United States Patent Application Publication US 2005/0208558 A1 - sequence listing, part 4

SEQ ID NO: 2917 - DNA, 3271 bp, DROSOPHILA
gaaaaatatatagacagctatctatgcacacaaacacaaacatggggaaacactgttgtttttcgcaactgcgtttcgcctgcaggtgcgacagagagggcgcgagtgggtgacaaacttgggtaaatgttgcaagcacttacgtcctgtgtgttttgtttgtttgtttgtttgcttgtcgcctttcgctgtcgttcgccaacaaacacctcagcgcagagcacacacgcgacacgcacacactcacacacagtcacagagacgtgcacaaatagcagccgaaaatggcactctcttcttcttcacttgtataataatgcagcaatctgcattgtttcgtttctatttccaattggaatttgttgttgtgctgcctgtgccagtgtgaccaggtagcgcggtggctaaaaatagtcgctaacgccagttttgaatgttgcgcgggtaaaagattcgtgagatacgaaaaaactccgaactttaataaaaggatctaataaaaaaggaaatactgaaaaagaaactaaacaaaatcaaaaacaccagattcataacagtataaatggtcgcatggttatgccatgtaaacacaccgttattaatcaaagtcttaatctaataaaggaaatttcattttttaaattataatttttggaataaatagtttttcttttaatatcatttttaatgtacgatcaaaagcaatatacaaaaaatttaagcttttaattggcgatgccagactaatgaattaaaagaataagtgttgccactaaaagtttattggtctatataatttgtttattgattgaggcactttattattataattaaaacacttaattattatgtgtgaaatgattgcactttttattttgtaagagcctgttgcgtattgaaaattttgtattttgtcttgtcctctaaatatcgtaaaaacgcgttattgctagataagttttgtattcccggctggtcactctgacttaaacgtttttcgcaaaaacagcggctgatcactgaagttttctcgtgtttttcgctatcaaaccgaaataaaaacaggtgaaaataactgataaattgaggggtagtccactgatcacagtgcccgaggatttgcaatgaaaagcgatcgaaatttgagctggggaaacgcaatagcagccgccgcctaacctacaaagttacataatttggttattttgttgttatgctggctggctgtggcagaaaagacttttaatcctgaatttatcctctcgttgcagcccaaaatgtccttcgttaagaacgcccgtttgctggccgcccgcggcgctcgcttggcccagaaccgcagctactcggatgagatgaagctgaccttcgccgccgccaacaaaaccttctacgatgccgctgtggtgcgccaaatcgatgtgccttccttctcgggatccttcggcatcctggccaagcacgtgcccactctgggtaagttcgatcattcagtttcagttgcctcgagatggttatatcaccgttggcgaatctctttgctattgcagctgtcctgaagcccggcgttgtccaggtggtggaaaacgatggcaagaccctcaagttcttcgtctccagcggttccgtcaccgtcaacgaggattcctccgttcaggttctggccgaggaggcccacaacatcgaggacatcgatgccaatgaggcgcgccagctgctcgcgaaataccagtcacagcttagctccgctggcgacgacaaggtgcgaatctagtcaagaagttgcatagtagagtagtgtctagaaagtagaagtagtggtccagaaagtacaactcaaacagactcttttgatggaaacactgcttccaccattcacgccaactggcatttaagttactaaacgatttctatgtgcccatcctttttacttgatatactttctttgtacaaacaagtttgctcttaaattaacgcttacacattcgatatttccatgagtaaacttatgtttgagttgcttttgcattctgtattgcacattctgaagctatctaaacgagacttaaccacgatccttgttttgcaggccaaggcccaggctgccattgccgtggaggtcgccgaagcgttagtcaaggctgccgaatagacgtaatcaccacacaaccgccaccaataaaccacaatcgatgctttgtgtctgaaataaataaaaaacataacgatcaccttaaaaagccagagagttatgaaacaataaaaaagcgaatcataatatcgtattaatgacccgtgatccaccaggcaaatgatttttttttcttttttttttcatgttatgccgctaaactgtgtgtttatatagtttataatatatgtatgtgagctggtgaagagaaatgtgtaatatttgctcgctgtgggatagaccgttgatatgataatgctttggcaatctttaagtcaaaaatatgagtgatttgcattttggccgaaagagacgaacgtcgtttctttttcccttgccaatttatgcaaatcgcataagcataaaaacttacaatttgtaaatgagctcgtctttcatcttaacaaatagtatagtttgtatttcatctggtgtgttgcattcatggatagttcgcatatcttatctcggatgattgtttaaatttctctcaaaagtagtaataaaaagcaactttgttttttttttatggaaacaagaattaatcaatggctaaaattatacttttggcagatagaagataatccattttgaaactctttataaagatgataaatactatagaattgaaaaaagaaaattggattttttttttttggaattgtctatgtatttggtaacaaaaaaatgtgttgtaaaaaaaatgtcttaaattaactcatggcgttgtgtgggaatggtaatatgctgtcgatgtagttagcaggaaggtcctccgatagattggcgaattgttctagtatcccggtgggccgtaggtctgggcaggggcgtgaccgatgggcagggactgctcctcgggagcaaaaacgggtgcaggagcgggatgtggcacactcaggacgggagcgggtgctggggcggcatagactggagctggggcaggagcggagtaaactggagcgggagcaggagcggagtaagctggagcgggagcaggtgcggagtacactggagcgggagcaggagcagagtacacaggagctggggcaggagcggagtacactggagcgggagcag

SEQ ID NO: 2918 - DNA, 664 bp, DROSOPHILA
caaaaacagcggctgatcactgaagttttctcgtgtttttcgctatcaaaccgaaataaaaacagcccaaaatgtccttcgttaagaacgcccgtttgctggccgcccgcggcgctcgcttggcccagaaccgcagctactcggatgagatgaagctgaccttcgccgccgccaacaaaaccttctacgatgccgctgtggtgcgccaaatcgatgtgccttccttctcgggatccttcggcatcctggccaagcacgtgcccactctggctgtcctgaagcccggcgttgtccaggtggtggaaaacgatggcaagaccctcaagttcttcgtctccagcggttccgtcaccgtcaacgaggattcctccgttcaggttctggccgaggaggcccacaacatcgaggacatcgatgccaatgaggcgcgccagctgctcgcgaaataccagtcacagcttagctccgctggcgacgacaaggccaaggcccaggctgccattgccgtggaggtcgccgaagcgttagtcaaggctgccgaatagacgtaatcaccacacaaccgccaccaataaaccacaatcgatgctttgtgtctgaaataaataaaaaacataacgatcaccttaaaaagccagagagttatgaaacaataaaaaagcga

SEQ ID NO: 2919 - protein, 157 aa, DROSOPHILA
MSFVKNARLLAARGARLAQNRSYSDEMKLTFAAANKTFYDAAVVRQIDVPSFSGSFGILAKHVPTLAVLKPGVVQVVENDGKTLKFFVSSGSVTVNEDSSVQVLAEEAHNIEDIDANEARQLLAKYQSQLSSAGDDKAKAQAAIAVEVAEALVKAAE

SEQ ID NO: 2920 - DNA, 18737 bp, DROSOPHILA
cggaaaagtgggacctgtacgccggagtgctcgtagagcgtctccctgtggtgtccaagtcccttaatccgctggaaaaacagttccaagacttgctatggcgcgtggagtacgaaaacagcctgaagtctgaccatgaactcaagcatgaacgtgagatcgtccaggcggagctcataaagcagggcaagatccaggtggacttggaggacgcaggatccaagcagacagctcaggacctcaaggacgcctacgtcgaggagctaaaaaagttccagttgggctcccgcaccacgcccgatgaccaggccaacagaaccacctccacggaccgctgtctggatgacacgctctaccttttggtacagcagaagctgggccagcaggagcacctcattctaccgcagggaaagcgtgaggagggagagtccatgcgtcagactgcagaaagagtgctccgcgagagttgcggccaggagctgcaggttcttttctacggcaacgccccagtgggcttccacaaatacaagtatcccagaaaccagcggacggagactgtcggagccaaggtcttcttctacagagcatccctgcggtccggccaggtgcccgaaaatctgaccaagttcgagtggcttcccaaggaggcgctcaatgaaaagctgaccaatacagcctatgcccaaagcgttaaaaagttcttgttgtaatcgtaattgttaaaattgttttgatatctaacaaataaataaaaatacttcagaggaatatctatctactagctgcctttcatttgagaagaatctggtgagatgctgatacttttgccaacttccttctgcaaaatcagattacagactcccctgaatttttaataaaaactccactcatttaacatatttagacatgcagcaatatatttatttttgcaattcacgagttgtaaatatacgtccaatacagaggcaaatatttattgttttgtttttcttttttttttctgctttgaaaaagcttactactttcgtttcgaatacacgtagaaactggaggaaacataaaaggctggttattatgcatttctggtagcaagagtatcttaaatctttttggtatatcagttgtatctatgttcgttacaagttacagacattcaatattgaaaatgtgtgctcgattactggaagctaagctttttatctgcttttcaggcgcaagttgatcaaattactgtgacaatgttctcgattagatatcttcttcggcgaccggacgcgtagccaattctcaaactgaaacgtcaaaatttaagatactttctcattgggctgttgataaataaatgcaaaaactagaaatggttcatagtcatgttgataaatatgtattgcaaggtgctattgttgatttaaggttcattgtggcataggttcttaaataagcattaaactgtttgacttagagactaaattatcgaaaataatggtgtaaatatatatttttgtttgatttttttttgtgttttgttggtttttagaaatatactttaaattgtaagacatatgctcaggcgccactaaataagacaatgcaggctctttagttctggaacagcgttcgcgtgaagtctatgtagtccagggcatccttgatgggctggccggagcgcggttccgagaagggtttcatgcgctgcacgcagtagtcagccatgtccttggtgaggttctgtggcaagaaagcaaagatgttagtagtggcatgggttgaaactttcagtaatcgaggaatattgaacttacgcagtagagctcctccttagttacataggggcggtcggcagcggtgatggcgcggaaggcattctcgatctcctcgtaggattgaacgttctccgtctccttggagatcatgaacgcgatgtattcctgcagagagacgtagccatcgcggttggggtcgacaacatcgagaattgcttcgaactccgggtcgggctgtccctcctccaccatgggcaggtcgtagccgagggcgcgcaggcaggacttgaattcctggtggttgagcttgccgctcttgtccttatcgaagtgcttgaacatcatcgagaactccttgagtgagtcctcggagacgcccgagtggttgcgtgcctggatctgttgctctaagttgtgctgcatgcgcatagacagctggtcaagctgatcccactgctgggccaggcccaccgtcgagtgttccgtgtagcggttgtccagaataaggtgctcctccagcaaggctcccagctcctcgatcttcttgaggtcaacgcgacgtgcgcgcacctcggtggccttgacacgaagcgcctccagttgctgttccagggaaccggagccttccatcatggacgttctgcgaaattcgcgatgtggggattggttgagagttggcggataaaaagcgtctattagtagggcacaatatcgagttaggtctcaaacaaatcggaacgttacaatgatataatgcaataagagaagcaaatcttgttagagggtctgttaagggcagcgaatatttttctggattttctgaattcgggcttgcaactagtttgtcttcactttgtttttagtttgtacatatttacacgtgtcggtgggaatttggcgggcccgagtgttttatctgtttgggtcaggtttagtgtagttaagattggttttttgttgagttcagcaactaataatgacgaaagttgtctaattgctaaaagcgagttaaaataagaaaagcgccaaaggaacgtttaaattgtaatttaataatgctactagatttggttaaactcttcgattgaacggaataaatatgaacataatttatgttttcgattgctacatatttctgtatgctacaacagtattttgatctcgattcgcatgctaaagagttcagtttcgttaattttgaataagattaggtgagaccaaaggagtaatggagaatcgaaacagtacgttgacgatatacactcagatcgggatcgggtgggtcagtgctctcgctaatgcaactaactaaaactaggtcttagtcgtcgctcaatcttatcagtgtggatatatacgagtatttacaagccctcagctcaaagggcaaagcaagagttacggagaacatggccattccaaaaggttagtggaggcgcagcgagattgggagctcagccccaacgcgagttaagaaaccaaaaagatcacaacagaaaataagagttcaaacgcagaatcaagcctgctcgcttaattacccttgacggttataacccagcatataatatctagaaaatagaatggatctttcagttacgtagtatttcatggggttagagtcgcgaccacgagacttgttttcggatttgtgtggattgggatgggaacatggattcgatccgaaaaaaaccaacacacgtctggatggagtagcccacatttgggaaagccttagcccccactcaccttgtctctgttagccactggtggaaaagattggcgtgcttggcaaactccttgcgcagcttgtcgttctcctcctgccgcttggcctccttggcaagttccccatcgcgttcctctatgatcttttgcagattacgccaggtctcctcaagagcttccatggtgaaccacgtgtacgggttgggtccaacattaaagctcttgatcttctggtcgagtgctgccaatgccttgaagtcagcttcggccgacgaaagggacgcctggaattgggcatgggcgtcgcgcagggcgcggatttcttcgatcgaattgcagcgaacaggatctgtgagatcctcctcggcattttcgaaccaagaattgaaggccgaagctttcttggcaaatgtcaagtagagttcctcgatctggcggaactgctcctgcatggccagcagtcggtccttgcgcgtgttggaggcgtcgcgcaacttctgccacctggcaatcacgtctccgtgacgctttaggattgccggcgactgggcgtgactggcatttatcagttggtccttaagtgccgtgatgttgtgtatgccctcctgctcgaaggcattgagaccttaacagatgacaatcgttaatataatgtgacttaagacaaaatctcagctgatcatacctgcatcgaatgtctcttgcttggtcaacagcgtttgcacggtggacaggtcgcgtccgaactcatcggagcgcacatagttctccttgtcgtcgatccagctctcgaccacatcggccttccacatgaactgcagataggccgagttgtccagcagggcacccttgcggcgggcagccagggcggacaggttgtccagtttcaggcgcagctgctggcagcgttgggcaatggactctccgtggtggttcttggcctccaccaactcactgccctggtcgcagatcaaagaacagcggtccttgtgggcagtgaagtccgtttcgaatgcgtcgtgctttttcagcagtccttgtacggcggccatcgagtcgccgtagtcctccacagagagcagctgttgcttctcggtgatccaggcctcctcctcctccacctgagcgaggaattgctgataggtcagcgactcatccaacttctgacctcgcgtggcagccaggttctttagctcggcccaggcctggttcagagccttcaggcgctgctcaatttcggggacaccgaggttggacacgtccatgagcttctcgccagcctcctgcacagcttgaatggccggctcgtgagagcccaattcggcttctaggcgcttgtgcttcttcttgaggttctggacgccggtcagatcgcgaccatagtcgtcggagccgacaagtagcttcttctccttgatccagctctcctcgtcggcgatgtcgcggaagaattggtgcagggtcagagcctcgttgagacgggcttggcgatgggccgccaggttgcagatgcgctcgtagcgctcattgatgctttgacgcttctcctggatgccggcagtatcgaactggccgctctccaccaaggaatcggcctggttgttcatgtccttgatgcggtcttcgtgcgccacgatatccgcctcgaccaactgatgcttcttcatgaggttttggacagaggccaaatccttaccagaatcctcagtggtcaaaagactctcgacctcgcccaaccagaagtccaaatccttgacagcagcgatataggtgcgctgcttattcgcctcctttagcttcagcgacttctcggtagtcttatgggtcaggtactcccactgatcggcgatctgcgtcagccgcttctgcaccgcgtcctccgacccgctgcactgcttcttatcgatgaggtttccgcccatggctagcacgctctggatgcgatcggcgttagccgccagctccgcctcgaaggcctggtgcttctggtgcttcgactgaatgttagccgggtccttgtagctctcttcggtggccagctgcaacttctctgcaatccagttctcaatctcatcggcatcgcgcgagaactgctgcagcgtctgctcgtcacccaaacgggatcgcttctcgatcagaccctccttgagatggcgccagcgctccagcacttgcttgcgcttctcgtccaccaaattggaggcatagtggttctgggcgatcaactgatccgccaccgtctgcagagcagcaatcttctgttcgtggccgttaatggccttgtcgaagtcctcgtgcttcttgatcagtgcctccacatttccgccggcattggcatcatcatcggcatttaggaaggcctcgcgggctgacatccaggactcggccaactcgcagtcacgcatgtagagctgcagatccaagttctgctccagctgcaggcggcgctctgtccacgccttctccaagtcctcgcgggccttggccagatcctcgattttctccttgatttcaggcgacgcatagtggttggcctgcagcagctcgtttccgaactgctcgaaagccccgaaagttccggcgcgcgcatcgatctccgttcggtgttcctggggaaattcatggggaaatcatattagtttgggtcatggtttttgctttggtaacgccgtgttagaacaacattgcaacgctggtagggtggccactgaggatcgattgctgcagcgtcgaattagtcaagagtaataaacgtagaacgaagttaaactgaacaaatcggtagataaactgaatgaaacgtgaacggagcttggatgtgtgacgatgatgaaaggatggcacagaaaactatataagttcattaagttatacatgtgtaaagctttaaagattagtcaaatcacatttttaattacttgtaataaatagatctcaaatgttcaacataaggcaactgatcaaatcaaagttcacatctttatcgagctctatggtgtagctctaaattgatgtgaacaagaatgtatgttttaagtttaattatttatatttatattttaggaagacccattctcacaaatgcagtaaactttatcaggacactaggaattgagtgatatgtgctgatgaaggttcgatgtgtgtaagcaatgttagataagataacaagaaaccgctcgagttactatagatagaacataacgtgtatgtgtaagggaaagctgaagccgtagatatggtctgatatttgtacatgaagggtattcccactgatcggcataaagataaagaaggaatttcgagtaccctctgatatatatgtatgaattggaatgaatgatacgagtatgtgataatcacaggcgagcaacacataaacacaacgaaacacggatctggggagatggtggtaagcgaaggaactacctcgtcgccggatggagatgcgatgctggaggtcgaggcggcggctccgggagccgagctgatgcccaatgtgaacccaatctcggcacggcgtgcctgcgatgggtgtcgtatttgtttgattgattgtttattggggagttggaatgtagaaacacaaccatgatggggatttggatgttgtcatgaaccgtgaaccgttgcagttgttgttgttgtcgattgtttgttgttcgtttatgacatgacacgaaccaaaaaatcaaaaccaaaaagacaggatatagtcaagagatgtaaaaatataaaggaccaaacagtctgcagtttaaagccatgttttaagacttatgtagaagatcctagttaacttgtgtatttatattcctcaacgaaatccatacctgatgacgctcgatcagagcctcggctcctgttacatcgttggccagctcgtcggacgtgaccaggctcatcatcgagttgatccaggccagcagatcgcggtagtcgctgaggaaacgctgcaggtcgtacgagtccagcagcttctccttgcgggcggtggacttggtgatgatctggtcccacatctcgttgatctccttctgcttggcgtaggtctgctcggcggtgtccgggtgcgactgcatcagcctgttggcggtttcgtccagctggcggatcttgtcccgcaatgcggccaagtcgcgttccacgccctcgtgcttgcgctgcagagtctggacactgcgcagatccttgcccaggtcgtcgttgttcagggcattggccttctcagcgatccaatccttggtctcgtcaatgtcacgatggaagcgttgcacctcatgggcggatcccagttggctggccttctcagcggtcagcgtctgcaggttgttccacttctcgttcaggtcttgcatctgggtttggatctttagggcggcctcggtctgacccaaggaagtcagctgcacggcaatctcgttcatgtttgccagacgcacttcgttggccttcaggtcgtcgttgaagtcgtcgaacttcttttggagcacctccacctcttccagatcctctcccacaacatcagcgatctgagcgtggttctccttgtcccggatccactgggccaagtcggcagcctcacgaacaagaacgtacgccttcacagtctcgtttagcttgttctggcgctcgcgggcgagggccagcaagttgtcgtactgcgagttgatctggttctggcgcttggcaatcgaatgattgtccactaggttctgctgggaggcgctcaagccggcgtcaatcttcttgatgtatgcggccggtacgaagccctggcggtcgttgacctccaccttccaccagtctttgttgttcgagttcagcagggtcagaacatcgcccttcttcatcgagacctcacgaggggatttctccgtgtagtcgtagagggcaaccacgcactccttgccagtgatatccacaacaggggtctcctgctggcgacagttcttggcctgctcctgcagcgcctgaatggtgttgccaaaagcctctagatcggagaccagagcctcgtgcttcttgagcaaagcctccgaggaatcctcgtccttaccataatcactgccagttgcaatcggttccttttcgcgcatccacgactcagcttcgttggcgtcggcaaagtactggtgtgcctggagagagtcatccagatcctgctttcgctggctggacttctccttcagcgtgttccactgctcttggagcgcctccaaacgctgacggatatcgtcgctggcgaagggctggtccttcagcatgttctcgcccgaactgatcacattcagcagcctggcctcatggttgttgatctcggccagcacagcctggtgtttcttgatcaggttttgcacaccaatcaagtcacgaccgcggttcgtggatgcggcaatgggttccttctcacggatccaggcagcctcgtcctccaagtcgcggaagagctgctgcacctgaagggagtcaagaaggtgttgtttcctctcgcccatgggtgcagctagggcggcatagcgagccgacagattgccctccttgttgcgaatgttgtccgcgtcaaagtgaccggattcgatgaacttgttggcggccactttgatgctttcaatgcgatcctggtgagccatcacatcggcctccagcagggcgtgcttcttctgcaaattctgaacggaggtcaggtctttgccgtgatcctccgacaacaattgaccctcgatctcgctaagccacagctcaatgtcctcgatggtgcggttgaactgctgctgttggcatgcctcgttgagtttggttccctttttatcggaagcctggacgagggtctcccacaggacgacgatctcctgcatgcgggtgttgatctggtcggcagcatagtgctgcttctcgatcagctcggtgcccacgttggtgatgtcctcgatgcgcgacttgttggcattcagctcgtgctcaaagttctggtgcttctgcatctttccgttaaggttggtaggatccaaatagctgtcatcggtggcaaacttcagcttctcgctaatccagcccttggtctcgtcgcaatcgcgctcgaactgctggtagcggttcgaatcctccagcaattggcgacgcttggacgatttttcttggagagcagcccgccgggctaggagcatctgacggcgctgggccacatcatcggcggcataatgctgaccatcgattaatttggtggcaaagatgtctaaagccttgatcttctcctcctgggcagccagactcttctcgaagtcctcgtgcttcttaattagcgcctccacagagtccagggagtcgccaaggtcctcgttggccaggaaggcctcctgtttggccatccaagtgtcagcctgctccgtatcgcggtaaaacagttgcagatccatgcactgctcgtacaggatgcgacgatcttcccacagcgagagcagtgaactcttgtcgttttccagagcggcaagcttttcctggatttcggcggcggcgtaatgctcacgctccagcagcttctgtccggattcagtggtcagcttgaagctatcctcacgagcgtcgatctcgcccttgtgctcctggtgacgttccagaagagcctctgctccagccacatccttagccagctcatcggccgagatgatggccttcatgccattgatccaggacacgaggtcgcggaaatcggcgaggaaacggtgcaggtagtaggactcatctagcttctgcttgcgctcgcgagccttggtggtgagactctgccagtagttggcaatctcggcctgtttgtcacggatctggtcactgtgatcggcgtgaatggagcacagccgctgggcctcggctcccagtgtggaaaccttatcctccaaggcggccaaatcccgctccactccttcgtgtttgcgttgcagcgcctgaacactggccaaatcgcggccataatcatcggacgacaggaccacatccttctcggcaatccaggcgacggtttcgtcggcatcgcgattgaaacgctggatctcgtgggcaccgaatagcttctcttggcgcacaatggctaactgcttaagtcgctgccaagcctcgtttagctcctccttgcgcttggtaatagtgtcgcgctcgggatgaccatcttgcaccaacttatcggccaactggttgacctcagtcacgcgatactcctgggaggccatgtccttctggaactcatcgaacttgcgctgcagaacctctacatgttccaggtcttggccgaactcgtcggcggtgacaaaggtctccttgtccttaatccagaacatcacctcctcgcactggcgcaggaactgcaccaggacgagagcctgctgcagctttagacccttctcggccagacggctaagaagcagctcccacagcttgtgcagctcgtcgaggcggacctgaatcgactcggaggcaaaatgttgctggttgatcatctcctggccagtgttgtccagcgagacaatggcgttgctgtgcgccgacacctccgcctcgaacgcctgatgtttctggattttggcctgcaggttggtcggatcgcggtagctctcctcgctggctgcctgcagcttctcgtggatccacgactccaactcgtcggcatcgcgcttgaagtactggaagcggcgcgagtcctcgagcttttcacgcttctggcgcgtctcgatcttgaagtcattgtagcgggacagaacctgctcacgtcgctcctggatgtcctcgactgtctcgaggatcttcacctctttgggtgtaaagttctccatttcgctggttcgtttacttgtctaattgcttaagtgtttcgttcgttttgatattgaaaagctgtaaaggtgttacgcaattaattgaaattgttgttttggtttctttacggactttaccttaagttgctctgggcgctggattgtttttaatttaatactgctgctgctgctaacccttcatcaaatgtttgaccgtgcccaactgtaaagaaaatgaagggggaacaattagtttaattctgtttaatcagcttcatgcgaacgcaatcagtcaattacttaattgttgggtcattcgtaaagtggaaaaaacaaaatcatgaaactgaatggctgactatcgtactacaagctttactctcctcaacgttgattttatatttcattcttatttcgtaatattttagtagtttaatgaatctaattttatttttaaagagtaatatgcaaatacctccttctgtaaactattttaactttttgactggcttggcaacaatcgtagaattctcatatggaatttccacttgcttgtcgactgttgctcaggtcgatgatcacatcgatcgacaacctcgtccccttatggtggcctcagtgttcgcacacactaaccaaactaaaagcgcgaatgtgacgcattctcgcgctgattaggttccatcagctaacgctatcttatcgggtacatagcgtggaccccgtttccattccatttccagcagacacatacaaaaagggaacactttattcgaaacataaacgttaaatgacataaccaacagttttaaacttaaaagttatccagatcccgcgataagtcggccagcatctccatgaagagatgcgacttggcctcgtcttcgggactatcgccagaggcgtaatgggcttcggaatcctttccggacagagagagttgctgcagaagttcggaaagcatgcaccacactttcggcgaccagttctcggcaaagagcggcatgaagagttcgttgagatgatcggcccgtatagctccagactgtagcatggatctaaggatcgtctccagcatccgaaagctgtccgcactgtttgccatctcctgcacaaaactaatgctgatcaagccgtcaaagattccgggtgaagctttactgtccataagctgctgtgatcgccacaccgaacagctggctgaaattatatccttgtcgaggaaattcggttttctggtaatgagcaactgaagcaaatgaactaatccagacccaatgaggtgatagaaaacagtgggcattttaggcaacaggaccgccttttgggcttttcgaagcagctcggccagatcttcttgactgcccacatattctggccgcaagctgaggcagtgcaaccactgctggagctgatagagaaactccgacaggctgaatccaatatccggactgagctggagctcactggagccgccgccacctgcagctgctgcatctgccttgttcctattgcagttgcacactttggtggctaactcctgaaggtcgccatgataaaatgtggactgaagcacgctcgactggagccactgttgcagctgagtctgggcttgcacccggattaaatgagcatatgtagaccgcaataccgcattggtgctggagggcagaaggccatccaaggagtgctctatgcgcctgtccagcatttggtgcacatgctccttccaacgctgacacgcattctccctggcatcttgaaagatctcatgcagctcctgaaacacctcctcgagcatcgtggatttaatttcgttgactttggcatccgcggaggccttcgacgggagcagaatctcctgctgggcgtccttaacgacacacttaaaagtgcgctccgtgacgaactcgatcaacctcctggtggacgcgttttgggattggagataggcatcgaccaatttgcgctgctgctgctccgcgggactcagttcgcttgccactatcgcgtccttggaaatggaactgctgttctgctgcaactgctccaaccgagtggttatgtaccggaaccgcccacttttcgcttgcctagagggcgtgatgctcacccggaattcctgcaggaaagggcaagccacgggcagaagttcgtccaacaagggggcgtgcgatttatcgtgacacgagaggtcctttaggcagatatccacaattgccgaaatgcttccgactccggcttcctgtgccctgtaattgtagtagccattaaccaactgcggctgtgcatccaaaagccatccaatgcagctcctggctatgaacacagctgctggttgcaattttgccatacgtatgtcggcatacaatccgtacagcagctccaaagtggccactgcgtccggaaggtgcaggctgaccaagtcgagcatcgccaggtattgaactaaccacggaagcgtaatcagcagcttgccctggcgcatggaacgttcgagtatctcgcggagattgaagtccggacgaaaatggttacgaagctgcaactgctgtggacaaagatatggcggcgttgggtttccatgttgcgtggtgccgctaaagggcatcacagttacgtagcccaagaacttggccaggataagcatgttagccatggtctggacgcgaacaatgtatggtccctgctgagcggactgctcctcgacagccacatcgtcagttagctggagcagatcaaaggtggagtcgttgttacgcattagttgcacaaagagctccagcttcaggtgcaccagaaatgctaccgatgagcatacggcgataaagtcgcggaagaaggcctgagagcgaggaaactgaccttccacactggaactggatgtcaccaagcgctgtgccagcttattgtgcctgaggggatccagctttaagcccagttcttcgggagattcggtggtctcggtagcggagatcaataattggttgacaaataattttgccaggtgcgtcatgttaactgggtgctccgatttcttatagatatccataatacgcggccccagttcgctgggaaagttgaaaccccgattcagatggctcacctcccaacgcttaagggctttgtaaaagaggtccctttgggacttgaaggccccgaactcattctgcgaaggaaagttatcccgcgagtcgttctccacgtgatagtatacattctgctgggaggacgaagaggtgtccatagcgaagggtgtggtcgaatcctgcctccgctgacagtgagtttccaattcttggacaactccttgcggcagcaggctcaatctctcgttttgtagcaagacactcaaagtccgtttgtcaagctgcagaagtaactttttctgattctccagcagttttgcggcaaagtatacacaacttttgtgctgggtgagtccctccaaagcactgggtacatacgatttgacgggtgattggccaaaatctcgcacatttagcagatggaccacaaaactaagttcacgtagtacgttgggcaccaaattgaggtccattaacaggctgtaaatggttgataggagctgcaagtgattggcattagccacaccctccaagctaatggcttcctcagggaaaacctcatcttcgggtgtcctctcctgttgactaacattcacaggcgcttcgcttttgatttcctgctttttgagcaacaggaacttgcgggcctccatttccagggctgcttcttggcttctatcgaagatttcgctgctctgcgagattcgccaaaagttattttcattgctaaaggaactggtgtctccgaaagaggagctggccgaaacattcttgctaatggtcatgggtaagacacgtcgccgcggcttggattgtggcgtggctccagctccagttcctgaacccaatgatgcatgttgattttgctgctgtttttggggcgtgatcttcttcttagatcgctgatggctctggataggtgtattgaccagaaagttgcccaagcagatgctgtgccctcctcctgctcccccaccgccgcttctgttaggcgtgctgcaaaactgggcgccacttcctggcgttgatcttctgccctgcggctgctggggagccggagtagtattcgaagtggaggacatactgcagctgctccggctaaggatcgaggactcattgagctgctgctgttcctcctccttgaccacatcggcgaccggcggcttgagctgatggatgggggtcaagggaaacacgggtgtctccgagttttgcgaatagtagtacctctttgtgctttgacgcagtgcacctaaaaagtaggtggcgaagtcctctagtgtgcagttactctggttatcacccttgccaacctttttaaaataggcgacgaacttttgctccagctggtggtgcggcaccttctccagttgcgcaagcagctgcagcagatgcctctcttccggcttcgtcatttctgtatctgacgctttgagctctgcagtcatgttccggtgatctattttctgtgccttagctcgagctattttcaacctttggccctcctccaatccctctctcccttttgtttccctgcaacggaagaggagagaagggaaatgttggctcggcttttgtgggtttcgttttctaagttatttttagagttgtttggatgggttgaagttgcaggattttcttttttttctgtataaacaatatgttttcacacaataaactaaatcaacgtaaacgacacgtaaaatgctacgagttgtgatgacttcatcacctgtactaaaagttgtaataaggttatagttaggcgggaaattatgaggaatatatttgtaggtcaggtttggaaaaacgcacatgtatgctaaacaaatttgtaaaggtattaaccttaacaataaaagaatagtaggtttctaaaagtatctaaatattgcatcaacaattttttgttgttaaagtataaatattttctatgaattcttataagatatcatttattttaatttccaaacttagttgatagcccataaaatcacatttctaatagtttccaatttttagtgctaaaaaaaaaaaaaaaacaactcagataagaaaagcagagaaatatctgaaattctcagctacactacacagaaggtaaaatagttaagattggccaagaatgattaatagagaaaagccaaggagtgaatttttgtcaatagagtaacatgaaatacaattagcactaacgataaggaaatccgtggaatgtccggattttaatacttaatacttcaaaatcgcccctttagaaggggtcagcagagcaagcaatgacatcatttaggggagagggtgggtcagcatgcagagaaacaaacaaacaacactctttgccacaggaaattgaaataaatcagagggagatggcaacagcccagggcttggcagccatacaatgttggagctcacatacaaacacacaggcaggccaatttaactgtttatcgcggtggcaaacaaaaacaacatcagaaacggcaattgcgagagatcgcacctcaaaaagagagcgaatagaaagagacggagagagcgaaacattaattgaagtgtctatcagaaaatagcagaggatgacgtaatgcgtacgctttggaattatgagcaatcaatgaagaggcacaaaaaatcaactggtacgcaagactactacgaacacggaatcgcctggcaagcaaacaaaaatatcctatgcaaacacaggccttcaagaaagtcaaggacacttgcccacccaaaactttggcatatgtaaggcaagcactttgctttttttttattcgtacttaaatatcttggaaacacaaacaagcaaagagagggagagtgtgctctcccgctttctctcatctgaagttgccgcaccaccaccaccacccgatgacgtacacacacacagcgttctctactcctgcgtaaccgcacacacacatgcacaacaggagcaccagatactttttcttaagttgcaattggagtcaagaattttgaaagaaattcaaaatttctattactaatcaagcagtgacattgcacagcatagcttttcagttatggccaagacttttctctcactttagccccgttaattggatttttgtgttgccttcgagggtgtggcgttgacccgaaaaattttcactttgcacgcacaccgaatttcaattgcattttgaacccaactaacagtgagctacggacgaaaactatgtagaaacttacactttgatggcaatctatttgttcacagttactttgttaatttaactattgatttgcagtagttattcgtaattttcacggagcgcctctatttcacgggaccgcagtttttttcaatatgtcggccgattggcgcagaacattgacatcaatatcgcgatttctatcgatgtcaatcgattataaacatagttctctttctggtcgctttggcgccttagtcatctcattatttttctagtagatgtagatgagtagtagtagatgatgtaaataaattaaaaacgacagggtatttcaattcaatctggtgcactcatgcatgactactatttcctagcgcggccccagagtaagcggggcttattatggtattattccgcaatagccctgcggtcacactaatttccagagcaatccaaaaaaaggaagcagccgaaaaagaacaaaaacctgcagcatttacattcaaatataaatccgaagcaaagaaacagcaaaatggtggactacagcaagtggaagaacatcgaggtgagcccactgctgggtgccaacccaaaaagtcctcctaatcggcacactaccttttagatttcggatgatgaggacgacactcacccaaacatagacacgccttctctgttccgctggcggcaccaggcgcgcgtggagcgcatggcggagatggaccacgagaaggacgagcttaagaaaaagcgccagagctaccaggcgcgcctcatggacgtcaaggagcggatctcaaagaaggatggcgacgaggaggccctgaaggtgggtcattgcaccgaatgcactgcgcacttgttgcttaggctaatgcctggtctgggagttccctatgttctcaatccatctaatttattcttattgtcaagcttatgattgactatcatcctaagtggccatccatctttcatcgcaatgcttaatccctaatttgtatcgcctacagaaagagctcgaaaagatcgaggccgagggcaaagagctggaccgcatcgagagcgagatgattaagaaggaaaagaaaacaccctggaacgtggacaccatcagcaagcccggctttgagaagaccgtaatcaacaagaagg

SEQ ID NO: 2921 - DNA, 8114 bp, DROSOPHILA
catattgaaaaaaactgcggtcccgtgaaatagaggcgctccgtgaaaattacgaataactactgcaaatcaatagttaaattaacaaagtaactgtgaacaaatagattgccatcaaagtttgggcacggtcaaacatttgatgaagggttagcagcagcagcagtattaaattaaaaacaatccagcgcccagagcaacttaagcttttcaatatcaaaacgaacgaaacacttaagcaattagacaagtaaacgaaccagcgaaatggagaactttacacccaaagaggtgaagatcctcgagacagtcgaggacatccaggagcgacgtgagcaggttctgtcccgctacaatgacttcaagatcgagacgcgccagaagcgtgaaaagctcgaggactcgcgccgcttccagtacttcaagcgcgatgccgacgagttggagtcgtggatccacgagaagctgcaggcagccagcgaggagagctaccgcgatccgaccaacctgcaggccaaaatccagaaacatcaggcgttcgaggcggaggtgtcggcgcacagcaacgccattgtctcgctggacaacactggccaggagatgatcaaccagcaacattttgcctccgagtcgattcaggtccgcctcgacgagctgcacaagctgtgggagctgcttcttagccgtctggccgagaagggtctaaagctgcagcaggctctcgtcctggtgcagttcctgcgccagtgcgaggaggtgatgttctggattaaggacaaggagacctttgtcaccgccgacgagttcggccaagacctggaacatgtagaggttctgcagcgcaagttcgatgagttccagaaggacatggcctcccaggagtatcgcgtgactgaggtcaaccagttggccgataagttggtgcaagatggtcatcccgagcgcgacactattaccaagcgcaaggaggagctaaacgaggcttggcagcgacttaagcagttagccattgtgcgccaagagaagctattcggtgcccacgagatccagcgtttcaatcgcgatgccgacgaaaccgtcgcctggattgccgagaaggatgtggtcctgtcgtccgatgattatggccgcgatttggccagtgttcaggcgctgcaacgcaaacacgaaggagtggagcgggatttggccgccttggaggataaggtttccacactgggagccgaggcccagcggctgtgctccattcacgccgatcacagtgaccagatccgtgacaaacaggccgagattgccaactactggcagagtctcaccaccaaggctcgcgagcgcaagcagaagctagatgagtcctactacctgcaccgtttcctcgccgatttccgcgacctcgtgtcctggatcaatggcatgaaggccatcatctcggccgatgagctggctaaggatgtggctggagcagaggctcttctggaacgtcaccaggagcacaagggcgagatcgacgctcgtgaggatagcttcaagctgaccactgaatccggacagaagctgctggagcgtgagcattacgccgccgccgaaatccaggaaaagcttgccgctctggaaaacgacaagagttcactgctctcgctgtgggaagatcgtcgcatcctgtacgagcagtgcatggatctgcaactgttttaccgcgatacggagcaggctgacacttggatggccaaacaggaggccttcctggccaacgaggaccttggcgactccctggactctgtggaggcgctaattaagaagcacgaggacttcgagaagagtctggctgcccaggaggagaagatcaaggctttagacatctttgccaccaaattaatcgatggtcagcattatgccgccgatgatgtggcccagcgccgtcagatgctcctagcccggcgggctgctctccaagaaaaatcgtccaagcgtcgccaattgctggaggattcgaaccgctaccagcagttcgagcgcgattgcgacgagaccaagggctggattagcgagaagctgaagtttgccaccgatgacagctatttggatcctaccaaccttaacggaaagatgcagaagcaccagaactttgagcacgagctgaatgccaacaagtcgcgcatcgaggacatcaccaacgtgggcaccgagctgatcgagaagcagcactatgctgccgaccagatcaacacccgcatgcaggagatcgtcgtcctgtgggagaccctcgtccaggcttccgataaaaagggaaccaaactcaacgaggcatgccaacagcagcagttcaaccgcaccatcgaggacattgagctgtggcttagcgagatcgagggtcaattgttgtcggaggatcacggcaaagacctgacctccgttcagaatttgcagaagaagcacgccctgctggaggccgatgtgatggctcaccaggatcgcattgaaagcatcaaagtggccgccaacaagttcatcgaatccggtcactttgacgcggacaacattcgcaacaaggagggcaatctgtcggctcgctatgccgccctagctgcacccatgggcgagaggaaacaacaccttcttgactcccttcaggtgcagcagctcttccgcgacttggaggacgaggctgcctggatccgtgagaaggaacccattgccgcatccacgaaccgcggtcgtgacttgattggtgtgcaaaacctgatcaagaaacaccaggctgtgctggccgagatcaacaaccatgaggccaggctgctgaatgtgatcagttcgggcgagaacatgctgaaggaccagcccttcgccagcgacgatatccgtcagcgtttggaggcgctccaagagcagtggaacacgctgaaggagaagtccagccagcgaaagcaggatctggatgactctctccaggcacaccagtactttgccgacgccaacgaagctgagtcgtggatgcgcgaaaaggaaccgattgcaactggcagtgattatggtaaggacgaggattcctcggaggctttgctcaagaagcacgaggctctggtctccgatctagaggcttttggcaacaccattcaggcgctgcaggagcaggccaagaactgtcgccagcaggagacccctgttgtggatatcactggcaaggagtgcgtggttgccctctacgactacacggagaaatcccctcgtgaggtctcgatgaagaagggcgatgttctgaccctgctgaactcgaacaacaaagactggtggaaggtggaggtcaacgaccgccagggcttcgtaccggccgcatacatcaagaagattgacgccggcttgagcgcctcccagcagaacctagtggacaatcattcgattgccaagcgccagaaccagatcaactcgcagtacgacaacttgctggccctcgcccgcgagcgccagaacaagctaaacgagactgtgaaggcgtacgttcttgttcgtgaggctgccgacttggcccagtggatccgggacaaggagaaccacgctcagatcgctgatgttgtgggagaggatctggaagaggtggaggtgctccaaaagaagttcgacgacttcaacgacgacctgaaggccaacgaagtgcgtctggcaaacatgaacgagattgccgtgcagctgacttccttgggtcagaccgaggccgccctaaagatccaaacccagatgcaagacctgaacgagaagtggaacaacctgcagacgctgaccgctgagaaggccagccaactgggatccgcccatgaggtgcaacgcttccatcgtgacattgacgagaccaaggattggatcgctgagaaggccaatgccctgaacaacgacgacctgggcaaggatctgcgcagtgtccagactctgcagcgcaagcacgagggcgtggaacgcgacttggccgcattgcgggacaagatccgccagctggacgaaaccgccaacaggctgatgcagtcgcacccggacaccgccgagcagacctacgccaagcagaaggagatcaacgagatgtgggaccagatcatcaccaagtccaccgcccgcaaggagaagctgctggactcgtacgacctgcagcgtttcctcagcgactaccgcgatctgctggcctggatcaactcgatgatgagcctggtcacgtccgacgagctggccaacgatgtaacaggagccgaggctctgatcgagcgtcatcaggaacaccgaacggagatcgatgcgcgcgccggaactttcggggctttcgagcagttcggaaacgagctgctgcaggccaaccactatgcgtcgcctgaaatcaaggagaaaatcgaggatctggccaaggcccgcgaggacttggagaaggcgtggacagagcgccgcctgcagctggagcagaacttggatctgcagctctacatgcgtgactgcgagttggccgagtcctggatgtcagcccgcgaggccttcctaaatgccgatgatgatgccaatgccggcggaaatgtggaggcactgatcaagaagcacgaggacttcgacaaggccattaacggccacgaacagaagattgctgctctgcagacggtggcggatcagttgatcgcccagaaccactatgcctccaatttggtggacgagaagcgcaagcaagtgctggagcgctggcgccatctcaaggagggtctgatcgagaagcgatcccgtttgggtgacgagcagacgctgcagcagttctcgcgcgatgccgatgagattgagaactggattgcagagaagttgcagctggccaccgaagagagctacaaggacccggctaacattcagtcgaagcaccagaagcaccaggccttcgaggcggagctggcggctaacgccgatcgcatccagagcgtgctagccatgggcggaaacctcatcgataagaagcagtgcagcgggtcggaggacgcggtgcagaagcggctgacgcagatcgccgatcagtgggagtacctgacccataagactaccgagaagtcgctgaagctaaaggaggcgaataagcagcgcacctatatcgctgctgtcaaggatttggacttctggttgggcgaggtcgagagtcttttgaccactgaggattctggtaaggatttggcctctgtccaaaacctcatgaagaagcatcagttggtcgaggcggatatcgtggcgcacgaagaccgcatcaaggacatgaacaaccaggccgattccttggtggagagcggccagttcgatactgccggcatccaggagaagcgtcaaagcatcaatgagcgctacgagcgcatctgcaacctggcggcccatcgccaagcccgtctcaacgaggctctgaccctgcaccaattcttccgcgacatcgccgacgaggagagctggatcaaggagaagaagctacttgtcggctccgacgactatggtcgcgatctgaccggcgtccagaacctcaagaagaagcacaagcgcctagaagccgaattgggctctcacgagccggccattcaagctgtgcaggaggctggcgagaagctcatggacgtgtccaacctcggtgtccccgaaattgagcagcgcctgaaggctctgaaccaggcctgggccgagctaaagaacctggctgccacgcgaggtcagaagttggatgagtcgctgacctatcagcaattcctcgctcaggtggaggaggaggaggcctggatcaccgagaagcaacagctgctctctgtggaggactacggcgactcgatggccgccgtacaaggactgctgaaaaagcacgacgcattcgaaacggacttcactgcccacaaggaccgctgttctttgatctgcgaccagggcagtgagttggtggaggccaagaaccaccacggagagtccattgcccaacgctgccagcagctgcgcctgaaactggacaacctgtccgccctggctgcccgccgcaagggtgccctgctggacaactcggcctatctgcagttcatgtggaaggccgatgtggtcgagagctggatcgacgacaaggagaactatgtgcgctccgatgagttcggacgcgacctgtccaccgtgcaaacgctgttgaccaagcaagagacattcgatgcaggtctcaatgccttcgagcaggagggcatacacaacatcacggcacttaaggaccaactgataaatgccagtcacgcccagtcgccggcaatcctaaagcgtcacggagacgtgattgccaggtggcagaagttgcgcgacgcctccaacacgcgcaaggaccgactgctggccatgcaggagcagttccgccagatcgaggaactctacttgacatttgccaagaaagcttcggccttcaattcttggttcgaaaatgccgaggaggatctcacagatcctgttcgctgcaattcgatcgaagaaatccgcgccctgcgcgacgcccatgcccaattccaggcgtccctttcgtcggccgaagctgacttcaaggcattggcagcactcgaccagaagatcaagagctttaatgttggacccaacccgtacacgtggttcaccatggaagctcttgaggagacctggcgtaatctgcaaaagatcatagaggaacgcgatggggaacttgccaaggaggccaagcggcaggaggagaacgacaagctgcgcaaggagtttgccaagcacgccaatcttttccaccagtggctaacagagacaagaacgtccatgatggaaggctccggttccctggaacagcaactggaggcgcttcgtgtcaaggccaccgaggtgcgcgcacgtcgcgttgacctcaagaagatcgaggagctgggagccttgctggaggagcaccttattctggacaaccgctacacggaacactcgacggtgggcctggcccagcagtgggatcagcttgaccagctgtctatgcgcatgcagcacaacttagagcaacagatccaggcacgcaaccactcgggcgtctccgaggactcactcaaggagttctcgatgatgttcaagcacttcgataaggacaagagcggcaagctcaaccaccaggaattcaagtcctgcctgcgcgccctcggctacgacctgcccatggtggaggagggacagcccgacccggagttcgaagcaattctcgatgttgtcgaccccaaccgcgatggctacgtctctctgcaggaatacatcgcgttcatgatctccaaggagacggagaacgttcaatcctacgaggagatcgagaatgccttccgcgccatcaccgctgccgaccgcccctatgtaactaaggaggagctctactgcaacctcaccaaggacatggctgactactgcgtgcagcgcatgaaacccttctcggaaccgcgctccggccagcccatcaaggatgccctggactacatagacttcacgcgaacgctgttccagaactaaagagcctgcattgtcttatttagtggcgcctgagcatatgtcttacaatttaaagtatatttctaaaaaccaacaaaacacaaaaaaaaatcaaacaaaaatatatatttacaccattattttcgataatttagtctctaagtcaaacagtttaatgcttatttaagaacctatgccacaatgaaccttaaatcaacaatagcaccttgcaatacatatttatcaacatgactatgaaccatttctagtttttgcatttatttatcaacagcccaatgagaaagtatcttaaattttgacgtttcagtttgagaattggctacgcgtccggtcgccgaagaagatatctaatcgagaacattgtcacagtaatttgatcaacttgcgcctgaaaagcagataaaaagcttagcttccagtaatcgagcacacattttcaatattgaatgtctgtaacttgtaacgaacatagatacaactgatataccaaaaagatttaagatactcttgctaccagaaatgcataataaccagccttttatgtttcctccagtttctacgtgtattcgaaacgaaagtagtaagctttttcaaagcag

SEQ ID NO: 2922 - protein, 2415 aa, DROSOPHILA
MENFTPKEVKILETVEDIQERREQVLSRYNDFKIETRQKREKLEDSRRFQYFKRDADELESWIHEKLQAASEESYRDPTNLQAKIQKHQAFEAEVSAHSNAIVSLDNTGQEMINQQHFASESIQVRLDELHKLWELLLSRLAEKGLKLQQALVLVQFLRQCEEVMFWIKDKETFVTADEFGQDLEHVEVLQRKFDEFQKDMASQEYRVTEVNQLADKLVQDGHPERDTITKRKEELNEAWQRLKQLAIVRQEKLFGAHEIQRFNRDADETVAWIAEKDVVLSSDDYGRDLASVQALQRKHEGVERDLAALEDKVSTLGAEAQRLCSIHADHSDQIRDKQAEIANYWQSLTTKARERKQKLDESYYLHRFLADFRDLVSWINGMKAIISADELAKDVAGAEALLERHQEHKGEIDAREDSFKLTTESGQKLLEREHYAAAEIQEKLAALENDKSSLLSLWEDRRILYEQCMDLQLFYRDTEQADTWMAKQEAFLANEDLGDSLDSVEALIKKHEDFEKSLAAQEEKIKALDIFATKLIDGQHYAADDVAQRRQMLLARRAALQEKSSKRRQLLEDSNRYQQFERDCDETKGWISEKLKFATDDSYLDPTNLNGKMQKHQNFEHELNANKSRIEDITNVGTELIEKQHYAADQINTRMQEIVVLWETLVQASDKKGTKLNEACQQQQFNRTIEDIELWLSEIEGQLLSEDHGKDLTSVQNLQKKHALLEADVMAHQDRIESIKVAANKFIESGHFDADNIRNKEGNLSARYAALAAPMGERKQHLLDSLQVQQLFRDLEDEAAWIREKEPIAASTNRGRDLIGVQNLIKKHQAVLAEINNHEARLLNVISSGENMLKDQPFASDDIRQRLEALQEQWNTLKEKSSQRKQDLDDSLQAHQYFADANEAESWMREKEPIATGSDYGKDEDSSEALLKKHEALVSDLEAFGNTIQALQEQAKNCRQQETPVVDITGKECVVALYDYTEKSPREVSMKKGDVLTLLNSNNKDWWKVEVNDRQGFVPAAYIKKIDAGLSASQQNLVDNHSIAKRQNQINSQYDNLLALARERQNKLNETVKAYVLVREAADLAQWIRDKENHAQIADVVGEDLEEVEVLQKKFDDFNDDLKANEVRLANMNEIAVQLTSLGQTEAALKIQTQMQDLNEKWNNLQTLTAEKASQLGSAHEVQRFHRDIDETKDWIAEKANALNNDDLGKDLRSVQTLQRKHEGVERDLAALRDKIRQLDETANRLMQSHPDTAEQTYAKQKEINEMWDQIITKSTARKEKLLDSYDLQRFLSDYRDLLAWINSMMSLVTSDELANDVTGAEALIERHQEHRTEIDARAGTFGAFEQFGNELLQANHYASPEIKEKIEDLAKAREDLEKAWTERRLQLEQNLDLQLYMRDCELAESWMSAREAFLNADDDANAGGNVEALIKKHEDFDKAINGHEQKIAALQTVADQLIAQNHYASNLVDEKRKQVLERWRHLKEGLIEKRSRLGDEQTLQQFSRDADEIENWIAEKLQLATEESYKDPANIQSKHQKHQAFEAELAANADRIQSVLAMGGNLIDKKQCSGSEDAVQKRLTQIADQWEYLTHKTTEKSLKLKEANKQRTYIAAVKDLDFWLGEVESLLTTEDSGKDLASVQNLMKKHQLVEADIVAHEDRIKDMNNQADSLVESGQFDTAGIQEKRQSINERYERICNLAAHRQARLNEALTLHQFFRDIADEESWIKEKKLLVGSDDYGRDLTGVQNLKKKHKRLEAELGSHEPAIQAVQEAGEKLMDVSNLGVPEIEQRLKALNQAWAELKNLAATRGQKLDESLTYQQFLAQVEEEEAWITEKQQLLSVEDYGDSMAAVQGLLKKHDAFETDFTAHKDRCSLICDQGSELVEAKNHHGESIAQRCQQLRLKLDNLSALAARRKGALLDNSAYLQFMWKADVVESWIDDKENYVRSDEFGRDLSTVQTLLTKQETFDAGLNAFEQEGIHNITALKDQLINASHAQSPAILKRHGDVIARWQKLRDASNTRKDRLLAMQEQFRQIEELYLTFAKKASAFNSWFENAEEDLTDPVRCNSIEEIRALRDAHAQFQASLSSAEADFKALAALDQKIKSFNVGPNPYTWFTMEALEETWRNLQKIIEERDGELAKEAKRQEENDKLRKEFAKHANLFHQWLTETRTSMMEGSGSLEQQLEALRVKATEVRARRVDLKKIEELGALLEEHLILDNRYTEHSTVGLAQQWDQLDQLSMRMQHNLEQQIQARNHSGVSEDSLKEFSMMFKHFDKDKSGKLNHQEFKSCLRALGYDLPMVEEGQPDPEFEAILDVVDPNRDGYVSLQEYIAFMISKETENVQSYEEIENAFRAITAADRPYVTKEELYCNLTKDMADYCVQRMKPFSEPRSGQPIKDALDYIDFTRTLFQN

SEQ ID NO: 2923 - DNA, 7564 bp, DROSOPHILA
tttgtcattggttattacatacatatattgatttatatctgttaatggttatatgcatgtgaagtgcctgggtgagttgagatggacattgaacgagattgattctaataagctttaagggcgacatattgtacacgctacgaatattgctaaaaatacctgcattcggatttggaattggatttcgatttcgttttcgccattaatctttggttttttctctaattaatttcgattttgttcgtgccccaatgtgttggtaggcaaagcactttgggcaggcgcttgtagaatcaattagttaatacattaaacgtactgtatgctgtatcttcagaacaagttgggtacaatatgtgctgagagctgtggctctctgaatctgaatctgaatctgaatctgatcctgaatcagattctgattctgatcctgattggctatcggttgtgatgggggcaatgtgttcgggtggagtgtgtgagatctagatatcatatcgttacatacacgtacatatatatgctctaattaccgcctcgtctattactcgtaacattgaaatatacaaacatatatgtatgcctcgtcgagctaactaagtcctgtggataaccaacgtattttgtgtctagcgcttaatttaatcgttgaactgtctggattccgctttcaatcgaacctttcgagctattctcaaacacaacagtaatgatagcgcgcacgtaaacaaaacgcagcaaatgaatcgcttgtatattttcactagactttgggattattagcttttgctgctggcttcatttcttttttgtttgttgtttttttttccagccgactacgcttgctgtttttgtataagtaaacttgcttgaaaacatttaactgccttttctctggcggcccgtcgattcaaattcatctttttggattatacatttcgaatatcatatttgcgtaactttacttaggaacaaagcttagatttcatttctttggtttcgcgtctgttccgaaatagttatgattctgttagttttgtctagtcgatttgctaaggaaactgagttcaaagagctgcgaacatcgggaagcgaccgcctgtcctcctgcttccactggcgctccttgttgccagtgcagcgtagagatgctagttccgtatagggtggtagtacagggtagtggttggagtcactcgtaatattcaagttccatatatttgtatttgtatttagatttgtatttatatttataattatatataccgttttatgcatgaaataatgtaaccataaacaaattagcaacaacttcaaattgtccggagcgtctgcattagatttagtattaatattatgacgtaagttacttaaaacctctcacaccaactcgtgcacatcgtctaagtgaaaattattattgagttttcattgcaattctcgagattttctagtttaactgagttttcctttcttggttttcttttgtcttctctgctttgttttcgcccgctgaaggagcacactaatcgagaaactttcgtcctggcagcgggattgcttacacgccgccgtgatcgccagctcctgccgatcctcctgctcctgctccgtctcctgctcctgccgcatccaccagcgatgactgtcctccggctggctgctgcggtggcggcggcggtggctgcatgtactgtgggggatactggtactgtggcggctgctccccgcctatgagtccaagtttatctgttttaaaatgatgcaagaattagtagggcacgacatgtgatggctctttgcgctctttagccaatctcagacaacgatacacgagtatacgccaaaaatattacacttcaaggcttaaaagctcactcatgacggaatatagcaagtggacatgggatgtggacggtgggtgggggcggacagcagggacaactgcatcgaacaggtatggatatatatatatatatatacatatatatttatgtacatttaggcagtcactggaagctgtcttcctttgagcctcccgaagagaagtcctctcgcttttggtgcaataaacttaggccaattttaaaatacatacaacattgaattgtaaaaatcaaataataaggcactaatcacacatagacatcgattaactcacatacatgcggctaaggctggcggtaaacgatgagacaccgtttacagccagccgaaataatataaaaccagaggaacggcggaaacggaagtgggagcacaaacggaaacggaagtaagaagaagcgcaggtgtcaaattactgggtatgattatttgcattgatatgttgccgttttttcgtttgcttacagtgtatcggattagatcgattttgtcaatggtacaaagaaagtgtgaaatgttttcttttcgattttgattaattttgactatggttctacggatgcgtcttggtggttaatcgatggctgattagtttggttggttggttggttggttggttggttgaatgttggttttcaagagagatcgtgagcgttctattgtccagtcgccacttcattcgacggactctgtgggtggtcggtcaatttctcggccaatggtttctcgagtgtcggtggttcagattttagattttgtgtatggtggtgtggttgtagttgttgttcttgttgttgtagtagttgtggtggtggtggtggtgctgaatcaggtgcagttgccgatgccggagccacctgctgctgcaaggcaggaggctgcggagcagcattatcatccgacatgtacggttctacgagaaatttttcggtgagttcatgttgttgtttaattcaaatcgatttgttttcaaagcgagcagataaagatgataacaataaagtataaatatagaaacggttttgagcgatgtaaaacaaaggatttatcaactggtgcacctagcaataaatgtggcgtatgagtaataaataaaagattgctctcgctgtttacctcacacacaaagtgttatattgggtaaattgatttgcttatggttaataaaattgtacaaagctgaagctttctgtgtgattattcttcgtctttctctgtaattgttcaaaaatatggttcggtgttgagagtgtgtcaaatcaaggtgaaaacattaaaaaaaaacttaggtaaatgaagaagaatggcagtactttatgcttttgctgtggttcagtggcacaagaaaggctggcttttccaatccgaaggccgttgcgcttgcgtggaggcttagtaacgagtaacgagtaacgagttgcgtgaaggcttagtattgagtaacgagttacgagaagggactacttttactggggaagtggattcaagttttgtattttacacaggacatggcacagtcgtgtgtctgtggctggggtgctgctgccaatatcagaacgaaacaaacgaaaaacggatacggatacggatacggttaacgaaacactgaacaaaccacaaactttacgattacggcttacgggagttagaactagctagctagaacttaaggtcctacggataaggctaacgggcaccattgagtatcggtccatctccgccagatcggcttctggccggggtccttccattgtcgtccagaccctcagccgcaacccacatggacggagctggcggatccgatactcggcgtgatctcaacttgattactggtggtggttaggcaacgtaacgaaacgaaacaacacaggacacgactttcagtgggcatcaaatgaaatctttaccgaacctgtgcgtatgctcgtatggaaccagatgatgttgggcttgggcatacatggtacacaatacaaatactcgcatatgtatgccacttagcatttagttattgttctagtggtggctgaagcgcatgacatgatatgatcgatcgatctatagttatgggaatttcgcaaggcatctaggtcgaatcggttgagcgaacggtcagttggactgtgagttcgcagctctactcatagcagttgtgaatgagttgaatttggtttcggttttggtttcgatttggatttcgattggttcttattgggttgattgattggcttttgatttggtttcgatttgcattgcattgcggctaagaactaaattcttacggattagatagttagcaatctacataaagttacctagagaaaaaaagtggcggaattaagaacgcaatttagattcggtgtgtagataaacgaaagcgatttgggccaacgaaatcagcgctaaatcaaggcgaactcaaaagacaaacacaactgggtaactgggtgatcttgaaagtatcttcggttctgtgtgtgcgtggtgagtcgagtggtgtggtgtggtgtggcgtgggtcaaggtcagtttctctggggtatgtgtgtcccagaaatgagtgcaccaagttcgcccaggatctgtcaacttacttgcaataatgcccacgacaaccaggccaatcacgcccatgatgatcatcatctgtgcggagaaaacaaagattgaagttcggtccgacaaggtaactgccatcgtcgcacttacctttaagttctgaagccagaatttcctcttgagcttgcccgcctgctgctcaaactgcgaggcaccctgctgcaaggcatcggcacggtcgtccagctccgacagcttgctgtcgcgctccagcaccttctccacgttcgtgcgcatgatgtccacgacctggtcggggattcagggttgcagtggttaatggaatggctgatctgtgatcgactttcagtcccggaactcacctcatcgacctgcgcctgcgtctgctgcagacgcttctgtgccgcgatctgctgcggattgtgtggtccgcccacaatctcgccatcgccgccctctccggccggggctccggcattgggtggtgcatcgccagctggtgcagcgtccgccctgcggaggaggtcgtcattagtcatcggatgcgagaacaagaatagctcgggccaagattaatcaacttccaacgggggctctcgcattaaatacagtacttagattacacaaagagtgggtgtgggtgggtggttacgaacgactatggtttctagctttaatcgaaatatctccaagatacgtgtgggctacggacagtgctggagtatagttctagccagctaccctttaacttggagagacacttactgttccttgttcttgtctttctttcccatctcagacccccaaaaactttgacctttaactcggcttctgggctctgcggggccaaaggaagggaaattgttaattttaaataaaagaattacaataggcgaagctacttatgctggactagtttgtatggtttctacgtgatgcatattttttagtgaaacaaacaatagagtgaagtatctcagtattatccatagtcatttggtcatttggtattggttattgttgttggcaaaatgttttcatcgaaccgtatttccctttcccacgacaaagaaaaagaaatcaatatcttaccctaatccctacgaccggcgacaattggttttttttttttacctacgtggagggaatatttttggatttctcaactttccccggcttttattggcaaaatcaattttatatggaatcaaagagcattatcaacaacttgtatgtgtgtataagacgagcttttcttttgatcatgacacatatcttatgtttggtttcaagcgaccaaaagaaataggtgcaacttagtttgcatgtcctgactcacgggtgcgaatcgtgtttttattgattttgcggtgtgagagacttggccatgtgatgccacaacgtcatcgccaagtgattcatgcctagcgaaccgaaacggcagctgcagctggcccgtgttccttttacggattttacgggcgcgagcacttggacaaatgacaaatgaaatgagcgacccatgctgcgtatacttaatgcggctatcaaacgagcattccctctgtgacggcgaaaagcaaggcggggaatcgaaacccccatttccccgccggaaaacgaatcaataacgtccatccacttacatggctctggtggctgtgtggttgcttctgtggtttggctggtggtgctctggtggcctcagcgaattcggctgtcgatgattaggatgaaggtactctatgcacgatgcacttggcctctttcactgtcttccactggcgcaggtcgggatgtgggatggtcagtgggcggtggtggcgttggtggtgtaggtagtgggtggtggtgcagctgaactctgtttcgttgtttttgttctagagggttgcgctctcagtgccgcttctctctctctctctctgtttctctctctctctgtcgctcttccgccagagctttttcgccccgtcgtcaatgaaaattcactccactccacggggggattggctggatctggatgatgtgtatgtgtgcgggtaacacttgccacgacagcctttcgcaggaattttctggctcagcgctggaactgctgctgaatagagtgcgaaaatagttgcaactatttttagtacatcggttaatgcttgaaatgggcagctatgggattctaattgggacgtaagaggactatttgggtggcagcaacacgcccagccatgaggcatgtccttcctcatttccgttgcatacccccaggggcacctaagatgtcttcaaaatgcaaaacgttttaaaaataatttcaagtgcccaactggccaacgtgggctcagaagaaaaaatcaatgaaattctgcacgacaagggttttcgctgactttggttgacatttcgtttgatcttcgttttcctaatcaatcagttttagcacttttgatcagaatcactttacttttgctcgggcaacttgagtttacaaaaaccaggcttaactaatattttacgaatttttttacgcagcaccaggaaaattttcacttacgacgtttttggccaactgcgaaaacttgcagctttcctaactgttatgtgtatttggggaaaaagctgcctggatggccagcagcgaatggtgttccagcgagaagcttttccttagcgatttccaagtgccgatggccaaggggtgggaaatttaaaaacaagccgggctttccatcaagaaaaagaaatgctcaaagttctagtaatattacagtttgaagttttaactttgtatttttaaatatatcgtgtaaataattatatcaattgatttgaacaaggtttaaaatgcacagaactattcgtctaaattgatttaaagcggtttcctgaactttgtctgaatccacacgcggtacattttcaagccgcgacagcgattaacttgcagtcttcggtccacaatgagctgctcctcctgcagccccgcttgagtcatcataccccgcagttcttcctccgtgaagaagtacaccatggtgccgtcgcctcgcacgtagaagttgtcctccatacacttgccgctcttgaagcgcagctgtgcc

SEQ ID NO: 2924 - DNA, 1636 bp, DROSOPHILA
cagttccagcgctgagccagaaaattcctgcgaaaggctgtcgtggcaagtgttacccgcacacatacacatcatccagatccagccaatccccccgtggagtggagtgaattttcattgacgacggggcgaaaaagctctggcggaagagcgacagagagagagagaaacagagagagagagagagaagcggcactgagagcgcaaccctctagaacaaaaacaacgaaacagagttcagctgcaccaccacccactacctacaccaccaacgccaccaccgcccactgaccatcccacatcccgacctgcgccagtggaagacagtgaaagaggccaagtgcatcgtgcatagagtaccttcatcctaatcatcgacagccgaattcgctgaggccaccagagcaccaccagccaaaccacagaagcaaccacacagccaccagagccatagcccagaagccgagttaaaggtcaaagtttttgggggtctgagatgggaaagaaagacaagaacaaggaacaggcggacgctgcaccagctggcgatgcaccacccaatgccggagccccggccggagagggcggcgatggcgagattgtgggcggaccacacaatccgcagcagatcgcggcacagaagcgtctgcagcagacgcaggcgcaggtcgatgaggtcgtggacatcatgcgcacgaacgtggagaaggtgctggagcgcgacagcaagctgtcggagctggacgaccgtgccgatgccttgcagcagggtgcctcgcagtttgagcagcaggcgggcaagctcaagaggaaattctggcttcagaacttaaagatgatgatcatcatgggcgtgattggcctggttgtcgtgggcattattgcaaataaacttggactcataggcggggagcagccgccacagtaccagtatcccccacagtacatgcagccaccgccgccgccaccgcagcagccagccggaggacagtcatcgctggtggatgcggcaggagcaggagacggagcaggagcaggaggatcggcaggagctggcgatcacggcggcgtgtaagcaatcccgctgccaggacgaaagtttctcgattagtgtgctccttcagcgggcgaaaacaaagcagagaagacaaaagaaaaccaagaaaggaaaactcagttaaactagaaaatctcgagaattgcaatgaaaactcaataataattttcacttagacgatgtgcacgagttggtgtgagaggttttaagtaacttacgtcataatattaatactaaatctaatgcagacgctccggacaatttgaagttgttgctaatttgtttatggttacattatttcatgcataaaacggtatatataattataaatataaatacaaatctaaatacaaatacaaatatatggaacttgaatattacgagtgactccaaccactaccctgtactaccaccctatacggaactagcatctctacgctgcactggcaacaaggagcgccagtggaagcaggaggacaggcggtcgcttcccgatgttcgcagctctttgaactcagtttccttagcaaatcgactagacaaaactaacagaatcataactatttcggaacagacgcg

SEQ ID NO: 2925 - protein, 192 aa, DROSOPHILA
MGKKDKNKEQADAAPAGDAPPNAGAPAGEGGDGEIVGGPHNPQQIAAQKRLQQTQAQVDEVVDIMRTNVEKVLERDSKLSELDDRADALQQGASQFEQQAGKLKRKFWLQNLKMMIIMGVIGLVVVGIIANKLGLIGGEQPPQYQYPPQYMQPPPPPPQQPAGGQSSLVDAAGAGDGAGAGGSAGAGDHGGV

SEQ ID NO: 2926 - DNA, 4069 bp, DROSOPHILA
cggatacaaggacatgtgtgccacgttggaacgcgagattcaatccttgcgccagcaggagcttgtgaacgaacctgccggagagggatacgatagcgtcaaaaaggaactggatacgctgcggatggaaaacgatcggctgcgtcggcgcaaggaggaactggagatggagatgatgcaccgctgcttgcggggcgacttcaacatgaaggacttcaaggtggtacactttagtgaaaatcccgctgccgaagcctatgagtccaccaaaaacatgatggagaagctgcaggcggagattgagcgactcaagcggcgcaacaagaagttggaggacgataacgagcaaaggctcaatgaaaccaccagcacgggcggcatgacactgaactttaaggagttcaatcaacttcaagccgaattagagtccgccaatggcaagatgcggaagatgagggattgcttcaaggcggcccgagaggagttccgcgatgtgtgctacatgctgctaggctataggatcgatcgaatcggtgccaacagcaactatcggtgggtagcgattccatagatcctccatcttagttgctaacatttaatatttctcttgcagcatatcgagcatgtttgcagagggaccggatgactatctggacatcagcctcaacgaatcgaactgtttggcgctactggagtcgccatattcgcacacattcaatccacctattgatcagcagctggcagccagcaactttcccgcattcttttccgccctcaccctagaactattccaaaaggccactgtcacgatgacttaggtcatcattactttagtctgtcttagcttaagctagccgagtatgaaggcattgaaacttattcttgtccgcatcagatatacgattggttttttattttaccacgctaacaataaacttccccacatataaatacatataaattatagtaatgcacaatagaaattggaatacccaatccactaagtggaggtcaggatgtgagccacctgctccggcgttctgtgcagcagctgctccggctgctcgaagccgttggccggatcgtggacgcgttcgtagatctgcttgtagatggccacgatcacgttgaaggatcgcttctgaacggcggcccggtgactgctggacattatgagctgcacctgcggcaggagcaatacatcgggtagttccagaaaggcgtccatcttggacatgaagatcttcagcaggtttgtttctattttagattgattgctctgcagaatggcgtagatgggacccagattgaggttcgccaccagcgatgatgcctgctcggaggtcagtgtgtccaactgggcatccgactgcgcctgcagccgctccacgcgctcatccatatattcgtagacagccagcgagctttgcatgtgatgcagacagttcaaaaggtacacacccatgtccacggtgggcagatgggcagcactttcttgcacggactgcagcagcggatctatcacgcagctcacgatctttgttatgtcggcctgccggccatcgaccatggtggccaccgaaagaatctctttgagcatatttagcaaacgtgccacgcttggcggcggtacaagatccctttgcggcggttccaaggccaggcccgatcctccagagggacgctgcaaaacacttctcacctgggcagccaaggcgcccaggtagatctgctcactgctcttctgaagctccaccaaacactcctccaggctgccgccctgcaccacctggcgcattatttgctggtagaagcgtaacagattggaaatggtaaacaacacaatagtgtccttctccgcctgcagtatcgtctccactcgaacctttagaggatgacaaactccatcggctatgtagcccaaagcgttctgcagctggtcggaaatatctattgcaaaacgaagagcactattttggtgccataatgtatgcattttcttatcttaccctgcttatcgcactttttgaacagcaaagataggttctccttttcggtgggaatgctctgatgcagccacgcaaacatatcgccaatatatctcttcggatcgtgggcatgcagctcaatgggcttggggttccctccaggacccccttccgtcaaggcctcaatgaactgacgcaccaaaaccgctcttctcgcaatggcgtattcgtcaatgacgtatctgcaaaggaattacttttataaatgctacaggaaagtccacaaaatggacacacttgaatagcaccggacggtcctgcagccggctcatggcttccacaatcagcggacctatttcgttgttttccaaactgcgacagtggttctgagtccatcggtagagcctttccagagcgccctcctgatgcaatgtcatctcctccatgatgtcgatggctgctgtttggtatccacactgcatcagcagccggcagtcagcgtgaatgctttgtactctgtccaatacgcgaaagaagtccgccacaatgggtgcatctttggcagcgccatatagtaactggtgctcggctccgcttagctgaaaacgagccagaaaagcttgcgcaatctgcttatgcacctccaagcggtccctctcccgctgcatggtgttggtctgcttgatcagatccttggtgagcgcctttgaggtctccagatccgatttcatcgtctctactgacgtggccatcgtgtccagatcttcgcacacggcatccagcgagagcttcacctggcggaaggccttcagaaagttctcgttgatgcccacggagcggtgttcgatctggctacgcagattcctgcgattctgcagcgtattctccgtgaagaaagtggacagaccactcagagcatccaatgtgtcctggaaccgtaacgcggttattcgctattggccaagcttgggtaaattgggcactgaccttgtccgactccaggcgagcctcaaggatcttgttgaccctcttctggatcctgtccagctcctccggtttttcctgcgtcgagctcatcttaaacagttgagagtggccaggtgcgcgaaaagtaaacataagtttgaaaaatacttaagacctaaatgaacagatgtaatatctcctttattaattttattttaaagatatgtttaattttatttaaagctatcaatatcaaagcatagctactaaatgtttgaaacggcaacattttttagatcgcactttactttaccccaaaaataccaaataatatttactgaatccctggttcacatgttatagaaaaataaaacagttgcgttttcgacaaattaaaaacaatttcttaaaataagttgtagtcatctaagttttaaatacatccaattaaatggctgccctggccagcttgactgcccagtacacggattccgagaacgagggcgatgctagtccggattcacaaaactccacggcgtccctggtttagtttcaccttaactttagtcgaaatcttataatctcactaaatgcatttctcaatacccaggtaatcataccgcccaagcgacccacgccgacgcccaccaaacaggacgaagaaagcaagcgatctaaggagaagaaaaagaagcgggccaagaaggtgcgtcggttggtgagctaccaggatgacaccctgatttctgacgaggacgaggaccgcgccgcagcgtcctctagtgaagaggagtccagcagtggcgacgagagcaatagttccaattcccagagcgaagacagtcccaaagccaaggataaaagcaatgctggtagtggttccaaggacggggacacgcccatggaggtggacgaggagccggcatgtttcccggtcgaagaacgcacggctgagagctacgaaaaggatgccaagtacgccaagtacaagttccagctgccacccgagccaaaggggaagccgtccgccgaattagtggccaaaatcactaaaatgtacacaaagatgaaccagaccaatatggacatgaatcgcgtaatacaggatcgcaagg

SEQ ID NO: 2927 - DNA, 1897 bp, DROSOPHILA
taagatgagctcgacgcaggaaaaaccggaggagctggacaggatccagaagagggtcaacaagatccttgaggctcgcctggagtcggacaaggacacattggatgctctgagtggtctgtccactttcttcacggagaatacgctgcagaatcgcaggaatctgcgtagccagatcgaacaccgctccgtgggcatcaacgagaactttctgaaggccttccgccaggtgaagctctcgctggatgccgtgtgcgaagatctggacacgatggccacgtcagtagagacgatgaaatcggatctggagacctcaaaggcgctcaccaaggatctgatcaagcagaccaacaccatgcagcgggagagggaccgcttggaggtgcataagcagattgcgcaagcttttctggctcgttttcagctaagcggagccgagcaccagttactatatggcgctgccaaagatgcacccattgtggcggacttctttcgcgtattggacagagtacaaagcattcacgctgactgccggctgctgatgcagtgtggataccaaacagcagccatcgacatcatggaggagatgacattgcatcaggagggcgctctggaaaggctctaccgatggactcagaaccactgtcgcagtttggaaaacaacgaaataggtccgctgattgtggaagccatgagccggctgcaggaccgtccggtgctattcaaatacgtcattgacgaatacgccattgcgagaagagcggttttggtgcgtcagttcattgaggccttgacggaagggggtcctggagggaaccccaagcccattgagctgcatgcccacgatccgaagagatatattggcgatatgtttgcgtggctgcatcagagcattcccaccgaaaaggagaacctatctttgctgttcaaaaagtgcgataagcaggatatttccgaccagctgcagaacgctttgggctacatagccgatggagtttgtcatcctctaaaggttcgagtggagacgatactgcaggcggagaaggacactattgtgttgtttaccatttccaatctgttacgcttctaccagcaaataatgcgccaggtggtgcagggcggcagcctggaggagtgtttggtggagcttcagaagagcagtgagcagatctacctgggcgccttggctgcccaggtgagaagtgttttgcagcgtccctctggaggatcgggcctggccttggaaccgccgcaaagggatcttgtaccgccgccaagcgtggcacgtttgctaaatatgctcaaagagattctttcggtggccaccatggtcgatggccggcaggccgacataacaaagatcgtgagctgcgtgatagatccgctgctgcagtccgtgcaagaaagtgctgcccatctgcccaccgtggacatgggtgtgtaccttttgaactgtctgcatcacatgcaaagctcgctggctgtctacgaatatatggatgagcgcgtggagcggctgcaggcgcagtcggatgcccagttggacacactgacctccgagcaggcatcatcgctggtggcgaacctcaatctgggtcccatctacgccattctgcagagcaatcaatctaaaatagaaacaaacctgctgaagatcttcatgtccaagatggacgcctttctggaactacccgatgtattgctcctgccgcaggtgcagctcataatgtccagcagtcaccgggccgccgttcagaagcgatccttcaacgtgatcgtggccatctacaagcagatctacgaacgcgtccacgatccggccaacggcttcgagcagccggagcagctgctgcacagaacgccggagcaggtggctcacatcctgacctccacttag

SEQ ID NO: 2928 - protein, 630 aa, DROSOPHILA
MSSTQEKPEELDRIQKRVNKILEARLESDKDTLDALSGLSTFFTENTLQNRRNLRSQIEHRSVGINENFLKAFRQVKLSLDAVCEDLDTMATSVETMKSDLETSKALTKDLIKQTNTMQRERDRLEVHKQIAQAFLARFQLSGAEHQLLYGAAKDAPIVADFFRVLDRVQSIHADCRLLMQCGYQTAAIDIMEEMTLHQEGALERLYRWTQNHCRSLENNEIGPLIVEAMSRLQDRPVLFKYVIDEYAIARRAVLVRQFIEALTEGGPGGNPKPIELHAHDPKRYIGDMFAWLHQSIPTEKENLSLLFKKCDKQDISDQLQNALGYIADGVCHPLKVRVETILQAEKDTIVLFTISNLLRFYQQIMRQVVQGGSLEECLVELQKSSEQIYLGALAAQVRSVLQRPSGGSGLALEPPQRDLVPPPSVARLLNMLKEILSVATMVDGRQADITKIVSCVIDPLLQSVQESAAHLPTVDMGVYLLNCLHHMQSSLAVYEYMDERVERLQAQSDAQLDTLTSEQASSLVANLNLGPIYAILQSNQSKIETNLLKIFMSKMDAFLELPDVLLLPQVQLIMSSSHRAAVQKRSFNVIVAIYKQIYERVHDPANGFEQPEQLLHRTPEQVAHILTST

SEQ ID NO: 2929 - DNA, 3272 bp, DROSOPHILA
gaatttatgaactcttagcaaaacctcattaatcgctttggaactcacgtttctaggtcatgctggatgaccaagtcatcgttgcccccggaaaaaatatatgagttttgggtgtcaaatcccaggcagaagatgttgctggcatgcttctcgttcatggaacggggttttccgagcttggatacaagctcgcggtcaatgttccatagtagaaccctcttgtcgtcgcctcctggtggccgaggaaagcaccgatcagctgggagggcggaaggatatcaacaggtatctccacttacctgaagccaggaactgaccgcccgagctgaactccagggcatttacacatccgtagtgaccagttaggttgcgctggtagagattctgagccgcacttagtcgctcgcgaaaaatggcagagggaaggtggccagccaccaatatgttctcacgctggctaagggccacgtccagattgcgggtctccagcgagcgcaggttccgccaaaggctcattttccgggctccgtcacctggttttctttgcacggaggtcgagatgctacccttgaaggggctgggactctgatttaggttctgttctgttctccagcagggcagtggtctaggttcacgcatatcgctctcacttcaatggggcttcgaactggaaccgcagtgcgcttctttgcatcaatgcaatcccttaattgcgcactcttaaagaccagaaaggcactttaaaatcttttacatgcagcttgttagattcagtcatgaaaaacgaacacaaatgtatgtactttatagagaacaactactcgttttgactggtttatcatcacttcgcatcgctccctaatcaaaactaaggcagaaagtatacaaaccgagaaaccaccgaacagctgttcgcccagccaggtacagtgggaccaaggcgatcgaaaaacggagagcagcggtggctcaaaaccgtgataataggcaacagtgtacactttttcaaatcattttaccttagagatttacattggcataagattgaattaaagtcacggtttgtcaccagttttcaaaatttatagtgatttttgggatccctagtggactgaagcgtttaacaatggccgacaataattcagcatcagagagcgaaaatataattcctggtaagaccgtaggtgttaaataatattaaattaaagctcctctctagtaatgccatgtacttagcatgtacatgtaacatttgaatatgctcaaaggtaaacttactccttcctgatttcctcccagtctttctaagtaatttcgatgaaaaggagcaggtgcgtcaactcagcttataccttcacaacctgcaagaccgtttgcggcagggcattcaggagcaccagaaggtaatgcagtcgtcggtgcagttgctcaaggaggtgggcgatgtgaacgacatgatgcagctcgcgaggtgtggccaccgcgccggggcctccaagatacagcgactgatcgtgggtttcgagacggttaatgctgtgaacgccccgcaaacctccgccgtggcgggcatgagtttgccttctgacctcaccgagattcaaggtctattggtggaatttgagcacctcaatgaaagccaagttctgcgggagagccaggagaacttcaaacgtgcccgagactcactggagaaggttctcggctttctagagaagattggcagcgaatcttcacggccgtctccacaaggaagtcagctctttgggtgtcccagtgccagccgcagcctgcgcgagaagatcgaagcattcaacaaggtcttagaggcggcccccgagaaacttggggatacctgccgtcattttaaggagtgcttttgtagctgctgcaccttggacgagtccttcctgtctaaagggcacaatccccttcccgttgcctcgaaaacaaattcgggctacgagggggacatagacagcgaggtagagcagccggagcggtccaataacgaatcgggggcggatataagggccgatcggtaaaaaattgatattggtaaagagcaagctttaaacacaattaatacaaattagttgcatttaggagtatcttttcaatgcctagtaagaatttaaaggacgattatagaaaaaataaattttagttggtataagaaagatgtaaatccgtcaaaactacatattaaactttaaataatatacaggcaaaggcactataataatacctcttcaaattaatatttaaatacagaaaattgattttcatatcagagatatataactcaaagcaccttttgctggatttaaatcaaaacaagggaagacattaggttcgaactttatctttttacttagaagccaacgtttataatttttaaaacttcggattcttgttcttgtcctatgtacattatgttgatatccacttttatacttaaaactacgaagggttgcaagtcaactgcaaattgttgtataaaaaagcgcgagttcaggtaggtattgtcttcattgtgacttgaggtgaaaatacacattaaaatatcacactaaactacagtaatagcaattttaaaatcacgatgcatccctggaaatcctggccgcgtcgagtttctggcgaggttagcagttcgactctgcggcctggaaaaggtctgagtagttgatcgcaaagaagatggccactgctccgatagcggatcctagctgcgtgatggcgcccacccagaccagcgattgtccgccctgcgcccgcataaccgtggtgattcccagtttcgtgtagctcacaatccctaccagcaaagtccaggctgtgaccacgagtacggcaccaacggtctggtcgtgaagtggcggaagaggactcagagccgccgtggtgaaaacatagctggtcagcagacccgcaaggatagagagcaccgtgataatccgcagggaggtaaaatgcaggaacatggccatgaagcaggcaaccgggttggctatcacactgagggtggctgctaagtggtacgcttgtgatccgtacggggcactggagtaggactgtatgctgccgaacattccgttactaaacagcgaaatcgcaccgattagcaggaggaggtatgtgtactggcctttactcagcttttccgcttttggctggttatccgcctctccgtaaacgtacttgttgccctcactgacggtaacctgggcgtactcccttctggccaaggggagggaattcagaagtgc

SEQ ID NO: 2930 - DNA, 1145 bp, DROSOPHILA
ctttttcaaatcattttaccttagagatttacattggcataagattgaattaaagtcacggtttgtcaccagttttcaaaatttatagtgatttttgggatccctagtggactgaagcgtttaacaatggccgacaataattcagcatcagagagcgaaaatataattcctgtctttctaagtaatttcgatgaaaaggagcaggtgcgtcaactcagcttataccttcacaacctgcaagaccgtttgcggcagggcattcaggagcaccagaaggtaatgcagtcgtcggtgcagttgctcaaggaggtgggcgatgtgaacgacatgatgcagctcgcgaggtgtggccaccgcgccggggcctccaagatacagcgactgatcgtgggtttcgagacggttaatgctgtgaacgccccgcaaacctccgccgtggcgggcatgagtttgccttctgacctcaccgagattcaaggtctattggtggaatttgagcacctcaatgaaagccaagttctgcgggagagccaggagaacttcaaacgtgcccgagactcactggagaaggttctcggctttctagagaagattggcagcgaatcttcacggccgtctccacaaggaagtcagctctttgggtgtcccagtgccagccgcagcctgcgcgagaagatcgaagcattcaacaaggtcttagaggcggcccccgagaaacttggggatacctgccgtcattttaaggagtgcttttgtagctgctgcaccttggacgagtccttcctgtctaaagggcacaatccccttcccgttgcctcgaaaacaaattcgggctacgagggggacatagacagcgaggtagagcagccggagcggtccaataacgaatcgggggcggatataagggccgatcggtaaaaaattgatattggtaaagagcaagctttaaacacaattaatacaaattagttgcatttaggagtatcttttcaatgcctagtaagaatttaaaggacgattatagaaaaaataaattttagttggtataagaaagatgtaaatccgtcaaaactacatattaaactttaaataatatacaggcaaaggcactataataatacctcttcaaattaatatttaaatac

SEQ ID NO: 2931 - protein, 263 aa, DROSOPHILA
MADNNSASESENIIPVFLSNFDEKEQVRQLSLYLHNLQDRLRQGIQEHQKVMQSSVQLLKEVGDVNDMMQLARCGHRAGASKIQRLIVGFETVNAVNAPQTSAVAGMSLPSDLTEIQGLLVEFEHLNESQVLRESQENFKRARDSLEKVLGFLEKIGSESSRPSPQGSQLFGCPSASRSLREKIEAFNKVLEAAPEKLGDTCRHFKECFCSCCTLDESFLSKGHNPLPVASKTNSGYEGDIDSEVEQPERSNNESGADIRADR

SEQ ID NO: 2932 - DNA, 6109 bp, DROSOPHILA
cagccaaagccgcgcttcatcttcaagatgcctcgtgtggtcccggaccagaagtccaagttcgagagcgacgaacttttccggaggctcagtcgggagagcgaggttcggtacacgggctatcgggaacgaagcatcgaggagcggcaggtgcgcttcatgaacggatgtcgcgaaggacacacggaggccagcttcgtggcatcgggcaccaatctgcagctggtgttcaacgccaaccagaacccgtacctgcacgacaaggagtgcgactttgacaaggagcacggcaaggtgcacatcaagtcctactttatcatgaacggggtttgtgtccggttccgtggatggatagacctggaacgactggacggagttggctgtctggagtatgacgagcggcgcgccatgcacgaggacgccattctgcgggatcagatcgatcgctacaaccagcgactgcgtgagttcgaggacactaagcgcgcctaccgtgacaatcgacaggacgagatggaggcagtgcgacggggcgtggcctccggaggcattggcgttggcgccagcatgtggcgtcgttagttggacctgtggacggctcctgggccgtcccatccgcagctgcctccccagcagcagcagacgcatcaccagcagttagagactcaattcgcgaatactcaatatttcatggacaactgagaatgctccgaaccccttaagagggctttcacttgagagatttcaatacgattacgttagacacgctcgaataattatgctcctagattagtgttagatgtaatgcttactttacgtatgcttttatggtattatacttacaacttagtgtgaaattagtgtcgtatctttaactaaaatacataattactaatctatatggcattgttcattttggaatttccacctttaagcagagtgactaagactcttcactgggaattgcctaccgaggctaggtatcgatcaagaaaacaagtcgtttggtttgattttatagcattataatatacagatactgaactttatacataataagcaaggatcgtgtaaaactaaactatggggtctcgctcggcgtgttggaaacatttatattaaaagcgacaagctagtccgtcctagcggaattgcaggtttgaaatgcgcaggccaatgctatccttgccgatctggctcacttcgcaaactgtgcagagattgcccttgaactgagggtcgaaagaggaggagcagaagggacaggtcacttcgggtttacccctatacagtggcttccagctgatgccgcagattgtgaacggattaaactcctcgtactgcagctgatgctcgtccacgggatttacctcgcaggcctgcaggatcttgcgcacctgctgggcaacgtccggtcgtggcgccagttccaggagacgacgggcaaatgaggcggccgtcttgtagttcttcagcttgaagaacatattgagggcggtacgcagggtgaggatttggtgcacgggctgaagcttgcagtgcgtgaagtaggcggccatctcgcacagacgcttttgctcctcaagcgtcgacttgggcatgcccttgcgcacagtctccatcttcaggccaacgatatactcagcgcagatccttaagagttgctgggcctccgccgcatctagcttcgtgtccactaccagcagtgggatgctaatcaagatggaatggaacttctctactgcctcggagaactttccagaagttgtcagttggtacccagcttgcaggcgtgccaccaaatcattcagtttaatgccaaccgcaggacgctgcagcttgatgtttgtctcggagtagttgcgaagtgggtaaccacttagggattgcagattcggattggccgtgtagctcgttcgagagcaggcgtagttctgcaggaagagtgtcttgaatggctggaaattgaccactcccagctgatcgtgcagtaaacggaaggcggtttcgaatgatccggccttgacatggtccaggaccagaggcgagttgttggcccattgttgggcaggagacaagcctttgttgggagccgcatagtagttgctgtcgagggctgaggccttgatcttggaggccagttcctcgggcacaaccaggtcatcatcgcccacatcccagccggcaccctcctctccacccgcaccaccatcgccatcgttgctcagcgcgtcgtgcatctcgtcatctccgtcttcatctagtcccaagtcggcatccgctccccaaccatctccaccaccattatgctcgtccaacagtgcagcatcggcgttgatgttcagcgcctgtcgggcagtggcactggagccagccctggtgaccatggcgccttcaaagaagcccttggacacggacagcaacggccaattggtttcaagctgctggatgggcactggtggctgcaacaactgggcattgggattcacctcgggaaggctgttaccctgcgaggttatcgattcgcccagggactcagtgagctcatcgaatccatgagtagcggctgtgagataagctaacgaaagttgtccgcagtttttgaggatgtttacccgctccttgacgtcaccgagaaggagggcaccctggtactgggcggaaacatccttgcgaatctcggcaatcttgttcatcttcttgagcttctccaagttgccggtgatcaggtagaggaagctaagcttgtcaaagttcttggtccgctggtagcacatctctaccacctggtggtttccttggagcagcgcactctgtcccaggcgatcccagcaatccttgtcatcgagagccttggctgcttcgagagcaatttcgatgttaccgcactccagagcgagtccaaatcgggttttctcatccttgacaaaatgcagtgccacctctggataacccttttgctgcaggtaagcaatgatgctctgacccactaggcgggcatttctcaccatatgcagtacttcatcgtacttgcgttgaatcagggcaagcttaaacttgtactccgtaggatcgatgtggagcacacgggtgcggcactcccggtccaagcagaacacttggttgcccttgacgcgtgtcagataaatgggtaggtccagcgtacggatgatgccgtggtccccgtttgtaatggcgtacttaatgtggttgctagtggtgtagataaacactccagactcgtcccaggcgccagacttcacgcggcagttctcctgcacggtgcacaagtactgaagtcttcggtcgcagattgtaaccgagtgcttgcagagtagagcgaccaaggacatgtccggagaccacaccacgtagcggcacttggccagtttaatgcttccaacggagactaggcgctgaacttcgtacagtgtgacaaactcagggtcccgaatgagcagcattcccgtaccggcatagaagatctcctcgcagaaagttggcaacttcttggtcacctcattcttgaagttcttgatcaccaactgctggttgcgatcaagcactgcaaaccgattgcgtgccacccagatggccgtgattccagagcttcgcttgctgtccgactcactttggctctcggtgtccttggggatttggcaaagatcgtaggtgctgttctccaggttgttggtgcgcgtgcagattagcacggcgttcagtgctgggttgtacgacatgctgtacaccggcgacttgcctggtcgaagctgcataaccacagtgtccttagtggtggtaaagtccagtttgcgaaggaaacgttccttgacgtagtagagaatattcccgtggacagcatatgcaggacgctctcgctccagtttaaagaccaccatacctgaaagaatatgtatcattacaaaaaattcctattcctaaaagaaatcaactaacctccatcgtggccagctgcaaacagattcagggtcggatgcgctgtaagtatccagaagcgctcgttgtcccgccggaatgtaaagaggcactggcgcttggtcatgtcccagacgcgaatactgcgatcttcgccgttggagagaatcaggtcttgcctgggatggaacaacacgctggacacgttgttgtagtgaccgcgacaggtgtcgacctcccaagccttgtactcgttcatgcgccacaacttcacaaggcgatcatcggcaccggagacaatcagcggcagggtgggatggaaactggcccagttgacgccacggtcgtggccctcgagcacgtgcttgaccacggcatctgcttggccaaacagatcagtggcacccggatgaccctttaggtggtcatcaagcccaccgggcccgggagccacgttcttcttacgcagccccgaaatgtcccacacgcgcaccgtctgatcgagtgaagcagaaacgatctgatcctccgtgggatggaactgggcgcacatcacatagtggttgtggcccgtcagcacgcagatgcagttgcgcgactgccagttccagatgcgtatggtctgatcgtcggaggcgctcagaatccatgggtattcgtggtggaaagccaccgtgcgcacatagtccaaatgggccaggagggtaaaaatgcatcggcgttgcttgtagttccacaccttgatcttgtagtcgtcgccgccagagacgaagagcggcatctgctggtggaaggccacgcctcgcaccggtccgtcgtgctcgtcgaacttctcgaggagcgtgtgcatccggtagtcccacagctggatgacgccgctgtgcaagctgaccaggatccaggggcgcttagggtggaaggagaggcccttcaccctcgccgacttcgactcgaagttggtcagcatggtggcactttttctgttctgcctgtaggtgtctcaaattggatgcacttctaggtgtcggcttatccgtcaagcgccctttttttgctggttcgagcacttgcctgtatcaaaacatcaagaggtgggtgttagaacaaacccattttattgatacgctacaagtaacacgtaatatactgccaacaattaattttatgaaaaacaccaaccaatcgtcgaaattgtgacacgtcaattatcttcttcttcgcgacccagtcagtgttgccagcgttggcagatgtgcatacactgggaaccataagttttcaaaagtacacacatgaatatgaatgaattatcatgctctccagtcttctttatatagttaaatatacagattttacgtgatatttttgaatatatttaatcttcgtcaataatattcgaaaattgagttggtaaatgtatttctacgaacacttttagtgaccactgtaatcgtagttttacagcactggacaaagtgcattctattcacggtaacttcgctttgtttattttctgtaataccatggaaaatatataaataagtgacaaagatgacactggcacaccgggcgctcttcacttggtttatcgtcctggtcttcctgattcttctgtgtctccgcctggacccacgcaccacctggaattggttcgtcacctttacgccactctggttcttcgatgtgatcattatcatctacgtgatcattaaatttatccgcaagtggcggaacctaacctgcctgacggatctcctgttcctctacaaatggaacattgccggcgtcctgctgaccatcgcctcccaagtgatgatctgcctaacgctggagtacccgcaacagattcccatatacgtgaccgttgccccggtcatcctgctgctgagcaccgccatcttctatgttggcagcaggctgggaaaacgagagggctggatacagtaatattaagcatatattgtaggattaggtgtacataaagtgaaaactcaaaagccgtatttgctttgggtggcccgacgggtctgccggttggccgaccacatggcctgcagctcggcttcgttggccttcgccttgtgcgccaggtaggtgatctggtgcttgcgccgagtccctgccaccggctcctcgtccgtcagcacgccggtcggttggaaggtggtggacg

SEQ ID NO: 2933 - DNA, 4053 bp, DROSOPHILA
gtttttcataaaattaattgttggcagtatattacgtgttacttgtagcgtatcaataaaatgggtttgttctaacacccacctcttgatgttttgatacaggcaagtgctcgaaccagcaaaaaaagggcgcttgacggataagccgacacctagaagtgcatccaatttgagacacctacaggcagaacagaaaaagtgccaccatgctgaccaacttcgagtcgaagtcggcgagggtgaagggcctctccttccaccctaagcgcccctggatcctggtcagcttgcacagcggcgtcatccagctgtgggactaccggatgcacacgctcctcgagaagttcgacgagcacgacggaccggtgcgaggcgtggccttccaccagcagatgccgctcttcgtctctggcggcgacgactacaagatcaaggtgtggaactacaagcaacgccgatgcatttttaccctcctggcccatttggactatgtgcgcacggtggctttccaccacgaatacccatggattctgagcgcctccgacgatcagaccatacgcatctggaactggcagtcgcgcaactgcatctgcgtgctgacgggccacaaccactatgtgatgtgcgcccagttccatcccacggaggatcagatcgtttctgcttcactcgatcagacggtgcgcgtgtgggacatttcggggctgcgtaagaagaacgtggctcccgggcccggtgggcttgatgaccacctaaagggtcatccgggtgccactgatctgtttggccaagcagatgccgtggtcaagcacgtgctcgagggccacgaccgtggcgtcaactgggccagtttccatcccaccctgccgctgattgtctccggtgccgatgatcgccttgtgaagttgtggcgcatgaacgagtacaaggcttgggaggtcgacacctgtcgcggtcactacaacaacgtgtccagcgtgttgttccatcccaggcaagacctgattctctccaacggcgaagatcgcagtattcgcgtctgggacatgaccaagcgccagtgcctctttacattccggcgggacaacgagcgcttctggatacttacagcgcatccgaccctgaatctgtttgcagctggccacgatggaggtatggtggtctttaaactggagcgagagcgtcctgcatatgctgtccacgggaatattctctactacgtcaaggaacgtttccttcgcaaactggactttaccaccactaaggacactgtggttatgcagcttcgaccaggcaagtcgccggtgtacagcatgtcgtacaacccagcactgaacgccgtgctaatctgcacgcgcaccaacaacctggagaacagcacctacgatctttgccaaatccccaaggacaccgagagccaaagtgagtcggacagcaagcgaagctctggaatcacggccatctgggtggcacgcaatcggtttgcagtgcttgatcgcaaccagcagttggtgatcaagaacttcaagaatgaggtgaccaagaagttgccaactttctgcgaggagatcttctatgccggtacgggaatgctgctcattcgggaccctgagtttgtcacactgtacgaagttcagcgcctagtctccgttggaagcattaaactggccaagtgccgctacgtggtgtggtctccggacatgtccttggtcgctctactctgcaagcactcggttacaatctgcgaccgaagacttcagtacttgtgcaccgtgcaggagaactgccgcgtgaagtctggcgcctgggacgagtctggagtgtttatctacaccactagcaaccacattaagtacgccattacaaacggggaccacggcatcatccgtacgctggacctacccatttatctgacacgcgtcaagggcaaccaagtgttctgcttggaccgggagtgccgcacccgtgtgctccacatcgatcctacggagtacaagtttaagcttgccctgattcaacgcaagtacgatgaagtactgcatatggtgagaaatgcccgcctagtgggtcagagcatcattgcttacctgcagcaaaagggttatccagaggtggcactgcattttgtcaaggatgagaaaacccgatttggactcgctctggagtgcggtaacatcgaaattgctctcgaagcagccaaggctctcgatgacaaggattgctgggatcgcctgggacagagtgcgctgctccaaggaaaccaccaggtggtagagatgtgctaccagcggaccaagaactttgacaagcttagcttcctctacctgatcaccggcaacttggagaagctcaagaagatgaacaagattgccgagattcgcaaggatgtttccgcccagtaccagggtgccctccttctcggtgacgtcaaggagcgggtaaacatcctcaaaaactgcggacaactttcgttagcttatctcacagccgctactcatggattcgatgagctcactgagtccctgggcgaatcgataacctcgcagggtaacagccttcccgaggtgaatcccaatgcccagttgttgcagccaccagtgcccatccagcagcttgaaaccaattggccgttgctgtccgtgtccaagggcttctttgaaggcgccatggtcaccagggctggctccagtgccactgcccgacaggcgctgaacatcaacgccgatgctgcactgttggacgagcataatggtggtggagatggttggggagcggatgccgacttgggactagatgaagacggagatgacgagatgcacgacgcgctgagcaacgatggcgatggtggtgcgggtggagaggagggtgccggctgggatgtgggcgatgatgacctggttgtgcccgaggaactggcctccaagatcaaggcctcagccctcgacagcaactactatgcggctcccaacaaaggcttgtctcctgcccaacaatgggccaacaactcgcctctggtcctggaccatgtcaaggccggatcattcgaaaccgccttccgtttactgcacgatcagctgggagtggtcaatttccagccattcaagacactcttcctgcagaactacgcctgctctcgaacgagctacacggccaatccgaatctgcaatccctaagtggttacccacttcgcaactactccgagacaaacatcaagctgcagcgtcctgcggttggcattaaactgaatgatttggtggcacgcctgcaagctgggtaccaactgacaacttctggaaagttctccgaggcagtagagaagttccattccatcttgattagcatcccactgctggtagtggacacgaagctagatgcggcggaggcccagcaactcttaaggatctgcgctgagtatatcgttggcctgaagatggagactgtgcgcaagggcatgcccaagtcgacgcttgaggagcaaaagcgtctgtgcgagatggccgcctacttcacgcactgcaagcttcagcccgtgcaccaaatcctcaccctgcgtaccgccctcaatatgttcttcaagctgaagaactacaagacggccgcctcatttgcccgtcgtctcctggaactggcgccacgaccggacgttgcccagcaggtgcgcaagatcctgcaggcctgcgaggtaaatcccgtggacgagcatcagctgcagtacgaggagtttaatccgttcacaatctgcggcatcagctggaagccactgtataggggtaaacccgaagtgacctgtcccttctgctcctcctctttcgaccctcagttcaagggcaatctctgcacagtttgcgaagtgagccagatcggcaaggatagcattggcctgcgcatttcaaacctgcaattccgctaggacggactagcttgtcgcttttaatataaatgtttccaacacgccgagcgagaccccatagtttagttttacacgatccttgcttattatgtataaagttcagtatctgtatattataatgctataaaatcaaaccaaacga

SEQ ID NO: 2934 - protein, 1234 aa, DROSOPHILA
MLTNFESKSARVKGLSFHPKRPWILVSLHSGVIQLWDYRMHTLLEKFDEHDGPVRGVAFHQQMPLFVSGGDDYKIKVWNYKQRRCIFTLLAHLDYVRTVAFHHEYPWILSASDDQTIRIWNWQSRNCICVLTGHNHYVMCAQFHPTEDQIVSASLDQTVRVWDISGLRKKNVAPGPGGLDDHLKGHPGATDLFGQADAVVKHVLEGHDRGVNWASFHPTLPLIVSGADDRLVKLWRMNEYKAWEVDTCRGHYNNVSSVLFHPRQDLILSNGEDRSIRVWDMTKRQCLFTFRRDNERFWILTAHPTLNLFAAGHDGGMVVFKLERERPAYAVHGNILYYVKERFLRKLDFTTTKDTVVMQLRPGKSPVYSMSYNPALNAVLICTRTNNLENSTYDLCQIPKDTESQSESDSKRSSGITAIWVARNRFAVLDRNQQLVIKNFKNEVTKKLPTFCEEIFYAGTGMLLIRDPEFVTLYEVQRLVSVGSIKLAKCRYVVWSPDMSLVALLCKHSVTICDRRLQYLCTVQENCRVKSGAWDESGVFIYTTSNHIKYAITNGDHGIIRTLDLPIYLTRVKGNQVFCLDRECRTRVLHIDPTEYKFKLALIQRKYDEVLHMVRNARLVGQSIIAYLQQKGYPEVALHFVKDEKTRFGLALECGNIEIALEAAKALDDKDCWDRLGQSALLQGNHQVVEMCYQRTKNFDKLSFLYLITGNLEKLKKMNKIAEIRKDVSAQYQGALLLGDVKERVNILKNCGQLSLAYLTAATHGFDELTESLGESITSQGNSLPEVNPNAQLLQPPVPIQQLETNWPLLSVSKGFFEGAMVTRAGSSATARQALNINADAALLDEHNGGGDGWGADADLGLDEDGDDEMHDALSNDGDGGAGGEEGAGWDVGDDDLVVPEELASKIKASALDSNYYAAPNKGLSPAQQWANNSPLVLDHVKAGSFETAFRLLHDQLGVVNFQPFKTLFLQNYACSRTSYTANPNLQSLSGYPLRNYSETNIKLQRPAVGIKLNDLVARLQAGYQLTTSGKFSEAVEKFHSILISIPLLVVDTKLDAAEAQQLLRICAEYIVGLKMETVRKGMPKSTLEEQKRLCEMAAYFTHCKLQPVHQILTLRTALNMFFKLKNYKTAASFARRLLELAPRPDVAQQVRKILQACEVNPVDEHQLQYEEFNPFTICGISWKPLYRGKPEVTCPFCSSSFDPQFKGNLCTVCEVSQIGKDSIGLRISNLQFR

SEQ ID NO: 2935 - DNA, 2700 bp, DROSOPHILA
atccttcatttccggtgattttgagacgtacgatccggaaacggccgacgatgtgttaaccctaaagccggacgacctgattggtttggccggatggcgggatttctatcaaaaggactacgtctacaagggacgggtaattgggcgcttctacgatgagaagggcgccctgaccacctatcatcataagtttctggagctgctggagcaggcacgagatgccaagcgacaggtggaggagctgcgtgcccggtatcccggctgcaatatcgagtggagcgaggagcgcggcactcgcgtctggtgcaccacgaccagtggcgatggcaaggagcgctcctggatcggttatccgcgcaagctgtacagtcgcggcaacaagagtttccagtgcgcctgtgtgccggatgcggagctggacgagatcgatgccggcggcaaggtggctcacggtgatgccatgctgaaaccctacgacaattgcgagccacaggccagggagtgcttctacagggtgtagcagcagggccgggatttgtaaatagtaattagtgcatttggatcaataaattattaggtggagttaacatggctggcggaactagttccggttctcttctgttaaatttttagttgcgctacatcgacaacaacaattgggaaatgttgacattcaagctaaatacttgagcacacttatttctatctgtaaaaccaaaccatttatttgctatcaacagctcaactttatttaaatcgttggatattatttgttgtatctgtaaatcaataccctttaatagacataccaatgaacgggacttggttctcttttcaactttagcgaggccgcactgccttaacagtaacatttcacacttaaaagctgctgttaagaccgttagctgtgctgttaggcgcatatcttgtttacaagcggtttaattttataaatatagctttgttttaataaatatccaagaaatttaaactattacacatggacacattgccgggaagttcctccgccctgagcacagacgacgagcaaactgccctgatttcccccactgtggtggccggcttaaagaacctgggtgccatcatttcgctgccactcaccaaactgctcattgccaattccttgaaactgacgctccatccagatgccagtgagttggaagctggaaattggtgtttcgcgtagacctaatcctaatatgtacacccccacagccattgctccggtgcccgagctgtatgccaagaacgccgcctgcgccaaacagagcgagtacgcggtggtcaccctcttcgccctgggcaccaagcacggctgggatggccttcaattgcgccagcagctggagcaactcaacctcgatgcagctgccgtcgacgagctgagtcgcgtttacgaggacagccgcaaggatctaattctccgccaactgcaaataggccatagctttccgcacattaccgacatccagtggcgcatcgtgtgcgacgtgaagtcttccacctcggactgcagcacgggcgcggcctgcttccacatcaatctgggcaactttcggcagagcagcggcgagcgggtgaccatcgttgagtttgtctgcaatgccgaggagctgcagtcgctaatcaatcgtctcaaggagatcgagcggcactgccaacagatggccgtggtctagggaaacaagctcttcaaattcttatcgattatatttcgcagcatataacaccagcattgtcggctatatacagtgtcggaacaggaaacctaaacagttaacacagtcatcatcgcttaaaaggctacggcttcatcatttggagtccaactccaatggcaaccacttcgttgatcatccgcgtcaatgggcaaccttgtgcggcggcggcacaagcagcttcatcagctgcccatagtgattcggcgctgtgctatagatggtgcccgagaagcgggtgctgtcgttcttctcggcggaaatcactgtgcaacggttctgttccgaaagccgcatgtttagaccacggaagcgtgagtccagcctgtatagattagccccttcccgtggtagaaagaatggacgtccgctaaacggattcatgaagtccgcccagtagccgtacgatagcaggcgatcgcacatctcccgcgctgccaggacaaactgcaaaggtagttggcattagttatgtatgtagatatactcgtttagataataggtaaataccaacaaactaacttctctgtattctcattcatcaacccaaatctaaaacttattacaaatgattgaaaatgttatggcttactttaaaattgggtgccaaacttaaggaaggtcaacccacctagctttcaacgtgctaaactggtttgattgtatataaacaaatgatcagagcaataacgaggtcattcctccaattcatccaaatacactgcagtgtgatttcccgctacagtgtggatgcgtgaataaaactgatttctcaccttggcagcgcccatttcgatgtctccttcgtggctgagaacaagcatggtgatgtttatgcactgctgtgcgacgacgggtaccgggaagatctccaagagtggcacacggataagcaggggacacttacagcaggtgaattccaggcgcgatttgtccgtattgggacccttgtgaaagttaa

SEQ ID NO: 2936 - DNA, 636 bp, DROSOPHILA
atggacacattgccgggaagttcctccgccctgagcacagacgacgagcaaactgccctgatttcccccactgtggtggccggcttaaagaacctgggtgccatcatttcgctgccactcaccaaactgctcattgccaattccttgaaactgacgctccatccagatgccaccattgctccggtgcccgagctgtatgccaagaacgccgcctgcgccaaacagagcgagtacgcggtggtcaccctcttcgccctgggcaccaagcacggctgggatggccttcaattgcgccagcagctggagcaactcaacctcgatgcagctgccgtcgacgagctgagtcgcgtttacgaggacagccgcaaggatctaattctccgccaactgcaaataggccatagctttccgcacattaccgacatccagtggcgcatcgtgtgcgacgtgaagtcttccacctcggactgcagcacgggcgcggcctgcttccacatcaatctgggcaactttcggcagagcagcggcgagcgggtgaccatcgttgagtttgtctgcaatgccgaggagctgcagtcgctaatcaatcgtctcaaggagatcgagcggcactgccaacagatggccgtggtctag

SEQ ID NO: 2937 - protein, 211 aa, DROSOPHILA
MDTLPGSSSALSTDDEQTALISPTVVAGLKNLGAIISLPLTKLLIANSLKLTLHPDATIAPVPELYAKNAACAKQSEYAVVTLFALGTKHGWDGLQLRQQLEQLNLDAAAVDELSRVYEDSRKDLILRQLQIGHSFPHITDIQWRIVCDVKSSTSDCSTGAACFHINLGNFRQSSGERVTIVEFVCNAEELQSLINRLKEIERHCQQMAVV

SEQ ID NO: 2938 - DNA, 3006 bp, DROSOPHILA
gatcttcgtaacatcgccatcattagcctgcatggtgatttctttgacaagcttctggcattcctttagcatcttttcaagatcttcacgcttttcttcctttaacgaaaggtttgattccttcctccggtcttggtgtttctccagatcttcccggaattttcggtgcatgggattggggagcccataatattcgttcttgatcacatgaatcactccaatggagccgtctccaaatttcttatgcttttgactaggctggctttcgggcttgagaatttctagtacgaacaagtataagttatctatttaagaggtcaccgtttgagctcttacctttttttcttaaatgttcatgtgcatttagatggtaggaccttttaacagaagtctgaaggcaccgataaactaacgcaggtctctttagcattataacggtaaatttagaatttttcttgtggaaaatgaatttttaacgaaaagctaagcaaaggaaataaccaaacttcacaatttttgaacactacccaaacatgttgacgttttcgtctaagaaaacttgtggaagtgctaaaaattatctaatgtgatttcttaagctacacattaggcgaagttcagaaggaactgaatgattcctactgaccaatgaataataatagaattaaactttaaaaggaatatgtgatttcagatccgtttcaacggtaatcacacttcactaatttctaattacatatttaagccgcaaatacttccaaactttacgtttataaaagcaatgttctttttttttaaatcatatttatttatatgatatataaatctatatatatatatatagatagattccttaacaaacatgaccgtctgactatcagtctgtccgtatgaacgacgaaatcttgccacggactcattactcgaaagctgggggttacatgctcattaactgttttcccccttgttatttttttaaataaataaaatctaatttttcggtaaaatgccgtattgtatattatgaaaaaaccatattttagataaagccgcgttgaacagagctgaatgaattaaaccaggtacgtatgtatttcattgaataatccgcgaaagcttcactttttcttgcatttgtcttttttagccattttcttgcatttttccttctgagccatttttttgcactttttctgcaactttttcattttttcttttttggccagttttttgcacttttccttttcggccaattttttgcacttcttttttaggtccccacccttttttttgcacggatctttctttttgcaaggatctttctttttgcagggatctttctttttgcaaggatctttctttttgcaaggatctttctttttgcagggatctttctttttgcaaggatctttctttttgcaagggtctttcttcgcgcacttcgtcttcttctccaattccttgcatttctttttcagttctatctgcttgcacttttctttttcagccagttccttgcaggcttttttgatgtcgccacctttagcagccatgatgatttctagagctagcctccggcattcatttttcatgttttcaagttcatcctgattcccttccttaaaccacttgatcctaacagtctgttgctgctccaggtcttgcaagaactttcgttgcattggactgacgagtgcagaacgaatgtgttgcggatcgtgaatagagacatcgacaaattttgcttgcccctgattgggaaggtcatcggttgtgaagtagtattaacagtaacaagtggtaaccaggcatatgagttcactgcataccttccttaaagttctcaaggacattgatgtggtgaggccgtataaaagtgggctgaaagcaccgacgtaaaattaaagcggttctcttaaacatttcgagaaaaatttttaaattttgtaccaaaagttttacaaagaattttgaaaaaaccacagctggagactatttgtctgtggaatcaggatctaaactgaatctgagatctaacctgcccccaaaactatacaagtttaactgacattattatctcagatcatcagatcaaaatcaatctaatgagaaatttatcgtctcccacgaaactcttagatccaaaagaacttaattgactgctagaaataaataaaacgaattgcaaagcaaaacaaacttcattaaaccatatagaaaattatttcttacacttaaagaattttactagaatatttaaagggtatatttgtagaaaagtggaagaatgaagcgtttcttattatacttttaggaccataacccaagacgatctgaaaatgtccttccgtccatctgtctgtccgtataaacgatgagttcccgggacttcagagacgcccacacttgatttcagaagcaaaaaatgcacatttcttcatctctgttttagttgtaaagtttagttttagttctgcattaaatcaaaaatgcattaatttagtgaaaaatgcaatcgtttttagcaataaatttatatcaaggcttttgatataagcaggaactagacacagaaacttcctatatgcaatttaaggaacacaattaaacccatcctgaatatacataaagaaaataaagttttattttaatgctgtgaaattaaaattttattgcggatgaaaatcactcgaaggccaaaacgtagctccttaaatataaactgttttaggttgaataatgacatcagatcgaccccatattgggcatatgcgtccaggcattatttaatccagcccgatatgcagtttcagtcacatcaatgtcttcggtctcgtgatgtcgattatgtgggaagattatttatttttgtttgaggtgtttgccgcatctggaattatagagaactgtgtgcccatcggttgggttagagcatttagtcttgacctacaaacaacctaggttgcctctcccagagttttatttatatttctaaatgtgttcatt

SEQ ID NO: 2939 - DNA, 948 bp, DROSOPHILA
ccacagacaaatagtctccagctgtggttttttcaaaattctttgtaaaacttttggtacaaaatttaaaaatttttctcgaaatgtttaagagaaccgctttaattttacgtcggtgctttcagcccacttttatacggcctcaccacatcaatgtccttgagaactttaaggaagccgatgaccttcccaatcaggggcaagcaaaatttgtcgatgtctctattcacgatccgcaacacattcgttctgcactcgtcagtccaatgcaacgaaagttcttgcaagacctggagcagcaacagactgttaggatcaagtggtttaaggaagggaatcaggatgaacttgaaaacatgaaaaatgaatgccggaggctagctctagaaatcatcatggctgctaaaggtggcgacatcaaaaaagcctgcaaggaactggctgaaaaagaaaagtgcaagcagatagaactgaaaaagaaatgcaaggaattggagaagaagacgaagtgcgcgaagaaagacccttgcaaaaagaaagatccttgcaaaaagaaagatccctgcaaaaagaaagatccttgcaaaaagaaagatccttgcaaaaagaaagatccctgcaaaaagaaagatccttgcaaaaagaaagatccgtgcaaaaaaaagggtggggacctaaaaaagaagtgcaaaaaattggccgaaaaggaaaagtgcaaaaaactggccaaaaaagaaaaaatgaaaaagttgcagaaaaagtgcaaaaaaatggctcagaaggaaaaatgcaagaaaatggctaaaaaagacaaatgcaagaaaaagtgaagctttcgcggattattcaatgaaatacatacgtacctggtttaattcattcagctctgttcaacgcggctttatctaaaatatggttttttcataatatacaatacggcattttacc

SEQ ID NO: 2940 - protein, 248 aa, DROSOPHILA
MFKRTALILRRCFQPTFIRPHHINVLENFKEADDLPNQGQAKFVDVSIHDPQHIRSALVSPMQRKFLQDLEQQQTVRIKWFKEGNQDELENMKNECRRLALEIIMAAKGGDIKKACKELAEKEKCKQIELKKKCKELEKKTKCAKKDPCKKKDPCKKKDPCKKKDPCKKKDPCKKKDPCKKKDPCKKKDPCKKKGGDLKKKCKKLAEKEKCKKLAKKEKMKKLQKKCKKMAQKEKCKKMAKKDKCKKK

SEQ ID NO: 2941 - DNA, 5297 bp, DROSOPHILA
agtttagttttagttctgcattaaatcaaaaatgcattaatttagtgaaaaatgcaatcgtttttagcaataaatttatatcaaggcttttgatataagcaggaactagacacagaaacttcctatatgcaatttaaggaacacaattaaacccatcctgaatatacataaagaaaataaagttttattttaatgctgtgaaattaaaattttattgcggatgaaaatcactcgaaggccaaaacgtagctccttaaatataaactgttttaggttgaataatgacatcagatcgaccccatattgggcatatgcgtccaggcattatttaatccagcccgatatgcagtttcagtcacatcaatgtcttcggtctcgtgatgtcgattatgtgggaagattatttatttttgtttgaggtgtttgccgcatctggaattatagagaactgtgtgcccatcggttgggttagagcatttagtcttgacctacaaacaacctaggttgcctctcccagagttttatttatatttctaaatgtgttcattttgctcggttgcgttgtgtactatcaaagttgaaccgacgctgatttgcgacaccttatcaaagccccggggtggtataaaattttaattgactctgaataattccctcgttttttgcgatgtcgtgtgaaatggagctaatctatatactacaattcgctgggcgtcagtcacctcgatatgacattcaaaaaggtctccgataatagttcgcagtatatttccgttctgtttgcccccaaaatttggccaaagagtgagttttttgaaatctatcactaacaaaagtgtttcatgtgtttcaattctttaacttgacatttgtattgaaaaaggttcccttgcgacatttaaatattgtcgatactattctgagctacaataaagctagaatatttatgtgaaaaaactacatccatgtgcccattggctagtataattctacccttaatctataagatatggactgacgtcaagtgttttcggttcagtgaacccaatcttaccgagagctgacttaagaatcgcgatagatggttagaaaagcatcgactgtcgcagtcatcatcgtctttttccttcgcgagcttcttcaaccgtttcatcttcttggcacactcctcggaaccaccaaggatcttgatattcctggtctgctgcttttcccggagaagctcacgcggcgactttttgggtgaagaacatgccggcgagcctccctttatctcagtgtcatcattttttgcgaacagatctaactctttcttggctagcatcctatcccgattctggatccctgtggcaataccataaggtaaaacgttcattgaaaatgtgctcatgtgacgttgaccagaaaaggaagacatttgccgtttgccctcgccgctctttcctcggcccaagatcttgtcaaaaaggtgttggatgaggctcttttcaactggtggtttcaccggcacagcagggatcactgggatctcacccgtagccttgtcccggagcttcagggctagctccccatcatccaactgaggcatttctttctttggctgatttacctcgagcggaggcttttcgtccaccttgattctggtctcatccattgaggtgggtgccttgactttggcttcctccttcttaggcttcacctcaggagcctctaagctaggactggattcttcggcttcttcttttagttccgttttacccgtttccgacagggatgctgaggaaacctctggggacactggatcataaagatcgcttggtgttagctctgatgtagtcttaactttgctgcttgactcgccttttttaaatctttgtggcttttgtgtagcgtcgtttttgataccactcttatcggcggatttcacaaaggacgaaaccttttgtgctagatcaaagctttttagttcaacatgcttttcatcattcttgtcactctttgcagactcgacctttttgtttagcttatcattggtttcttctcgtatagtggagtccaagttactgagtttgacgaagtagtcttcgttgggcgtgtccttttttttctgatccgtctcgtcctcttctctgatggctgagtccaagtggccaagcttggtaaagtgatcgtcagatttattggcagagccagtagtatcaagttggcctttttcattaattccgatatgtccttttttatccgatggcgatgaaagcattgctagaacttcctcttgactgcttttagttgctgacgacaattctggtagtgtccaccaagcacctggattattattaaatttttcaagagtctcgaagagttcgttgactttgccttcctcgcttttgtattgctcaccatcgtggtcgtctttgaacatggccactatttcctctgtggactggctcttaggttcgttatgagtaactccaattgttttagcgttgtctaagctaataaatggatttggtattttgcaatcggcgggctttaaactgttacttgatgggggcttatttaaaataaattctctagtcttagttgctttagttttggaatccaacttggtgtcctttttactcgactgtagttcagacggcggaatgggattaaaaattttcttaaactcagtcggagcttcatgcttggccacaatttttaatggcaactctagttgagagttaaccttagaggtcttagttgaagttgagtcctgaccagaagggagggaactggcatttggagatgtcttatctttgggaacccaaatattttcttttttcaccaacgtttcaatgaaatagggcttttcacttttatactctataggggacgcacttgcatttatgcttttgctttcggaggtagatgcagccttcttactaaccgatttaaaatgttccacccatttaaggattctatcttgattttcttgattctcgttgtgtgtgtcgatattattgaatctcttttcatgtgatttatctagcatctttctaaattcttcacttctgtcgctaagtgcctttgagttgactgtgatacccgatatcttaccttccgcaggcatgttaaagctggaactctcacctttcggagtttgtatatctctggtttcaggattggagccttgatttaagtcttcaatactttgagtagatgtctgagaatttttcgttcccgtttgagtcttttgaaatgaacttgatataactttaagatcgaggctagcacttggttcagtcttggaagctacatttaatttggcattttccggctttgaactcagagattgggtgttacttttcatttcaggcttaaaactgtctttggctgttattttatcttttgattcgtgaatgctcgcagaggttttttgaggtgtctcgttaatagactttgataatcccatcaaatttttttcacctgtcgagtcactagatttgagctccgctttaattagagggcagtctttctgaatagggtcaacaccgaaatcagacacagaagctgccagcgcctttagttcggattcaattgaacataagttattcagcttgatctcatctttcgatttagtaagggacgagttggtagactcagatggaactgactttaaatcattatctgcatggaaagggttaatgacttaactacagcatttcattccagacttgcttacctttgctttctgtagtcccaaccgaagacccaaactcaaccaccttccctatcatgtcatcattggaccctgaggaaccaacgttatctgagctgcagacaatggtttgcggattaggaggcttaacttccgtaggcgaaggctgggagcggtttggctgatcctggaggggcagaatctctggcctgacctcgtacggcaactctggtcttcgctctccaggaactttgggaggttcggggggcgctgctgccgtctccaatcctaaagtacttttttctgatttcttgtcttcgcccacttcctggtttaaccgacctggaccctgcttcccagccgattccccggactctgaggaactggtgtatcgacgtcgtcggtatgaacaaaccccaagagggcggtaggaggaccgcaggagccccaagcagtgagtggttcggcgacatgccgcgataccgccaaaaacgatgccggtcatctggctgctaaaagaagggggtcgactggaaactcaacaaattttgggtttcgaataaaatatgtgtcgaaacttaagattttgactagtgcctattgatcgacacagagtagtgtactgggttctctatactatatttttaacgacttatacaaatgtttagaatttgcgaggattgttggtgtctctgggctggacgtggatcatgaccttgatggcaccacccagtccctttcgtgacgtttcaaacgcctttgccgtttccttgatgtcgaaatggtgggtcaccagacgcttaacattcacctttccggaggcgacaagggccagggcagcggcatagctaaaagtattcatgtttaatcaaatgacatctttcgggaagttcaaacttactcattgcagtagcggaagacgccgcggatgtccacttcccgggccagggcattaattaggggcaacttgatctcagctgctcccatgcccaccaccaccacaatgccaccggaacgagtggcctgaaaggagtcggcgctatagctctttatatcacgcaaaacctttgcgattacttacgaagatggccagtcgggcactgctctctgctccacagcagtcgatggacttgtccggctgaccgcccatcgttttttggacgagcaccgccgtctcctcggcggtctgatcccgtttcagcaggagggtgtgagttgcacctagctctttagctacatcgaggcgttgctgcacaagatccgtaatgaggatctcagacgcacccatggcttgagcagcctgtgggataaaagatataagatatatggattatcctttagaaatattcttcgctctcagctgatagtattaggagcgcatttgtaagttttaaatattgaataagaactatgtttatatggagagattttaaaaatatgtttctgcgttccttatttcgtttgttaaccttattaacataacatcctaacctaacatccttttttgaccttagatttttgtagccatttatgaaattgtaaacgattaagtaaagctaacataccattaaagtgaccaggccaatgggtcctgctc

SEQ ID NO: 2942 - DNA, 3242 bp, DROSOPHILA
gcactagtcaaaatcttaagtttcgacacatattttattcgaaacccaaaatttgttgagtttccagtcgacccccttcttttagcagccagatgaccggcatcgtttttggcggtatcgcggcatgtcgccgaaccactcactgcttggggctcctgcggtcctcctaccgccctcttggggtttgttcataccgacgacgtcgatacaccagttcctcagagtccggggaatcggctgggaagcagggtccaggtcggttaaaccaggaagtgggcgaagacaagaaatcagaaaaaagtactttaggattggagacggcagcagcgccccccgaacctcccaaagttcctggagagcgaagaccagagttgccgtacgaggtcaggccagagattctgcccctccaggatcagccaaaccgctcccagccttcgcctacggaagttaagcctcctaatccgcaaaccattgtctgcagctcagataacgttggttcctcagggtccaatgatgacatgatagggaaggtggttgagtttgggtcttcggttgggactacagaaagcaaagataatgatttaaagtcagttccatctgagtctaccaactcgtcccttactaaatcgaaagatgagatcaagctgaataacttatgttcaattgaatccgaactaaaggcgctggcagcttctgtgtctgatttcggtgttgaccctattcagaaagactgccctctaattaaagcggagctcaaatctagtgactcgacaggtgaaaaaaatttgatgggattatcaaagtctattaacgagacacctcaaaaaacctctgcgagcattcacgaatcaaaagataaaataacagccaaagacagttttaagcctgaaatgaaaagtaacacccaatctctgagttcaaagccggaaaatgccaaattaaatgtagcttccaagactgaaccaagtgctagcctcgatcttaaagttatatcaagttcatttcaaaagactcaaacgggaacgaaaaattctcagacatctactcaaagtattgaagacttaaatcaaggctccaatcctgaaaccagagatatacaaactccgaaaggtgagagttccagctttaacatgcctgcggaaggtaagatatcgggtatcacagtcaactcaaaggcacttagcgacagaagtgaagaatttagaaagatgctagataaatcacatgaaaagagattcaataatatcgacacacacaacgagaatcaagaaaatcaagatagaatccttaaatgggtggaacattttaaatcggttagtaagaaggctgcatctacctccgaaagcaaaagcataaatgcaagtgcgtcccctatagagtataaaagtgaaaagccctatttcattgaaacgttggtgaaaaaagaaaatatttgggttcccaaagataagacatctccaaatgccagttccctcccttctggtcaggactcaacttcaactaagacctctaaggttaactctcaactagagttgccattaaaaattgtggccaagcatgaagctccgactgagtttaagaaaatttttaatcccattccgccgtctgaactacagtcgagtaaaaaggacaccaagttggattccaaaactaaagcaactaagactagagaatttattttaaataagcccccatcaagtaacagtttaaagcccgccgattgcaaaataccaaatccatttattagcttagacaacgctaaaacaattggagttactcataacgaacctaagagccagtccacagaggaaatagtggccatgttcaaagacgaccacgatggtgagcaatacaaaagcgaggaaggcaaagtcaacgaactcttcgagactcttgaaaaatttaataataatccaggtgcttggtggacactaccagaattgtcgtcagcaactaaaagcagtcaagaggaagttctagcaatgctttcatcgccatcggataaaaaaggacatatcggaattaatgaaaaaggccaacttgatactactggctctgccaataaatctgacgatcactttaccaagcttggccacttggactcagccatcagagaagaggacgagacggatcagaaaaaaaaggacacgcccaacgaagactacttcgtcaaactcagtaacttggactccactatacgagaagaaaccaatgataagctaaacaaaaaggtcgagtctgcaaagagtgacaagaatgatgaaaagcatgttgaactaaaaagctttgatctagcacaaaaggtttcgtcctttgtgaaatccgccgataagagtggtatcaaaaacgacgctacacaaaagccacaaagatttaaaaaaggcgagtcaagcagcaaagttaagactacatcagagctaacaccaagcgatctttatgatccagtgtccccagaggtttcctcagcatccctgtcggaaacgggtaaaacggaactaaaagaagaagccgaagaatccagtcctagcttagaggctcctgaggtgaagcctaagaaggaggaagccaaagtcaaggcacccacctcaatggatgagaccagaatcaaggtggacgaaaagcctccgctcgaggtaaatcagccaaagaaagaaatgcctcagttggatgatggggagctagccctgaagctccgggacaaggctacgggtgagatcccagtgatccctgctgtgccggtgaaaccaccagttgaaaagagcctcatccaacacctttttgacaagatcttgggccgaggaaagagcggcgagggcaaacggcaaatgtcttccttttctggtcaacgtcacatgagcacattttcaatgaacgttttaccttatggtattgccacagggatccagaatcgggataggatgctagccaagaaagagttagatctgttcgcaaaaaatgatgacactgagataaagggaggctcgccggcatgttcttcacccaaaaagtcgccgcgtgagcttctccgggaaaagcagcagaccaggaatatcaagatccttggtggttccgaggagtgtgccaagaagatgaaacggttgaagaagctcgcgaaggaaaaagacgatgatgactgcgacagtcgatgcttttctaaccatctatcgcgattcttaagtcagctctcggtaagattgggttcactgaaccgaaaacacttgacgtcagtccatatcttatag

SEQ ID NO: 2943 - protein, 1049 aa, DROSOPHILA
MTGIVFGGIAACRRTTHCLGLLRSSYRPLGVCSYRRRRYTSSSESGESAGKQGPGRLNQEVGEDKKSEKSTLGLETAAAPPEPPKVPGERRPELPYEVRPEILPLQDQPNRSQPSPTEVKPPNPQTIVCSSDNVGSSGSNDDMIGKVVEFGSSVGTTESKDNDLKSVPSESTNSSLTKSKDEIKLNNLCSIESELKALAASVSDFGVDPIQKDCPLIKAELKSSDSTGEKNLMGLSKSINETPQKTSASIHESKDKITAKDSFKPEMKSNTQSLSSKPENAKLNVASKTEPSASLDLKVISSSFQKTQTGTKNSQTSTQSIEDLNQGSNPETRDIQTPKGESSSFNMPAEGKISGITVNSKALSDRSEEFRKMLDKSHEKRFNNIDTHNENQENQDRILKWVEHFKSVSKKAASTSESKSINASASPIEYKSEKPYFIETLVKKENIWVPKDKTSPNASSLPSGQDSTSTKTSKVNSQLELPLKIVAKHEAPTEFKKIFNPIPPSELQSSKKDTKLDSKTKATKTREFILNKPPSSNSLKPADCKIPNPFISLDNAKTIGVTHNEPKSQSTEEIVAMFKDDHDGEQYKSEEGKVNELFETLEKFNNNPGAWWTLPELSSATKSSQEEVLAMLSSPSDKKGHIGINEKGQLDTTGSANKSDDHFTKLGHLDSAIREEDETDQKKKDTPNEDYFVKLSNLDSTIREETNDKLNKKVESAKSDKNDEKHVELKSFDLAQKVSSFVKSADKSGIKNDATQKPQRFKKGESSSKVKTTSELTPSDLYDPVSPEVSSASLSETGKTELKEEAEESSPSLEAPEVKPKKEEAKVKAPTSMDETRIKVDEKPPLEVNQPKKEMPQLDDGELALKLRDKATGEIPVIPAVPVKPPVEKSLIQHLFDKILGRGKSGEGKRQMSSFSGQRHMSTFSMNVLPYGIATGIQNRDRMLAKKELDLFAKNDDTEIKGGSPACSSPKKSPRELLREKQQTRNIKILGGSEECAKKMKRLKKLAKEKDDDDCDSRCFSNHLSRFLSQLSVRLGSLNRKHLTSVHIL

SEQ ID NO: 2944 - DNA, 4164 bp, DROSOPHILA
actgtctttggctgttattttatcttttgattcgtgaatgctcgcagaggttttttgaggtgtctcgttaatagactttgataatcccatcaaatttttttcacctgtcgagtcactagatttgagctccgctttaattagagggcagtctttctgaatagggtcaacaccgaaatcagacacagaagctgccagcgcctttagttcggattcaattgaacataagttattcagcttgatctcatctttcgatttagtaagggacgagttggtagactcagatggaactgactttaaatcattatctgcatggaaagggttaatgacttaactacagcatttcattccagacttgcttacctttgctttctgtagtcccaaccgaagacccaaactcaaccaccttccctatcatgtcatcattggaccctgaggaaccaacgttatctgagctgcagacaatggtttgcggattaggaggcttaacttccgtaggcgaaggctgggagcggtttggctgatcctggaggggcagaatctctggcctgacctcgtacggcaactctggtcttcgctctccaggaactttgggaggttcggggggcgctgctgccgtctccaatcctaaagtacttttttctgatttcttgtcttcgcccacttcctggtttaaccgacctggaccctgcttcccagccgattccccggactctgaggaactggtgtatcgacgtcgtcggtatgaacaaaccccaagagggcggtaggaggaccgcaggagccccaagcagtgagtggttcggcgacatgccgcgataccgccaaaaacgatgccggtcatctggctgctaaaagaagggggtcgactggaaactcaacaaattttgggtttcgaataaaatatgtgtcgaaacttaagattttgactagtgcctattgatcgacacagagtagtgtactgggttctctatactatatttttaacgacttatacaaatgtttagaatttgcgaggattgttggtgtctctgggctggacgtggatcatgaccttgatggcaccacccagtccctttcgtgacgtttcaaacgcctttgccgtttccttgatgtcgaaatggtgggtcaccagacgcttaacattcacctttccggaggcgacaagggccagggcagcggcatagctaaaagtattcatgtttaatcaaatgacatctttcgggaagttcaaacttactcattgcagtagcggaagacgccgcggatgtccacttcccgggccagggcattaattaggggcaacttgatctcagctgctcccatgcccaccaccaccacaatgccaccggaacgagtggcctgaaaggagtcggcgctatagctctttatatcacgcaaaacctttgcgattacttacgaagatggccagtcgggcactgctctctgctccacagcagtcgatggacttgtccggctgaccgcccatcgttttttggacgagcaccgccgtctcctcggcggtctgatcccgtttcagcaggagggtgtgagttgcacctagctctttagctacatcgaggcgttgctgcacaagatccgtaatgaggatctcagacgcacccatggcttgagcagcctgtgggataaaagatataagatatatggattatcctttagaaatattcttcgctctcagctgatagtattaggagcgcatttgtaagttttaaatattgaataagaactatgtttatatggagagattttaaaaatatgtttctgcgttccttatttcgtttgttaaccttattaacataacatcctaacctaacatccttttttgaccttagatttttgtagccatttatgaaattgtaaacgattaagtaaagctaacataccattaaagtgaccaggccaatgggtcctgctcccaggatgagaacttttgagcccagggtgacctccgcccgcttgcaggcatgcacgcccacagacagaggctcgagcagggcgccctcctccatggtgacgtggtcgggcagcttgaagcagaagtccgccgcatgcttgtagtagcgggtgaggttgccgtcgtaggggggcgtggcacagaagaccattccggggcacaggttgtatttgccctgcttgcaatggtcgcacttacggcagggtacgcccggttcgatggccacgcggtcgccgaccttcagtgtggtcaccttcttgcccagcttagccaccacgccggcggactcgtggccaataatcatgggcttagtgagcacaaagtcgccaatgcgtccgtgtgcaaggtagtgtacatcagagccgcaaatgccaacactatccatggccaggagaacctctaaaaagcaaaaaaccaataccatgaaatacgaaatagggaacttttgtatctaacgagttttactactgttataattgaataaatctagttagttcttgataatgcttaactcaatcgctttgcggctatcaaactgacaaaaatgcatagcacttaaagatttaataatgtatatttaaccttgggatattttgtttgtagcagtaggtcatcgacgtgataagaaatactatgaaaaatgggttgaactaaacagtgtacgagtggaagaaatattgaaatagggaaagtataatgctgttggattataccaaaaagtatcccaagtctaactactttcagtttcatttggttgatctaatttatgtttatttattgcttaccatcatcagcaatctctggaataggacgttgctcctgttaaccaaatagacatggttagcatttattcgatgcaagttccttttgtccttaccaatcgcatgtcctcaatgccgtgcagcactgctgttagattatccttggccatttctatgtgtcaattgaattatttgagagctctaataaccacacgctcgaatagccgattcacaactgattcaaatattttaaaccttacactagtggacttctgaattcgcggttatcagttatcagcgtgacgtaggaccagcgataggaaaataataggcaccacacccactatcgtttgtggtcaaatgttatcagccttatcaccacttgagtacagctggatgtgtgtttaaaaggtgtgtttgtttgcatgtgcctgtttatatgttagaacgtttagatgaagggtgaaattgaagttagtacacttggaagaaaaacaaaaatcgatctcaaatctagccaagatcgtatcatgcctagcatactcagatcgagatcgaaccattctcgaaggactttgctctcatttgtatctctctgtctctctcttaattttccagcctttccttccacaatctaaaacccgatacaggatccgtctgaaaatatgaacataaatatcgttttcgtctcgaaatcaataaggtttcttctcatgggaacgacgaatgagcacaaccgatctcgcttttttcgttctcaatttttctgggtgtataatttgcaagcacacgttataaatattgataaattcatgtcaataatgtattggagtttcccgggccacattaaaatggagtgagctgttgcttctggttaagttatggctttattaccaaggttgcaacgatggctattgcaatgcatttaccatgaagttatcattctgagtacaatctagttttggttattcaggcaaaaagcgtaagcgtatataagatagaaatacataggtcagagcttccatgtccctgtagtgaaaatcagatcacaacacccctacaacgttgtatgtcctttcaagtcatgtatgctttaagtacaaatggggggatgtcgtcaatgtgtcattgcggacatttaacagaacatcaaaagtggttgcgccataaataaggagaccctagctttggccccacaactagttcacaaccacccccgagcagggtctgctggttcttctggaactgaaccatttgtaattttttgctggggcaataacaacggcaaacaaattttagtccacttctgttttatggcaaattaatggagcgacatgctggcccatgttcgcaatggaacttcactccatgcactcgagcctagcaggtggccccagtatccggccactccccattttctcctccctcctt

SEQ ID NO: 2945 - DNA, 1344 bp, DROSOPHILA
gcacatgcaaacaaacacaccttttaaacacacatccagctgtactcaagtggtgataaggctgataacatttgaccacaaacgatagtgggtgtggtgcctattattttcctatcgctggtcctacgtcacgctgataactgataaccgcgaattcagaagtccactagtgtaaggtttaaaatatttgaatcagttgtgaatcggctattcgagcgtgtggttattagagctctcaaataattcaattgacacatagaaatggccaaggataatctaacagcagtgctgcacggcattgaggacatgcgattggagcaacgtcctattccagagattgctgatgatgaggttctcctggccatggatagtgttggcatttgcggctctgatgtacactaccttgcacacggacgcattggcgactttgtgctcactaagcccatgattattggccacgagtccgccggcgtggtggctaagctgggcaagaaggtgaccacactgaaggtcggcgaccgcgtggccatcgaaccgggcgtaccctgccgtaagtgcgaccattgcaagcagggcaaatacaacctgtgccccggaatggtcttctgtgccacgcccccctacgacggcaacctcacccgctactacaagcatgcggcggacttctgcttcaagctgcccgaccacgtcaccatggaggagggcgccctgctcgagcctctgtctgtgggcgtgcatgcctgcaagcgggcggaggtcaccctgggctcaaaagttctcatcctgggagcaggacccattggcctggtcactttaatggctgctcaagccatgggtgcgtctgagatcctcattacggatcttgtgcagcaacgcctcgatgtagctaaagagctaggtgcaactcacaccctcctgctgaaacgggatcagaccgccgaggagacggcggtgctcgtccaaaaaacgatgggcggtcagccggacaagtccatcgactgctgtggagcagagagcagtgcccgactggccatcttcgccactcgttccggtggcattgtggtggtggtgggcatgggagcagctgagatcaagttgcccctaattaatgccctggcccgggaagtggacatccgcggcgtcttccgctactgcaatgactatgccgctgccctggcccttgtcgcctccggaaaggtgaatgttaagcgtctggtgacccaccatttcgacatcaaggaaacggcaaaggcgtttgaaacgtcacgaaagggactgggtggtgccatcaaggtcatgatccacgtccagcccagagacaccaacaatcctcgcaaattctaa

SEQ ID NO: 2946 - protein, 360 aa, DROSOPHILA
MAKDNLTAVLHGIEDMRLEQRPIPEIADDEVLLAMDSVGICGSDVHYLAHGRIGDFVLTKPMIIGHESAGVVAKLGKKVTTLKVGDRVAIEPGVPCRKCDHCKQGKYNLCPGMVFCATPPYDGNLTRYYKHAADFCFKLPDHVTMEEGALLEPLSVGVHACKRAEVTLGSKVLILGAGPIGLVTLMAAQAMGASEILITDLVQQRLDVAKELGATHTLLLKRDQTAEETAVLVQKTMGGQPDKSIDCCGAESSARLAIFATRSGGIVVVVGMGAAEIKLPLINALAREVDIRGVFRYCNDYAAALALVASGKVNVKRLVTHHFDIKETAKAFETSRKGLGGAIKVMIHVQPRDTNNPRKF

SEQ ID NO: 2947 - DNA, 10776 bp, DROSOPHILA
ctcaacctctataactcgactcccctccctcgtactccgtcctttaatcatacatacatacacatggagatatattcatcatcgagttttgggtcgcttgtcgttctcgacttactaataaattaaaacaacgctaatgaatttttttttcgtctcgctaattgtgagttctcgtttaacgttcttcttcatcgcctgctccgctctccactaacttttcatttattatcgttatcaatcaattatcaatttcaattttcatttatacatactaggttttcatttaatcttttttcgcttcaatgctttagttttgtgccttggacaaatgtctgttaaaagtcgctttcttattccacttctcgattccgttttacatttaagttagttttggttagatgggagtacagtgttggctgatctcagcataaggtcttaggatctaattgcgcagcggaagtttctaaatcgaatgcacacagatctaatccaggacacagtgactagcaacgtagaccagctacgtttgcaatggactacctatgacgaccctttctgaatagcaatcccaagtgggagatgccttaacaataagaactcaagtctgcagtaaaaacaagtctaagtgacattaacaaaacaagtcgaacaatgatgttataataattttcaaatatcaactataaagtataaactaggagcataatatattcaaacaattcagagaatgtttaggttcattggttagtttacccacactaaaacgtacgtgcttcctttcgatagtattatattcattacgttggcacatccatcgcctaaaccttccatgtccttgccaagaatcctccaacccagtgctctctcaatttatcccgattgcttgatacccgtatggaacagtcaaagttctggaagtcgaaagcctaacccaacgaatgtggatgcaggtgcgaatgctaatggcgatgttggcagtgttttcgcttttacgcatttttcaattacgatttcgattgcgatcgtgtgatgtcttctgatacatactcccaatggatctacggctgattctgtcggccatgcgggggcggtctttatctactacacataattttttagtctgtcgtcaggcatttggcgagcatcgagcatcatcgagcgtcttgcttattgtttctattctctgtgtttaattttaacattgtgcgcgatttgttgaacgtttgacaacactacaaataacggcagttttacatgctgatgcggatgatttccggaatttctttgggggcagaaatgcaacaagattaacaaagaataggccactaacagagagttacgctgtccaggaactatacaaatgcgggttgggggttcgttaagcaaattaaaatgaggaactcactacataggaaaagagagaccgaccaactacaattagaccccgcgtcatcatcgtttttctggcaacaacattttatagtctctgttatctatatctctttcacaacttatagtctttggggttagattagatttcctgactcgagtggcagtctgtttgtggggctatccaactaaataaggctattttggcacacaatcacaacggaacacggaacatctattgtacaacaacgataacaacacaaggatggctgatttgggggcttgcaactgatctgtgggctaaattttggggcgtttgaattgaattttgcgaattcagaattcgttaagctggctgcagacggtgcagtgatattcttcgacgtctccaaccagccatgcttctgatttatggtaacgtcggtccccgtcaatgagaatattggataaatgctacaaaaactgctcttaagtggttcgcgcttgttgctgttgttgtgggcatgggtgtatgtgtttctgggtgtgtggctgctttgctttcgcctttttataattcacgtttacgcttacttcactattgtacaatgtgcgacttgcattattatattctcgtaattattttatataagtatatatgtatatatgtatgcatgttggtgtgtgtttgtgtgtgtgttcttgtgtcgagctgctgggctactcttattttgggtttttccattttttcgttttggtttctgtaaaatgcgctagtttattgataccttctgtggcgcccaacgtgggacagtcatgaacctgtgggtttgcccgtctgcctgtcattggcactctaaattctgtcctcctcatcctcttcctcctcctcctcgacctcctcgccgttctcctctagctcctccttgtagccaggatgctcagagatggcatagtaattgccattgtaaatgacgcccagttcgcgcagcgcatcgccgcgtattgtcgcctttatcgtccagttgtagcagtcgtctgactcggactcgcgatccaatcgctccacgtcaaggatcttggagttgaggcgttccagtatgatgccgatgtccttgatgctgaggtgacgcttctggtccaccgacaactggtcgatcagcagcagaaacttctccgtcgtcgtcttgtcgtcctccatcaccgtgttctccgtttcgctctcggagctatcccgctcgggagcgatgtccaggaatcgcacatggcccttggcgcccgaggagcggcgttgcatgctgccgcttccgccgccaccgctgccgcccagcataggatccataaccgatggtgccgactgcggctggggactgctgcttccgtcctggatgggcgacgtggccacgctcttgtgcacagcgatcttgcgcccctcctcgtgcagcgcacagcagtggaagtcgcactcggtggtgctgggactgcccgccctgctgggcgtgtgggcgtggtgggcgcattccggcgtgtgcacatggacagctcccacacccacgcctacggtgctgtcgaaggagcttccctgcttggagagtcgcctgctgccgccgggtatcacaactcctggcggcagaacaacgccaccgggatggtatatgctcgccggtccgtcgtcgctgatcaccgttatttgagggctggcatagcgcggctgggaggactgcgacgacaccgacttgttgtccagcgaactctgcgcggagaggcccttctttgagggcgagtacttatcggacgacagcagcccattgctgctgcccaggccggagcacatgctccccactccgccgccggcgccaccgcctcctcctccgccgccgcttcctccaccctgccgctgatcccagtgcagaacgaccgtgacacgccctttgttatccatgatcttccacgacggtgtctcatcgtgcaactccagcgcatgaatcgtctcacagacgattttcggtatagctgatatggctgtaagaaaaataatagaatgagatccgaaccactgagaaatcccaactgaagttcagtacggaatgatgagaaggtcaactatcgcctcaaaaaatagctaatacgatattcacttaaatagacttgtataagaatcggacgaccatgttcttgaaattgtaatgactgtcatttaaatctctaaatagcatttttcttttgtttaatttttacgtcttacgtttttgtttacaattcaatgctagcagcggaaatcttaatagcttgccaacgcattaaaaacatgctgaaatttattgcattcaagatccaatgtgtctcaaaacagaggatatagtccaaagaattgtttaaatttctgttctttagaaattgaataagttcagccaactataaaaagaatttaaattcattcgcaaacaattgaccttgaaatcaattcaaacaagccacattgaaagttgtgctaagtactaaagtaaatgcttgctctatgaattagttattcaatttgaatgaaattgaaagagtctttgatcaaatatcgaaatagactttttgcaaatatttagctataagggtaaggctcataatttacgcagtgataacttatttgaatttaatattgaatctaaatgaatgtttcctctgaccaggtctaaatctataattaaatttcccgtggccagtactgatcccgagatgggagtgaacttattacacccaccagcctttatgacatcgacgccagtgggataccagcgctcgccctgccttaacagcagcagcaccgtattgttggccagggtgcgaaagtattcgccatcctcgatttgggttccatcacactccagaacaacgcgcaccggttctgaagcaggaacccccagcttatccttgccgcggaccaagagctcctcgaaggtcccaactacgacgcccttgcgcacattccgccagctgtcccagattttcagtggtctcttgccgcgagactcctgcgaagagaaattcggattagttgcgttttacgaattacaattccaactgctggcgaaggaagggaaagtgaaagctgagatgtgggaggatggggatgtgggatgtgggatgcagggtgcagggtgcaggatgggcgtgacacctgtgaaacgctgcgcacgaaaaactgacaagtgggtgtggcagcaggcccggactgtgtcataatttcctcagcccgctaattgggcttctctggcttggccaaaaagggcgcaaatgtcaaggccacaactgctgcactgctcatattaattgtagatatcttatggaataaaagttgaaataaatccacggccctcacattcgaaataaagcaaatgcaagtgctaatgcttgaaaatggaaacatatatgtacatataaaaagggccaaagaaaattgaaaacgaatccttttggctaacagcgcgcacagctgttggctaacagttgcaggcaacaacaacaacgaccagccagccagccagccagccgagcaggacgaaagctgcaatgtttaatgtattgcaaggacatgagtgtggcgctccagtgacccagtaacgagtgcagcacacgagccatatacaaatatctctcttcggccaaccaagcccccaaatcccccgatccaccgatcccccagttcattccccgcccgttcacccaaaataaaatgtttgaaaaattacaaaaaattcatgttgacattttgcttattcctccgcaccgaaaacaagcagaaacttttcataaaaatatttcatttccctcgctctggccagtgttttgtgtgctctactcgccgcctcatccctctccatccaaaccatcgcaccgattttcctcttgggataggtcagttgctgcaccccagcaccatatggcaccgagggagtgcagcgggtcggggatgtgctggctattataaattatgaaactgataatactataaacagcgagcactgccagttctaaggctcgataaatcatattatgccgtaaaacaattgttggagaactggttgaatatcgtagcactttaagattgtgtgacttagctttaaaaaaaggggaaactttagaaaacaagtgggtaatagtacctaaagaaaatgtataacatacgctaaaggtgatgctttatcttccctaagtaaaatagtaagatatttcatttcatgcaagaaaagaggcaaaccaaccaccaacaggttgaataatttcaaatgaatttccaaaaaccattaaactagttattgagcagtattgcccaacaagctattcgattaaccagtgtgaaatgcatttgaggaggtatttagaattggaggtggaattggaaaccaaactggataaaggacggaatagattgagtttgatctagaaatgaaggacatttgcagtcgatgaaagctaaacactgaataagtatgggtcgcaaagcgaaactattaccattgcggacagtccgccgtttgtgaccgacgacgagggccccgttgtgatggccccaccacccactccggccccacccgccgccgcggcagaggcagctacgccctgcgtggcctgggccgccgccgcagctgcggctgccacttgtctgatgctcagacagttgcagagcggcttcgtcacgcccagcgtgcacagggcgttggaccacatggtggtgctggtggtgctgttggtggtgctgctgctgccagccacttttaggccgagtctctgcgctggctctgctggcttgcttgcaatggttggcctcgtcgcttccaaggtcgtcttacacttggagctccaagctctggtaatccatgtccgttttaaaaatccgttatataaacccgtaaccgatgtacgccttacaaaatccggagttgcggatgcttttaccaaaagttctacaaaaattaaagcttattgcttattgttggagtcataaatgccttgcgttcagggggaaaattcgtaattacaaaaattgttaagggggtcacgaaaaaaaaaacgcactttgcacaaaatacagcttctggtataaatgttatcgtccacgttatttggttactttagtttgttgtaaatactggcagagttgaagtgcctagaatttcgcttttcactgctcgtacttcgcattcgcattcgcattcgtatttttggggcaggtcagggcgggttgaccttcgcactttcactttacggatactacgcgcctgcagcgcccttttgcccgtgaaaccgccgagttttcattttcatttgatgctgagtcccagttattagacttaattatagctcgtttttagaaacttgattttgtagaaaaacgcttgatttgtttagttatagcacccagtgggaacgtggtgtttccacgggccaaagcagcgtccttagctgcctgtgtgcctggcagcctggcagagcaaactgtgagttttcccgacgagatgctgcatcggatttcactacggtagcagctgctgcttctgctgctgcttcttctttgacttttggggctgggtgcgtttttgcagcgcgttaacagcgcttgaaatgagcacgaggcataagcgcgagagaagtgcagtgagaacgaggtgaaatgcagcacaaagctttgcgagagcgagtaggacaggtggaggagtgggggtagaaatcccgttactactatctagtcaatttaatgccttcagtttttaggtccccaattaaaccgtatttgttttatccaccccactatttcccatttactacctttttttccataattttcgatgttttaacaggtaaagatatttcgtcgtgctttggcctacatttgcatcaatgtgatataatcaggacgccaaagcgcgcgcaccttctccctcgaaacgctttaccagcatttcataagatcccatcagtttgattttgtaaacatttacttccaatcaacggcgttcaattaatagtgttgctattggattgtgtgccccaggaaaatatttagctttcttttagacctgatcttgctcgacatttaaactctagcattaaacattgaagtcttttaataaaaagggtgagacagagagagagtgatgcacttttatatgaagctctctacctctcgcaaaagcattgccagctgtaaatgtgaatggataacagagcactaaaactcctgtaattgctgctggccgagatttttaattgcagtaagaagaaggagagataaagttgttttgtttatcctaaataatgccagatcaactgccaactgaaagccatctcggctgcatttttatcagctcttaaaggaattccagcgctttgggaattcgcaactaatttatttttggagacatcctctcaaagcaacaattttggaaaggccagagagcgaaattcctttcaaagggggcgcgagaagaggaagaagaacaacagttgcagccacacgtgggatggaggcggcgggaaaggagggcgttgggggagtggcacatctgtgaggcgtaagtattacctcagttatttgggtcaaagctattcactcacccgcaaagcaaaacgaaacgaaggaactgcataaaacatgcacaaacacacacacatatgcagagcaggagcttgagggacacgcacacaaagagactaatgcgggccacaggcttaataggtttctctagcggatgcggacgcgagtgcggagcatccgcagcgatacgccttgctagatacactcgccaaaggttgtcatatgaaaaattcacatagatggagcagagtgcctgtagtttaggccaggcatgaatcgtatccattgcacccatactcaagcagcaaaataaaaatttgcctaatcttctctagaagttgatttattcatgcatcctgttgtgttgctctataaagaacctatctttcgttcagctgaccacgtaaagaacaaaatatctacaaagaccaagtcaaagaaatattaaaatatattataaattttactttgttcaaattgcatgttattaaaaaaaatctattacctagtattatttttgattattttgtttctactgcttaattaaaaaattcattcctacagagaataattatttgttacacgcagcatttttattattaagttgtagtgttgggttaaacttctttggaaaaatatgacatagggttaactgttttaatgttgggagaggctaacaccgttggttgcagatgtgaatgatgggggatggtgatgaagtgagaacagctgattttggcaaagtaacttgcggtaccgtggtgatcgggaaaactaaaacggttaagccgtagttgccggctttgctttgcttttagcacgtttgcacttacctctctggccattacgacatgttatcaccagcggcacccgcttagagggtctgccatttgctcagcggcaataacaacaaaaacaacacgggagcgcctcttagagcgagggagtgggagaggcaacaacaaagcacacgcttttcgcgatacgagaactctcgtgcgtctacttaagtatgtgtgtgtgtaggcggcaagcggtatagacggagagacagagagaaagagtgtgggaggagtgtgtgcgtgtgagtgtctcaaaaattctctactacacgtttattttcaatcttctcttcccgcacatttctccaacgcgccgatgctgtttcgttcttcctcttgcttttctatcctgtcctttggcttcctttccttcttcctctccacaccaatcactgcgtgggtatgtgtgtataggtgtgtattggaattcgcaaaggtatttgattaggaaagctgggatttgtttaaacaattagcatgcatcactttttgcaaatttgttacagtaacttgggtcaacccacgcccacttttataggtgcggctgttgggcaggatttgctttttggcagtggtggtggtgtacgtgtgcgggatgcttctgtgtgcgtgcgagagagcacattggagtaccgttatcgctggagccacattttcttatttgacatacacttttttgttgcacacgcacacgcgtttcgttgttttttttttgttactttagtaaaatttattttctatactctctttcttgaaagctttcttttaaccgttttttgtccttatctcttggtatgtacgacacacacgcttcacatacgttctagtttttggcagttgttcaattgttcgaattaattccgatttcggaatttgttgttttaacgatttatgagttttttcggtgcggaaacaataacatttaattcattttaagccgagaagaaatgcaaatcaatttttattttcggcaacactcgaagaactatcgttatcgattgcgatttcttttacctgtagtatttcgtgtaacatacttttgggtggtgcagaaaagagtcacgctcgaatatactaaactgggctgccaacttagcttttgatttgttttcttgattttatattaacacaccaaataaagaaattgcttaagacaactgtcccttttaagatattatttcccagattaatatacgtatatttgattattggtgacaattttggatacaaaagccaaagttatcggccactttaatactaataaaatatgaccaatatttggcatttcttgtctaaatatttgcagccactctaagattaatattttaccaacttcttttagcaataaaaagtaaatatctttactgaaaacgtcaactaaggtctcccacatacaacttaaaatggacgacatacgtagcagcatagatgatatgatggaccgctttaacgacagcattacccattcggcacccaagaaactacttttcaaccggctttccgcctccttcgatttaggagtttgtaagttgtaatttacaggcgcgaacgtagaaactaacaagtaactcctctactagcacccaataagcgacgtcgggaacgggaatcaccggaacgcagtcttaacgacaccgcctcttccctcaatatgcccgccaacgattccatggcttctttgcagaacagcaaactacggaccgagctgatcgaaaccaaggccatagtaattcagctgcgtaacgaaatcgaaaagaagagccgggaacacaaagaggccatattgctggctgagaacaagagcacggccttaaaggatcagtgcgacatcaccagcaagaagaatttggagctgcaggacgatcttaaggcgcttcgtaagcgagagctggtcttgaagaatgaggccagtcgggccaccgccgagttgaaccaacttaggcttaagttcgatgaatccacgctcaagttgcagaagga

SEQ ID NO: 2948 - DNA, 2546 bp, DROSOPHILA
cgagtgttgccgaaaataaaaattgatttgcatttcttctcggcttaaaatgaattaaatgttattgtttccgcaccgaaaaaactcataaatcgttaaaacaacaaattccgaaatcggaattaattcgaacaattgaacaactgccaaaaactagaacgtatgtgaagcgtgtgtgtcgtacataccaagagataaggacaaaaaacggttaaaagaaagctttcaagaaagagagtatagaaaataaattttactaaagtaacaaaaaaaaaacaacgaaacgcgtgtgcgtgtgcaacaaaaaagtgtatgtcaaataagaaaatgtggctccagcgataacggtactccaatgtgctctctcgcacgcacacagaagcatcccgcacacgtacaccaccaccactgccaaaaagcaaatcctgcccaacagccgcacctataaaagtgggcgtgggttgacccaagttactgtaacaaatttgcaaaaagtgatgcatgctaattgtttaaacaaatcccagctttcctaatcaaatacctttgcgaattccaatacacacctatacacacatacccacgcagtgattggtgtggagaggaagaaggaaaggaagccaaaggacaggatagaaaagcaagaggaagaacgaaacagcatcggcgcgttggagaaatgtgcgggaagagaagattgaaaataaacgtgtagtagagaatttttgagacactcacacgcacacactcctcccacactctttctctctgtctctccgtctataccgcttgccgcctacacacacacatacttaagtagacgcacgagagttctcgtatcgcgaaaagcgtgtgctttgttgttgcctctcccactccctcgctctaagaggcgctcccgtgttgtttttgttgttattgccgctgagcaaatggcagaccctctaagcgggtgccgctggtgataacatgtcgtaatggccagagaggagtctcgcggcaagagaccactgaaaatctgggacagctggcggaatgtgcgcaagggcgtcgtagttgggaccttcgaggagctcttggtccgcggcaaggataagctgggggttcctgcttcagaaccggtgcgcgttgttctggagtgtgatggaacccaaatcgaggatggcgaatactttcgcaccctggccaacaatacggtgctgctgctgttaaggcagggcgagcgctggtatcccactggcgtcgatgtcataaaggctgccatatcagctataccgaaaatcgtctgtgagacgattcatgcgctggagttgcacgatgagacaccgtcgtggaagatcatggataacaaagggcgtgtcacggtcgttctgcactgggatcagcggcagggtggaggaagcggcggcggaggaggaggcggtggcgccggcggcggagtggggagcatgtgctccggcctgggcagcagcaatgggctgctgtcgtccgataagtactcgccctcaaagaagggcctctccgcgcagagttcgctggacaacaagtcggtgtcgtcgcagtcctcccagccgcgctatgccagccctcaaataacggtgatcagcgacgacggaccggcgagcatataccatcccggtggcgttgttctgccgccaggagttgtgatacccggcggcagcaggcgactctccaagcagggaagctccttcgacagcaccgtaggcgtgggtgtgggagctgtccatgtgcacacgccggaatgcgcccaccacgcccacacgcccagcagggcgggcagtcccagcaccaccgagtgcgacttccactgctgtgcgctgcacgaggaggggcgcaagatcgctgtgcacaagagcgtggccacgtcgcccatccaggacggaagcagcagtccccagccgcagtcggcaccatcggttatggatcctatgctgggcggcagcggtggcggcggaagcggcagcatgcaacgccgctcctcgggcgccaagggccatgtgcgattcctggacatcgctcccgagcgggatagctccgagagcgaaacggagaacacggtgatggaggacgacaagacgacgacggagaagtttctgctgctgatcgaccagttgtcggtggaccagaagcgtcacctcagcatcaaggacatcggcatcatactggaacgcctcaactccaagatccttgacgtggagcgattggatcgcgagtccgagtcagacgactgctacaactggacgataaaggcgacaatacgcggcgatgcgctgcgcgaactgggcgtcatttacaatggcaattactatgccatctctgagcatcctggctacaaggaggagctagaggagaacggcgaggaggtcgaggaggaggaggaagaggatgaggaggacagaatttagactaaaaaattatgtgtagtagataaagaccgcccccgcatggccgacagaatcagccgtagatccattgggagtatgtatcagaagacatcacacgatcgcaatcgaaatcgtaattga

SEQ ID NO: 2949 - protein, 482 aa, DROSOPHILA
MAREESRGKRPLKIWDSWRNVRKGVVVGTFEELLVRGKDKLGVPASEPVRVVLECDGTQIEDGEYFRTLANNTVLLLLRQGERWYPTGVDVIKAAISAIPKIVCETIHALELHDETPSWKIMDNKGRVTVVLHWDQRQGGGSGGGGGGGGAGGGVGSMCSGLGSSNGLLSSDKYSPSKKGLSAQSSLDNKSVSSQSSQPRYASPQITVISDDGPASIYHPGGVVLPPGVVIPGGSRRLSKQGSSFDSTVGVGVGAVHVHTPECAHHAHTPSRAGSPSTTECDFHCCALHEEGRKIAVHKSVATSPIQDGSSSPQPQSAPSVMDPMLGGSGGGGSGSMQRRSSGAKGHVRFLDIAPERDSSESETENTVMEDDKTTTEKFLLLIDQLSVDQKRHLSIKDIGIILERLNSKILDVERLDRESESDDCYNWTIKATIRGDALRELGVIYNGNYYAISEHPGYKEELEENGEEVEEEEEEDEEDRI

SEQ ID NO: 2950 - DNA, 5507 bp, DROSOPHILA
caaagatgacatttcgttaccactgattctagagatcttttgttccaaaatcaatttgtgaccggttttccatttcttagtgccgcacccacaccgtcccccttttctatacaattgttattttcctatcttttttattttattaagaaacctacaacaacaaaagttcgatacgatagcttcttcttttccacttgattatattattattattattgtatacaaatcttttttttttttgttataatcgtaagtgcaatatttttattattaagttcaaatgaacaaaggcaaaggagtccacagaccaggagataaaacccagacattaatcatcattgaactattgttactcattgttaattcacattatcatatatatgcacatatgcaaaaggtaaaataaatcaaaagacgaaaatcgaacaaaaagaccatttgaccccatatcggcattaatccttaattgtgctattcgcggacgacgaacacttgtaagacaattgggcacaagcataaggcaaattgaaacgcaaaagaacgattaacattctttatgtgtaactttattgtttataaacaaaaagcactgatgtgttgtacatatagtatgaataaaacgatagatgcggaaagaagaatccccataccagcaaattgcatcggatgtttgttttctaattaggcaaattgatcacttcaaattttgaattctttttttcgcgtatttgtattaaatcagtacgaatgtccagtgcaattgaacatatacggtgtctccatgcttcaaaatgcattcgtcatttgctgtgtttttaatttataatgaatgagcgtattacaacataagagcaaattcccgacttggtcaggaggatatcatgagaaaaaggttgcttcctgtgtaactaatcgtctacctttggctagttaaaaaaaaaaaagaatcgaaatcgttgatagtttgttgggtggtgggtgggtggtatggccgtaaatctcacacctggcggattgcatccgcaatgtgagcggagatcaattcatcctcctctttcggctgggtcttttgctggggataaacgtattgatcgtccttgaatttctcaatatccgtgataataaatgcattgttgaatttagcgggcaggaagacgatattcaacttgttttctagtgaataaaatagatcgtcttcgtcctcccccttcaacccctccttctccttctcctcctcctcctcctcctccgatgactcctcttcctcctcgtcctcgtcatcgtcatcgtcattttcagattcactctcatcatccgatttgctagcgcattttgccgtgtcttcgccacacaatggttccggcatacctgctggtcgatggccaatcacctgcacggatagctttctcatgttatcgccgtcaatgcttataacaaaattaatgatctcatccttttgaagcgtgcgcaacacttcaatctggcgacgtcgacgatcgaacagataactttcgttaatgatctcgtcccaattgcgactcatttccgtgctcaatgccaagtccgccaccagcttcagcttgatcagagagtcgcgagtgtgttcgtattcatcctgaggcaggtggcgcagaatttgcagcattttggctcggaacacctcgatgcggccctccacatagtcggccgtcgtctttgtctcctgtgagttaaccataatggaatatccagcaatgccgtagttgagtctaacagtggcgcccacatggtagcccagctgctcctttgttctcaattggtcaaacaatggttcgtccacgaacatcattaacagatcgagaatgctctccacacgaacggtattgggtccgatttgatagaagtttgtgatcaccgtgtttgtatcctgcacgttgagcgcatggcatcggataatactagttcccaccggcagctttacggtaatatcttccaaaaagcgtccacgctccctgatctgcttgcaattgagtcgacttagcaacgagttcattacattatgagcggactcttccgtatagttgccctggatgagagactggatgtatagttccttcgggaactggtgggcgaactcgcgcatatcctccaaaataacactgctgaggcacttgtacttgttgatcatcagccagcggattcgttccagcacacagagacgaatatctctgaaaaagagcgagaaagatgtatagtttagtatcagcattgtgtaaattcagggatttcttacctgttgagtgcctttggcttgatcaaagcgttgaagaaggctttacgctggttctttacaaaggcagaaagcatattttcgtcgagcgtctctgccacattgagcatgccttcggcaatggcttccacgatgagatgcagtttttcattgtagccgcacaccttgaggagcaagcccttttcgatggtgcttaaggagtaagagagtccggcacttatggctggataaagttcctcgcacacatggaacctgaccatttcctcgtaaagtgagcacatggcatcgctgaacgaaaaattagatgttaatatatgagagaaacttagaaaactacactaatgtatgtactcacttcttggcattttgccgctgcatcggcgagataaaatagaaagccatatgggcttcaggtaaatcgaacttatcatcctggcggaaccagagctcgcaggtgtccgtcttgatcagcaacttcggggaatcgggaacttccggccttcccatcgaatgccaatgcagtgtgaagtcatccgtgacatatttattcgactcgggcaagaacaattccggaaggggcaccgaatcctcccacagcttgcgccacttctctggcattggaatggtggcgtactcagtgccgaaccactcctccgtcttatcataggcggagatgtcatcatactttctgcgtgaggtcaccatcaggttgaacttcatctcattcaggtggctaatcagttctttgagatgctcctcattgtactcatagtagagctccttgccggtgagaatatcttttggtgggaaatacttcaaattcagcaccagctcctgtacattatcaaaggctggacgctgagcatggaaacggaaaccggtttcctcattgcgctgttgctcctcgtaaacatccttcatggaaccgcagttggcgaagagcttgacgtaggcaaacgttgcggccaggacctcgtccagattcttaaatccctcgtcggtgagataaatgcaaatgttaaacagggaatacatggagttcatatcgaagccgttttcatcgatgccagcaatcagttggagagcccataagcggcgtctcaggtaggcgcacaggctgccacgtccctcgtagcccagcagatacgagaggaactggtcgggcttgctgcggtaatactgacgcacattcggcagcacccaagtcagctccagtttggtctcgttctccaccggcttgacgaagaagacttgctcgtggaactcggccttaaaggcgtccttgtagttgaagctgctcaaatcgggagccttcacctcattgtgcggaataccagagaagtggcgcaccacgagtgattccagctcatcgatgggcaaacgagcctgcaggcaaacgtacatgcgattggcgccatagtgctctttgcggatctcgtgcaaaatcttgtgcagctccgcgtcgtcaacgttctcttttagcgacttcatattgccccaggcaaaggtgccgtgggggaaacctttcgtggccaaactggccagcagttgatcacgcctggtctcatcatcctgaagaatctgctggaactctgagtccacagcgctgcgctcgcgttgcatagcctcttgcttcatcagtggcgccttcatcagggccgtaaaatagtccaaactggagtccagatgcttctcggctacctcaaaatagaaaagcgtgtcctcgcagtcagtgttggcattggcaaagccgccgcatttcttaatatgtgcatcgaaaatgttctcctttgggtacttctctgagcccataaagatcatgtgctcgagaaagtgtgccagtccctggtattttgtgggctcagcaaaagacccatagtcaatcaatagggcgcaggcggccagcttttcgtcaccttcctcgctgctcgattcctcgctgctttcactatcggtggaggtagatgaggtggattcactgcgtgagattatggaactgctggtcgacacggtcgacttagacgaggacgactcggatgtggtgaagccatcgtgtggcatgggactgggatcggagacaatcaacgcatgcaatccattccccaagagaagtgtcctaagtgaagaccaaccattgaatccagttcaactgggttaatagtccgctacttacttgtaaagcttcttgtccgtttccgacttgtccggtatgtccagatacttgacctggtcggtcattttgcacaacgagctgtatgtgatcgcccgtacgccggctaattgagtaattgggctccggcgttttgtacgtacgtgaaattcgaatcgtctaaacaaatgtgcgctgtatcgctgccagagcatgcaaaactcgaatgagaatgagacttatggcaatccgtatcaactgggatcggagctatggaaaatccacggggaaaaaatcacaggctgtcaaatagcaaacgcaaaggcaactattttatatgttaacgatacaaactattaatcgaaagacgtgggcttagtgatggaccaggtccttgggtgtcgccttatcgataacgtcgcaaatgtcaaatggcttgtgtggcggtatttttacatatagggaaatgaaaattggaaaacattttgtgatgtatgacagtgttcttcatagctaattgattagtgattcagtgtggtcttagacgaagaaaaaaaaccacacataacaattctatcaataggtaataaaaaataccaaaagctttgcaccgattggcgcgtgcagatatcgagaaccgataggcttcgataggtttggacaaataacgtctggtatcgaaaggaaattgtgttgattccaaataaatccgattccagcggagatgcagtcgcgcagcaagtccgatatgaagcccatacgaaaggagatcctcaatccgggaaacgcctacatcgagctaaccccgggcaccagggtgagttactaaaaccgcttggcagtttggcaggtttagttccatctgcgacagcaaaagcaaaacagtgggaaaatgggccaaggccagtgggtggtgcagccaacagagactcactcctcatgatattggccttttccaggtgaagttccactttcaaacgcggagggccggcgacagtcgcatcatcgatgatagccgcaagatggagaagcccatggagctggtcctggggaagaagtttaagctagaggtctgggagctgattgtgc

SEQ ID NO: 2951 - DNA, 3234 bp, DROSOPHILA
atgaccgaccaggtcaagtatctggacataccggacaagtcggaaacggacaagaagctttacaagacacttctcttggggaatggattgcatgcgttgattgtctccgatcccagtcccatgccacacgatggcttcaccacatccgagtcgtcctcgtctaagtcgaccgtgtcgaccagcagttccataatctcacgcagtgaatccacctcatctacctccaccgatagtgaaagcagcgaggaatcgagcagcgaggaaggtgacgaaaagctggccgcctgcgccctattgattgactatgggtcttttgctgagcccacaaaataccagggactggcacactttctcgagcacatgatctttatgggctcagagaagtacccaaaggagaacattttcgatgcacatattaagaaatgcggcggctttgccaatgccaacactgactgcgaggacacgcttttctattttgaggtagccgagaagcatctggactccagtttggactattttacggccctgatgaaggcgccactgatgaagcaagaggctatgcaacgcgagcgcagcgctgtggactcagagttccagcagattcttcaggatgatgagaccaggcgtgatcaactgctggccagtttggccacgaaaggtttcccccacggcacctttgcctggggcaatatgaagtcgctaaaagagaacgttgacgacgcggagctgcacaagattttgcacgagatccgcaaagagcactatggcgccaatcgcatgtacgtttgcctgcaggctcgtttgcccatcgatgagctggaatcactcgtggtgcgccacttctctggtattccgcacaatgaggtgaaggctcccgatttgagcagcttcaactacaaggacgcctttaaggccgagttccacgagcaagtcttcttcgtcaagccggtggagaacgagaccaaactggagctgacttgggtgctgccgaatgtgcgtcagtattaccgcagcaagcccgaccagttcctctcgtatctgctgggctacgagggacgtggcagcctgtgcgcctacctgagacgccgcttatgggctctccaactgattgctggcatcgatgaaaacggcttcgatatgaactccatgtattccctgtttaacatttgcatttatctcaccgacgagggatttaagaatctggacgaggtcctggccgcaacgtttgcctacgtcaagctcttcgccaactgcggttccatgaaggatgtttacgaggagcaacagcgcaatgaggaaaccggtttccgtttccatgctcagcgtccagcctttgataatgtacaggagctggtgctgaatttgaagtatttcccaccaaaagatattctcaccggcaaggagctctactatgagtacaatgaggagcatctcaaagaactgattagccacctgaatgagatgaagttcaacctgatggtgacctcacgcagaaagtatgatgacatctccgcctatgataagacggaggagtggttcggcactgagtacgccaccattccaatgccagagaagtggcgcaagctgtgggaggattcggtgccccttccggaattgttcttgcccgagtcgaataaatatgtcacggatgacttcacactgcattggcattcgatgggaaggccggaagttcccgattccccgaagttgctgatcaagacggacacctgcgagctctggttccgccaggatgataagttcgatttacctgaagcccatatggctttctattttatctcgccgatgcagcggcaaaatgccaagaacgatgccatgtgctcactttacgaggaaatggtcaggttccatgtgtgcgaggaactttatccagccataagtgccggactctcttactccttaagcaccatcgaaaagggcttgctcctcaaggtgtgcggctacaatgaaaaactgcatctcatcgtggaagccattgccgaaggcatgctcaatgtggcagagacgctcgacgaaaatatgctttctgcctttgtaaagaaccagcgtaaagccttcttcaacgctttgatcaagccaaaggcactcaacagagatattcgtctctgtgtgctggaacgaatccgctggctgatgatcaacaagtacaagtgcctcagcagtgttattttggaggatatgcgcgagttcgcccaccagttcccgaaggaactatacatccagtctctcatccagggcaactatacggaagagtccgctcataatgtaatgaactcgttgctaagtcgactcaattgcaagcagatcagggagcgtggacgctttttggaagatattaccgtaaagctgccggtgggaactagtattatccgatgccatgcgctcaacgtgcaggatacaaacacggtgatcacaaacttctatcaaatcggacccaataccgttcgtgtggagagcattctcgatctgttaatgatgttcgtggacgaaccattgtttgaccaattgagaacaaaggagcagctgggctaccatgtgggcgccactgttagactcaactacggcattgctggatattccattatggttaactcacaggagacaaagacgacggccgactatgtggagggccgcatcgaggtgttccgagccaaaatgctgcaaattctgcgccacctgcctcaggatgaatacgaacacactcgcgactctctgatcaagctgaagctggtggcggacttggcattgagcacggaaatgagtcgcaattgggacgagatcattaacgaaagttatctgttcgatcgtcgacgtcgccagattgaagtgattggccatcgaccagcaggtatgccggaaccattgtgtggcgaagacacggcaaaatgcgctagcaaatcggatgatgagagtgaatctgaaaatgacgatgacgatgacgaggacgaggaggaagaggagtcatcggaggaggaggaggaggaggagaaggagaaggaggggttgaagggggaggacgaagacgatctattttattcactagaaaacaagttgaatatcgtcttcctgcccgctaaattcaacaatgcatttattatcacggatattgagaaattcaaggacgatcaatacgtttatccccagcaaaagacccagccgaaagaggaggatgaattgatctccgctcacattgcggatgcaatccgccaggtgtga

SEQ ID NO: 2952 - protein, 1077 aa, DROSOPHILA
MTDQVKYLDIPDKSETDKKLYKTLLLGNGLHALIVSDPSPMPHDGFTTSESSSSKSTVSTSSSIISRSESTSSTSTDSESSEESSSEEGDEKLAACALLIDYGSFAEPTKYQGLAHFLEHMIFMGSEKYPKENIFDAHIKKCGGFANANTDCEDTLFYFEVAEKHLDSSLDYFTALMKAPLMKQEAMQRERSAVDSEFQQILQDDETRRDQLLASLATKGFPHGTFAWGNMKSLKENVDDAELHKILHEIRKEHYGANRMYVCLQARLPIDELESLVVRHFSGIPHNEVKAPDLSSFNYKDAFKAEFHEQVFFVKPVENETKLELTWVLPNVRQYYRSKPDQFLSYLLGYEGRGSLCAYLRRRLWALQLIAGIDENGFDMNSMYSLFNICIYLTDEGFKNLDEVLAATFAYVKLFANCGSMKDVYEEQQRNEETGFRFHAQRPAFDNVQELVLNLKYFPPKDILTGKELYYEYNEEHLKELISHLNEMKFNLMVTSRRKYDDISAYDKTEEWFGTEYATIPMPEKWRKLWEDSVPLPELFLPESNKYVTDDFTLHWHSMGRPEVPDSPKLLIKTDTCELWFRQDDKFDLPEAHMAFYFISPMQRQNAKNDAMCSLYEEMVRFHVCEELYPAISAGLSYSLSTIEKGLLLKVCGYNEKLHLIVEAIAEGMLNVAETLDENMLSAFVKNQRKAFFNALIKPKALNRDIRLCVLERIRWLMINKYKCLSSVILEDMREFAHQFPKELYIQSLIQGNYTEESAHNVMNSLLSRLNCKQIRERGRFLEDITVKLPVGTSIIRCHALNVQDTNTVITNFYQIGPNTVRVESILDLLMMFVDEPLFDQLRTKEQLGYHVGATVRLNYGIAGYSIMVNSQETKTTADYVEGRIEVFRAKMLQILRHLPQDEYEHTRDSLIKLKLVADLALSTEMSRNWDEIINESYLFDRRRRQIEVIGHRPAGMPEPLCGEDTAKCASKSDDESESENDDDDDEDEEEEESSEEEEEEEKEKEGLKGEDEDDLFYSLENKLNIVFLPAKFNNAFIITDIEKFKDDQYVYPQQKTQPKEEDELISAHIADAIRQV

SEQ ID NO: 2953 - DNA, 6196 bp, DROSOPHILA
cagccaaagccgcgcttcatcttcaagatgcctcgtgtggtcccggaccagaagtccaagttcgagagcgacgaacttttccggaggctcagtcgggagagcgaggttcggtacacgggctatcgggaacgaagcatcgaggagcggcaggtgcgcttcatgaacggatgtcgcgaaggacacacggaggccagcttcgtggcatcgggcaccaatctgcagctggtgttcaacgccaaccagaacccgtacctgcacgacaaggagtgcgactttgacaaggagcacggcaaggtgcacatcaagtcctactttatcatgaacggggtttgtgtccggttccgtggatggatagacctggaacgactggacggagttggctgtctggagtatgacgagcggcgcgccatgcacgaggacgccattctgcgggatcagatcgatcgctacaaccagcgactgcgtgagttcgaggacactaagcgcgcctaccgtgacaatcgacaggacgagatggaggcagtgcgacggggcgtggcctccggaggcattggcgttggcgccagcatgtggcgtcgttagttggacctgtggacggctcctgggccgtcccatccgcagctgcctccccagcagcagcagacgcatcaccagcagttagagactcaattcgcgaatactcaatatttcatggacaactgagaatgctccgaaccccttaagagggctttcacttgagagatttcaatacgattacgttagacacgctcgaataattatgctcctagattagtgttagatgtaatgcttactttacgtatgcttttatggtattatacttacaacttagtgtgaaattagtgtcgtatctttaactaaaatacataattactaatctatatggcattgttcattttggaatttccacctttaagcagagtgactaagactcttcactgggaattgcctaccgaggctaggtatcgatcaagaaaacaagtcgtttggtttgattttatagcattataatatacagatactgaactttatacataataagcaaggatcgtgtaaaactaaactatggggtctcgctcggcgtgttggaaacatttatattaaaagcgacaagctagtccgtcctagcggaattgcaggtttgaaatgcgcaggccaatgctatccttgccgatctggctcacttcgcaaactgtgcagagattgcccttgaactgagggtcgaaagaggaggagcagaagggacaggtcacttcgggtttacccctatacagtggcttccagctgatgccgcagattgtgaacggattaaactcctcgtactgcagctgatgctcgtccacgggatttacctcgcaggcctgcaggatcttgcgcacctgctgggcaacgtccggtcgtggcgccagttccaggagacgacgggcaaatgaggcggccgtcttgtagttcttcagcttgaagaacatattgagggcggtacgcagggtgaggatttggtgcacgggctgaagcttgcagtgcgtgaagtaggcggccatctcgcacagacgcttttgctcctcaagcgtcgacttgggcatgcccttgcgcacagtctccatcttcaggccaacgatatactcagcgcagatccttaagagttgctgggcctccgccgcatctagcttcgtgtccactaccagcagtgggatgctaatcaagatggaatggaacttctctactgcctcggagaactttccagaagttgtcagttggtacccagcttgcaggcgtgccaccaaatcattcagtttaatgccaaccgcaggacgctgcagcttgatgtttgtctcggagtagttgcgaagtgggtaaccacttagggattgcagattcggattggccgtgtagctcgttcgagagcaggcgtagttctgcaggaagagtgtcttgaatggctggaaattgaccactcccagctgatcgtgcagtaaacggaaggcggtttcgaatgatccggccttgacatggtccaggaccagaggcgagttgttggcccattgttgggcaggagacaagcctttgttgggagccgcatagtagttgctgtcgagggctgaggccttgatcttggaggccagttcctcgggcacaaccaggtcatcatcgcccacatcccagccggcaccctcctctccacccgcaccaccatcgccatcgttgctcagcgcgtcgtgcatctcgtcatctccgtcttcatctagtcccaagtcggcatccgctccccaaccatctccaccaccattatgctcgtccaacagtgcagcatcggcgttgatgttcagcgcctgtcgggcagtggcactggagccagccctggtgaccatggcgccttcaaagaagcccttggacacggacagcaacggccaattggtttcaagctgctggatgggcactggtggctgcaacaactgggcattgggattcacctcgggaaggctgttaccctgcgaggttatcgattcgcccagggactcagtgagctcatcgaatccatgagtagcggctgtgagataagctaacgaaagttgtccgcagtttttgaggatgtttacccgctccttgacgtcaccgagaaggagggcaccctggtactgggcggaaacatccttgcgaatctcggcaatcttgttcatcttcttgagcttctccaagttgccggtgatcaggtagaggaagctaagcttgtcaaagttcttggtccgctggtagcacatctctaccacctggtggtttccttggagcagcgcactctgtcccaggcgatcccagcaatccttgtcatcgagagccttggctgcttcgagagcaatttcgatgttaccgcactccagagcgagtccaaatcgggttttctcatccttgacaaaatgcagtgccacctctggataacccttttgctgcaggtaagcaatgatgctctgacccactaggcgggcatttctcaccatatgcagtacttcatcgtacttgcgttgaatcagggcaagcttaaacttgtactccgtaggatcgatgtggagcacacgggtgcggcactcccggtccaagcagaacacttggttgcccttgacgcgtgtcagataaatgggtaggtccagcgtacggatgatgccgtggtccccgtttgtaatggcgtacttaatgtggttgctagtggtgtagataaacactccagactcgtcccaggcgccagacttcacgcggcagttctcctgcacggtgcacaagtactgaagtcttcggtcgcagattgtaaccgagtgcttgcagagtagagcgaccaaggacatgtccggagaccacaccacgtagcggcacttggccagtttaatgcttccaacggagactaggcgctgaacttcgtacagtgtgacaaactcagggtcccgaatgagcagcattcccgtaccggcatagaagatctcctcgcagaaagttggcaacttcttggtcacctcattcttgaagttcttgatcaccaactgctggttgcgatcaagcactgcaaaccgattgcgtgccacccagatggccgtgattccagagcttcgcttgctgtccgactcactttggctctcggtgtccttggggatttggcaaagatcgtaggtgctgttctccaggttgttggtgcgcgtgcagattagcacggcgttcagtgctgggttgtacgacatgctgtacaccggcgacttgcctggtcgaagctgcataaccacagtgtccttagtggtggtaaagtccagtttgcgaaggaaacgttccttgacgtagtagagaatattcccgtggacagcatatgcaggacgctctcgctccagtttaaagaccaccatacctgaaagaatatgtatcattacaaaaaattcctattcctaaaagaaatcaactaacctccatcgtggccagctgcaaacagattcagggtcggatgcgctgtaagtatccagaagcgctcgttgtcccgccggaatgtaaagaggcactggcgcttggtcatgtcccagacgcgaatactgcgatcttcgccgttggagagaatcaggtcttgcctgggatggaacaacacgctggacacgttgttgtagtgaccgcgacaggtgtcgacctcccaagccttgtactcgttcatgcgccacaacttcacaaggcgatcatcggcaccggagacaatcagcggcagggtgggatggaaactggcccagttgacgccacggtcgtggccctcgagcacgtgcttgaccacggcatctgcttggccaaacagatcagtggcacccggatgaccctttaggtggtcatcaagcccaccgggcccgggagccacgttcttcttacgcagccccgaaatgtcccacacgcgcaccgtctgatcgagtgaagcagaaacgatctgatcctccgtgggatggaactgggcgcacatcacatagtggttgtggcccgtcagcacgcagatgcagttgcgcgactgccagttccagatgcgtatggtctgatcgtcggaggcgctcagaatccatgggtattcgtggtggaaagccaccgtgcgcacatagtccaaatgggccaggagggtaaaaatgcatcggcgttgcttgtagttccacaccttgatcttgtagtcgtcgccgccagagacgaagagcggcatctgctggtggaaggccacgcctcgcaccggtccgtcgtgctcgtcgaacttctcgaggagcgtgtgcatccggtagtcccacagctggatgacgccgctgtgcaagctgaccaggatccaggggcgcttagggtggaaggagaggcccttcaccctcgccgacttcgactcgaagttggtcagcatggtggcactttttctgttctgcctgtaggtgtctcaaattggatgcacttctaggtgtcggcttatccgtcaagcgccctttttttgctggttcgagcacttgcctgtatcaaaacatcaagaggtgggtgttagaacaaacccattttattgatacgctacaagtaacacgtaatatactgccaacaattaattttatgaaaaacaccaaccaatcgtcgaaattgtgacacgtcaattatcttcttcttcgcgacccagtcagtgttgccagcgttggcagatgtgcatacactgggaaccataagttttcaaaagtacacacatgaatatgaatgaattatcatgctctccagtcttctttatatagttaaatatacagattttacgtgatatttttgaatatatttaatcttcgtcaataatattcgaaaattgagttggtaaatgtatttctacgaacacttttagtgaccactgtaatcgtagttttacagcactggacaaagtgcattctattcacggtaacttcgctttgtttattttctgtaataccatggaaaatatataaataagtgacaaagatgacactggcacaccgggcgctcttcacttggtttatcgtcctggtcttcctgattcttctgtgtctccgcctggacccacgcaccacctggaattggttcgtcacctttacgccactctggttcttcgatgtgatcattatcatctacgtgatcattaaatttatccgcaagtggcggaacctaacctgcctgacggatctcctgttcctctacaaatggaacattgccggcgtcctgctgaccatcgcctcccaagtgatgatctgcctaacgctggagtacccgcaacagattcccatatacgtgaccgttgccccggtcatcctgctgctgagcaccgccatcttctatgttggcagcaggctgggaaaacgagagggctggatacagtaatattaagcatatattgtaggattaggtgtacataaagtgaaaactcaaaagccgtatttgctttgggtggcccgacgggtctgccggttggccgaccacatggcctgcagctcggcttcgttggccttcgccttgtgcgccaggtaggtgatctggtgcttgcgccgagtccctgccaccggctcctcgtccgtcagcacgccggtcggttggaaggtggtggacgaagccagagccgatcgcatccattcctcgcgatcaggtagcacctgagacccagatatgtcgatcacctgcatctccttggcctcct

SEQ ID NO: 2954 - DNA, 4032 bp, DROSOPHILA
gtatgcacatctgccaacgctggcaacactgactgggtcgcgaagaagaagataattgacgtgtcacaatttcgacgattggcaagtgctcgaaccagcaaaaaaagggcgcttgacggataagccgacacctagaagtgcatccaatttgagacacctacaggcagaacagaaaaagtgccaccatgctgaccaacttcgagtcgaagtcggcgagggtgaagggcctctccttccaccctaagcgcccctggatcctggtcagcttgcacagcggcgtcatccagctgtgggactaccggatgcacacgctcctcgagaagttcgacgagcacgacggaccggtgcgaggcgtggccttccaccagcagatgccgctcttcgtctctggcggcgacgactacaagatcaaggtgtggaactacaagcaacgccgatgcatttttaccctcctggcccatttggactatgtgcgcacggtggctttccaccacgaatacccatggattctgagcgcctccgacgatcagaccatacgcatctggaactggcagtcgcgcaactgcatctgcgtgctgacgggccacaaccactatgtgatgtgcgcccagttccatcccacggaggatcagatcgtttctgcttcactcgatcagacggtgcgcgtgtgggacatttcggggctgcgtaagaagaacgtggctcccgggcccggtgggcttgatgaccacctaaagggtcatccgggtgccactgatctgtttggccaagcagatgccgtggtcaagcacgtgctcgagggccacgaccgtggcgtcaactgggccagtttccatcccaccctgccgctgattgtctccggtgccgatgatcgccttgtgaagttgtggcgcatgaacgagtacaaggcttgggaggtcgacacctgtcgcggtcactacaacaacgtgtccagcgtgttgttccatcccaggcaagacctgattctctccaacggcgaagatcgcagtattcgcgtctgggacatgaccaagcgccagtgcctctttacattccggcgggacaacgagcgcttctggatacttacagcgcatccgaccctgaatctgtttgcagctggccacgatggaggtatggtggtctttaaactggagcgagagcgtcctgcatatgctgtccacgggaatattctctactacgtcaaggaacgtttccttcgcaaactggactttaccaccactaaggacactgtggttatgcagcttcgaccaggcaagtcgccggtgtacagcatgtcgtacaacccagcactgaacgccgtgctaatctgcacgcgcaccaacaacctggagaacagcacctacgatctttgccaaatccccaaggacaccgagagccaaagtgagtcggacagcaagcgaagctctggaatcacggccatctgggtggcacgcaatcggtttgcagtgcttgatcgcaaccagcagttggtgatcaagaacttcaagaatgaggtgaccaagaagttgccaactttctgcgaggagatcttctatgccggtacgggaatgctgctcattcgggaccctgagtttgtcacactgtacgaagttcagcgcctagtctccgttggaagcattaaactggccaagtgccgctacgtggtgtggtctccggacatgtccttggtcgctctactctgcaagcactcggttacaatctgcgaccgaagacttcagtacttgtgcaccgtgcaggagaactgccgcgtgaagtctggcgcctgggacgagtctggagtgtttatctacaccactagcaaccacattaagtacgccattacaaacggggaccacggcatcatccgtacgctggacctacccatttatctgacacgcgtcaagggcaaccaagtgttctgcttggaccgggagtgccgcacccgtgtgctccacatcgatcctacggagtacaagtttaagcttgccctgattcaacgcaagtacgatgaagtactgcatatggtgagaaatgcccgcctagtgggtcagagcatcattgcttacctgcagcaaaagggttatccagaggtggcactgcattttgtcaaggatgagaaaacccgatttggactcgctctggagtgcggtaacatcgaaattgctctcgaagcagccaaggctctcgatgacaaggattgctgggatcgcctgggacagagtgcgctgctccaaggaaaccaccaggtggtagagatgtgctaccagcggaccaagaactttgacaagcttagcttcctctacctgatcaccggcaacttggagaagctcaagaagatgaacaagattgccgagattcgcaaggatgtttccgcccagtaccagggtgccctccttctcggtgacgtcaaggagcgggtaaacatcctcaaaaactgcggacaactttcgttagcttatctcacagccgctactcatggattcgatgagctcactgagtccctgggcgaatcgataacctcgcagggtaacagccttcccgaggtgaatcccaatgcccagttgttgcagccaccagtgcccatccagcagcttgaaaccaattggccgttgctgtccgtgtccaagggcttctttgaaggcgccatggtcaccagggctggctccagtgccactgcccgacaggcgctgaacatcaacgccgatgctgcactgttggacgagcataatggtggtggagatggttggggagcggatgccgacttgggactagatgaagacggagatgacgagatgcacgacgcgctgagcaacgatggcgatggtggtgcgggtggagaggagggtgccggctgggatgtgggcgatgatgacctggttgtgcccgaggaactggcctccaagatcaaggcctcagccctcgacagcaactactatgcggctcccaacaaaggcttgtctcctgcccaacaatgggccaacaactcgcctctggtcctggaccatgtcaaggccggatcattcgaaaccgccttccgtttactgcacgatcagctgggagtggtcaatttccagccattcaagacactcttcctgcagaactacgcctgctctcgaacgagctacacggccaatccgaatctgcaatccctaagtggttacccacttcgcaactactccgagacaaacatcaagctgcagcgtcctgcggttggcattaaactgaatgatttggtggcacgcctgcaagctgggtaccaactgacaacttctggaaagttctccgaggcagtagagaagttccattccatcttgattagcatcccactgctggtagtggacacgaagctagatgcggcggaggcccagcaactcttaaggatctgcgctgagtatatcgttggcctgaagatggagactgtgcgcaagggcatgcccaagtcgacgcttgaggagcaaaagcgtctgtgcgagatggccgcctacttcacgcactgcaagcttcagcccgtgcaccaaatcctcaccctgcgtaccgccctcaatatgttcttcaagctgaagaactacaagacggccgcctcatttgcccgtcgtctcctggaactggcgccacgaccggacgttgcccagcaggtgcgcaagatcctgcaggcctgcgaggtaaatcccgtggacgagcatcagctgcagtacgaggagtttaatccgttcacaatctgcggcatcagctggaagccactgtataggggtaaacccgaagtgacctgtcccttctgctcctcctctttcgaccctcagttcaagggcaatctctgcacagtttgcgaagtgagccagatcggcaaggatagcattggcctgcgcatttcaaacctgcaattccgctaggacggactagcttgtcgcttttaatataaatgtttccaacacgccgagcgagaccccatagtttagttttacacgatccttgcttattatgtataaagttcagtatctgtatattataatgctataaaatcaaaccaaacga

SEQ ID NO: 2955 - protein, 1234 aa, DROSOPHILA; identical to SEQ ID NO: 2934

SEQ ID NO: 2956 - DNA, 3914 bp, DROSOPHILA
tgaacaagtaatcttaagactaagatctgaaagagagagaaacctcgaaaatttggcaaactaattattaatcaccttgtttgtaaattgttttgaaaacctccaaacaaattcgaaactaatgatatatagaacagctgttgctctgaattttttgtttacctcttgtaaaaataacgcccagagattttcgttttcattaccataaaaataattcgcataccaaagtaaacatttgcgaacacaagaaccacaatgacgtgttcttttcactcaattcagagtatacaaattggttttatatacataaacaatagggtggcctgagggattattcaaaaaactttatagttttagagataaaagtaaataaataaccaactagatcatccaaaagacacttcagttcaatactttcgaaaaaaatcagtattcagatggcgttttcgaattggcattgcattcgttacgcgccatttcactttcaattttgaagatttctcaatctcgtttttcccgaaggcatggcatttgtatttcggtgtaattacccccgtattaccacaaacactcggggccaacgatgccaacagaaacagatgagtgtgacaacaggggaagcttgcttccatttaaaaataaacccgctgcactgcctcttccgctgggccgccaggcggagcacattcctctgcgggtgtttctgggcatgattaattatatcctcgtattcgatttcctctcgatttcagcgcacagagtacgtgaagtatgccaaagtgttcccactaacggcgctcttcggagtgaagataccctcgaaatggtaccgccgcaccgttggcatcctggagatcgtctgcggcctggccatggcgctgattccctatcgtaagtgtatggacttattaatacggcgcatcagtcggagtaatcactacttacccacagataaggtcaaaaacacggccaacgttacgctgctggtgttgatgctcctgggcatctaccagcactggatggtcagtgatccgttcgagcgctccggtccggcgctggtcttcaccttcatgctgggcggacgcctggtggtctggtaccagaccgcccgcctccaggacgaggccacgacggcagcgcagcctgctgcgaacggcgtaaagcaggactaggtgcctgctaccggtgcatcacgtactcatagtcattcactgatccagctttgttttagcaccttaagttgggctcgagatggcgcgccctgtctgcgggtctcaaattcattcacatcattctagcaaatcgaaattcatgttttcactttggtgccaaattattatcgtatacagaactactatattgtatgcaatggcgagagatattaactaaactgtagacgcgaccagatcaaaccagaatgtaatcaaatcctcttcgtaacgggcacttagtcggaaccatttaaattacgactttagaaacaattttaataaatttgaacaactcatacatatttaaaattaataatccaacgtcagtcaatctgaatttcgttttactttcgtcctcaaacgagcgattagcaggagattatgcggcattatactggtgctctaagctataactgtgccaaggaagcgattcctaaatacgtgtgaatgtggatgtgtacgccctactcggacccggtgctcagcagcttcagggccttctgcaggttctcgatggctgtcttgacgtcgtcgtagttgagggcactgccggcgtacttgcaatacttctgggcggtaatcatttggtcgggagtgatttgcaccccggccacgggcacaatgggctggtaaatggtggccgccgtggccggattaggctgagctgtgggcacgtagggcacaaagccgcccggcttctcctcgtccaccggtggactgggcaatttgttcgggttgttcagcacctcctcggcggtgggagggaccactccggaagttgtcggtgatgatggagctggtggctgtgagtcaggctccggctggtagggcgctggagcagctgctcccgcggcgtcctccggcgatgtgtctgccgaggcgttggcattctccccctcgagctccgcctcatcgtcgtcgtctggcaaggggccgggaatcggtgtctcaccgttcttcaggcaattgtggatgtaggcggccttccacttggcgtacttcctgttgtgcagcgcctcttcgctcagttcaccgaaggtctggagaatgtcgtagagcacaccactggagtagaaggccttaacgacgtttctgcgaagaagcacaatcttatgaatcaggaaaatcgattcagggtatttctacgaagggaacgcactttccgaagttctcctcgcgatcctgtttgtcggcgtacaggaatagtttcaaggcgtagttctcgatgtgtgcctgggcagccacctcgttggtgatggcctcgttctcagcatactgtttcttcatctgctccagccagtccatgatgcctggcggtcgtagggaaaaccaaaacaaaacaaaccacggatgagtcataggctggtaatatgcgtatcggatttttcactcacccagcagcagtttggtttcttcacccgtttgggtggaggctttgaggcccacctggagagcactggattcggaagatgagtaaatacgggcaaaacaagaaaaactaatctgtagatactcactagagtctcgcccagtaggcgatgaccacatcccgggtatcatgttcctgggccagcttcagaaagtgttggatggacttcagcgagggaggacaaggcggaaactccatcgtggtggaaagagggcttaatctttagttctatgcttaattacggatctggaaaattatgccgacaacaatggaaatgacgagcacgcagagtgaccagatatcgcagtttctcgaatgccatggaaccaccccagttccaaactctggaactagcgaaatactaaagtttgtaccttcggctaaagttgttggttcggcgctcagttgcgaatctgcgaccaaaacgtttggagtttctcaggtaagcactggactctgggaactggttttcgctgttatcagtgcgaccagttgcactttgcactttgacctgcatccttcacaccagtcacattccaggcacatctctgcaccaccggcaacatggttctctccaagcccctgtactcgctcttcggcacttatctggagcagctcttcaaccacccggtccgcaccaaatccattacggcgtaagtacactattcgccttatcatccggttcgcctcacccaccggctgctccttactgcagatgcgttctggccacctcggctaatgtcacctcccagcgtttggcgggcgccaagaccctcaaccagcagagcgtattcgcctacggactctttggactgatcttcggcggtagtgtgccgcactacttctacacgacggtggagcgactcttcagccaggatgtgcgcttccgaagattcttcctgttcctgtccgagcgactggtctatgctccgatttaccaggcactgtccctgttcttcttggccctgttcgaggtgagaatccataatccgcaatctcagttcctagaactataatttgtaatcccttacagggcaagtctcccagcactgcattgaagaatgttgagaagctctactggcctctgctgaaggccaactggcagtacctgtccgtgttcgtgtacctcaacttcgcctacgtgcccccgatgttccggtccatcagcatggccatcatctccttcatctgggtggtgtacatcgcccagaagcgtcgccgcttccaggacaagctggccgccaaagaggcagccaaataggctatacgaccct

SEQ ID NO: 2957 - DNA, 1702 bp, DROSOPHILA
ttccattgttgtcggcataattttccagatccgtaattaagcatagaactaaagattaagccctctttccaccacgatggagtttccgccttgtcctccctcgctgaagtccatccaacactttctgaagctggcccaggaacatgatacccgggatgtggtcatcgcctactgggcgagactctatgctctccaggtgggcctcaaagcctccacccaaacgggtgaagaaaccaaactgctgctgggcatcatggactggctggagcagatgaagaaacagtatgctgagaacgaggccatcaccaacgaggtggctgcccaggcacacatcgagaactacgccttgaaactattcctgtacgccgacaaacaggatcgcgaggagaacttcggaaaaaacgtcgttaaggccttctactccagtggtgtgctctacgacattctccagaccttcggtgaactgagcgaagaggcgctgcacaacaggaagtacgccaagtggaaggccgcctacatccacaattgcctgaagaacggtgagacaccgattcccggccccttgccagacgacgacgatgaggcggagctcgagggggagaatgccaacgcctcggcagacacatcgccggaggacgccgcgggagcagctgctccagcgccctaccagccggagcctgactcacagccaccagctccatcatcaccgacaacttccggagtggtccctcccaccgccgaggaggtgctgaacaacccgaacaaattgcccagtccaccggtggacgaggagaagccgggcggctttgtgccctacgtgcccacagctcagcctaatccggccacggcggccaccatttaccagcccattgtgcccgtggccggggtgcaaatcactcccgaccaaatgattaccgcccagaagtattgcaagtacgccggcagtgccctcaactacgacgacgtcaagacagccatcgagaacctgcagaaggccctgaagctgctgagcaccgggtccgagtagggcgtacacatccacattcacacgtatttaggaatcgcttccttggcacagttatagcttagagcaccagtataatgccgcataatctcctgctaatcgctcgtttgaggacgaaagtaaaacgaaattcagattgactgacgttggattattaattttaaatatgtatgagttgttcaaatttattaaaattgtttctaaagtcgtaatttaaatggttccgactaagtgcccgttacgaagaggatttgattacattctggtttgatctggtcgcgtctacagtttagttaatatctctcgccattgcatacaatatagtagttctgtatacgataataatttggcaccaaagtgaaaacatgaatttcgatttgctagaatgatgtgaatgaatttgagacccgcagacagggcgcgccatctcgagcccaacttaaggtgctaaaacaaagctggatcagtgaatgactatgagtacgtgatgcaccggtagcaggcacctagtcctgctttacgccgttcgcagcaggctgcgctgccgtcgtggcctcgtcctggaggcgggcggtctggtaccagaccaccaggcgtccgcccagcatgaaggtgaagaccagcgccggaccggagcgctcgaacggatcactgaccatccagtgctggtagatgccc

SEQ ID NO: 2958 - protein, 316 aa, DROSOPHILA
MEFPPCPPSLKSIQHFLKLAQEHDTRDVVIAYWARLYALQVGLKASTQTGEETKLLLGIMDWLEQMKKQYAENEAITNEVAAQAHIENYALKLFLYADKQDREENFGKNVVKAFYSSGVLYDILQTFGELSEEALHNRKYAKWKAAYIHNCLKNGETPIPGPLPDDDDEAELEGENANASADTSPEDAAGAAAPAPYQPEPDSQPPAPSSPTTSGVVPPTAEEVLNNPNKLPSPPVDEEKPGGFVPYVPTAQPNPATAATIYQPIVPVAGVQITPDQMITAQKYCKYAGSALNYDDVKTAIENLQKALKLLSTGSE

SEQ ID NO: 2959 - DNA, 10893 bp, DROSOPHILA
tcgagccgctctcgttagcaaacagctccaacacggtggagccatcaacagtgctccgcctacttgtcctctgtgacgcctggcaagttctttttattgaatacagttgttcggccaagaccacgcctactgcttccacacacaaagagctgcacactagtggtcattttcaaaagaaagctgttcacaaattgaaatttttgtgcctcgcggttgagcgttaatggtggctatttttcttgaattatttatttgctcatgatttgcggttggtgaactgcaggcaaacaccaaaattccattatagtaaacacactttaatagtttaatgcctgttttccagcaaatgcccaaaagacactcgattgaaggaaagatgcagccaaataggctaaagttttgcttggtatggcaaaattccgatttttgacgagcataataatgcccatttgactaacagcaaatggaaggagcagattcgagggccagaacttttccctaacgatatctgctcttgttgcaagtttggcgaagttatcaagtagcaacaagaattggtctgagaacggagtgaggaaaatggacggtcagtcgccaacacatgtcaaagtttcgcaatttcaaagattcttcattcccaatttgtttctcccttacgaagatgattttcagcaaccacagagccgagtactggatcacttaagatgtttccgttgcgtggcaagggaaactttgctgttgaccgctcattggccacccaaacaccccctccttggtattaatccattaataactttgcttagcttgcggcaggcacttcattttccagcaatttcatatccgaccctcacattgttgctctggcctccgggctctccctctaccgccggggaaattttggggcagggccatcctcataaacttcagggcgtgtgacatcatcggtgaacgtcacgtgtcggctactgtcgcctcgaatctcgatgtcctggagttttgcatgacggtgcaaccggctgaaatggcggtgacagaaattacagagactggcgaattaattattgcacactttctggagcgagcgtaggataggaggtcggaaagattggcaaaacaaaaaggtcgttaacattacgtcagcagcacaattttgtaaccaatcttcttggtaactggtatttctttaaggcagtgccaaattctttttgggatgcatgacatttgattttgacttaaaacaaaaacttcctatttcaattactaagtgtgaaaaagtttcgctaagctaagtttccttagctttatgccaaggaaccgtttatataactgagctgcgataaattagcctaatttatgcaaagctaaatccttaagtgaagctaaaggcagagacaaaagcagccggaagtgcaaaagctgctgcagctgggcccacaattagtttaaaaagcgtcaaactcttgatatttgcatttagcgaggatgactatgataaataattttgccattgtttcccgtaggaaaatggaagatcagttcctgatgtcaccgcaagcccgggacgggccccgcccggaccactgcccgccaaccagatgcctgcgatgggcaaccagcaacaccatggaaaccagcaacatcatggaaaccagcagcaacatcatggcaatcagcacagcaaccatcgaggtcagagcggaagtttgtcaaacgccgccggggtcaaggacccggtgatgctacagggcgattttcggaaagtcagcggaatcagctcagagatctttcggcagatagaagccgtcgagaatgaccacgacccaaacacggcggcggctttggaggcggtggagagacgcggtgagatgatcgtgcgcgtcctggagccgcgttgcatgggcagcaaacaggcggtggacgctgcccacaagctgatgaacaaggcggacgcacggcacaccgtgcagctggtagaaatagtcaagcggccgggccagacgctgggcttgtacatccgcgagggaaatggggccgatcgaactgatggcgtctttatttcgcggattgcactggagtcggctgtctacaacagcggctgcttgcgggtaagtttattccgaaacttataaccggacataaaaataatcccatataattctaggtgggcgacgaaatccttgcggtaaatctggtggacgtgacacacatgtccttagacgatgtcgtcattattatgtcaattccgcgccgcttggtgctggctatacgtcagcggcggggcaatagaggcacaggatctcctggaccgccaacgctctctaggccagaacagaagcccccaccggttgttgtcatcaagcgagatttgcgagacgaggatctggacgagacggaccggatgccgaggccgcgctcatcacgtgacagacgtacaggtagtttgaaatggacgccacgttcacctatctaatcgcttgcttctcttctatttcttccaggagatggtcgcgaaatgacggaatctcgttctaggctaggtctgggtcttaataattacagcccgcagtccgagcagttggatatgtactacaatacccgcggcggaggtggaggagccatgggtgagcctccaaactggggctataaaccaccaccgccaccgtcttcggtcattacggagcaacccacgaaagcacatgcttttgcgccgtcgcatgcttactaccaaaatgccggcactcttgaaagcttggcggagaaggtacatgcattctatcctggacagcctggtggtccgccagtgggtccctcgagaagaatgtcaacgggaactggaaacgttggcctcgctcagcaacatgccagatttccgcgatctggctcagatcagcatttacctcgcgtagaatattcggactattccaattcactggggcggcattcccttctgcgatcaagtttaaaacctggaacgaccggtggagctccaatgcaggtaggagtgggaggcactcttggccgatacggccgctatgatcaacagagagccggtgtatccaagtacggccctccatctggtggagctcaatcgctgacccgtcgttccagaccaaatttggactattccagcgatacggaagccacaattgggcccaggccaagttactactactataacagacctgccatcggcagtatgtcgaggggatcaggtggagcaggcggaggagttggcgcagcttcaacggctgccttgctggctggagctgctgatcttaacaaatttaactcgttgccacgagagcgccccgggacgagactgcagggaattcgttccagaatgggagatcgtttggtggacgaaaatgacggaaatacttcggcacccgagttcgatgtacggagaggaagggacttacgtcagcgaattaccgccagtccgtcgatatttacggcagatgaataccgcgcctggctcagaagggcgcctagcagttccgcaattgcggaacaaatgcgaatgacgcgggacatgtttgcccagccacgggctcagcgattttcgtgtagcgctgagaacatccatgatgcactgagaaatgtgagtatatatattgctgatgaaagccctaacctattggataacgtcattttaaattcatttagacggaaagcatctactccagtagaaaccatattcttggtacgggcactctcgatcggaacatgggtcttacccgaccaatttcagcactacccgtgcgctccatgtcctcacagcacattggaggagcgggttccattcgttcgcctagcatacggcgcatgcgacagttactggagctttccgctggtcccgccagtccgagcggcagtatcttgagcaccggtggtcatcagagtccggcaccaactccaagcgcgaccctaccacgcccgcaccgccaaatcgacatcaacccggcggagtttgccaagtacaagctggataagcccatcgttgatattggggggatctccggcatgttatggattcatttgctagcaggtcgcggcctaagaaccgctccagagggagcagcaggaacggcgacacagggccaaaccagagatctttactgcgtaatcgagtgcgatcgagtacataaagcacggactgtggtacgatcgggtgacctgcagttcgactgggacgagtcgtttgagctcgacttggtgggcaacaaacagttagatgtactagtctactcatgggacccgcagcacagacacaagctgtgttaccgaggcgcaatctcgttatcgtcgatcctccgtcagtctccacttcatcaactggccttgaaggttgaaccaagaggtacgatatacattcgcatgcggcacacggatccactggctctctacaagagaaggggacttccgagcctgagagcaggttaccctacgctcttcggcgctgatttggaaacggtggtgaatcgggagtctaagaatgctcccggaagtgcacctgttcccatcgtattaaggcgctgtgtggaggaggtggaacggcgtggtcttgatataatcgggttgtaccgcctgtgcggctcggctaccaagaagcgattgctacgcgaggcctttgagcgcaatagccgtgcagtggaattgaccccggaacatgttcctgacatcaacgtcatcaccggcgtcctcaaggattaccttagggagctgcccgagccgctgttcacgcgctgtcttttccagatgacggtggatgccttaggtgagaacctttaattttaagaagattttttttaaataccaattggactgtctttatctaatatatagctgtctgcctgccagatgacccagagggcaatgcgaaactgatgcttagcatactcgactgcctaccgcgggcgaacagggtgagaccggtcgtttttaaatttaagaaacgtaatctataatctgtataacaatttcgtaattgaacaggccaccctggtattccttcttgatcacctctcgctggtcgtttcaaactcggagcggaacaagatgtcagcccaggcgttggccaccgtgatgggcccaccgctgatgctgcattcggcgagtgcgcagccgggtgctgacatcgatcacgctcagccgatcgcggtgcttaagtatcttctgcagatctggccgcagccgcaggcgcagcatcagcagatggcgcagcacatgggcggcgctgcgggggcaatgatgggcggtttggtcaccgccgggagcatgagcaatatggccggtgttgcttcaggtaacgtactcccagcgtccgattgatttcctaccccagagctaccagaaagccccatccccaacacttaacaaaacacccaccgattattgccaccacacttgcaagagtttgattcatattttcgttcctgctttggatgcatagctgcatcagcagcagtttcaagtccaaatctgtgccacccgctcgttcttcaatataaagtgcgtcacaaaaccgttcttactgttagcttttatgcaacctacccagacagaagtacacaccgtccccatcacccacacacaacggttgccacttccaatgctattttcagcttaattacgtcttaattcaaagccagccacaattttgattccgattttaatgccaataaagtgggtgcgatgcacaatttgtatgattggaagaacgcttaagaaaacatatgttttgacttgactaaatcaatagcagaatatattttaagacgcatggaagcaatcaagtggtaaccgcagtcctctctcacctgaccctctcagccactgaaaacacttcaaagcgcgtccacattaatattgattaatacagagtcctatgtagacaggtcggcgcggcgagtcaacagggcagcgtggaagcaaagtcagtgcgttgccagcggacagacagcaacttctactgcagcagcaggcgcagctcatggcggcgggcaatcttctgcgctcgtccacttcggtaaccaacatactctcccaaggccatcctcagctctcagccacagccaacaatcatctgtatcaatcagtagtgggtcagttagctcaatcgcatcgagccttgcaacaagcggtgcaacaggtaaacaaacagaatccacacaacacagcaaccaaaacaaaacagccgaagacgcgaacaatgaatacaacagagacatacttttccagaaaacttgcatacaaacatatcatccaccataaacccacaccacacacacacacacacacacacacaccccccccctaacatccatatttcaatgtgatggggcaaaagattggatgcattttaaatctaaatcatgcattttaaatttaaatctaaatttacatccaagtcacttttaaatttgtaattcctgatttcttcaaactaagggaagtaactttacagaaaacaagagaggaggctatagtggccattagagtgggcgggtctaaacatttttcgcgtattgaaagaagctggtatgacaaatattaaaatcaaaacatgtcacaagtgtgggcgaaattcctgttcatatgggacataacgttcatttagttatttattcgggaaatcgttaaccgtgtcattttcattattatcattcattttacactaaccctaaaaacacggatacacagaaacacgtacgctgaaaaatgttccttcttcttttcctgttgaccgttctgcaaaagatgaaagtttaaaaaatatttgtccattgaactattcaatattgaagcattatctgttattaactttttttttgctttttatgaaaacaatatattataaaacctatattataatagtaaagtaaacaataatttgctgtgatccttgatcgatagacgttgtaattgtgatacataaatgtatacgtacattcataatctatacatcagtctgacataatgatggtgatgatgttaatggtgttaaacggcgtgcaaagcatgattggcccactactggtaacaaataaacatactcgtaacgacagttttccccaaacataattatttcactcccatttaatatgtaaatcatacagctttgtatgcctacacataacaaatgaaagacacatcttataaaagcttcattaatatcgagtgccactgccattgtaaaaacttcaccaatcataccaaacttgcgtttcattggaattgcttacacacccgccccaggaatagatttgctcctcttgttggttcaagcccacaacccaagtccccgacaccttggcgcattaattttcccagagttcgaaagcacagcttaaatagtgtagaacatctcaaagacggaggggaaacgtatcggagcatttaattgttctcggaagttcagttgaatcctattccctaagttgaaattttcgtttaaagccttaaatccacagtccagtaaaaccgctcttactcaacgcactcagttcgacttaaatgtcactgaagatttttaaaagacacatatatatttttagttaacatattattgaaagtcaatttcaaatagtgaaattgaaatttgcttgcatgaaatacaaatcacgccttatcacaagccaataactttaccaatgcccacatagtcacccgaatcccaataataacatgtaattggttaacgaattggccgtcacctgtatgagaatcgcaccgcgcacgcagtgaaattgtcttttgtctatgaatataaatatgctcctgtatgtgtcacacatttacccacttgaaaacaaacattaacattaacactaagccccgaaatgattcaaaatttgaaattcttactgcaccacccaaaaccaagaatttgcacgtattgacgcccttaaagctactttcagccttaattgacgttcagccaacatataaccaactttgcgggaattcccctgctctcctttccgttcgttattttcttgcagccctatcaattggggggctcagtgggctcagcaattcccgacccatcgccactgccacttccaggcacaccctcccccggcagtagctcagcatcgacgggctcaggctccggatcgggtaaaagtaagtaaactcaaatgttcctacgcttatgtcggttgcattgtgtttgttattagagaggaaagataacgaggcttttgtaattttctgcaggcacggacaccatcaagcgcggtgcttcgcctgtttccgttaagcaagtcaagatcgtcgaccagccatccagcccatactccattgtgatgaagaaaccgccgttgcaaaaagatgcgcccgttgaaatcaccacccccaccacacaggctgatacagagtcgaccttgggatgcaaggaaagcaatggaacagcttctcgaaggggaaatgtagacttttatgatacgcataagacgcaggcaaagagtgtggtaaacgaggaatccagctacagctccaagtacactggctcggagaccaagaagatcatccctggcaacagtagctacactcccagcaaggcgaatgctagtggcctttctggcggcgaagactacaaagcaatgcgtaacaagtcgagcgctacatccagctccagttcatcgcaggcaaccgttttgagtgctggctctaccgccacatcagccccgaccacttcttcagacgattcggatgacctggtctcctacaagtcatcggcgtccacaaatgccttgctggcccaatcgcaggccatgaccaccagccagctgatgtccaagtatcttaagcgggagccacgagtacagtttacgccaatcaagtcaccggaatctccctcgccaccgggtagcggcgatggtctgccgaagggtacttaccaactagttacgcctatctcgggatcgtcgagcaaaccgggtgctacaactggagctataagcaagtataccaccggctcagtggaatcatctattaatgcgaacagccagaagttgtcatcgccctcacgattgtgcaacagcaaggatagcaatagcaggactggaacggccagtagtacgacccccgcgacctccatggtttctacaggtcggcgtttgtttgacagtctcgcctcttcatcgtcctcggaaacggagaccaagacgtacataggtggcaccactgcagccagtggagccattaccaccaccatctacaccaacgacaccaagaactccggcagcagtagcagtaagtcgggaataggaggagggtctggaactgggttgggagcagtttcgggagcaagctccgagacccgaagcttcggcagtacgctatttggcagtagtggcttaggtaatggcaatggtagtagccacaaccactctagcgccagtccaagtcccttcaccaccaccaacggcaacggtaaccacaataccatgcatctgtacggcaccttgcccaaaaacggaacttccacgggggcagctctgtttggcggatcggccaacagttcttcgtaccactcttcggcgagtggaagtggagccggaaccgccagcagtagtggggtcagctctatgactggctccacaaacagctacgacttctacacgagcacaagttccactgtgagcagttcgcgcccctttgccaatggaggcaacaactatcacacactgggaacctatagggctcagtacgccgccactaaccccttcctggacgcatttgatgaaaagccgggcagcaacgggggtaatgcccacggggaggagaagctaggcgcggacaagggccaccacagagcggccgttatggcctttcagtcttcaggagactcgaaaaacggtagcgatgagtacgatgacatcaagtgaggtaggaaaaatgctataaatacggttaggggcaaggaatatagatacaactacgattatacgcgtacaattggcgaaagttaaaaaaatctcaaagctagtcttccttatttaatctttcttagtctttcttagttcaccttcaccttttcggtctgcgaaaatggatcgtttaaaatatttgtgggcatcgaaaagcgatcaactgtcaactgctcgactgcagtgcccttgattaaactttatttcccactctatcaattttatcggaaaacatcaaggcgatcttaccctttcgccattgcattgctcgcgtactatcgtagttatgtaacaactaatgtcacacaatgctgaaagtgttcttttgaagtatttacagtttacaaatttacaaagtacgatcgataattgcatataacgccacaatgaggtccctttaagctttaaagctagcataatctacatacaaaaactaaaatagtcgccgagctctgtgtatgtgtttataaatacttgtgaaagcttatccctgatagcgttaaaagtcttgaagcgcttgacagtggtttgcagtttagctaacataaatccgaattcaaaaatatttacgaacagtatttttaatgaactaaaatatacattgaataaagtcaacagcgtatacaataaatgacacttaagaaatacaaatagaagaacttacccaaaaggttgaatgcgcatttaatttttcaaaacatacttcaatatcaacttacaccgtgattcgttactgatatttcgcagtggaaactgtatataaggagagctattataatctacccacgtaatctcttttgtgggcgtttaaatgtgaccaactctcttatctgcaaaagcaatttacacgactatgacaacctgtccaattaaatgttctacgactttttgagcaacatatttgcctaaaatgtttcgccccatgcctcttttataaaacttaaatatgcgcatgtga

SEQ ID NO: 2960 - DNA, 5535 bp, DROSOPHILA
atgacggtgcaaccggctgaaatggcggaaaatggaagatcagttcctgatgtcaccgcaagcccgggacgggccccgcccggaccactgcccgccaaccagatgcctgcgatgggcaaccagcaacaccatggaaaccagcaacatcatggaaaccagcagcaacatcatggcaatcagcacagcaaccatcgaggtcagagcggaagtttgtcaaacgccgccggggtcaaggacccggtgatgctacagggcgattttcggaaagtcagcggaatcagctcagagatctttcggcagatagaagccgtcgagaatgaccacgacccaaacacggcggcggctttggaggcggtggagagacgcggtgagatgatcgtgcgcgtcctggagccgcgttgcatgggcagcaaacaggcggtggacgctgcccacaagctgatgaacaaggcggacgcacggcacaccgtgcagctggtagaaatagtcaagcggccgggccagacgctgggcttgtacatccgcgagggaaatggggccgatcgaactgatggcgtctttatttcgcggattgcactggagtcggctgtctacaacagcggctgcttgcgggtgggcgacgaaatccttgcggtaaatctggtggacgtgacacacatgtccttagacgatgtcgtcattattatgtcaattccgcgccgcttggtgctggctatacgtcagcggcggggcaatagaggcacaggatctcctggaccgccaacgctctctaggccagaacagaagcccccaccggttgttgtcatcaagcgagatttgcgagacgaggatctggacgagacggaccggatgccgaggccgcgctcatcacgagatggtcgcgaaatgacggaatctcgttctaggctaggtctgggtcttaataattacagcccgcagtccgagcagttggatatgtactacaatacccgcggcggaggtggaggagccatgggtgagcctccaaactggggctataaaccaccaccgccaccgtcttcggtcattacggagcaacccacgaaagcacatgcttttgcgccgtcgcatgcttactaccaaaatgccggcactcttgaaagcttggcggagaaggtacatgcattctatcctggacagcctggtggtccgccagtgggtccctcgagaagaatgtcaacgggaactggaaacgttggcctcgctcagcaacatgccagatttccgcgatctggctcagatcagcatttacctcgcgtagaatattcggactattccaattcactggggcggcattcccttctgcgatcaagtttaaaacctggaacgaccggtggagctccaatgcaggtaggagtgggaggcactcttggccgatacggccgctatgatcaacagagagccggtgtatccaagtacggccctccatctggtggagctcaatcgctgacccgtcgttccagaccaaatttggactattccagcgatacggaagccacaattgggcccaggccaagttactactactataacagacctgccatcggcagtatgtcgaggggatcaggtggagcaggcggaggagttggcgcagcttcaacggctgccttgctggctggagctgctgatcttaacaaatttaactcgttgccacgagagcgccccgggacgagactgcagggaattcgttccagaatgggagatcgtttggtggacgaaaatgacggaaatacttcggcacccgagttcgatgtacggagaggaagggacttacgtcagcgaattaccgccagtccgtcgatatttacggcagatgaataccgcgcctggctcagaagggcgcctagcagttccgcaattgcggaacaaatgcgaatgacgcgggacatgtttgcccagccacgggctcagcgattttcgtgtagcgctgagaacatccatgatgcactgagaaatacggaaagcatctactccagtagaaaccatattcttggtacgggcactctcgatcggaacatgggtcttacccgaccaatttcagcactacccgtgcgctccatgtcctcacagcacattggaggagcgggttccattcgttcgcctagcatacggcgcatgcgacagttactggagctttccgctggtcccgccagtccgagcggcagtatcttgagcaccggtggtcatcagagtccggcaccaactccaagcgcgaccctaccacgcccgcaccgccaaatcgacatcaacccggcggagtttgccaagtacaagctggataagcccatcgttgatattggggggatctccggcatgttatggattcatttgctagcaggtcgcggcctaagaaccgctccagagggagcagcaggaacggcgacacagggccaaaccagagatctttactgcgtaatcgagtgcgatcgagtacataaagcacggactgtggtacgatcgggtgacctgcagttcgactgggacgagtcgtttgagctcgacttggtgggcaacaaacagttagatgtactagtctactcatgggacccgcagcacagacacaagctgtgttaccgaggcgcaatctcgttatcgtcgatcctccgtcagtctccacttcatcaactggccttgaaggttgaaccaagaggtacgatatacattcgcatgcggcacacggatccactggctctctacaagagaaggggacttccgagcctgagagcaggttaccctacgctcttcggcgctgatttggaaacggtggtgaatcgggagtctaagaatgctcccggaagtgcacctgttcccatcgtattaaggcgctgtgtggaggaggtggaacggcgtggtcttgatataatcgggttgtaccgcctgtgcggctcggctaccaagaagcgattgctacgcgaggcctttgagcgcaatagccgtgcagtggaattgaccccggaacatgttcctgacatcaacgtcatcaccggcgtcctcaaggattaccttagggagctgcccgagccgctgttcacgcgctgtcttttccagatgacggtggatgccttagctgtctgcctgccagatgacccagagggcaatgcgaaactgatgcttagcatactcgactgcctaccgcgggcgaacagggccaccctggtattccttcttgatcacctctcgctggtcgtttcaaactcggagcggaacaagatgtcagcccaggcgttggccaccgtgatgggcccaccgctgatgctgcattcggcgagtgcgcagccgggtgctgacatcgatcacgctcagccgatcgcggtgcttaagtatcttctgcagatctggccgcagccgcaggcgcagcatcagcagatggcgcagcacatgggcggcgctgcgggggcaatgatgggcggtttggtcaccgccgggagcatgagcaatatggccggtgttgcttcaggtaacacaggtcggcgcggcgagtcaacagggcagcgtggaagcaaagtcagtgcgttgccagcggacagacagcaacttctactgcagcagcaggcgcagctcatggcggcgggcaatcttctgcgctcgtccacttcggtaaccaacatactctcccaaggccatcctcagctctcagccacagccaacaatcatctgtatcaatcagtagtgggtcagttagctcaatcgcatcgagccttgcaacaagcggtgcaacagccctatcaattggggggctcagtgggctcagcaattcccgacccatcgccactgccacttccaggcacaccctcccccggcagtagctcagcatcgacgggctcaggctccggatcgggtaaaagcacggacaccatcaagcgcggtgcttcgcctgtttccgttaagcaagtcaagatcgtcgaccagccatccagcccatactccattgtgatgaagaaaccgccgttgcaaaaagatgcgcccgttgaaatcaccacccccaccacacaggctgatacagagtcgaccttgggatgcaaggaaagcaatggaacagcttctcgaaggggaaatgtagacttttatgatacgcataagacgcaggcaaagagtgtggtaaacgaggaatccagctacagctccaagtacactggctcggagaccaagaagatcatccctggcaacagtagctacactcccagcaaggcgaatgctagtggcctttctggcggcgaagactacaaagcaatgcgtaacaagtcgagcgctacatccagctccagttcatcgcaggcaaccgttttgagtgctggctctaccgccacatcagccccgaccacttcttcagacgattcggatgacctggtctcctacaagtcatcggcgtccacaaatgccttgctggcccaatcgcaggccatgaccaccagccagctgatgtccaagtatcttaagcgggagccacgagtacagtttacgccaatcaagtcaccggaatctccctcgccaccgggtagcggcgatggtctgccgaagggtacttaccaactagttacgcctatctcgggatcgtcgagcaaaccgggtgctacaactggagctataagcaagtataccaccggctcagtggaatcatctattaatgcgaacagccagaagttgtcatcgccctcacgattgtgcaacagcaaggatagcaatagcaggactggaacggccagtagtacgacccccgcgacctccatggtttctacaggtcggcgtttgtttgacagtctcgcctcttcatcgtcctcggaaacggagaccaagacgtacataggtggcaccactgcagccagtggagccattaccaccaccatctacaccaacgacaccaagaactccggcagcagtagcagtaagtcgggaataggaggagggtctggaactgggttgggagcagtttcgggagcaagctccgagacccgaagcttcggcagtacgctatttggcagtagtggcttaggtaatggcaatggtagtagccacaaccactctagcgccagtccaagtcccttcaccaccaccaacggcaacggtaaccacaataccatgcatctgtacggcaccttgcccaaaaacggaacttccacgggggcagctctgtttggcggatcggccaacagttcttcgtaccactcttcggcgagtggaagtggagccggaaccgccagcagtagtggggtcagctctatgactggctccacaaacagctacgacttctacacgagcacaagttccactgtgagcagttcgcgcccctttgccaatggaggcaacaactatcacacactgggaacctatagggctcagtacgccgccactaaccccttcctggacgcatttgatgaaaagccgggcagcaacgggggtaatgcccacggggaggagaagctaggcgcggacaagggccaccacagagcggccgttatggcctttcagtcttcaggagactcgaaaaacggtagcgatgagtacgatgacatcaagtga

SEQ ID NO: 2961 - protein, 1844 aa, DROSOPHILA
MTVQPAEMAENGRSVPDVTASPGRAPPGPLPANQMPAMGNQQHHGNQQHHGNQQQHHGNQHSNHRGQSGSLSNAAGVKDPVMLQGDFRKVSGISSEIFRQIEAVENDHDPNTAAALEAVERRGEMIVRVLEPRCMGSKQAVDAAHKLMNKADARHTVQLVEIVKRPGQTLGLYIREGNGADRTDGVFISRIALESAVYNSGCLRVGDEILAVNLVDVTHMSLDDVVIIMSIPRRLVLAIRQRRGNRGTGSPGPPTLSRPEQKPPPVVVIKRDLRDEDLDETDRMPRPRSSRDGREMTESRSRLGLGLNNYSPQSEQLDMYYNTRGGGGGAMGEPPNWGYKPPPPPSSVITEQPTKAHAFAPSHAYYQNAGTLESLAEKVHAFYPGQPGGPPVGPSRRMSTGTGNVGLAQQHARFPRSGSDQHLPRVEYSDYSNSLGRHSLLRSSLKPGTTGGAPMQVGVGGTLGRYGRYDQQRAGVSKYGPPSGGAQSLTRRSRPNLDYSSDTEATIGPRPSYYYYNRPAIGSMSRGSGGAGGGVGAASTAALLAGAADLNKFNSLPRERPGTRLQGIRSRMGDRLVDENDGNTSAPEFDVRRGRDLRQRITASPSIFTADEYRAWLRRAPSSSAIAEQMRMTRDMFAQPRAQRFSCSAENIHDALRNTESIYSSRNHILGTGTLDRNMGLTRPISALPVRSMSSQHIGGAGSIRSPSIRRMRQLLELSAGPASPSGSILSTGGHQSPAPTPSATLPRPHRQIDINPAEFAKYKLDKPIVDIGGISGMLWIHLLAGRGLRTAPEGAAGTATQGQTRDLYCVIECDRVHKARTVVRSGDLQFDWDESFELDLVGNKQLDVLVYSWDPQHRHKLCYRGAISLSSILRQSPLHQLALKVEPRGTIYIRMRHTDPLALYKRRGLPSLRAGYPTLFGADLETVVNRESKNAPGSAPVPIVLRRCVEEVERRGLDIIGLYRLCGSATKKRLLREAFERNSRAVELTPEHVPDINVITGVLKDYLRELPEPLFTRCLFQMTVDALAVCLPDDPEGNAKLMLSILDCLPRANRATLVFLLDHLSLVVSNSERNKMSAQALATVMGPPLMLHSASAQPGADIDHAQPIAVLKYLLQIWPQPQAQHQQMAQHMGGAAGAMMGGLVTAGSMSNMAGVASGNTGRRGESTGQRGSKVSALPADRQQLLLQQQAQLMAAGNLLRSSTSVTNILSQGHPQLSATANNHLYQSVVGQLAQSHRALQQAVQQPYQLGGSVGSAIPDPSPLPLPGTPSPGSSSASTGSGSGSGKSTDTIKRGASPVSVKQVKIVDQPSSPYSIVMKKPPLQKDAPVEITTPTTQADTESTLGCKESNGTASRRGNVDFYDTHKTQAKSVVNEESSYSSKYTGSETKKIIPGNSSYTPSKANASGLSGGEDYKAMRNKSSATSSSSSSQATVLSAGSTATSAPTTSSDDSDDLVSYKSSASTNALLAQSQAMTTSQLMSKYLKREPRVQFTPIKSPESPSPPGSGDGLPKGTYQLVTPISGSSSKPGATTGAISKYTTGSVESSINANSQKLSSPSRLCNSKDSNSRTGTASSTTPATSMVSTGRRLFDSLASSSSSETETKTYIGGTTAASGAITTTIYTNDTKNSGSSSSKSGIGGGSGTGLGAVSGASSETRSFGSTLFGSSGLGNGNGSSHNHSSASPSPFTTTNGNGNHNTMHLYGTLPKNGTSTGAALFGGSANSSSYHSSASGSGAGTASSSGVSSMTGSTNSYDFYTSTSSTVSSSRPFANGGNNYHTLGTYRAQYAATNPFLDAFDEKPGSNGGNAHGEEKLGADKGHHRAAVMAFQSSGDSKNGSDEYDDIK

SEQ ID NO: 2962 - DNA, 12800 bp, DROSOPHILA
atccattacggcgtaagtacactattcgccttatcatccggttcgcctcacccaccggctgctccttactgcagatgcgttctggccacctcggctaatgtcacctcccagcgtttggcgggcgccaagaccctcaaccagcagagcgtattcgcctacggactctttggactgatcttcggcggtagtgtgccgcactacttctacacgacggtggagcgactcttcagccaggatgtgcgcttccgaagattcttcctgttcctgtccgagcgactggtctatgctccgatttaccaggcactgtccctgttcttcttggccctgttcgaggtgagaatccataatccgcaatctcagttcctagaactataatttgtaatcccttacagggcaagtctcccagcactgcattgaagaatgttgagaagctctactggcctctgctgaaggccaactggcagtacctgtccgtgttcgtgtacctcaacttcgcctacgtgcccccgatgttccggtccatcagcatggccatcatctccttcatctgggtggtgtacatcgcccagaagcgtcgccgcttccaggacaagctggccgccaaagaggcagccaaataggctatacgacccttaaaccctgtggtagtcgtcttggcctaatattccaattactgcttagattacggctgaactgcttcaagttctttatcttcccgcgttccggcggattgcaaaaagtccgtgtgtatttgaacactttagataagctaaaactaactggaggggcgccttatcaaccgactgttgttataccttaaaccctaaattttgtaaacttttcttaccaaaataaactaatatacaatgtataagatatctagatatccatggccaaatttggccaacagaaatgcttaacaagtagcgacaatcgtcgatctaacatcccatttccattgcgcacaatggatcccaatttgagaaattccaaggcaaccttttgagatgcaacaaataatgtctgttttttttttattaaaacgcagcttagaactagcaaataatcgagcaaaggcttacaaacgagaattattggctttttatcggcgctacaatataatttcgctagtaaattcatgggcagatgactaacttagggctacggaatgcagtgtaaaacaagttaaatgcgcataacaactatcttaaaactaggattctgactagaggaggtgactacgatgatggtgatgattgtggggggcacctgtgcctcaagactcgccgcacatcctgcgcagcgacgcggttaacactcagaaggcggccatcgacggactccggctgttgcgcaggggcgtgagaaggggcgtggcaggactgctggcgcggctaaagcaactggagcagcaactagaggcatcctccacctcgccctcggcgttcgccttgtggtgatagggaatcggtcgcttgcgagcgctgaaagcataatgaatagattagtatgggattcgtgtagcaagcttaaaaaccaaagggcaaatatgaaagtaactcaccaaactgaaaatcgtaaggaatagaaaagcagtggctaaaaatcaaacaaaagaaatcctataaaaccatataatcggtaaagtgacaaagtttatttgcggcttggctaaattacgaaaaatcaggatgacacacaatttgatagctacaaatatataaaagaagattggcgagtagttaagataatcaaattataagtagttcctgagtcagctgaaaaaataaaaccatttagaagaaatcaagagttcgtgctgtataaataaggtgtaaaattattgtaactcaatcgtgtaatggatataagcagtcactagcgtcttgtgctgcgcggcgatcgacggctacgaaataaaatgtaaagaacaaataaaatgtaaaagaaaacgattattcaaagaaataatgaggtcaaccaaggcggggcaggaatcctgccaagttacctcgttatgcgacgtctgtccagaaagcttggcgagccgcgacgccttgggatggagggcgatcgagagccggactgtgatgatccggagccgctgccggaggaggagctgcccgagctgctgttcgtggagcagctggtgcgggaggagtgcgacccagaccttgagctgtgcgatccgctgcgactgctggacgagctgtaccgcctacgaagagggataagatttagcattagtctacatttagaaacttgctcagccaagtacttacgatctcgactcgctgctggagtcatgtcgatgatggctggtgctggtgcgcctcttgctgcgactacgacgctcgcgactgcggctcctacgggccgcactctccgccgccgccacggtggccgtggataccttggagacgatagcatccaccagtgagctgtccgcgagcgccgcgactagaggctgtggatcgtgaattttgaagggttttataacgattttcggtttttgttggtgttgatggtgatgatgaaggtagctaatactattggcggccacagccgcagccgctgccgccgcattgaagctaatgggcccgccaccaccccggacatgcgacggatggcccaacagcggagcacctggcccactcatgcccacaccagctcccgtcagggacagcagtcccggatggcgctgtccatggccgaagagagccgagttgtagaccaagccacgagccaggtggtgcgcctgctgctgctgcaggctgtgctggtggtttttgcagatgttgtagtgtgtggcggttagaaggggaccgtggttgaggcggtttgtggtgcgattgtatgtgcccggagtacccgccagaaacgggagcatggccgcgttgttgttgttcccgccgctattgctactgttggaattcgaatgaggtaccccgccaccaccacatgcatgagggttgttagtactatgtctactgttagggttattgttcagcgtgcggttgtggaagatacgcttccccggcggatgctggtgatgttgctgctgctgcgagtggtgatgcatatgctgtggaggcggcctgttgtggtgcacgtggttcttgtgaaccaatgtcggactctttgcgtcgccattcgccgtcacttggggcgtcttgcaaatgggcggtgtgctagtgtccctttttttgaccgtatcctccacaggcacagacagctctcgatccggatcccgctgctgaggctgctcctggcgctgctccagcggcacaaccaccgccaaaggcggcgggggcgtcgtcgttagtgttaccgtggttgtagtcagtgtgttaattaaagcggtcacgttgttagcaacaaggaattcgcttagcgagttacgtttggtagccgtcacctggtcactgccacttacttcgctaccctctttggccgggtctttctccatgatcttgatcttctgcttggccttggccgctataccagacttcagttgctccagcatgcgcagctcctgctgttcctcgcgttcgcgcctgctctgctggaattcctccaaggcggcaccatctactcctgtttccgcatcgctgccgtcgtcgctttgtgccctcaggcggaccactggagcaggttttgtcgagtgggcttcccttactttggacggtcgctttttgtcctgcacaatgtcgtggtagcgttccggatgacgttcagctggcgagtagcgcagctcagaggaaatagagcgagaacgacggctcgtacgcttgggacttgattcgtccaccttgctctttgactttgacttttgcggggagtttgattgctcccgtttcacgctaacgcggctctcctttctggggctaatctccttcttcacctcttttagctctggggtcttgctcctcttcttttgtttcctaggtgtgggcttaggcgatggcgtacgcgaggaagtcgagctactaccggagctgtcggaatccgagctagagctggaagccgcccgctgtcgcttagtctgttccagggccaccatcaccgactttgtgccaaggatgtcgttaacagtatcctcggccgccttaaagggattgaaggctggcgttggcaccgacttcttcggtggcgcctctggggaatgggctggagatttgaatcgggcattgcggcttaatttagtgtcatctttttgcttcctgctagcattggtaggagaccgatgtcggcggtcgtctcttgatttggaactgcgctctcttggcgatcgtgtgggccgggcttccttggctggacgttctctagaacgctgccgctccttggaacgttgcctgtcctttgattgcagtggctccctagagcgctgcctctcccttgagcgctgtttttccttggagggctgtctctcctttgatcgcttcctctcgttagaacgctgcctttcctttaacccttgcctatccttggaaagttgcccctccttagagcgtcgcctctcccttgaacgctgtctatccttcgagcgctctctctccttcgagcgctgcctctccttcgaccgttggcgctcgttggaacgctgattttcctttgaccgatccgtggatctatctcgccttttgtctactgattgttgttcatccttgggcctgtgtttttccttggatctttgcctatccttggactttgatcgacgtctttccctagatctttctttttcgttgcactgcggtttctccttgcatctcagtgcgtccttcgacctagaccgctgtctttccttagatctttgtctttctttggatcgctgtctttcaatagagcgctgtctttcttttgaccgctgtctttccttagaccgctgcctctccctagatcgttgtctttccctagaccgctgcctctctctagaccgcagtctgtccctcgatctgtgcttctccttggagcgctgtctatccttagagcgctcccgatgcctttccggctccttgcgcggtggagtagccgctgaccgttcccgcggctttcgttgacgactgtctatggaggcttcgagtggccgggatgatctcgtatccttgcgctcgcgagaacggcttcgcatgacattttcctgttgcggagccttctcatcggacttggaagcctttgccccacgggacctgtccgatttgttctccttccgcgagggagagctaggttatataaacataagttatacgttctagcgttataagactttaaacttacttcgtgcgctccgagtccgaggaactggcccgtgcgcgtgacttctttttcagcttcttgtcgcgttttttctgcataatagaagagtatggagtgttagtatagagcgacttaagtgctaggcgctcttgctaagagtctaactgttagcagtaatgtcaaacatagttcattctttatggcatgatagacatatgaagttagagtttggtgctttcaatttggcagcatttgactttcgcaagcattctctctaggactgaaaacagttttgcattttgcattctgtatttgtacaacagtttcgatcggctatcactgcgcactaggtatcagtatcatatggttgtaatacaataagtagcttaaagagaacagtcaaatgaaagtacttacaaaactacaagagagccattgaaagctatcctatattaatgaagcgccaagggttttcataaacaaaatataaatttttcgtttcttgaatttacttaaatatcttggaatgattttgttgttcgaaagacaatctacgtgtaacgaaaatttggaataatcaaataaaatgttggaaccatccacagcacatggtatttcactcggaaggagtgggtgtggatagttccatggcaataatgatattcttctaagcatctatacgaacgaaagaaaagttggtagaaaattaagggaaatcataaggttatactagaatgcgtttgcagcctttttaccttttacaatatttgtgggtgagttttggtaatttttgattactaattaagtagtatgctttagtatttataaggtagagaacggtttatgcaggattatagttcagtacttggttatttggtcaatcgatattttgaatgttcatttggtggaaaaagaagtaaataagcaagagaagaaatggcgtatgtttaatatttggtgaacaattataacaacgaaacgaaaagtcagacgagttatcatcatatacaggtaataataatatcatatgtaaatatatagagagagaggcagtacttccattcggattagattgttgggtcagacgtaataattagttggttgttagtcaagggatgagtcgtacaataaaggaatagaaatatgcatatgttacaatatttgcagtcaggtgtctcggagaaggagccccagagatcagagccctttgttggagcgttcgattcacccaatctcgctctactttcgtccaacaatgacctccgctcatgggctcttcctcttcgcacctttctccagctcctgatagctaatgtgcacaggttgggagctctagctcctgcctaccttgtccttcttggccttctttcggacattcttcgactcgcgtcgctcctcctcgctgctgtcatcctcctcatcgctatcccggtcgctgtcccggccactctcgctgtgcttgcgcttgcgcgaccttttcttctttgacttactgcaagtagaagggtggagttcgataagaatgagtggatccgtaagggcacgttcattcgacagctaatcgaaagtgttctttggtgctggctacgagacacagattggaaagggcgctttcggtagccgaaagcctagagctccaaagtactggttagcagcaatgtataaataggttggtttacttgtggttcagtgctttaccttcatcgaaaactgcgcaaatggctttgtcttaacattatagaaggtaatcataataatagaaagaaagatgagaaagtaattcgcttttaattgttgcaacacacagagagacctcttaacgttatcgtttattgtatggttgtaagttctagtagttctttacttgtggtttttggtattgtagttttagttggcaatgcaatttctatggttttattgtagattgtagaatcgaattattacttaccgccgggcagagttttggggaatgtgaatgggcgaattttgggcggggggagtatctgtgagcagttgtatcaggttagatggttagtttggatctgatgggatgggttgggttgggatttcgagtggttggtaggtaggtgcgtgtaaagtgttggctagtggagaacccatacgtacttagatccctgatcactctactcactctcgctgcacacggattcaaataaaagattgtcttggcaagtgttaggatatcgaaagtatatattgcagaaaggcatttgaaacatttcacttgattggattggttcttatagcttgttgaatagtgttagctttgttaaaactaagtgtgagtcatttgtacgtggcttttcgcttctttttactttctttctcatatgagtcccttttgtggtttcaaatgcaatgtaaaagaaggagtagagacgaaaaacaaaatgtattaagcagttgattgatagttacatagtatcattggttttcacgctctaagcgcacgtgtttacagtttactatgtacgataaggaacaaatcaaaagtcatgactgtagagtccaaagaaagagcaaaggaaacaaacacaaagctacgattgtcgagggtttcaagtttcggattccggccaggactcttacctctctttcttgtgcttcttcgacttcttcttcttcttgcgctcaggactggccgaactgaaatccaaatccgaaagtaaatccaccagtacagtacaagtcgctaccatctacccacctctctctggcgcgcttcttgcgcttcttcttgtccgtcttggagacatgatcgcgttcgtcgccattggctgccgcatcgccagcatcgcgatcccgttcgcgggaaggagtacgcactagggcataccgcttcccggtctccttgtccttgccggctgctgcggcagctgccgccgctgccaggctctcgcgctgggcgtccagttccttttggagagccacgcttttggccaggtcctccttcgccttgcgatcaccgtcgaagctgctgccctcgacaaagtactcggatatgttgaaggcctcgcgcagcctggcgttcttctgctgttgagcctcggctatttgatgggtgtcgcgagcactggaagagaaagttgtgcgtttagttaatgaagtactaagaaaaagtatgtgcctcaatcataaaatctaaaatgtatgtattttctggttccccccttcattaagtggctaccttgtggccacagcactgccggctcccagcagtgtccccagcagactgctcgaggagtacttgagcagctcgagcaggacgctgccatcgatattgattttcatctgtgacgaaggcagctccttctggatggagtgctcagctgttcggtgggccggctcaagtgccggctccgggtccttctgttggcaggcgcaagcgcagtccgggtgagtcctcttggagactgctggtcgcctggtcttgttggcgccgcttgccaacgccggccgcaagggcttaaactttctggccaccgccgcgtagttccacgtgtgggcggtcaaacggaagctctcgtacttggccaggtactcgcggttgtcgtgctggaagtagggagccttggtcttcctggccccatttgaggtggcagacggagcagaggaggcgggctccccggtttgggtgcggggactgctggttttgctaccgggagtgctaatggcggcgctcttttcggtggtggtggtggtgattgcgtgacctgcgcgtttgcgtcgcttgcgtcgtttcttcggtttcgccaccttcaccgtggtggcttccgtcgttgttgtcatcgttgatgcagtggccgccgaggcagtcgctgtggttcttactgcagccgttgccgtggatgtggtggtgttgctatagatctccgaggagagcatttttgcctttaaggataagtatttcacttatgatatctttggatctgcttttatacaagattattcgtatttaacgtaaagttttaatccatgtgtgtggaagacagtggatattaggctttagttttttttattccgcgggtattttaactttaatttgtatttattctgaaaagacgttacttcaacttcatatatccatgttattggaagacgatggattttaattatacttgttttcggatttttgattcgcgtttgttttatatatatatatttttttatgttgtatataatatatgtttaaatccatgtaattggaagacaatggattcgcagaatgtttatgctttatataaatacaaaaatagttttcctttacaatatactttgctataatttcatcggttacgattggaagacgatggattagcatatatttggttttactttcggctacatttcgtagagcccgtgatgttttaataaatccttattcatctggaagacgttggatagttttatagaaatattggattatatttgctatggttatttaatttactccgctgaagcaactacgcgcacttgtcttcttcacttcgcgacttatactaattaattactgactatgtttggaagacttatttagtgatttgttgcattcattcggcttatgtattgagcattactcctactggccctgctacctcatttaaggggctccactcttagcacttgcaacaaccactacaataatccgcagctcgaaagcggctggcaatgctgagttaggggtgaaccaagagctatgcgacaccaccaccaccggcgctgggttttcatttatcgggtgcgtatgcagagctactcctcctcgggcacacttgaagggcttttgctggctgggtgccaagccctccctccaggtcattgggatctcgtgttttattttaattttttttcttttgattgctaggcttatggatgcatttgctgctgagctcctgacggggcggatatcgatttttccagcgattttccagcgcttatcgtgccttttttaccaggtcccctgagacggctcctctgcgccacctccatcgccagctcctcgccaagggcacttagtgggtcgttttagcaggcggttattgcttttaatttgtgtgtaaatatatctggctgctacgcggcgtttcctgagcgctttggccaacttgctgtggctttggaagacttgaagtgactgaaagccgtgcgcatcccggaaaatctttgcagcagctttttctctaccatgcgacgcctgtgattggcccccgaatgaatgaaagaaggggtggcgagttgggcgctgcggcggcgcatgtcttttcttggatgtggtttacagctgtcgtgcgctggccgagatttgagcaggccttcggtttgtttaagagcttattgatttgtccactgggcgcacgttttgctttaaattacataagctattaaaagcgtggtacttacgctacgcgtccgaattcatctttggccagatctgttttgccctgtcccatcaacttctggcggaaggagtccacctgcgacttaatttcctccggggtgcgtctgtaataattcaattttaatggataagataattagcgtggctctatatctaaagttcgtaattctacctttaagactagcttgattagctcaaaaaaggcttaaatatggatgatgtttcacctatctagattgttaaattagctaaggagtgcttagatttcagtccgcttgcccggacatgcggatgtctttcactcaaaataatctctacaactgaaatgcacttttttcaccaccagccgagttcgtgccaccggaagagtgctcacatgtgacgcaccgagcgggtggaggaagccctgcccgcgtaggggtggctcgccaacgggctgggggtagttcagtgctcagttcggcgcgtgtgcgtccgctctctggcgtgcaggagcagctaccaggcgccaatgtaaacataaacagcgaaggaagcaacagccccaggccggcgttatataacccggattgacattacatactggcatgtaattgcccatgtcccctgctcacccctgcttctcgagaatgtcctccaattccaggcacttgacttcgatcttgcgcttgcggtcgtggtccaggatctccttgttcggcggccggttcagctgggcgtccagcttcttcgtgtcgtcctcggcgcggtagtccttgtccttcttcccgggccgcacacatgcccaattccgctgcacgtgcccattggtgccggagccacggggcgtggtcaggccaatgccgttgtacatgctggtctgcgatgtcctgcaaattcctcttaactatcaacgactcccggcggccactgggtgctccaccaacgctgcaattgcaccacacgaaaaatcgatttcagttgcagtgcaagtggtgttcgacttgtctggctttctcacctctgttatatgtcctgcggcgctgctatccaagcgctggctttactaggctgcctaacttttcagtagtttattcctttttgtcaaaatattcgactagatatgcgacaatatgccgccctcagtgtgaccagatgacaaatgtcgcctaaatgctccctagctgtcaattccacaatgaagctaacatgagtggatcctgttcaaagcaacgaagtggatgttatcagtgaagtgaaaatcggcgaaacgggcacactaatagctaaacgtaaacaacaatattacacttattttatcttaagaaatatatagatttattagtctaaaatcatgagcgatgcagaggaaacaaaagcagaagccaccaccaaagtgttgttcaaaaaagccggtcgaaaaaacctaaggcaacgcaagaattcagacgaagaagaaaaggaggaacagtaagccgtcaacaattagaaatgaattaaactaaagtgttcatttctatacagattaacgctagatgagattaaagaacgccagcgcctcaggcagcgacccaatggcgtcagccttgtgggactggcgctgggcaagaagatcgcgccagaagaggagctggccatcaaggatccctttaatgtgaagaccggtggtctggtcaacatgaagcagctgaaatcgggcaagatgaaggaggcggacgacgcctacgacgtgggcattggcacgcagttctcggcggagacgaataagcgggatgaggacgaggagatgatgaagtacatcgagcaggagctgcagaagcgcaagggaggcggcacggaggacgcagcagaggacgacggtgatgtaaacaagtacctgacccccgaggatgccgccctgtacgccctgcccgaccacctgaggcagtcttcctcgcacagatcggaggagatgttgtccaaccagatgctcaatggcattcctgaagtggacctgggcattgtggccaagatccgcaacatagaggccaccgaggaagccaagcagaagctgctgcaggacgccaagaacaagaaggacggaccctcgcaattcgtgcccaccaacatggcggtgaacttcatgcaacacaatcgatgtgagttc

SEQ ID NO: 2963 - DNA, 4810 bp, DROSOPHILA
ctgagggcggcatattgtcgcatatctagtcgaatattttgacaaaaaggaataaactactgaaaagttaggcagcctagtaaagccagcgcttggatagcagcgccgcaggacatataacagagcgttggtggagcacccagtggccgccgggagtcgttgatagttaagaggaatttgcaggacatcgcagaccagcatgtacaacggcattggcctgaccacgccccgtggctccggcaccaatgggcacgtgcagcggaattgggcatgtgtgcggcccgggaagaaggacaaggactaccgcgccgaggacgacacgaagaagctggacgcccagctgaaccggccgccgaacaaggagatcctggaccacgaccgcaagcgcaagatcgaagtcaagtgcctggaattggaggacattctcgagaagcagggacgcaccccggaggaaattaagtcgcaggtggactccttccgccagaagttgatgggacagggcaaaacagatctggccaaagatgaattcggacgcgtagctgctcgcgacacccatcaaatagccgaggctcaacagcagaagaacgccaggctgcgcgaggccttcaacatatccgagtactttgtcgagggcagcagcttcgacggtgatcgcaaggcgaaggaggacctggccaaaagcgtggctctccaaaaggaactggacgcccagcgcgagagcctggcagcggcggcagctgccgcagcagccggcaaggacaaggagaccgggaagcggtatgccctagtgcgtactccttcccgcgaacgggatcgcgatgctggcgatgcggcagccaatggcgacgaacgcgatcatgtctccaagacggacaagaagaagcgcaagaagcgcgccagagagagttcggccagtcctgagcgcaagaagaagaagaagtcgaagaagcacaagaaagagagtaagtcaaagaagaaaaggtcgcgcaagcgcaagcacagcgagagtggccgggacagcgaccgggatagcgatgaggaggatgacagcagcgaggaggagcgacgcgagtcgaagaatgtccgaaagaaggccaagaaggacaagaaaaaacgcgacaagaagctgaaaaagaagtcacgcgcacgggccagttcctcggactcggagcgcacgaactctccctcgcggaaggagaacaaatcggacaggtcccgtggggcaaaggcttccaagtccgatgagaaggctccgcaacaggaaaatgtcatgcgaagccgttctcgcgagcgcaaggatacgagatcatcccggccactcgaagcctccatagacagtcgtcaacgaaagccgcgggaacggtcagcggctactccaccgcgcaaggagccggaaaggcatcgggagcgctctaaggatagacagcgctccaaggagaagcacagatcgagggacagactgcggtctagagagaggcagcggtctagggaaagacaacgatctagggagaggcagcggtctaaggaaagacagcggtcaaaagaaagacagcgctctattgaaagacagcgatccaaagaaagacaaagatctaaggaaagacagcggtctaggtcgaaggacgcactgagatgcaaggagaaaccgcagtgcaacgaaaaagaaagatctagggaaagacgtcgatcaaagtccaaggataggcaaagatccaaggaaaaacacaggcccaaggatgaacaacaatcagtagacaaaaggcgagatagatccacggatcggtcaaaggaaaatcagcgttccaacgagcgccaacggtcgaaggagaggcagcgctcgaaggagagagagcgctcgaaggatagacagcgttcaagggagaggcgacgctctaaggaggggcaactttccaaggataggcaagggttaaaggaaaggcagcgttctaacgagaggaagcgatcaaaggagagacagccctccaaggaaaaacagcgctcaagggagaggcagcgctctagggagccactgcaatcaaaggacaggcaacgttccaaggagcggcagcgttctagagaacgtccagccaaggaagcccggcccacacgatcgccaagagagcgcagttccaaatcaagagacgaccgccgacatcggtctcctaccaatgctagcaggaagcaaaaagatgacactaaattaagccgcaatgcccgattcaaatctccagcccattccccagaggcgccaccgaagaagtcggtgccaacgccagccttcaatccctttaaggcggccgaggatactgttaacgacatccttggcacaaagtcggtgatggtggccctggaacagactaagcgacagcgggcggcttccagctctagctcggattccgacagctccggtagtagctcgacttcctcgcgtacgccatcgcctaagcccacacctaggaaacaaaagaagaggagcaagaccccagagctaaaagaggtgaagaaggagattagccccagaaaggagagccgcgttagcgtgaaacgggagcaatcaaactccccgcaaaagtcaaagtcaaagagcaaggtggacgaatcaagtcccaagcgtacgagccgtcgttctcgctctatttcctctgagctgcgctactcgccagctgaacgtcatccggaacgctaccacgacattgtgcaggacaaaaagcgaccgtccaaagtaagggaagcccactcgacaaaacctgctccagtggtccgcctgagggcacaaagcgacgacggcagcgatgcggaaacaggagtagatggtgccgccttggaggaattccagcagagcaggcgcgaacgcgaggaacagcaggagctgcgcatgctggagcaactgaagtctggtatagcggccaaggccaagcagaagatcaagatcatggagaaagacccggccaaagagggtagcgaagtaagtggcagtgaccaggtgacggctaccaaacgtaactcgctaagcgaattccttgttgctaacaacgtgaccgctttaattaacacactgactacaaccacggtaacactaacgacgacgcccccgccgcctttggcggtggttgtgccgctggagcagcgccaggagcagcctcagcagcgggatccggatcgagagctgtctgtgcctgtggaggatacggtcaaaaaaagggacactagcacaccgcccatttgcaagacgccccaagtgacggcgaatggcgacgcaaagagtccgacattggttcacaagaaccacgtgcaccacaacaggccgcctccacagcatatgcatcaccactcgcagcagcagcaacatcaccagcatccgccggggaagcgtatcttccacaaccgcacgctgaacaataaccctaacagtagacatagtactaacaaccctcatgcatgtggtggtggcggggtacctcattcgaattccaacagtagcaatagcggcgggaacaacaacaacgcggccatgctcccgtttctggcgggtactccgggcacatacaatcgcaccacaaaccgcctcaaccacggtccccttctaaccgccacacactacaacatctgcaaaaaccaccagcacagcctgcagcagcagcaggcgcaccacctggctcgtggcttggtctacaactcggctctcttcggccatggacagcgccatccgggactgctgtccctgacgggagctggtgtgggcatgagtgggccaggtgctccgctgttgggccatccgtcgcatgtccggggtggtggcgggcccattagcttcaatgcggcggcagcggctgcggctgtggccgccaatagtattagctaccttcatcatcaccatcaacaccaacaaaaaccgaaaatcgttataaaacccttcaaaattcacgatccacagcctctagtcgcggcgctcgcggacagctcactggtggatgctatcgtctccaaggtatccacggccaccgtggcggcggcggagagtgcggcccgtaggagccgcagtcgcgagcgtcgtagtcgcagcaagaggcgcaccagcaccagccatcatcgacatgactccagcagcgagtcgagatcgcggtacagctcgtccagcagtcgcagcggatcgcacagctcaaggtctgggtcgcactcctcccgcaccagctgctccacgaacagcagctcgggcagctcctcctccggcagcggctccggatcatcacagtccggctctcgatcgccctccatcccaaggcgtcgcggctcgccaagctttctggacagacgtcgcataacgagcgctcgcaagcgaccgattccctatcaccacaaggcgaacgccgagggcgaggtggaggatgcctctagttgctgctccagttgctttagccgcgccagcagtcctgccacgccccttctcacgcccctgcgcaacagccggagtccgtcgatggccgccttctgagtgttaaccgcgtcgctgcgcaggatgtgcggcgagtcttgaggcacaggtgccccccacaatcatcaccatcatcgtagtcacctcctctagtcagaatcctagttttaagatagttgttatgcgcatttaacttgttttacactgcattccgtagccctaagttagtcatctgcccatgaatttactagcgaaattatattgtagcgccgataaaaagccaataattctcgtttgtaagcctttgctcgattatttgctagttctaagctgcgttttaataaaaaaaaaacagacattatttgttgcatctcaaaa

SEQ ID NO: 2964 - protein, 1430 aa, DROSOPHILA
MYNGIGLTTPRGSGTNGHVQRNWACVRPGKKDKDYRAEDDTKKLDAQLNRPPNKEILDHDRKRKIEVKCLELEDILEKQGRTPEEIKSQVDSFRQKLMGQGKTDLAKDEFGRVAARDTHQIAEAQQQKNARLREAFNISEYFVEGSSFDGDRKAKEDLAKSVALQKELDAQRESLAAAAAAAAAGKDKETGKRYALVRTPSRERDRDAGDAAANGDERDHVSKTDKKKRKKRARESSASPERKKKKKSKKHKKESKSKKKRSRKRKHSESGRDSDRDSDEEDDSSEEERRESKNVRKKAKKDKKKRDKKLKKKSRARASSSDSERTNSPSRKENKSDRSRGAKASKSDEKAPQQENVMRSRSRERKDTRSSRPLEASIDSRQRKPRERSAATPPRKEPERHRERSKDRQRSKEKHRSRDRLRSRERQRSRERQRSRERQRSKERQRSKERQRSIERQRSKERQRSKERQRSRSKDALRCKEKPQCNEKERSRERRRSKSKDRQRSKEKHRPKDEQQSVDKRRDRSTDRSKENQRSNERQRSKERQRSKERERSKDRQRSRERRRSKEGQLSKDRQGLKERQRSNERKRSKERQPSKEKQRSRERQRSREPLQSKDRQRSKERQRSRERPAKEARPTRSPRERSSKSRDDRRHRSPTNASRKQKDDTKLSRNARFKSPAHSPEAPPKKSVPTPAFNPFKAAEDTVNDILGTKSVMVALEQTKRQRAASSSSSDSDSSGSSSTSSRTPSPKPTPRKQKKRSKTPELKEVKKEISPRKESRVSVKREQSNSPQKSKSKSKVDESSPKRTSRRSRSISSELRYSPAERHPERYHDIVQDKKRPSKVREAHSTKPAPVVRLRAQSDDGSDAETGVDGAALEEFQQSRREREEQQELRMLEQLKSGIAAKAKQKIKIMEKDPAKEGSEVSGSDQVTATKRNSLSEFLVANNVTALINTLTTTTVTLTTTPPPPLAVVVPLEQRQEQPQQRDPDRELSVPVEDTVKKRDTSTPPICKTPQVTANGDAKSPTLVHKNHVHHNRPPPQHMHHHSQQQQHHQHPPGKRIFHNRTLNNNPNSRHSTNNPHACGGGGVPHSNSNSSNSGGNNNNAAMLPFLAGTPGTYNRTTNRLNHGPLLTATHYNICKNHQHSLQQQQAHHLARGLVYNSALFGHGQRHPGLLSLTGAGVGMSGPGAPLLGHPSHVRGGGGPISFNAAAAAAAVAANSISYLHHHHQHQQKPKIVIKPFKIHDPQPLVAALADSSLVDAIVSKVSTATVAAAESAARRSRSRERRSRSKRRTSTSHHRHDSSSESRSRYSSSSSRSGSHSSRSGSHSSRTSCSTNSSSGSSSSGSGSGSSQSGSRSPSIPRRRGSPSFLDRRRITSARKRPIPYHHKANAEGEVEDASSCCSSCFSRASSPATPLLTPLRNSRSPSMAAF

SEQ ID NO: 2965 - DNA, 3191 bp, DROSOPHILA
ctgtttgtgccgcaggtgcgtaatggccaggagcgattcgcgcttattaatcgctgctcatttgttttttcgaagtcaagccaaagatgctgaccaacgcagaccaataaatcaaatgtcagagacaaaaattaattatgcccgcaatagcgctgtcgtaatttgtaacataatccgaggtgcctggcttccacgcccgcacaatttgtcacagctttttggtaaaacggtggtgcacggagtccgaaatactgagtccattttgcatgtgcaaaataccgagttgtaaaatttaataaaacaaattccgttcaagcgacttagcctccgactgaattcgaatctcggcaacatcaagccagaaattccgtagcaggcaacattccgcaaggcacgaaggataagggcagggttcttaggtccgcattccacctgatcctgatcccgaagccccgaaactagctcaagacccgggctgagtcgaaaaaggagcccgaggccattggctggcaagcagcatggtgcacatagtttgagtagctatttttcagcaacttgttccccacctgaacgatgctgctgatgttgcatactttcgtactttcatactaacaaattccgactacctggtgtatacatctatatacatacaatacatacgagtacccatatgcacacacgactgacatcatggccacacgcatgagctggcttcgctagctgcctttgtggaatgccctcatgaatttcatatgctcctccatctgcctgcagtggcatcaacctggggcatgagatcccttcggggcagctgagcccgtcaaaaacatgctcgtccaaatggcaactgattggagttgggttgtggatgtttggatcgcttgcccatgaatatttccaaataaatgtactcgactattaaagattattgattgattaagaaattataatcatttttgttcattaagaggtaactattctcaagcttcgatttgatgggctaacgctcgaaagtcctaagcatggccagaaatgagcccgcagttctgatgacctgcaagatataatatcttaagtatgccttaataatccattactaaaaacccacccaaagcagcagtggcaagtccacaacgaacatgaatccaaaaatcttagccggtcgctgcgccctcatgatcaccatttgccagagtcttcttttctttggcgtcatttctggccaattgatttgaccataaacggcttgtgcgatggccaaactttgctgctttatatactcgcctccatagcaatacgaactcagttggatgatgatggccactaggaaggtggctctaaatggcacctgggcactccagccactgcggctgaagcgaaaggccaacatgcagagttgcaggtaactgagcatgtatttcacaaagacgatctccccgaaaatcgaacttagttccttggccaaatccagagctatacgatgacgactaacaaacccggtcaggcgagagtctccgccattcagatccttctcttcgagaacaagctccagtagttggaactgaatcaccacattgtgagtcagccaggagaacagggtgtccgttgcaatggccaaccaggcggcagctgccacgcccagtacgccccaaacgtagatgggccaataaaagtgaggctttcgctcgtccagccagaagttgaactccatgggtgtggtcggggtaaatacacccgtctccacatatccccacaggccaagcaacatgggcgctatggccgaggcacaaatcactccgtaggcggcatttctaaaggacctggcgacatacctatccagttggttttccctctcgatcttctccaggtgattgggcgtggcactggccgcctggtttagcttatgcaaacggtgaatcaacgatccaatgcgccttcgtttcgccatcatgaccaggaacttgaaggtgctctgtgatccttgcataaacaccgcaaagttgtccgtcagacgggtcaagtcggagagatcctgcagggcatagactaccatgggccagttgtgagagatcaaggacaggatgagaatcccggcccagatgggatgtttcagactcagttgcggagtactgggatcgaatccaactatttccagagctcttctctggacggcaaagtagctggcgtccatgttggtctttcaaccggatttcgttgttgcaccaacttttatagcagccactgggggcaaaaaaaaaaagaaaaaaaagaaagctaagtggatgccgttgccgcccctgaaattgtgcctgaaatatttatttcatccgttaacaggctacgtgacacggttaccactaccacactggctgtgctgttttgattggaaattttcccatttccatttaggggggcgtaaatatcgtattaacaaataaatacccaacacaagtggaagtggtgcgacacgttgtttacctatttgtttacattctatttggttatctatctatttattttcactttaacatttaaatgcctgactggacaatggcatgttcttatacaagaccgcaagggttatgattatgaacaagttgtgatagatataattttttctgtagccttgacatttgggctagagcaaagcatttttccttttaaattccttttaaatttgtgtattttgtaccaaaaagttagcgtaaaaattccctgtaaatacaccaaaatgaaattaatttttgggctggccccaaaaatccttttttttcccaatttgtttgccctctgggaggaaaatgtcgggacccatttggtccgcactttattcgcgagtaattcaattacgtgggaaatcaacaagtaaatctgctttcgaaatttatcgccgggactagacgaaatcgagtgaaatagccatttgccaggccacattatctccaagcgttttttccccccgatttgcattttgggttctttgcctttgggttcggcttaatgtcaccttaactgctctcaattaatctagagtgggtgtgccaaataaagaccttttcctggaattttaataaccatcatttgcatttttccgaaggatattcgtagctgacttgttcaaagttgcggctacaaaagttatgcaacgttatttagagcgagctatgtacatatgttggcctccggccaat

SEQ ID NO: 2966 - DNA, 1137 bp, DROSOPHILA
atggacgccagctactttgccgtccagagaagagctctggaaatagttggattcgatcccagtactccgcaactgagtctgaaacatcccatctgggccgggattctcatcctgtccttgatctctcacaactggcccatggtagtctatgccctgcaggatctctccgacttgacccgtctgacggacaactttgcggtgtttatgcaaggatcacagagcaccttcaagttcctggtcatgatggcgaaacgaaggcgcattggatcgttgattcaccgtttgcataagctaaaccaggcggccagtgccacgcccaatcacctggagaagatcgagagggaaaaccaactggataggtatgtcgccaggtcctttagaaatgccgcctacggagtgatttgtgcctcggccatagcgcccatgttgcttggcctgtggggatatgtggagacgggtgtatttaccccgaccacacccatggagttcaacttctggctggacgagcgaaagcctcacttttattggcccatctacgtttggggcgtactgggcgtggcagctgccgcctggttggccattgcaacggacaccctgttctcctggctgactcacaatgtggtgattcagttccaactactggagcttgttctcgaagagaaggatctgaatggcggagactctcgcctgaccgggtttgttagtcgtcatcgtatagctctggatttggccaaggaactaagttcgattttcggggagatcgtctttgtgaaatacatgctcagttacctgcaactctgcatgttggcctttcgcttcagccgcagtggctggagtgcccaggtgccatttagagccaccttcctagtggccatcatcatccaactgagttcgtattgctatggaggcgagtatataaagcagcaaagtttggccatcgcacaagccgtttatggtcaaatcaattggccagaaatgacgccaaagaaaagaagactctggcaaatggtgatcatgagggcgcagcgaccggctaagatttttggattcatgttcgttgtggacttgccactgctgctttgggtcatcagaactgcgggctcatttctggccatgcttaggactttcgagcgttag

SEQ ID NO: 2967 - protein, 378 aa, DROSOPHILA
MDASYFAVQRRALEIVGFDPSTPQLSLKHPIWAGILILSLISHNWPMVVYALQDLSDLTRLTDNFAVFMQGSQSTFKFLVMMAKRRRIGSLIHRLHKLNQAASATPNHLEKIERENQLDRYVARSFRNAAYGVICASAIAPMLLGLWGYVETGVFTPTTPMEFNFWLDERKPHFYWPIYVWGVLGVAAAAWLAIATDTLFSWLTHNVVIQFQLLELVLEEKDLNGGDSRLTGFVSRHRIALDLAKELSSIFGEIVFVKYMLSYLQLCMLAFRFSRSGWSAQVPFRATFLVAIIIQLSSYCYGGEYIKQQSLAIAQAVYGQINWPEMTPKKRRLWQMVIMRAQRPAKIFGFMFVVDLPLLLWVIRTAGSFLAMLRTFER

SEQ ID NO: 2968 - DNA, 14552 bp, DROSOPHILA
tagatgtttacattgcatgagtacgtgtttgacatgtatcagctgttcaccatcgcattcgttgaattgattcgactacccaagaaaacagtttcaaggtttttgcatgtgtacatatgtatgtatgtatgtatgccactacgggtaaaaccattttacacacacaatttgaacttagcaagctgatttttgtatacatattcatctaatacgagcgaatacgggaactcaaacttgaattcaacattgtcataaaacagtttatgtaataaattgggaaaatgtgcaccaaatacgaaaggtgggaactttttaaatggagcttccaaaagtacacatattagcaatgcacacttaaaaatatatgtaagtgctcatgaaaggagtgctagagccaactgcaaataaatggaggagctttatactgtttcctactgcaacactgggtatttttactctagcacttaagttcttaaacttaagtccaggaagaaaaaaattataaaaaacgtacaacatctacacacacacgcactgccccttacaaatgacatcgacactcccttattttatttgttcgtcggataaaactgaaaattcgtaggttcagaacggaggggaatggagcccaaaagagctgaaataccttaacgcctttgtaggaagactgatgcaaatccgagttttggagtgtttttgagtcacagcgaaagcttgagcatgttgtacagtcaatgtttatgtgtagattgagtaaaatggcctagtttgatttgatttgactagccatccaaaaggaacgctcgatctatgtacgtgtagaatccggcagaacgcgttagggaatttctcggagctccgttgcgagcacgtaacgaaagacaacgtaacccatccaacgcgtcgtctgaccgaaaaagctccgataaactgcaaataagtcagcaaagctcctttttcctagtctttctatttgcggcgttattggtgttggttgctgtttgtggttcgtcgtgcatgagcagcagaaagtggaaaattataataaatctcatccagaattctgttttgattccgatacatcgcgaatttaaattaacgactaaacgtgcaacggtgctgtgaggcaaattaataaattctgcggcatactactgttcttcgggtgtgtgtgtattcatacacgacatgtgtgcacatacatatgtctgcatgtacattcgaaattgaaattatgcaaaatgtgcatcatactgcgaacgctagttaaggagcagtgcttcaattgctacttcgatggaaatgtaactgttacgtactgtgttcgcgatttcccccgtacttatcctgtgcctaaaccgtcgagcgaaacgtgagtatatgaccacctatatactcacacattttctacataaatacaaatacacgcaaacttatttttgttggtcgtctctcagttctctcctcgtttatggtcattctccgttcctctcgctgccatctgccacatccactttggaaagcgaaaacagaaacagcatctctgtgaacccacagaaatacatatgtaaagcagatatgtacatagatgtgtatatatggatgtgaaaaaacgagaagagtagcgactagtcttttatcttttattttggtatcgggactgtatttcgtatccgtaaatccgaatccaaattgtcgggacagcacagactagagtataaagaatagtataagtaaaaataaattgatacatacacttatagatgtatgtgcgcaaatgtacaatacaccctgtcaatgcttttaattcgtattcgtatttgtgtatattttgacttattttaaaatatatcacaatgcccttgtagtcggaactccgccttatcgggctcaaaaatgactaatcccttccaagctttaatcatgtgcgtacctgtagaatcctagattcttgaggatagtgctgctatattgttttctttcctttcgtgaacagggagtttctaagaaaaagttatgtaaaattagtccgaaaaataaaaatttttggtctgccttgatagccccagcgattttcaaaactgcttccacatgttatttttgaacgccaatattctgttaactgaaatattaggagctaaaagacaaacactccgcaaataagagtgctttactcaattttacgtcgcagaacgtaatatctaaacgtgaaattgaaggtgttgtcagtccgattttttcctcgccaagggaaatttctgtttaacttgagggatttagacagggtaaaatctggatatactcgtatatttacatatgtatagccgctttcccgctgaagtagcgtagtttttcataatggttacaactaatgtttaaaataccgacctgtgtgacagaaaacaaataggatttaaaaaacgtgtcgttgcagacaaaacacgcgacagaaatttacagtttaaagaactaatcaaaatttgttaataatttttgtggctgaagttaatcttcaccggtttttcttcgaaccattaatttttttaaaatgacaaaacctcagaatctttcaattcttcgtgtgtatgtatgtgtgtagtcgattcggcattgttctggtgggcttcgtcagtacttccgtccacagtggaatcaagaaagttaagttggattgaagagttgtcactccaacgccacagctttttgaaatgttttgaatttatttaatttattatatgttttgcgacctttttccgtttacacagacggacgaccaacgtgaggataacctggcattgtcagattgactcgtatatatatatatatatttatttatatatatacgatatatatatatatcctttgacctgctacataaatttcaacgaatctagtgtaccctttcactccacaaacaacttagctaaatagaaaaatttagataatcataaacaagagtaagctgtatagtcgaatttttcggcttttagactaccgggtatcagctagggaaagtgcgaaattcacaagactaatagaaaatatcaaaacatttttaaaaattgtggacgtggcagttttgggtggtttgtagacgttagagagtacgtggcaacatcagtaaacgaactttcgctgcgtctatgttccggcacctgtattcctaatctcagccctctagcttttatagttcctcacatcttccgacatctcggacaacaccttagcgaatcgtcattttgctaattgttggcaaattgttgtggtggtcaaattgttgttggcaaagtaaatacaaaaattaaaaaatttttttttttaattttcatacgactttgtgatggtttttgataattgataatttttagaactgcagggttcgtggtaccccccatatgtacatctataataaatcccctcactacaaacaaggactgacaatgatgcaacattttagattaggtgatcattctaatcgcggtctaagtctacctatagtaatacacagccacaattcgtaattaactttttgttcgcaattttgacgaccttataaatttaagttttaaaagttaaacatttttggtaggccggcttgttttacgtatggtatacattatcgacacgcgggttaccacatatggcctctcttaaaaaaatctcttgaacatatacgaactctcggcttgagcttttttgagagtgcgtactcatttggctgttgtttctgattttactaaactttctggtacagtagtttagactcacacatatgtaaactcaacagcatacggccctatatatacgtacgtgcatacaaatggaaatgcacacactcacagcttgctactgccattttcgcttcgttgcattttgagactcagctaaatattatgtgtatgcatatttgtaccattgtgttcattgtgtctcaaaagttgatacacaggcgattaaaaagagtaagccaatattgtttttgtatttggaaatataaattttaatttattgctatatattttatatatgccattcgcaaaaagctacacatgaactccatttatagtactaatatttcaacgaaataattttaaaatgagactgaatatcttacctttaaaaagtcctaaatataattacttatatagccctttggaaagcttattatttatatttggaaaataagagagaatactatagtctagttaccaattatcagatacccgttactcagctagtccaaatgcgaacgagaaattcaataatttatctggcttatcgatagttattggggaaataaatgcgcaaacaattaaaaaatgttcataagtgtgggggtaaccgttttggtcgttttgtaggtgtaaggagggcatggccagtgtttttgtaacggtagaaattcgcggacaaaaaaataaaacgaagaaaattcaaaacattttccaaaaatgtgtaggcgtcgtacaatactcgtacaattctcgttaatcctgcaaatagggggtataataataatatatctcacgatttatgcttttaggatatacaaaggacgattttctaattggtcaattagttacttcgtaaaagggcttattgcattcgatgaatagtctgaaacaaagcgaggccgcatgaatataaaatgcttaagataaatatcgcggccaatctaaacatcgtcatttaccgggctatataaagtttaaatagcgcacagatagtgtaataataaggagagaataagatggtaaataatatttgtgttcggcagatgacgacgattatggtaatatacaacgggtaataaaggtctataagcataagtatgaaggattaaatatagaccagcctacacactccagttcaatataacaaagcttatttcagacgcattgaatttgcacggtggtatacattgttgaagacctccgttattaagtatgaatcgaacacatgagttaaaaaccctgtgaagtttgcttataaatatttaaaatcatattatatatattcctttattcttctctttattttatctaattaactgtttgtgtgatttatttttaggcaggcttatagcgcatctggcacataacacggttcacgaaagaattttttcaaacctaaagaattgttaatttgatcgaactatcatatttgatggggatgctactgtatgtaattgaaagcgatcatagttttcttcctaaatggacgcttaataaataggatatgcaagaggaaagtggaagcactccactgttaagtagttccttctcttacacgcctacagtagcgccattagtcttaaaaatagctcttatacaagcagctagatcatttgctgcctctaaatataccattaaagttctgctttctttaaacttagctttgtctgagcaagcaatagttcagaaggcagtaaaacctatttgcaccgtaatggcatcagaggtggatgcgagttcgggaccagaagatgggaccgtaccaactttgatgtcattaacaccatacataactaatttagaacatggcaacaatgaatcaggcaagtatgtctctggcctgcccaataatcgcaaacgacagaagctgtccattcttgaacacaacaccattcagaacaatgatgtggataatacggaagtcgagcccaatatggatccgaaatcaaaaatgtcagacaccaagtcaaataaatattccgaaatggagaagcatttgaatgacaacagtaagatcgtcattgaagggacaatatctataggcaactcaaaaagaaaaagtccagaaaaattagtgccatatgataacgattgctatatgcccccagagcaggcactggtcactagcgtggagttagtcgttcctgcccctcaaacacattcatcgaacacaccgggcaggcaatctgaggagcccaatcttagcactctgggcgaatcctcgactacaccgtcatcgactattgataacaaattgcaatacagtacggctggtctgtataattctactagttccacaagtatattagcaaatgataaaatcgttggttgtgcaaatgactcttccaatttgaacttaagaattcctactaagttagtagtaacgacagcatcaggtgatattttgattgatgatcgaagggcttctttatggacacctcaccatgacgaatccggccaaaggcagcaacgcacaggaacagcatcgagtgacacgaagcaagagcccatgaatgtaagctcagagctgtcataccaccaccagaatcgtcactccgaacttttgctacaaatcgagaaagaaagctctggttcatttttacaagcaagtccaattccattgcaggataaccataataatgcagcatcgggccagtttggccaaacagaagagacttccaatattgacagtcagtcgcacaataatttttatgcccaaatgatgcagccgcagcaccttcttcataatcagcatcaacaaagcatgcatgaacacagtcctcgccatcagcagcctgcaagttattctggctatatcactcattatcaaaatcctccgatgtttggtgctcatcaaagtgagcatcatcaacgtcttaaccaacagcagcaaccacttcagcatctattggattgccacgggcatttagagcaatcgactcctatttcccaacaaaatcaacatcatttgtcacagcagatccatcagcaccaacatcagcagacacaccaacgattgccattgcgcgaaaactatcatgatattattatggatgatttccatgaagaacccagccatgccttcaaattgtaagtacacacttaaaaaagtattaaattttgtcacactacagaatttctacaaaatctgttattatttttaaatgtcttgattttttgtgtcaggctaaggttgatgcagcttatgcaggaaaatataaatagtatttggcatttcttgcagcaatgatataaaatgtttaaaatgagaataagttgtttacatttttataagagaagttttatgctcaaaaagctagaaatattttgaccacactttaaataaatcaatctgagtacgaaataaatcttggtcattgtatgtaataatatgatgactagaatttattgttaggacttaaaagacatgaggaatgcggatatttagatttggatttggatattcatactcatatgtacagaacaaccaagaatacattgaatgaacgaaatagtgtttatagcactgaaaagcatttttaagatttaacaaaatcaaattacagctcagacacctgctcaataatttaaataaaactttatacaattttataagtagtttttcagttttaataattgtccaaaattaaaaaatttacgatttttcatttcttttaaaagtttgtatttaattttgcagaacgctctctccaagcaacacaaaacctgagaatcaagatgatggttatgagacaagtgctggcgacgttttaacaccaaattcgcatagttcgtccacacactccattactcctcagcatcaaatgcaacattcgaatatcgtgcttatgacgcaaaaccagaagaagtctgatgatttgcaattgacaaaagttacactctccggggaagctcacactgaccccaatgcttgctcatcaaacagtagtcaaggacaggttctcgcctcccaatctcatctagaactgagtgagggcactcgatgctcaagtcatgcgtctgttgtcgatccctacagttttatgggtgaggagttgcacatgcattcaccatcacatcgtcatttggatgctgtcacaactgggccagggcggtatgggattttagtatcaaatgatactcccgaatgtctaagcagagaaatgtatcgacacagtcaacaaagtacaactgtattggaacaaactgatagctcttcgtgcggcataaatttcaagccaatgccaaaaaaaagaggccgcaaaaagaagctagtagctgttaatgctgatacctcacaaatgacaacgccagtcgatcaacaaaagtaagttctataactttctcagcaacaatatgattacatcccgaaagtacatgtaaaggagaatcccctccaattcgatttactgtccaggttgtttttactaggaaaaaaaggtaataaaatcaattggattcaaaagctgaatctccttaattgttaggatcaaattagatagattaatgccatggaagatatattttcgcacgctggaaaattatttgaaatttatttttacccgttagattttttgaatgtatgtatcgggtagaagggaaagtttacttataaatatattattagctacggtctttgtatacccttgtacttgtagagtaaaaatagattatccgtcgtcgatgttattcgggcatctctcgtaaggccgaggaaagcaatatcatgcattgtggggtcgactaatctggtttcaaggtaggagtgctgtcctctgtgtgagttgaaggggttaatatccaagaggccaggtatagatgcaccagtcgttctaaaatttctgttgttctttttgtcaaaagtatttgctctttgaatcttattatatataatgatccgtagcagcctccatacatatgaccagtgatctcggtgttcaatctgggaagcagtcgcattcttgttttcatatctcgcactctctttagcaaaacaaagataatccgaagtccaggtaataatataatacaggagggatctacaaaaaacaaagcattgtattaccgtatatgctttgtgatattattccttaaagtgttctgccttcaaaaaacgataactatattattactattattactgttattactattattattattattattattattattattattattattattattatttttattagggtgtctgctggcagagcagattgtgaagatggtggtggcgatcaagctgcaaaacccaaggaacgcaaaaaacatgacagatttaatggaatgtccgaggaggaagtgattaaacggacaattccagatcatctatgtgataaccttgatatcgttatagtgagttgtaaatttcggttttaaaaatacaaaaaaacactatttatattcaaagaacaatgttaataactttttgcatgtgcgctttacaggtcgggataaatcctgggttatttgcagcatacaagggacaccactacgcaggtccaggcaatcacttctggaagtgtctttacttagcaggacttactcaggagcagatgagtgctgatgaagatcacaagctgataaagcaaggaataggatttaccaatatggttgctcgagccacgaaaggatctgctgaccttacaagaaaggaaataaaagagggcagccgaattttgctagaaaaacttcagaggtttcgcccaaaagtagccgtttttaatggcaaactaatatttgaagtgttttcgggaaaaaaggaatttcactttggtcgccaacctgatcgtgttgatggcacggacacagtaagtatttcagcgttagttgcctaaaatctgtatagcgcgaaaccgacaaataatttgtaagatatgcttttttcctaattataacaggcgaaagaaagcgtttccgactatataaagtatatatatatatatcaggatccgtccgtatgaacgtctatatctcaggaactataaaagctagaaggttgggattcagcatacagattttaaagacaaaggcgcagcgcaattttgttggcccatgttgtctttctaacgcccacaaacaaaacagccacgcctacacttttgcacaatttttcgatattttttcacaatttcattagtctatcgatttgccataagacttttagccacgcccaccttaacgccctaaagccagcaaaccggtcacgcccacactttggaacaattttaaaatttgtttcataccaatttaccaatatctatcgatatctcagacaagactattccattatctcttgttttcaactcaatgtaatatgaattaaatgaaatgtgtggatattattaatatttataattttttcaatttaatccaaaaaattctgtacgcaaaattacaaaattgcactattttaaatcagcggtcggcgttgggaccaataggctgccatagaaaaaagcccgttccttgcctgcacacgtatggcgttaaaattctggcactgtgtttgattcgtttttggcgcgttttttttttaacagctgcagcaggaaactgaataagttgatatccagccgtcaaattgaaaagcctacgctgcttaactattttgtagattgttttgatggtgatgcataatattgttgtaataataaattgtttactgtaatatattgacgtttattgtttaaagatctttaatttcttcaatcgtgaaagctttttgctgtttgggagcgtttgagggaccaatatgtttttgccatgactatagaaactcgcaaaaaaagtaatgaagtaaagaagtaatttatgcttaatgtagccgaattataaaatatttatggcttcctttcttgtcttataagctcctaatatgtttttttttttaaaacactattaaatagacatttttatatttcagttcatttgggtgatgccctcatcttcagcacgatgcgcacagttgccgcgcgccgctgacaaagtaccgttttatgcggctctaaaaaagtttcgcgactttttgaacggacagataccccatatcgatgaatcagagtgcgtgtttacggatcaaagaatccgtctatgtagcgcacagcaacaggtggatatcgttggtaaaattaataaaacacatcaacctcctcttggcgatcatccatccagtttaacagtagtaagtaactgtagtggtccaatcgcaggggatgcggagtgtggaattgtcgccgaggagtcagatcaggttcaatcggagaaaatgattccccaaatggatcccacagtgccatcttcaagtaatgcaactgatgggaaatcgttttcctatacggcagaaaatacacccttactcccagtgtctaatcataatccttcaattaatgaaaacaattacttatccgtgatgggttctcaacagcccttgtcgcagcaaccactagagaagaaaaaacggggccgtccgaagaaaataaagggacaagatattattgatcattccgtcggcggaaaagcttcaattgccggacagcatatacccagtcatgatttcaataatattcttaacctttcggtgatgtctggcggtggcaccattgaaactccaaaaaaaaagagaggcagaccaaagaaacttaaacccgcaattgacaacataatgacagttaaacaacttcaacatggtaataacaatttaaacacaacagcagggttgtcggcaagctcaatgcatccaatatccatggagcatattgcagcgtctccgcaaagcagtcatcaaatgccgccaagtttgtacaatacgcccccaccgtctcaccttttgtacactgcatcggcatcaccgatggcctctcctgcccttaactgcaattacactcaagtacatggacatggaactccaccggtagggcaagtggcttctgttgctcagggctcgtcacctgtcatcgatacgcaaaacgaccatcttgctcaacaaaagcaatcccaccatggaaatctaggcgctggactagatatgcgggatcatccgcacttgggtgaaacccctccgccgagttcgccaaatatgtgttcaacagtcgacttcgatccaccagacgaacactcaggctctcaagtgggctcacgggtgcaaaataaagcagttgaattggatcatcaacaccctcaaataatggagaaggtccagtatgatagccctgtacctaataccgaggcgaacccagctcatcctcacgaaaattaccagcaatggctttcgcctcatcctcaccaaagtaatcaaccagcacaaaaactgacacatcggcaacaacatccacctatgcaccatttccatcaggagcagacggagaactggcagcgttacgaagaacagaattcaaatccctatatggtgatctctgctcaccaccagcatttgagtccacgacttggaaatcaaacccatcagaattcctccccatctggtcatatctcctcagatgttgctcataaaagcttatgtggactcgaatcgctggttgatcaaataccagccatcagagaacaagattgcagcaatataccattagcgacagtagcggcagctgcggctgctgtggaaagtcgtatcttgagcttgcagcaccagcatcaacatcccctccaaccacatcaacaaaaccaacaaaatcaacagcagcaactaaagcaatgcaaacaagagaactcggcgcatagagaatcttgtagacctacaagtgagaatagcaatgtaagcaatagcaatttttcagtaagcagtctagccgcttctgcttcgtctgcaagaactgacaacgctatatatggaaatggagaaacaaagggcaacaatgaaagtagccatcataacagttgtgacaccaatattgactatcccattcataatcaatcggcttatcatcatacacctcatttgattggtagcgccctgggcacgaatgttaataattctgagcctaatcttcatacgatttcccatcctcatccacctcacccacatccgcattcaatgtatgtggaccaagcgcaccacatggcacatatcccttccgtaaatgtaaattcaatgtacggccctgcgtatggatcccatccacagcatactacaggagaatacccaggaacacacggtcactatagtctgggcggtagcgttcagactgctgtgcctacaagctctgcaactttacatgttccgagtccaaattatccatttggacaccacccatatggtcatacgccaccccaagcaaactatccaagctatactcatccacatactcaccatcaccatagccatccctcacaccatttgaccgtgtttgatcacttaaagccgtccgacataagtggatacggcggtttttgattaaaaaaataggaatatgaatctgcaaccgatttaatcgcaactactcgaatacagcgacttgatgtaaatgtaaatcttttacgattttgcgtcccgccgcatctcagcaatatttatcaatctccggcattgccgattttactttaaggattttttagatcttatatacaataagataaccaaagactccgcctaatctaattattctagctttactttctaaaattacaaaatattacatatgatagtgtttacttaaattatatacgtaacatacagaaaagtacgatcccgaaacaattgtttgtacttaaatcatttaagcatactttattttactcacacacaaatattgcgaaacttactagtatataataaagttttaaaataataaaaatcttttgtttaatacaaaacaaagttatacttaaatccgcagcccacaaaaactacattttgcagttgtcaacccagttcatgaagttataatctaagagctgtttccaccaaaaatattatatgaatttctattgttttcacctaaaagcgcttttctgcggacataacatgagaatggagtgttcatagaacagctacaaaaatgacaatgtaatttcgtgtatttatatgagagtaattaacattaatttttttggtaatatctcctttaaaattggaaaagaccacaatcccaaaattaaaaaaacaaccaagaatctgttgggtcctaattgccatttaaaaacgcctaaatttggaatttgtatatccacatttggaattcgtgaatcgtaatcaataagtttttgggtcccatcattttatttaacaaatgtatcattttatagtaaagtgtaaccatgcagacaaacggatagcaagaattctcattataactaaaagttcaaagtaatttccaacataaaatgttgcgtattttatatttgtatgcataatgagacttgtatatctaattttatacccgttactcctagagtataatggtatacgttgaaaagtaacaggcagaaggaagcgtttccgtgtgtatgaagttcgagatctaaagaactataaaaactagaaggttgagattaagcataaagattctagagacatacgaccacaaaccaccaaaaactgccacgcccacatttttaacaaatgatataatttttttggtttaaatcatttgtttttccatttctatcgagaatacccaatttctaccgatattcctgaaaaatgttgaaatttctcggccccacttgaactagctaacggttatctgatagtcggggaacattgacataatttctgcatgctatatattctgaagttaagtgttttatatagcaagataaaaattaccacaaatttcaaatgcgtttaggtta

SEQ ID NO: 2969 - DNA, 5989 bp, DROSOPHILA
tttgtggttcgtcgtgcatgagcagcagaaagtggaaaattataataaatctcatccagaattctgttttgattccgatacatcgcgaatttaaattaacgactaaacgtgcaacggtgctgtgaggcaaattaataaattctgcggcatactactgttcttcgggtgtgtgtgtattcatacacgacatgtgtgcacatacatatgtctgcatgtacattcgaaattgaaattatgcaaaatgtgcatcatactgcgaacgctagttaaggagcagtgcttcaattgctacttcgatggaaatgtaactgttacgtactgtgttcgcgatttcccccgtacttatcctgtgcctaaaccgtcgagcgaaacatgcaagaggaaagtggaagcactccactgttaagtagttccttctcttacacgcctacagtagcgccattagtcttaaaaatagctcttatacaagcagctagatcatttgctgcctctaaatataccattaaagttctgctttctttaaacttagctttgtctgagcaagcaatagttcagaaggcagtaaaacctatttgcaccgtaatggcatcagaggtggatgcgagttcgggaccagaagatgggaccgtaccaactttgatgtcattaacaccatacataactaatttagaacatggcaacaatgaatcaggcaagtatgtctctggcctgcccaataatcgcaaacgacagaagctgtccattcttgaacacaacaccattcagaacaatgatgtggataatacggaagtcgagcccaatatggatccgaaatcaaaaatgtcagacaccaagtcaaataaatattccgaaatggagaagcatttgaatgacaacagtaagatcgtcattgaagggacaatatctataggcaactcaaaaagaaaaagtccagaaaaattagtgccatatgataacgattgctatatgcccccagagcaggcactggtcactagcgtggagttagtcgttcctgcccctcaaacacattcatcgaacacaccgggcaggcaatctgaggagcccaatcttagcactctgggcgaatcctcgactacaccgtcatcgactattgataacaaattgcaatacagtacggctggtctgtataattctactagttccacaagtatattagcaaatgataaaatcgttggttgtgcaaatgactcttccaatttgaacttaagaattcctactaagttagtagtaacgacagcatcaggtgatattttgattgatgatcgaagggcttctttatggacacctcaccatgacgaatccggccaaaggcagcaacgcacaggaacagcatcgagtgacacgaagcaagagcccatgaatgtaagctcagagctgtcataccaccaccagaatcgtcactccgaacttttgctacaaatcgagaaagaaagctctggttcatttttacaagcaagtccaattccattgcaggataaccataataatgcagcatcgggccagtttggccaaacagaagagacttccaatattgacagtcagtcgcacaataatttttatgcccaaatgatgcagccgcagcaccttcttcataatcagcatcaacaaagcatgcatgaacacagtcctcgccatcagcagcctgcaagttattctggctatatcactcattatcaaaatcctccgatgtttggtgctcatcaaagtgagcatcatcaacgtcttaaccaacagcagcaaccacttcagcatctattggattgccacgggcatttagagcaatcgactcctatttcccaacaaaatcaacatcatttgtcacagcagatccatcagcaccaacatcagcagacacaccaacgattgccattgcgcgaaaactatcatgatattattatggatgatttccatgaagaacccagccatgccttcaaattaacgctctctccaagcaacacaaaacctgagaatcaagatgatggttatgagacaagtgctggcgacgttttaacaccaaattcgcatagttcgtccacacactccattactcctcagcatcaaatgcaacattcgaatatcgtgcttatgacgcaaaaccagaagaagtctgatgatttgcaattgacaaaagttacactctccggggaagctcacactgaccccaatgcttgctcatcaaacagtagtcaaggacaggttctcgcctcccaatctcatctagaactgagtgagggcactcgatgctcaagtcatgcgtctgttgtcgatccctacagttttatgggtgaggagttgcacatgcattcaccatcacatcgtcatttggatgctgtcacaactgggccagggcggtatgggattttagtatcaaatgatactcccgaatgtctaagcagagaaatgtatcgacacagtcaacaaagtacaactgtattggaacaaactgatagctcttcgtgcggcataaatttcaagccaatgccaaaaaaaagaggccgcaaaaagaagctagtagctgttaatgctgatacctcacaaatgacaacgccagtcgatcaacaaaaggtgtctgctggcagagcagattgtgaagatggtggtggcgatcaagctgcaaaacccaaggaacgcaaaaaacatgacagatttaatggaatgtccgaggaggaagtgattaaacggacaattccagatcatctatgtgataaccttgatatcgttatagtcgggataaatcctgggttatttgcagcatacaagggacaccactacgcaggtccaggcaatcacttctggaagtgtctttacttagcaggacttactcaggagcagatgagtgctgatgaagatcacaagctgataaagcaaggaataggatttaccaatatggttgctcgagccacgaaaggatctgctgaccttacaagaaaggaaataaaagagggcagccgaattttgctagaaaaacttcagaggtttcgcccaaaagtagccgtttttaatggcaaactaatatttgaagtgttttcgggaaaaaaggaatttcactttggtcgccaacctgatcgtgttgatggcacggacacattcatttgggtgatgccctcatcttcagcacgatgcgcacagttgccgcgcgccgctgacaaagtaccgttttatgcggctctaaaaaagtttcgcgactttttgaacggacagataccccatatcgatgaatcagagtgcgtgtttacggatcaaagaatccgtctatgtagcgcacagcaacaggtggatatcgttggtaaaattaataaaacacatcaacctcctcttggcgatcatccatccagtttaacagtagtaagtaactgtagtggtccaatcgcaggggatgcggagtgtggaattgtcgccgaggagtcagatcaggttcaatcggagaaaatgattccccaaatggatcccacagtgccatcttcaagtaatgcaactgatgggaaatcgttttcctatacggcagaaaatacacccttactcccagtgtctaatcataatccttcaattaatgaaaacaattacttatccgtgatgggttctcaacagcccttgtcgcagcaaccactagagaagaaaaaacggggccgtccgaagaaaataaagggacaagatattattgatcattccgtcggcggaaaagcttcaattgccggacagcatatacccagtcatgatttcaataatattcttaacctttcggtgatgtctggcggtggcaccattgaaactccaaaaaaaaagagaggcagaccaaagaaacttaaacccgcaattgacaacataatgacagttaaacaacttcaacatggtaataacaatttaaacacaacagcagggttgtcggcaagctcaatgcatccaatatccatggagcatattgcagcgtctccgcaaagcagtcatcaaatgccgccaagtttgtacaatacgcccccaccgtctcaccttttgtacactgcatcggcatcaccgatggcctctcctgcccttaactgcaattacactcaagtacatggacatggaactccaccggtagggcaagtggcttctgttgctcagggctcgtcacctgtcatcgatacgcaaaacgaccatcttgctcaacaaaagcaatcccaccatggaaatctaggcgctggactagatatgcgggatcatccgcacttgggtgaaacccctccgccgagttcgccaaatatgtgttcaacagtcgacttcgatccaccagacgaacactcaggctctcaagtgggctcacgggtgcaaaataaagcagttgaattggatcatcaacaccctcaaataatggagaaggtccagtatgatagccctgtacctaataccgaggcgaacccagctcatcctcacgaaaattaccagcaatggctttcgcctcatcctcaccaaagtaatcaaccagcacaaaaactgacacatcggcaacaacatccacctatgcaccatttccatcaggagcagacggagaactggcagcgttacgaagaacagaattcaaatccctatatggtgatctctgctcaccaccagcatttgagtccacgacttggaaatcaaacccatcagaattcctccccatctggtcatatctcctcagatgttgctcataaaagcttatgtggactcgaatcgctggttgatcaaataccagccatcagagaacaagattgcagcaatataccattagcgacagtagcggcagctgcggctgctgtggaaagtcgtatcttgagcttgcagcaccagcatcaacatcccctccaaccacatcaacaaaaccaacaaaatcaacagcagcaactaaagcaatgcaaacaagagaactcggcgcatagagaatcttgtagacctacaagtgagaatagcaatgtaagcaatagcaatttttcagtaagcagtctagccgcttctgcttcgtctgcaagaactgacaacgctatatatggaaatggagaaacaaagggcaacaatgaaagtagccatcataacagttgtgacaccaatattgactatcccattcataatcaatcggcttatcatcatacacctcatttgattggtagcgccctgggcacgaatgttaataattctgagcctaatcttcatacgatttcccatcctcatccacctcacccacatccgcattcaatgtatgtggaccaagcgcaccacatggcacatatcccttccgtaaatgtaaattcaatgtacggccctgcgtatggatcccatccacagcatactacaggagaatacccaggaacacacggtcactatagtctgggcggtagcgttcagactgctgtgcctacaagctctgcaactttacatgttccgagtccaaattatccatttggacaccacccatatggtcatacgccaccccaagcaaactatccaagctatactcatccacatactcaccatcaccatagccatccctcacaccatttgaccgtgtttgatcacttaaagccgtccgacataagtggatacggcggtttttgattaaaaaaataggaatatgaatctgcaaccgatttaatcgcaactactcgaatacagcgacttgatgtaaatgtaaatcttttacgattttgcgtcccgccgcatctcagcaatatttatcaatctccggcattgccgattttactttaaggattttttagatcttatatacaataagataaccaaagactccgcctaatctaattattctagctttactttctaaaattacaaaatattacatatgatagtgtttacttaaattatatacgtaacatacagaaaagtacgatcccgaaacaattgtttgtacttaaatcatttaagcatactttattttactcacacacaaatattgcgaaacttactagtatataataaagttttaaaataataaaaa

SEQ ID NO: 2970 - protein, 1738 aa, DROSOPHILA
MQEESGSTPLLSSSFSYTPTVAPLVLKIALIQAARSFAASKYTIKVLLSLNLALSEQAIVQKAVKPICTVMASEVDASSGPEDGTVPTLMSLTPYITNLEHGNNESGKYVSGLPNNRKRQKLSILEHNTIQNNDVDNTEVEPNMDPKSKMSDTKSNKYSEMEKHLNDNSKIVIEGTISIGNSKRKSPEKLVPYDNDCYMPPEQALVTSVELVVPAPQTHSSNTPGRQSEEPNLSTLGESSTTPSSTIDNKLQYSTAGLYNSTSSTSILANDKIVGCANDSSNLNLRIPTKLVVTTASGDILIDDRRASLWTPHHDESGQRQQRTGTASSDTKQEPMNVSSELSYHHQNRHSELLLQIEKESSGSFLQASPIPLQDNHNNAASGQFGQTEETSNIDSQSHNNFYAQMMQPQHLLHNQHQQSMHEHSPRHQQPASYSGYITHYQNPPMFGAHQSEHHQRLNQQQQPLQHLLDCHGHLEQSTPISQQNQHHLSQQIHQHQHQQTHQRLPLRENYHDIIMDDFHEEPSHAFKLTLSPSNTKPENQDDGYETSAGDVLTPNSHSSSTHSITPQHQMQHSNIVLMTQNQKKSDDLQLTKVTLSGEAHTDPNACSSNSSQGQVLASQSHLELSEGTRCSSHASVVDPYSFMGEELHMHSPSHRHLDAVTTGPGRYGILVSNDTPECLSREMYRHSQQSTTVLEQTDSSSCGINFKPMPKKRGRKKKLVAVNADTSQMTTPVDQQKVSAGRADCEDGGGDQAAKPKERKKHDRFNGMSEEEVIKRTIPDHLCDNLDIVIVGINPGLFAAYKGHHYAGPGNHFWKCLYLAGLTQEQMSADEDHKLIKQGIGFTNMVARATKGSADLTRKEIKEGSRILLEKLQRFRPKVAVFNGKLIFEVFSGKKEFHFGRQPDRVDGTDTFIWVMPSSSARCAQLPRAADKVPFYAALKKFRDFLNGQIPHIDESECVFTDQRIRLCSAQQQVDIVGKINKTHQPPLGDHPSSLTVVSNCSGPIAGDAECGIVAEESDQVQSEKMIPQMDPTVPSSSNATDGKSFSYTAENTPLLPVSNHNPSINENNYLSVMGSQQPLSQQPLEKKKRGRPKKIKGQDIIDHSVGGKASIAGQHIPSHDFNNILNLSVMSGGGTIETPKKKRGRPKKLKPAIDNIMTVKQLQHGNNNLNTTAGLSASSMHPISMEHIAASPQSSHQMPPSLYNTPPPSHLLYTASASPMASPALNCNYTQVHGHGTPPVGQVASVAQGSSPVIDTQNDHLAQQKQSHHGNLGAGLDMRDHPHLGETPPPSSPNMCSTVDFDPPDEHSGSQVGSRVQNKAVELDHQHPQIMEKVQYDSPVPNTEANPAHPHENYQQWLSPHPHQSNQPAQKLTHRQQHPPMHHFHQEQTENWQRYEEQNSNPYMVISAHHQHLSPRLGNQTHQNSSPSGHISSDVAHKSLCGLESLVDQIPAIREQDCSNIPLATVAAAAAAVESRILSLQHQHQHPLQPHQQNQQNQQQQLKQCKQENSAHRESCRPTSENSNVSNSNFSVSSLAASASSARTDNAIYGNGETKGNNESSHHNSCDTNIDYPIHNQSAYHHTPHLIGSALGTNVNNSEPNLHTISHPHPPHPHPHSMYVDQAHHMAHIPSVNVNSMYGPAYGSHPQHTTGEYPGTHGHYSLGGSVQTAVPTSSATLHVPSPNYPFGHHPYGHTPPQANYPSYTHPHTHHHHSHPSHHLTVFDHLKPSDISGYGGF

SEQ ID NO: 2971 - DNA, 3835 bp, DROSOPHILA
tcggtctcggagtcgctgttctcgtcgaagatggagggcctttcgactcgttttagaggtactttcttctgttggccgggtaaaataaggccatatctgcacggtgttgaaacgggtccttaaaaaactgctcaaattgtttatttttaacaaattacttactgttttgccattcttgtttatttatgaataattagtatgaccgtctgaagcgaccacaaaaatccctcaatggtgcaaaactgctgacagcaacgctttaccggctaaaagaaccgttgtatatcgataggaggaccattcgatagtattaagataatagtttgaaacacggatagtatcacaaaattcgttatttcaatgtgaaactactttaaaacttgtgctttaatcaacttgtatttaattgtgtttcaatggaccaatcattactttattttctgttttattgccaaaccaaggctcttaccccttgaaatcatgttagtgcaactctagagacgtaaaatacacatacaaatatggcgaaatattgaaacaaattaaaataaatttaaatataaataaattgttatgttaataaagcgtttaattatcacttaaggcctgctgttttttttttatttatttttttacgccaatggaaacatcggtccttagtctggctacgcagaaaaatatagacgggatcatgatgctcggggggatcagagaaatatcaaagattacttctgaagccgttcaagtctattcacatgcatagtggcagttgggctccaaataattggaagcgattttagtcaagccagcaaccgcggcctgcgtccggctaactatcgataggcacgttgagcgtagacacattcgacaaacgcggccacactgttctgcgtctttttccttccgtttccctttcttttccctttttcacgtttgcgtgagtacgtgtactccgagttttgttcaacaaaattgtatttaactctcttttatttcctctatttgcagcggtcgtgtaaaacagtttttgcaaacaaatccaggtaaatgccgcttccattggacccgttttaagcgcgaaaattcagccagattagattggcggcgatcgccggccgaaacatgtgcaaatccacccaactccgttttttttattacccatttttttttactgtgggccaatgtgccaaaactgatcagtttaccgtgtaaacaatgcatgaaatgcctcgctacatgcgctatatatatgtatttttttggttataatttttttaatgtgcaaacgaatatgaagtgaaaaattggccaaagtgtgtggcacagtgttgttgtgcatgtgtgggtgggtgtgagcggctttaaattgtggcaaaaagttgggcattcagttgaatcgaatgcacgaccgaaaaccggctaaattaaacaaatttttacgcagtttagttggtaaacttacccgaaatagttgttgtttacagccacttgtacgcacacacacacagccgcagaaacacagacagtatcatttttttttctttgctattttgcacgtgttttacttgctgtttctgcttctttttttattcaatgttccgttcctcgctgatttaaaaagtgaagtaaaaaactgttaaaaatcataatcaatattaaaaaacgattcgtcgtctgtccgcgtgaatttccgaaaaggcgccacgcctcctgccctccagaaatctagagtattataatagtagccacttttattgaatactttattatgctcataatggttcatatgtgttagggaaacctttttccaataagtcatatgccacacttgtataggctccataagttgatatgttttgtttaggtggtcaattgatctgttcttgtagtacacatagttttacgtacttttcaagttagtttttcatttaatagggcttaagctttgttagccaacctcatagtactacttatatagtagttatatgcaatttagtgagatacttttttttagtaggctctgagcacgttttgcttggttttgtagactgattttatagagcaatgggggtggcaaagtctgcactttcgattaaagcccaagacatcatctttttttttctgtgattattgcctcttgactaattgtgttcccgaacattttgcagccatggtgcgtatgaacgtattggccgatgccttgaagtgcataaacaacgccgagaagcgtggcaagcggcaggtgctgctgcgtccctgctccaaggtgatcatcaagttcctgaccgtgatgatgaagcatggctatatcggcgaattcgagatcgtcgacgatcatcgttccggcaagatcgttgtcaacctgaccggtaggctaaacaagtgcggcgtcatctcgccccgcttcgatgtgcccatcaacgacatcgagaaatggaccaacaatctgttgccctcgcgtcagtttggttacgttgtgctcaccacctctggcggcatcatggaccacgaggaggctaggagaaaacatttgggaggcaaaattctcggcttcttcttctagagaaaccaagttcgcatcgtagagagtctgtatgtgctgctaaggagtttgatatgtagattgacgttttatttcaccgaccatgcaaccaactatgtactttgtgcacaggaaacaaggggcgaaaacgctgctacgttcattcagaaaacaaacgacgatgaatgttcacaaagttacgcgaaataaaatgattgatacataataattttaataacgattttgtctacgatccatatactatgttaagcggtacagtgataaatcaatagcgacagtaaaacgatctgttaacataaaacccaatttgtgtataatataacctcgaccggagttacttatagctggatattgtcaattttatggctgaaatcaagacaattaggatgttaagaacgcgccatgcggtttcttttgaggtgcttaaaacacggttacgtgctttccataatgaaagtaagggccaattgttcccactcttgacaccttaaagccaaaaatgattagaccatcatagttttggtattcccacctaggtttcttattatttgttagaacttcttcaccaagaaaacctcaattactgtcaaaaattgtttatgaagcaaataatgcttgttagaatttgttgtagtttctatagaacaaaatgtacatgtaaaacgtacatttacatgcttcttcaggttttcaactgttttccagcacaagttccgaatttatgctgtagataactgctgcaatttttgagtaaaaatttgttttaattatgataaagtgtattcactcgatgagtcaaatttgatgttatctcaagttatccctagggagtactaggttttttatgaacgggtgttgggtttgtgatattcgtttttaggcattacttgttatcaacacttaaagtttttgcgggcaaattgcagccctcgagttcagtgctgcaaaactcgtcacaaacgcagctcaactaattttcgaatcgtatccagcactatatattcattaaaaatccattgcatactttgtggctcatttgaaattgactgactgttagattcgaattgatggcacttggaaattcaattatccgatcagtatcctgacccaaatgagtctcctgtctagagacaattggcattattaagtacaattacattttatatcgactaccgatcgatatcgccgttgcgtgcggcttagaacaaatataattgatgagcagcccacgcagcgttatctatgtacttcatatttgtgggagaccccaac

SEQ ID NO: 2972 - DNA, 710 bp, DROSOPHILA
atttgcagcggtcgtgtaaaacagtttttgcaaacaaatccagccatggtgcgtatgaacgtattggccgatgccttgaagtgcataaacaacgccgagaagcgtggcaagcggcaggtgctgctgcgtccctgctccaaggtgatcatcaagttcctgaccgtgatgatgaagcatggctatatcggcgaattcgagatcgtcgacgatcatcgttccggcaagatcgttgtcaacctgaccggtaggctaaacaagtgcggcgtcatctcgccccgcttcgatgtgcccatcaacgacatcgagaaatggaccaacaatctgttgccctcgcgtcagtttggttacgttgtgctcaccacctctggcggcatcatggaccacgaggaggctaggagaaaacatttgggaggcaaaattctcggcttcttcttctagagaaaccaagttcgcatcgtagagagtctgtatgtgctgctaaggagtttgatatgtagattgacgttttatttcaccgaccatgcaaccaactatgtactttgtgcacaggaaacaaggggcgaaaacgctgctacgttcattcagaaaacaaacgacgatgaatgttcacaaagttacgcgaaataaaatgattgatacataataattttaataacgattttgtctacgatccatatactatgttaagcggtacagtgataaatcaatag

SEQ ID NO: 2973 - protein, 130 aa, DROSOPHILA; identical to SEQ ID NO: 2172

SEQ ID NO: 2974 - DNA, 3473 bp, DROSOPHILA
tgactaccattatgataagtttaggaagcagttccgcagatactaaagatacgagtgccagcaataaaatgtacaattgtttaggttcaggattctgttttatttctatatatatttcaattaaatgtactttaagaattaactcattaatccattaatcgggccacttctgtaaaaataaaagcaaacacttggttagttatgcttcacaacgatgaacatatttgcttttatgcttgcaatcagtgagagacaaaattaatttcaaagcaacgaatgactgaggctcaatgagattcctactcaaaatatcatcacaataaagaagttgtcagtaactaaaacagatacacaccttataagaagttagtccagagaatcgggaaacaatggcgcaactgaaatgaattaaaaaagaattgttaaataaagcgctttaagagaagccattgttgtttgaaatgatttgatcagtgggagattaaaattgatttcatagctacaggtagctcaatgagattcctactcgaaatatcatcagagcagattacaattcaaactactccatccgaaatatacacaccttgaagaatttcatatccaaggatccagatacgagccagattgaaaactgaaacgaaataaagtcttgattagcttggtttggttgagttcagcttccttgagcataatgctatcagtggagataaaattgatttcatggttatttcaatgagattcctactcgtaatatcatcagctaagtgttatacattaaaattacaaaataaaactttaattacctcttcgtttagcaagttaagcttcccatttaaagacagcctgcgatagaaggtagtattagcaaattgaaagattgcttgttattaaaaactcaccaatttagagcgctaaaacctgaagtatccaatctgaaagagaaaactgaaagaaactcagaacccattgagcccacattgaaaacccacacttagtttttgagtggttttattaaacccagacaactttgaaacgttcatcctcgctctaccgtgtcagcttagcattactttgtttatagaaaagaatctacatataaaatgtagaacgcgatgcccattccacacgttaccgcagattgcagcgcttatatgatgccgatcttgttggcaatgtccagggcgtcgtagtcgcgcgccaggcgcacataggccttcttctggccatcgggccggatgagcacgttcaccttggccaccttgatgtcgtagagcttgcgcactgcggcacgcacgtggttcttgttggcgcgcaggtgtgtgaggaagaccagggtgttgttgtcctcgatcttcttcatggccgcctcggtggtcagtgggtacttgatgatgttgtacgcgtccatgcggttcctggtgggcaccgatttcctggggtacttgggactcctgggcagcttcagggtggttggccgacggaagtgcacgttggtgcggatcttgcgggcacgggtgccgaaggcgcccttgatgatctgttcgaaaagagcaacaaagaacgaggttagtccgagtcgatctcctcaatattaagcagctgatgcacaccttcttctggaccttcttggcgttcagcagagccacagccttggccttggcggttcccttggcgggcttggtcacgggcttcacgcccttcttggccttggcggccgcgcgagccttggcagagagcttggccagcacggactggggcttcttgccggcgaggaccttcttcttggcatccttgctcttggccttggcggccgcggtcgtctttacggccgcgggcttcttggcagcagcaccggcggtcgctggcttcttggcggccggagcagccttcttagccgctggggcagcagccttcttgggcgcagcggcagctggcttggcagccgagggagcagcctccttcttgccggcagcgggagccgcagcagtcttcttctgctctggcttcttgtcgccaggcttggctgtaaacagaagagcgcggagtccacggattagtaaacatgttcggctctcgacgcacaaagttaggttaggcctgatcgatcagcaaggcaatgggacgctttccgactcatccagctccattcgaataaattcaactttggattgctcactcggttgctatactatcccattctgaacacacacttggacattcccacgcagacacaccgcacgtggccgaaactacggattatctgttcgaacacatttatgccttaaaatcacaatatttcgcacaaattcgattgccttctggtgggctgagctgtcgtctcccttttgctgatcgattcacgcatttttcgcatatttttgaatgaaaaatccttaccggatttctcggttggctttttgggtggcatttctacgagaaaaagaaatgaaaaggaaaactgaggggcagttgtcaaaaggcggaagcccgttttgacaggagggtggccagatagctggaatttggcacgcattcagtgcgtttggcaacactgctgcggcacttattagccgtgtctggcttgctatcttgacactgtgcgcgtgcaacacagccgcaaaaatgagtggcaacgctaacggtgtttaaaatgtaacggtacttgttgaattcgaatttaaagcgaaagaagtaaccaaattgtttaaaactgttttattcaatgtcttacgttaagctaaaaatacaagttgtgcaatctgcaggctagcaagtacagccacttttctgttgcgagaggcggcttccaaagaagttgcgtaaatctaaataagaataaatataagctgataggataagaattttcgaatagcggcttaccaaaagtttgcgatttaacagatgcctgagtggcctgttcctgaggcttattcttaatagacctaatttcctgcattacagcctcttcaaaggccagggcagcgatcctttggaataattccgtaactttgaagccagatcgcgccgaaacggaccaatattccgcctgaagctcggcggctgccaaccctgccagtcgttccatgcgtacaaactcctccttcgactgaaaagtaagtgctattacttgaatcttttgttggaaaggtggtttaccaagaggtctgcttttgtgcccaccaggaaaaccaagggtctcttgcttgcattgtagttgagtgcgctatttagccatttttttgccgactccagcgaatccttcttcgacatgtcgtaggtgaccacaatcactttggttatggatttgtattgttaaaactctctcctaatgatttaattagttggtacttaccactcgcattgcgataataggctccggcgatgcacctgaagcgctcctgaccagcagtgtcccacctgcaagtagagcacatttcaaaaccaaactgatagcgccttctaggcagttgacc

SEQ ID NO: 2975 - DNA, 1026 bp, DROSOPHILA
acaactgcccctcagttttccttttcatttctttttctcgtagaaatgccacccaaaaagccaaccgagaaatccgccaagcctggcgacaagaagccagagcagaagaagactgctgcggctcccgctgccggcaagaaggaggctgctccctcggctgccaagccagctgccgctgcgcccaagaaggctgctgccccagcggctaagaaggctgctccggccgccaagaagccagcgaccgccggtgctgctgccaagaagcccgcggccgtaaagacgaccgcggccgccaaggccaagagcaaggatgccaagaagaaggtcctcgccggcaagaagccccagtccgtgctggccaagctctctgccaaggctcgcgcggccgccaaggccaagaagggcgtgaagcccgtgaccaagcccgccaagggaaccgccaaggccaaggctgtggctctgctgaacgccaagaaggtccagaagaagatcatcaagggcgccttcggcacccgtgcccgcaagatccgcaccaacgtgcacttccgtcggccaaccaccctgaagctgcccaggagtcccaagtaccccaggaaatcggtgcccaccaggaaccgcatggacgcgtacaacatcatcaagtacccactgaccaccgaggcggccatgaagaagatcgaggacaacaacaccctggtcttcctcacacacctgcgcgccaacaagaaccacgtgcgtgccgcagtgcgcaagctctacgacatcaaggtggccaaggtgaacgtgctcatccggcccgatggccagaagaaggcctatgtgcgcctggcgcgcgactacgacgccctggacattgccaacaagatcggcatcatataagcgctgcaatctgcggtaacgtgtggaatgggcatcgcgttctacattttatatgtagattcttttctataaacaaagtaatgctaagctgacacggtagagcgaggatgaacgtttcaaagttgtctgggtttaataaaaccactc

SEQ ID NO: 2976 - protein, 277 aa, DROSOPHILA
MPPKKPTEKSAKPGDKKPEQKKTAAAPAAGKKEAAPSAAKPAAAAPKKAAAPAAKKAAPAAKKPATAGAAAKKPAAVKTTAAAKAKSKDAKKKVLAGKKPQSVLAKLSAKARAAAKAKKGVKPVTKPAKGTAKAKAVALLNAKKVQKKIIKGAFGTRARKIRTNVHFRRPTTLKLPRSPKYPRKSVPTRNRMDAYNIIKYPLTTEAAMKKIEDNNTLVFLTHLRANKNHVRAAVRKLYDIKVAKVNVLIRPDGQKKAYVRLARDYDALDIANKIGII

SEQ ID NO: 2977 - DNA, 21449 bp, DROSOPHILA
ggaccaaaaggaatggccagcagacaggcgacgtcagcacaattgatagcatacttctcagggcagcggcagctgaggagcagcaaaggtgagtcccttgccgagcacttggctccactgcactccttagccacaatagaatgtacccactttgaatttgtagtaaacacggaagcacacttttgaatttataaacatataattagctacaaaaaaattgcatttagttgctaagcttaccgccaagtaaaaatcataaaatttaaactttagcagttattgccaatgtatccaaaaatgtaattctcatatttatctcctacatacaatatttcaattaaataattatagtcgtctagttattgtaccttatgtgctcatgttttcgggctatataaatcgcagttttaagccaataacattttcagcaacgatttcccctagtgaattaggaaatagtaattgattttatgcgattgattcactgctgcaccagtaaaaagtatctgcctgaactaaggaagtataattaaattagttttaaactggaaagtaaccgaatcaacgtggcaagcaagcggaaaacttcatttgtagctgggaattggccacgtgggtgggcggtgttccttggttggttcgggggggagtgggaaaaaggagagctacgtgagagttacaagggcacgcacgcagacacacgggcacagcgaaaagcgaaagcagcgagagaggaaaatcggagatgacgaaaaacagcaacagcaacggcaatggcaacagcgactaagcaaaacatgggccaaaccaaaacaaaaacacacgatttgccggcaaaatgcacgtgacacatcctttggcgagcttcgtcgagtgcgatccttcgtcgagtgccgaatgcagccgattgcagccgaacgaagcagagccgaagctgcgcagaatccaacgagaggtataaaagcgagacgctcgccgcactcgtggcattcgattgtcgtcgctcgagaggataggtgcccagcttcgaaaaggataaaaccccgcaaaggactctaagtaaaagtgaaactttaaagccaaagagcacacacacatacacatacacgcgcacacgttgcatacagtttggcgcgagtgtgggttactgctggcggtacgccagtgtgtgtgtgtgagttggccaagtggatttctatttttggcccattaagaagtcaactcgtgaagtgcagtggtgttaaattcgttgctatttgaaaggactcatcgggttgcttaacaaacgaaaacaaaacaacgccgaaactctggcaatcgcaatctgatccttggacatgtggagcaggcagcgaatgcgccataagccgctttgggccctaatatccttgaccgttttgctgctggtcctggacaaaagcaatgccaacacggagcccgtcgagaccagcaccacatccgagccaggtgagtcctaattgccccgcacacacgtgggctcctccgtttgaccttcactcactggacggacgaaaagcgtaaataaattatgacgggccgcctcgaactcggtcactttattaaatggccttccacgcatccatggaaatcggacagttcacagcttccagctcccagcgattatcacacacgctcgaacaaaaaggatataaatccggagtagaaatgaattcgtaaccgggaggggaagctacagagcgcaagagcaaataactggcagcaaatgaaatatttcacggcatctgcggcacaaaggcaatcaaagcgagccgagagcccatgggcaaccttaatcccaatcagagtcaacaaacaagcaagggcatcgcgaaaacggggcactgcggaaaatatttggcaacaaatttttaggttgcttttcatattaaattataaaagacatgcttataaggtgcaaggataatggcttttattatgaatcattcaaagcaagacatcatgaagtctttaaagttagttttcaaacgcaatcacaaacattatttttcagtaagaataaagaaaaacatgattgtcatgtatgacaaatcgaaataaattttcgtatagcattcacataaatatttaaaatcattatgtatttcacaccttgtaaaataattatttaacctttatttcgagcgtattatgataatttattaggtaagaatttaatgataaatttagttatttttgatcaaatatattttcaattacatatgtatatttatacattataaattatgattactgaacattttgaacatgtgaaatcattaataaggcgcaaacttaatgcatacttttgattgttagacctttgctcctaaatctcaacgaaacttaattccgctggcagtcaccaataatttctctcagtgcactaggggaaggggagctgaaaggtagctcgggcaagcggcaattgcacgaaagtccgtaatgaagtatggcaggcaggccgtccgaggctggtaatagaaattaatagcgtcatgtgtgagttttgcgaaagggaaggaagactttggacgggggaatgggtggatgtggggtacaagggacaagggaagtgggaaaaaggatacaggggaagtgtaaagtgcccgacagcgacacgcagatgcgcataaagtaattaattcactctgcctccatcggcatcgccatcgccatcgccatccctccagtcggttgccttctaatttcccctggcaaatcgacaggaccagctgttgagctgctgagcttttggggtttcgtccttcagtcaggcaaaagtgcgtcgcacttatcttctttttttttcttttgtggcggatattgcgacttcttatttcgccttttggtgcgcagtttggcagtcagtcaggtgagaggggtgccgattcttagattttctgagatccaaacgttcgcttgacacatgtgaaagcgagggaaatttaatttacatgactcacaaatggaatccatttaatgttgacttatggcgacgaagcactagcgcacagagcactaatgaaatatgcagtagccgagtagcagctaaaaccagagctgcctttcacccatttccatgtgctgtcccataaatcctgggtccccaggatggatgatgatgttggaacgagttgggcgcacactaaaaaatatgcgtttacgataattattttcaatagtagagtagtagtaagccacatataaaagagaagctaactaaaaatatcccttcgaaacatgatataaatatttcataaaataaataggaagccaaagatagatggaacttatttcagtgcaccacacacagtgcattttgcgagcccatggtcacccatgtctttttgccacattttatgtgcttagaacaaagctgagtctgcattatgcatgcaaatggtataactgagtaacgaactgtcaaaatcgcagttaaagcaaaaaggagtcgttgggaaagggatgtagcctcggcaggaggaggaaaaccaaatgacaaaaagtcgccagcgcattatgcatttgcattcccatatatgtgagctaaaggacagagattacttgacttttcctgggctgcctcaaaaataataggaggggtaggaaatgacagggagctcccactgtgtgggaaatgggagttggaattgtaatagctgctggaaaagaagaagagaagtgcttctacccgccagggcatgaatgatttatagggcggcagctgtcgagatgccaacgattatcggccataagctagtcacaggacatttttgcaccaagagaaagaagaaaggagtctttggatgaaactattgttcactgtgcactttatgactaacagagttccgtgaacaattccattccgttaaagctgcctcattttcttctcacgagcttcacgtgaatctggttcttggtccgcagtgttagtccagtttgaaaaacaatagttttcggatcgatttctggtagaatttggaactgcttcagtagggccaccattagggttttcatctcctgcatggcaaatttttgacctacaaagaaaatgatatgtttatccaatcattccatgagagtaagcaatattacatacctatgcaattcctctgaccagcactgaatggaatatatgcgtaggtgtgacgattctgcgagttttcgggcagaaatctctccgggcgaaactcttcgggagaatcccagtactcgggattgcgatggatgtcgaagacatggacaaaaatctgggagccctttggcaagatgagaccgttgctcagctcagtttcccgcgtagtttccctacccatggcgggaacagaaggaaacaggcgcatggtttccttgataaagtattccagattcttcaatttgttcaactgcccgatgttcaagatgttaagctcatctgaaagattttatatgcttatgaaatcgtaagtttactaatttcagctcatttcaccatctatgttagcttggatctcttggtagcatttttcttgctcctcgggatataaagacatgttcattagtccaaacatgagcccaattgaggtagtatcgtagccctcaaacatcaaagtgtccacctcctcacaaattccaatgtgatcgatgaggccatccttttcggcaagaataagggtgtccagcatggcaaagcgctttttactggtaaatctaaagtaatcggtattgttatggacttatggacgactgtcaaatgccttacaattcatcttcagcggtctgagtgtttcctctgctatctatctcatcattcagctgatctctcctcttggcaataatctcgctggaaaatccgtggaccacatcgagtgcagacgcgtaatccttttcggcaaacatcttgaatagtgtatcgctccatagaagtgggttgctcatgcgacgaatgaagcattcttcgatctgacggaagttctcccggtaccgatcccccttctcggccatctcgtccagcttcacacccatggccgtctctgcagatatgtttgtggttttataattaacaaaacttttaaaacgtattgcatctcaccacaaatgctattcagggtaaatctgggaatgacttcgtttaacgagatgattgcctcatcattgcctttgaattgctctaggaacttcagactctccgttctagtaaagttcattttttttttttttgaatagttactacgttagaaatccaaactcacataaaaatttcctgaaactgatttaagatattgaaatggaatgttggggaaagcatcttgcgtcgtgcatgccatttttttcctaaaaagcgtgatagcgttgtaaaacaaatgaagcatgtgctaatccaaactcacccgtggatgtcaacagtccagttctcagaaatggatgaagaaaatcgtaaattgttcccttgtttattagatttggatcattaagcacacgttccgcactatctgcgtctataacattgtagatggccgttcccattgcatattccgcgtagcttttgcccagtttttttgcacagtcacgcgagtgttcaaaaacaccagctgattgtataataagaataacagccatgatatgatgtcattagcatagataagccagcaaagctccccccaaataacttacagtgatctttgccgtacaaatcgaagctgttggcaaatatggtactgcccttcactaatggagcaatgctctccggattctgtccattcttggttcgaatcctcttggcaaagaatccgagaatgcagtagtccctgttcagcctatagatccactgaattagaacaataaaagctcccacgagccacagaattaacatttttagagaaccgcatccgcagatttgtcttaccaaactgatcgctgagatcactagcagccggttttatgaacaaacaattccggtataaaaagcgaaactgattagattgtctcacacaatttcagttcacaagcgaatgctatgatatgagtttggttatctaggtacactgaggaatacattgtgctagtacatgcaataaatattttataaatatacaagttagctgtttattgatatgggtgtaattaagtgattcagatcttcatgagtaacatctagttagaccgaactttaacaaatgattaaataagtcacgttcgcctcacaagctttacgcgaatcttgtcttgggtgcgcagagttatacccgtatggaagacaatcttctgcggatcgatagccttcaaaaccttgaactgcttcagaaggaccaccatcagcgttttcatctcctgcatggcatactttttacctgcaaaataaaagcaatcattagaaagtcattggatagagaaaaacgtgaccttcgcttaccaatacaatttctttgtccagcactgaagggaacataagcgtacgtatgacgatcctgcacattttcgggtaggaatctctcaggacggaactcttcaggcgaatcccagtacttggcgttgcgatggatgtcaaagacatgaatggttatctgggcgccctttggcaggatcagtccattggccagttcagtctcctggacggcttcacgacccataatcggtaccgagggaaacaggcgcgtagtttccttcatgaagtactccagatacttgagcttattcaactggccaacatctaagttgctcaggtcatctgaaaacgatctcataagaggtttctttttagtgctaagtgcagtgggcttaccatctatgtgctcttgaatctcctggtaacataactcttgcttgtctgggtttagggacatgttcattagaccaaaaatgagcccaattgaggtagtatcgtagccctcaaacatcagagtgtccacctcctcacaaatcccaatgtgatcgatgaggccatccttctcagcataaattagggtgtccagcatggcgaaacgcttctttgagacaaatctagtgttacgtgtataagtatatattcaacttgcaaattatttccccaatttacgtacccatcatcatcagcggtgcttgaacttttgtccagctcatcctttagcaagtccctccttttggcaataatctcgctcgaaaatctatgaaccacatcgagtgcggaagcgaaatccttggcagcaaacatttcgaaaagcttgtcgccccataaaagtgggttactcaagcgacgaatgaagcattcttcaatctgactgaagttctcccggtatcgatcccccttctcggccatctcgtcgagcttaacacccatggcggtttctgaagatttgaaatacacaagaatttatagggtgaatctatgaacttaaggtattgacaacccaccacaaatactgtttagagtaaatcttggaataacatcgtgtaacgttatggttacctcatcttgaccctcaaattgtagcaggaacttttgactctccgttctaaaaacgaaagccattggtttcttaagataataaatagaatggaggtatcttacttaaagatctcctggaactggttcaatatgttgaaatggaatgtcggagtgagcatcttgcggcgagcatgccattttttgcctgtaaaaggagtacggtagtatgaagaatagcgccgagtgatgaatccacagtccaactcaccagtcgatgtcagcaagcccgtccttaggaatggatgtaggaagttgtagacgagccccttggttatgagattcggatgattcagcacattttccgcgctatccgcatcgataatgttgtaaatcgcctttccaaagacatattctatgtagctagtacccatttccttagcacgctcacgcgagtaattgaaaacaccagctagacagtcattacatcagccaaatggggtccagcgttcggcttttgctattactcaccgtgatctcgcccatacaagtcaagggtgttgccgaatattgtttttcccttggctatgggagcgatgatctccacaggggttccatcctttaatcgaattcttttggtgaagaaggacaggatgtggtaatccttgttggctctgtggagccagtagagcagggcacttagggccagaatcagccacaagataatcattttggcacaaccgcgttgacggaactctcgtttcacactgattgcacctatcgcagatttctatataaacagctcatactatcagccggttttgtagcaaaaattacacctaaaagctgcttgaactgattagattgcacggtggcgttcccgctgttggcgttcgactagctacgatttgtggttgaattcatctaacaaaaacaatgaatgacttgctagtttgtttgaatgaaagcttgtttcatttgaatgtgggataaccggttttattgttaacaatattcgtccaatgtatggctccaagctacgacgattagcactggagagtcagggttaattagtcatctaatatcaacaacgcacttaaatcaatttagcacttagtaagcatgaataaggaatatcctaaaatcgataaacactaaacgcaattccgcctcacaagcttgacttttattttatttttgaagcgcaaggttatgcccacttggaagacaatggacttgggatcgataacaggcagaatcttgaaatgcttgaggatgaccaccatcagggtcttcatctcctgcatggcgtacttctggcctttgtggttaaaagagatagataatacacatatgtatgagaaccgtatattttgaagacttgtactcttacctatgcagttcctttgtccagcactgaagggaatgtaggcgtaaggatgccttttcaggcagttctgaggtaggaatcgctctgggcggaattcttcgggcgattcccaatacttgggattgcgatggatgtcaaagacgtgtatattaatctgagagcgcttcggcaggattaggccattctctagttccgtttcctggagtgtctgacgacccatgatgggaatcgaaggatacaggcgcatggtttcctttataaagtagcccagataatttagtttacttagttgacttaggttcaggttgctcaggtcgtctagaacggtacgaagaataaaatttatgattctcacgattacgattgcagcgaactgatttacccagaatgtgctcctggatctcttggtagcacagttcctgttcagcggcatatagagacatattcattaggccaaagaccagaccaatggatgtggtatcgtaaccttcagccatcagcgtgtccacctcctcagaaatcccaatatcgtcgattagtccatccttttcggcgcaaatcaaggtgtccagcatggcgaagcgtttctttctaatcacgcatctggttttcgagagaggaagtttattaatgtgaataagtaatttcaaaataagctcacatatcatcgtcagccgtttgagtggctcttctattttccagctcctcttcaagtagtactctgcgttttgcgattatctctctggaaaattcgtgtaccacttttagagctgcgttgtacttgtgtcccgtgaacatgttgtatacacaatcgtcccaatagagcgggtttactatgcgcctggtaagtccttcgtcgattatgtgaaagttcgccctgtagcgatcgcccttctctgccatttcatccagtttgattcccatggcagtttctatgtaagaaatcactgattgttaaagagccactataaacattaaatctttaggtaccacaaatgctatttagggtaaatcgggatatgcggtccttcaaagaaaccacaacttcattttgtccttggaactgacttacgaacttcaagctctccgctctgaaaaaagaaaatttataaaagtttaattgattcattcataagtatgtaagcctgttcatacaataaggaaaataacacaaatgtaagacaaagatgactgcttatccaaagtccataatattgtaaaataaaaattgttacgaaaggcacttacataaagatttcttggaactggttcaatatatccaaatggaatgtcctagtgagcatactgcgtcgcgtgtgccatttcttttctgcaataaagaattttagatccagcattccatttttcagatttcgtttctcacctgtcgctgttagaacgccagttcttaggaaagggtgaagaaaattatatattacacccttcgttatcagattaggatgattcaatatgttcgctgcattatgcgcatctataacattgaagttggaaaaccccatggagtactgcagataactgtctccgctgttcttcgccaactggcgtaagtgagtaaatacctggtctacttatgcgaatagaccaaggggaaaagaagtcttataaagataagaagcccgatgtcaatgttcaccttctacgaaccagtgtcttttcctaagagatcgaagcagttggcgaacacagttcggcccttgatcatgggcactaagctgtccaatggtttgccatccttggtttgaacccttcgggcgaaaaaggccaggatattgtagtctttgtttaccttatagatccagtggatgaccacaagtatggccaccgaaatccacagaagacaaatcatcatgtgggcgaactggatcggtgggcttcgctctcagcactgttttggtcttgtttttttagttccccgctctcgatccacgcgagctttttactatcagcaacgcagagaaccggcacagaattgattagatttggatctattttataaagttagtataaatagtgtacccatgtatgaatatattttttttttttgtgtgctggtttcttcgctccgctggtcgatatttaatctcacgttcacccaataagcttttcattggtgtctaattttaatcgatacactagaatgttcacatttatttattaaagctcaatgtgctttgcaataatctttagtagtgaataatttatctctaaatcaaacacatttctcacaaccgataattgggcttataaattcaaaatctgtaatttcccagctaatttccatcgagatgcctaacaaatttacttcaaactcccaccagctgagtaacaggaatctaatagtcgaggaactgactatatttatttacggtacaaaacgtaaatcttgaattgaagtcaaatgatcattaaagtcgttttggtcgacagcgtgctaaagtcatttgcagtagtaagaaaacccgtataaaatatttttttttgcctttaatgggccatttaataactcgaaagcagagcttgtgaaaaatgccaaaaacatcatcggagtactttaatgaaatgatacccaatccacattgaatatacaagatctgaggctattttcatgaactgttcaagaccacagctatgagataattattaacttaataaacttaacttatataccataaaatgttatgtttgttagcttaactgaataaacatgaatgcagcaaaaagttctcattgcatgattgcattgcaattttactttataaaacatccagctaaaactctcgctttaggtaacattaaacttttgttaaaagtatttcatatagatggcatatttaaaaagttaacttgtatctttcaccttaatcaactgagtggcagtgtccgatgcccttagctcatttttcctttgtcattctgttgcatttgcccggactgctaattggcgattgcaattcatcaattacatggcattctgtgattttatttgccagcgccattatacatcactcgacctactttccgacaaagtgcatgacacgttacggacaaaaggaaaagtgtggaaagggcggagctgggctgggaaaactttaattccaccgtcggcgattaccgaaggccgactggagatggaaatggcggaaaacggaaaatgctgccacgactttagagctctccgctgcagctgactgaaatcctgattttgattccgattccgactctgactctgactctgtttctgctcgagttcctcatggcctccatctctcatgtaaaattgaaacttgagctgtgcgtttgggccacgaccttctgcgccgcccactccgcctcctgattacttgcctgcattccaaatgcatattggaaatttgcaatttcgatggcactcaaagtctggcgacgtcaagtggaaagttcttcccagccaggccaagttatcaaattagatcacatatgaaatatttatggcaagagtttctggcaaacttgaaattgcattacctccagtcaagccaaagtcttgggtgaattcgtttggcaaaccctcactgaggcaaactagcgattattgaatgatttattcaatggattgagacattgttgcctctgctatataatttcattacttctaaatggcaattttgtttgcctaagtgatattataatgtctattattataaataattactaacatatttactttaacaccaattaaagcccatttagcaaaatctatttacatttttctcatttataagtgataatatgcattactgttttttcccagtgttcttatttcccgctttcattatccatccgcagatgcctcgccaggctgtcgggcgccggatgtgcgcttcacgattgtcaagccggaagcgacgacggagcagccgctggccaaattcgagaccacgcagatctacctgccggaggacttcaccacggcggatgtggagttcgtggactcggtgccgcgtcaccccaacgaaaaccatgcggccgtaatcaatccgtactcgctggacctgggcgacgaccacttgcatgtgggcgatgcggccgccagtttggttggcgacgatgatctgggtgacgaggacgaggaccaccacggggacccggaggataagcgcttaaatgccaatcgcaagcagggcaaacgaaggcgcgcgggctcaggccgtcggcggaggattgagaatgaaaatggacagacaggcaggggtcgtggcagtcgatataagcggcatgccattctccatgacacggaagcctcaccggaaacggatcgctgggcgggcagcaagctggcagccgaaggggatgtgtactatgtccacatagccgatatcctgaagagccgtgagccaaatcgtgaattgaaatcgaagctgcacaagctcaaaatgaaggccagactgaacaagtgcctggcggaaggtggcaaggagaagtgcacaaggctcctcaagaagaagcccaagaagaaggtcgtcgagaaggagcagaccctgaagaaggagaagaagttccccaaagaagaacagtccaaggaaaaggtacccgagaacggacaaacaccaaaggaggacgaactggaactggaccatccggagaccgctgctgctcatcaccgccgccgcggggacagtcacgctgcagagctcgaccagcgtgaccggagcccgcgatggcgccgccggcgcagcaccgagttcaagggcgatctcggccagctgccaccggagtccggaatcgggccggagccggaaccgctagcggatcaggatctaaaggatcttcagcagtacggaaatcagtcgagcagtgcacgagtggccctgttgtggcaacgtgttaagcgcaagtccggcaagaccacgggtgcactgagccgtccgaagggtggtggcgactccagctccaagaccaccagtcgcaaggacaagggtgagtgtgcgcccgcacggcggccagacactggcaatgccacagtgcccaatgcctttgaagccttgatttgccgtcgctgtcgctgtctcgttgtctgtctgtccgtccgtgtcgcgctgtccgatctcgcagagatctcacggagggcggaatcatccgctcggaaatcccttgcaaaggttgaagggtcgccgaatggcagtacaagtccaggagtggtccgttacaagaacacgcctgttaactgttggttaacaaaataaaaaccatctttaactttcaaatcttttgacgatttaaatatgcttcaaatgactaatattttccagagcttggtgttaatataatattaatattttaaaatataccatcaggatgtaaatggttttatctatacaataatttttaaattacgcatacgcacagttgaatagttataccttttaaatgcaaaattaagtatacgaccagttagccagccattgaagagtgaaacccatgccagctacgactcccaagcggctggccagcagcctaggcgccgcctcatcatgccctcgagctttataatgtggcaacattttgacaatgtctagcagcgagtattgaaacgcttttgcaagggcatttcagccaacagcagcacacatgagtacacacgaacacccaaacattaacggaagttgagagcggatgacacaccgaacatactcgtaaaagctaatcgcagtcacagccaaagccacagccatcgcatctaacaatagcatcctatccagccatggctcatccccctatcaaaatcacaccttcacccaacacccaaaacgccaccaaaagcccacctgttctggcattttccaccctctccgacggcttttcattaccccatttccgccatcggtgctgcgtggtcatggtttatttgccagtccatatctttgtcatggttagagttcagagttgagagttgtccgctgccggttggccgtttggccctttgttctggccggaatgattttccttttggctcctttgtttgccttgggcttcagctggggctcctttgtccgagtccttctcggcatcctttactgctttattcatctttttttttctattttctattagccagcataatattatctttggtgttatctctgccttttcacatctcccttattttagtgccgtcttttgatggggtttctgggaaatgaagttgtatcctgttaagtggccacttcgccagccttctggttttcttttaatgcatatctaagcacttggagcggcccattgaagttttcagctggcagcacttttcgcacgtctcgtggtttctcgatggcttctccttggcttaatgtgtgtgcccaaggggcgtacttgaggattttgcagcctctttcgcacttttggcgcaacttggagtcgagttttgggtcaacttggatgggcattaagatcgctcattgtccaccggcacttcattagcatactcatcttcatctacatctgcatctgcatcagcatcttcatctgcatttcattcgcatgccgttcaacggctcattagatgcttgctctatttgctctatccccctctgaacgtctatctaccccctcccctgtttcttggcatggtacattgcccatctcacgacgcccacaccttctgctcttctcgtcccgcctcgaatatccaggtatctacgacgaggaggctggctacacgcccatccatccagatgacccggagttcgacgaggaggaggaggaggacgaggaggtcgacatcctgcagcagttcaccgaagtgtcggagattcgcttcccgggcgaaatcggacccatgggcgatcggcggctatgcaagatccgttgcgtcaagggcaagtgggtgggtccgttgtgcgccaccaacgaggagggtaagtgaactactcccgcctgcaacaactcacgcccacgacaatgcaccatcaaatattgaagtattgacatacacacaaatacttagttgcagttgcagatacatagctccaattacagatacacttaagccacacaaacagttgcgaattcatttatttacatacgtgcgcaaataaagactacacaatcagtacacaagcgaatacagcacacaatcagattgttgtttcatttaaacccaattaatattctcgccaattaaagttacgcggcgaaatggaaacgtacgtcgatattttatgcacttaaattttctatcataacaatattccactcatcattcggattttgaatcgctatatctaacctgtaaaagataaattcatgctaaactttgcactttacagcaaagttgacataaaatcaaacataaattatatttatgtatttattacgaatcttcaattttatatcttcagttatatatacgagtttcttaagtttggaccccaaaaaacactttttcagattcttagattcttaagttgttgtagattaatcataaaaacacgccacactctaaacatattggctaagaatctgtacaagtaaacatttggtatgatatctcttatccgtgcggctctgcaatctctagacgataatgggaatgtgaagtttcagccgctctacaagagctgtcacgtaaaccggataccatcgcacttgctgctcagctaccgcaacatttcagtggtaagtggttagaggtcgaaggttctcggatccttgggtcagctggctgccgcactaccaccaccacaaccaccaccacaaccaccaccaccaccactacagcacaagaacacctacatgcaacgcacacgcacacaccggtacacccagaactcgtacatgcatacgtttttagatttccggagattgcccgcgttcatgtctttaactctaactggactgcttttgcgagaggatctcagctcagctcagctccgatctcaatttcgatttcgatatcgaattcgatctcgactccgaccttgatctactatctctctctctctctctcactctctctgcctgcgcctctgcttgtctctgtctactcgcacctgtctatcgctctattctcatatctcagcctgaaaatctcacctaagaattcttaatatcgtaatactcgtatcgcaatttcgcaatatctcaagaccagcgaccaagccatctgcatgggtgaaatacaaacgaaaacgattctctacagtatgtgtgttttttggtactctctgattctctctcttgcagacaccgatcccaccaaatcgcggctggcgtaaaacgcgattatccaaatcgacacttctctcaaatacagaaattgtgagtcgtcgtagtagctgtgtagtattgtgtagaattgcacccaaaagaaacccacaggcaaagcaccgacacacacagaaacacccaaaagataccacccacaaacacccaccactagcagggagctaacagataaaagatacagttcacaagatacaacatagtacaagttgaacgtaacaagtttcaacataccagatacagatacccacactcagatactcgcacacggagaatgttaaatgcgaggactgcacgccagagcaaccagcgccactttcccagttcgcgggaacgtctgattatttgataactttctccactttctctctctctctcttcctctttctctcggtgctatctctccccccatcccgacctccaaaatacctgcaaaataaatgcaccctttcgcttttcctcaccgcttgcttgcgttttgctccttctgcagaatgtgggatgggatctgccgcacggacactctctgcaggcacgctgccaggagctgggcatctacaagctcctgggagagtcgagggtcctctgctccaacggcctgtgggcaccgcggatgcccagctgcgtccccaccacggtgctgaccaactactcggaggacagcgccccatcgatccgcatcaagatcttcaatggctcccactcctttgagccatccggcgtcatggccgttccgccgcacagcacagtgctcatggactgcatgtatccgagggttaggggcactccggaatggagctggaccagctggtacatgcagtattctacaggtaagccgacctcctactgttgtacttaaagagagtgacttctaggaaaaagagcgagagaaaacgctttaatcgtgttttgagtaccgagtctaaaaacactaacgagaaaatatggtccttcaactgcttgataactataatactccgattagtttcagattaaaaccattgcagtgtgacatcgctctgatttttcggaaaaattacctctcccttttacaggatggtctccagcccaggaggagaaagcggtgcgctaccggctgagcatcaagaatatcgagaacaacgactccggcaccttcacctgcacctcgccgcgcggactgaccaacagcattgccgtcgtggtggccacttcgacgtgtccgcagctaacagagccgctggcgccgctcaagctgcgcctcgagggcaataagctgggccagcgggcgcactacgagtgccccgagggcttccggctcgacggcgcctggaacgccacctgcctggcctccggcaattggtcatcgccgacgccgacctgccatgccattcagtgtccacgtctggagctggacgacccgcacctcagcctgatcgagctgaacacctcggcatgggggcgggcggtgttcaaatgccagtggggcttcaagctgaccggaccggcgcagctggactgtgagccgtcgggcgtctggagtggccccgttccgcgttgcaaaggtgagcgatgcactcgaaactttcttgataaggaagtatgtaactatcttagtaactttcgttagggggccttataaactggctaaatataagcttatattttatgggtactataaatttgccatctgcaaatcacttaatcccccatacagctgtctaaaagtatgcaatgaagaatctcgtttttgtattgcccacttttcgacaccttttaaagttgctcccaattctcctggcatatctgtgcttttctgttactaactttcgaataacctctgttgctggtgcacccctctgctgaccgctgccccccccccgcagtcattcagtgcgtgatgccagtggcgccgctcaacgggcgcatcgggggcaccagcctgagccagaggcgcctcaccgtgggcgccctggtcacgtttagctgcaacgacgggcacagcctggtgggcgagtcgagcatcatctgcacggagaacggacagtggtcgcactcgccgccattttgtaagtagactcgctactcactcacacactcactgacatagacacgtatatgtatatgcgtgcgctgcgagagattgccggcgcaccgcaccgctccaccgttccaccgatcctcctcctcctcgtgggcccgctcacagatcaacccaattaatgactcttgtgttgtatttccgccgaacaaacgaccgatttcgataccgatcacgaatcatcattaacatacctgatacctgaaacctgaaaccacctgatacaatccgtacacgcacgcatgacatgcccactgaccatccacgatctcaggcaaatcgcagtgcccctatcccggcgatccgcccaacgggctgatagcgccgctcaagttcaactacgacgccggagactacctgagcgtccagtgccggcccggatttgtccagagttacgagggtccacccgagcggcccaaatgccagccggatggccggtggtccggtccgatgccgaagtgcaagagctacgaggaggtgtaacctccaggaccaccagagattgaagccaagggccaaggattcgccgccaagtcagcattacgggtcctccatctgagcggatgctgtaattccgaatgcagatcgaaaccgagtgatatttagattaacttagtgagaggtatcaaaattaatagatattttatcagataggttcaattcaaatcattgtctttctgtggcccacgaatctttcaagaactctccttttgaaactatgtatgtatgtactctaaacagatcaagttgatcttgcacactctacagatatttgttcttcagattgaataaactttgcgcttgcatttcattacgaagtatccttgtactaacactaactatttaatgaaatatataatcaacatctgcgtacaggtatttatgtattacgtattctggttgcaactaaaagttacataaatgtaaatgtttaaacgaaagcaagcgaaaatcttacccacagtgcgaataaaaaccaagaaaaagcatatagatatattatatatatatatacagattaacgattctattccaccatataaatgtattacactgacagaaatgcggattgcagcagcagttgttggacgagtgttgattagttaggagctaagaaatgccaagctaagtggccctttaaagtcatatccataaacgattccttgagaggcagaggagcacacatatgtaggtattgcatagtgtattgtaggcagctgcaatctttgtgtaaagtaaagaccgttttaaataaaatacgatattgtgtaaaatgcaattctcggccttaaactctcttttgcctgttggctgtgggacttctctgaagatgtaatgtatccgttagctccgcgaaagtgtgccaaggaaatccatgtgcacgtgtttctctttcgcctaagccagctgctaatgcgagcacacaggagtaacatcccctgcagcaacaacacatacagttgcagcatccacagcagcagcagcacctactgcagcagcatctacggcagtaacatctacaccagcaaccaaagcaacttcataagcgtgagctgcactggaaaaaaagctttgtaagcctgtgaagtgtattgcaacttagaatgtttaatcttctatcttcattttccaattcatttttgttttggatttcatgtgaccttttatatgaaaaaaaaccaagtgtgacaatgtaatctaaagtccgacctcaattaggaaattatccataaccctagattaagtttacattacacgaatctaaattatttggattatgctttaaaatgctgaaatcactttagttttgtcctgtgcacttcaccatttccgaacagctgaatggcagggaaccaaacggaagtgaaattcatttaaaagttgagaggggcttggaaatttagttggtaatcttcccaaggtttccccttcatatgcgcgcgtgtggcatacagtttgccagcggagcccgcaatgtgcacctggaaaattaatttgttttgttgctttgcacctcggaacgattgaggcttcatttcccgccgccagctcattttccacacatggccacagaaacgccattgtcgtttattctcagccacgccttcgctcatttaatggcaatttggttgtggatatggatgtgggatgtgagggcgaatcgatgtctggatgtctgtgtgctgtgtggcctggtgctcctgatgggaaaaggtgtccaaattgaggcgccccgttgtcacagcagcagcaacttgtgtgcgctgctatgtgcgtaa

SEQ ID NO: 2978 - DNA, 4010 bp, DROSOPHILA
tcgctcgagaggataggtgcccagcttcgaaaaggataaaaccccgcaaaggactctaagtaaaagtgaaactttaaagccaaagagcacacacacatacacatacacgcgcacacgttgcatacagtttggcgcgagtgtgggttactgctggcggtacgccagtgtgtgtgtgtgagttggccaagtggatttctatttttggcccattaagaagtcaactcgtgaagtgcagtggtgttaaattcgttgctatttgaaaggactcatcgggttgcttaacaaacgaaaacaaaacaacgccgaaactctggcaatcgcaatctgatccttggacatgtggagcaggcagcgaatgcgccataagccgctttgggccctaatatccttgaccgttttgctgctggtcctggacaaaagcaatgccaacacggagcccgtcgagaccagcaccacatccgagccagatgcctcgccaggctgtcgggcgccggatgtgcgcttcacgattgtcaagccggaagcgacgacggagcagccgctggccaaattcgagaccacgcagatctacctgccggaggacttcaccacggcggatgtggagttcgtggactcggtgccgcgtcaccccaacgaaaaccatgcggccgtaatcaatccgtactcgctggacctgggcgacgaccacttgcatgtgggcgatgcggccgccagtttggttggcgacgatgatctgggtgacgaggacgaggaccaccacggggacccggaggataagcgcttaaatgccaatcgcaagcagggcaaacgaaggcgcgcgggctcaggccgtcggcggaggattgagaatgaaaatggacagacaggcaggggtcgtggcagtcgatataagcggcatgccattctccatgacacggaagcctcaccggaaacggatcgctgggcgggcagcaagctggcagccgaaggggatgtgtactatgtccacatagccgatatcctgaagagccgtgagccaaatcgtgaattgaaatcgaagctgcacaagctcaaaatgaaggccagactgaacaagtgcctggcggaaggtggcaaggagaagtgcacaaggctcctcaagaagaagcccaagaagaaggtcgtcgagaaggagcagaccctgaagaaggagaagaagttccccaaagaagaacagtccaaggaaaaggtacccgagaacggacaaacaccaaaggaggacgaactggaactggaccatccggagaccgctgctgctcatcaccgccgccgcggggacagtcacgctgcagagctcgaccagcgtgaccggagcccgcgatggcgccgccggcgcagcaccgagttcaagggcgatctcggccagctgccaccggagtccggaatcgggccggagccggaaccgctagcggatcaggatctaaaggatcttcagcagtacggaaatcagtcgagcagtgcacgagtggccctgttgtggcaacgtgttaagcgcaagtccggcaagaccacgggtgcactgagccgtccgaagggtggtggcgactccagctccaagaccaccagtcgcaaggacaagggtatctacgacgaggaggctggctacacgcccatccatccagatgacccggagttcgacgaggaggaggaggaggacgaggaggtcgacatcctgcagcagttcaccgaagtgtcggagattcgcttcccgggcgaaatcggacccatgggcgatcggcggctatgcaagatccgttgcgtcaagggcaagtgggtgggtccgttgtgcgccaccaacgaggaggacgataatgggaatgtgaagtttcagccgctctacaagagctgtcacgtaaaccggataccatcgcacttgctgctcagctaccgcaacatttcagtgacaccgatcccaccaaatcgcggctggcgtaaaacgcgattatccaaatcgacacttctctcaaatacagaaattaatgtgggatgggatctgccgcacggacactctctgcaggcacgctgccaggagctgggcatctacaagctcctgggagagtcgagggtcctctgctccaacggcctgtgggcaccgcggatgcccagctgcgtccccaccacggtgctgaccaactactcggaggacagcgccccatcgatccgcatcaagatcttcaatggctcccactcctttgagccatccggcgtcatggccgttccgccgcacagcacagtgctcatggactgcatgtatccgagggttaggggcactccggaatggagctggaccagctggtacatgcagtattctacaggatggtctccagcccaggaggagaaagcggtgcgctaccggctgagcatcaagaatatcgagaacaacgactccggcaccttcacctgcacctcgccgcgcggactgaccaacagcattgccgtcgtggtggccacttcgacgtgtccgcagctaacagagccgctggcgccgctcaagctgcgcctcgagggcaataagctgggccagcgggcgcactacgagtgccccgagggcttccggctcgacggcgcctggaacgccacctgcctggcctccggcaattggtcatcgccgacgccgacctgccatgccattcagtgtccacgtctggagctggacgacccgcacctcagcctgatcgagctgaacacctcggcatgggggcgggcggtgttcaaatgccagtggggcttcaagctgaccggaccggcgcagctggactgtgagccgtcgggcgtctggagtggccccgttccgcgttgcaaagtcattcagtgcgtgatgccagtggcgccgctcaacgggcgcatcgggggcaccagcctgagccagaggcgcctcaccgtgggcgccctggtcacgtttagctgcaacgacgggcacagcctggtgggcgagtcgagcatcatctgcacggagaacggacagtggtcgcactcgccgccattttgcaaatcgcagtgcccctatcccggcgatccgcccaacgggctgatagcgccgctcaagttcaactacgacgccggagactacctgagcgtccagtgccggcccggatttgtccagagttacgagggtccacccgagcggcccaaatgccagccggatggccggtggtccggtccgatgccgaagtgcaagagctacgaggaggtgtaacctccaggaccaccagagattgaagccaagggccaaggattcgccgccaagtcagcattacgggtcctccatctgagcggatgctgtaattccgaatgcagatcgaaaccgagtgatatttagattaacttagtgagaggtatcaaaattaatagatattttatcagataggttcaattcaaatcattgtctttctgtggcccacgaatctttcaagaactctccttttgaaactatgtatgtatgtactctaaacagatcaagttgatcttgcacactctacagatatttgttcttcagattgaataaactttgcgcttgcatttcattacgaagtatccttgtactaacactaactatttaatgaaatatataatcaacatctgcgtacaggtatttatgtattacgtattctggttgcaactaaaagttacataaatgtaaatgtttaaacgaaagcaagcgaaaatcttacccacagtgcgaataaaaaccaagaaaaagcatatagatatattatatatatatatacagattaacgattctattccaccatataaatgtattacactgacagaaatgcggattgcagcagcagttgttggacgagtgttgattagttaggagctaagaaatgccaagctaagtggccctttaaagtcatatccataaacgattccttgagaggcagaggagcacacatatgtaggtattgcatagtgtattgtaggcagctgcaatctttgtgtaaagtaaagaccgttttaaataaaatacgatattgtgtaaaatgcaa

SEQ ID NO: 2979 - protein, 958 aa, DROSOPHILA
MWSRQRMRHKPLWALISLTVLLLVLDKSNANTEPVETSTTSEPDASPGCRAPDVRFTIVKPEATTEQPLAKFETTQIYLPEDFTTADVEFVDSVPRHPNENHAAVINPYSLDLGDDHLHVGDAAASLVGDDDLGDEDEDHHGDPEDKRLNANRKQGKRRRAGSGRRRRIENENGQTGRGRGSRYKRHAILHDTEASPETDRWAGSKLAAEGDVYYVHIADILKSREPNRELKSKLHKLKMKARLNKCLAEGGKEKCTRLLKKKPKKKVVEKEQTLKKEKKFPKEEQSKEKVPENGQTPKEDELELDHPETAAAHHRRRGDSHAAELDQRDRSPRWRRRRSTEFKGDLGQLPPESGIGPEPEPLADQDLKDLQQYGNQSSSARVALLWQRVKRKSGKTTGALSRPKGGGDSSSKTTSRKDKGIYDEEAGYTPIHPDDPEFDEEEEEDEEVDILQQFTEVSEIRFPGEIGPMGDRRLCKIRCVKGKWVGPLCATNEEDDNGNVKFQPLYKSCHVNRIPSHLLLSYRNISVTPIPPNRGWRKTRLSKSTLLSNTEINVGWDLPHGHSLQARCQELGIYKLLGESRVLCSNGLWAPRMPSCVPTTVLTNYSEDSAPSIRIKIFNGSHSFEPSGVMAVPPHSTVLMDCMYPRVRGTPEWSWTSWYMQYSTGWSPAQEEKAVRYRLSIKNIENNDSGTFTCTSPRGLTNSIAVVVATSTCPQLTEPLAPLKLRLEGNKLGQRAHYECPEGFRLDGAWNATCLASGNWSSPTPTCHAIQCPRLELDDPHLSLIELNTSAWGRAVFKCQWGFKLTGPAQLDCEPSGVWSGPVPRCKVIQCVMPVAPLNGRIGGTSLSQRRLTVGALVTFSCNDGHSLVGESSIICTENGQWSHSPPFCKSQCPYPGDPPNGLIAPLKFNYDAGDYLSVQCRPGFVQSYEGPPERPKCQPDGRWSGPMPKCKSYEEV

SEQ ID NO: 2980 - DNA, 3512 bp, DROSOPHILA
ggaaaaagcaagaacaactcgagtggaatgtacaacgggatagctgcactcgacgaaaaaacgttgtaacatataagtagcggactgattaattcaaacaactagtttaataacaatattattaaaaaattaggatttatatttaatgtttgtttattacatgatatttaaataaattttgtactcaaacatatgacttaaatagtttttttgatttttctactagagtacatacttatttttccggtgctgtgagaggggcgcgggggcggggcacggccgcaatggactgcaaaaatattaactaccttttagcaaaaagcgggccaagctgacgtcaagttttgtagaaaattatgttttacaatgcgaaaattgaatttcagtttattgttttctgctgcttgttcttgttccgccattttccattttccattttctattttctttttctctcacaattttgctttacgattaactgttaaatgcagccgacttttcgccgttttgtggctgcaagtcaacgacttttccatgtgtgtttggccgtttggctttcttgttattttttatgcagtttacaagaacatggcgaaaaccggctggctgccaaattgaacggaaatatttactgctacgttcgttaagagtaaaaaaaaaaataaaaacgctctagagatttatattcttgtgagaaacttcggcgaattacgatgaactcgctagagattttaagtaagcttaagtatcttaagtatcatctgttttttttaaggaatattggtttgtgggagttataaatagaatcgcagcacaaaataaagtgaaatgaaaatacattgttttgttagacatattattacagtaaactttatccaacaatgtgctgttgattgttgattaacccttaggctgtcacgtctcttttccatcataaaatgattgcatacatttaggctgcgtttattttaacactaacaaaacactaggaactacttattcacgcacagcgatcactctctctgtctctgtctcttcgctgtcgctctctcgctcgctcgcgccgccgccagctgttcgtccagaggcgcagcaccagggggctttggctaacctgactgaccttgctcgacgacattcgccccaccccgctcagccagttggtctgacgcctcggcacgtacggctgctggggggcggtgcggaaatagaagctaccctgcgcacgcctctgcgaatggataccgaagcgcgccttccggttgccatcgcaatatccggcggcgaattcccggtagctgccgcactcgtagcccacgaacgggtactcgggatccatcgattgccggaagaagatcgcagccgccgagtgactgcaggaaacgggatctgccgaatgataatggtttgtatcttatttcatagctcttcagcgagattacatattaaataagcggcttatctttgaaataatcctatgatatagatggccttgacttactggtattttgcatgtcacgcagattggcgaacatcttgcaattcgtttgcggcgccctgcctccgttgggatagaaatcggcgtggccgcacttcagactggtgcccaaggagccgccggaagtgtgaagtacctggacgaactgcgcatctcctggatccaggcggtacttgggcgccacctcggcgggcagcgagaacagcggtccagcgggatccaagcctatgatctgctccacctgaccctccaacactgcgcccgcatatccagcggcatgggcacccaagctgtagcccgccaaggtcacgttgcttcgatgaaagtgattgggacgcagctcctccagggccatgatgattccagccaccgttagacccacatcgaaaatggacatggatgcggacttgtagtcgttctgcgacagatttccccagtccacaacgcacacattgtaattggagtcgaatagggtccaagctgggtataagaaccgaaattcgaatgatgattatgtggataaggtgagtatacatacttagcaataactcttgcacccaatccttgctgccctgatcattccagccgtgcaaaaatagggccaactttttgttaggatcgaggcgacgaaatcctcgaaggtctccaagctgcagattgaaatgcacttcattaccaaaatccttagctgatctggaaaaaagtcgaagttcttagctaaaaatacgcatttattatggaaactataaaattgtttgaaaaaactttaaaattgaagaacagatgaataaagctgaatacaaaacctacacccacttacatggtgcgacactcgaagacgatgccatgattgagatgggcacgttccaggctattccggagcatggtctcctggagatagcggaaggccttcatcatgggactccagcggtggaaagcctcgattctcggcacatcgccgagcaggcagagcaggcagccaaggagcagaaggtggttcacgtgaccgggcatgcggtcaaagggtcatgcaccaccgaaaacaccacacacacttgcacactcactgtcactgagcaacaccagaaaaaaaaaagaaatagaggagcgaagaactgggggagttaaccgagatcttaagacacgctcttctggaccgaatggtttgccccgtggctggctactgaagaactcgactcgcttgtaactccaaaagacccgtgaagacgatgatcatcatgacgctgatgatcgtgatggaaaagtacacttgggaaaattacaagcaagcatagtaatggttctgaagagcactagaaataatatattaaaagatcagatataaatatgtataaagtatttcttaaatatatgaattttataacttagtttaaacaccttcaacagcattatgccttgagatacattaatatagcacagatgcacagtacatgaatttctcgtattttcgcgcagtgtatgtgatgctgatgaccctgctctccgagagctctaaacatctttggcgttcttggccgcgtgtttgcacaagtgaaagtacaaaaaaagcttgtaacgactttttgacttcgatttcgatttctttcggctgggaattcggctttgggtttttcggtgtttggtatttggtattcggtactcggcacttcactgatcttgacatagaatccagcaaacggtagcgacgaatttctgtcttgtcatggctgttgtttatagcttatagtttactttggcagctgagcaaaccgcacagcatcgaaatcgataataaaaccgaaagacaaggcggcgcattcaggcctcatctcggatcgaataggttaattttagtgcagccataaacttcagagggagttgatctgggcacacgctttctcgatgcagtgagagaaagggagttgtcagcagaatggatgtaatcttaatacttaatacttaaacatcatatactcaaaaacctctttacatacttgaaaactatgctaatatt

SEQ ID NO: 2981 - DNA, 1215 bp, DROSOPHILA
atgcccggtcacgtgaaccaccttctgctccttggctgcctgctctgcctgctcggcgatgtgccgagaatcgaggctttccaccgctggagtcccatgatgaaggccttccgctatctccaggagaccatgctccggaatagcctggaacgtgcccatctcaatcatggcatcgtcttcgagtgtcgcaccatatcagctaaggattttggtaatgaagtgcatttcaatctgcagcttggagaccttcgaggatttcgtcgcctcgatcctaacaaaaagttggccctatttttgcacggctggaatgatcagggcagcaaggattgggtgcaagagttattgctaacttggaccctattcgactccaattacaatgtgtgcgttgtggactggggaaatctgtcgcagaacgactacaagtccgcatccatgtccattttcgatgtgggtctaacggtggctggaatcatcatggccctggaggagctgcgtcccaatcactttcatcgaagcaacgtgaccttggcgggctacagcttgggtgcccatgccgctggatatgcgggcgcagtgttggagggtcaggtggagcagatcataggcttggatcccgctggaccgctgttctcgctgcccgccgaggtggcgcccaagtaccgcctggatccaggagatgcgcagttcgtccaggtacttcacacttccggcggctccttgggcaccagtctgaagtgcggccacgccgatttctatcccaacggaggcagggcgccgcaaacgaattgcaagatgttcgccaatctgcgtgacatgcaaaataccaatcccgtttcctgcagtcactcggcggctgcgatcttcttccggcaatcgatggatcccgagtacccgttcgtgggctacgagtgcggcagctaccgggaattcgccgccggatattgcgatggcaaccggaaggcgcgcttcggtatccattcgcagaggcgtgcgcagggtagcttctatttccgcaccgccccccagcagccgtacgtgccgaggcgtcagaccaactggctgagcggggtggggcgaatgtcgtcgagcaaggtcagtcaggttagccaaagccccctggtgctgcgcctctggacgaacagctggcggcggcgcgagcgagcgagagagcgacagcgaagagacagagacagagagagtgatcgctgtgcgtga

SEQ ID NO: 2982 - protein, 404 aa, DROSOPHILA
MPGHVNHLLLLGCLLCLLGDVPRIEAFHRWSPMMKAFRYLQETMLRNSLERAHLNHGIVFECRTISAKDFGNEVHFNLQLGDLRGFRRLDPNKKLALFLHGWNDQGSKDWVQELLLTWTLFDSNYNVCVVDWGNLSQNDYKSASMSIFDVGLTVAGIIMALEELRPNHFHRSNVTLAGYSLGAHAAGYAGAVLEGQVEQIIGLDPAGPLFSLPAEVAPKYRLDPGDAQFVQVLHTSGGSLGTSLKCGHADFYPNGGRAPQTNCKMFANLRDMQNTNPVSCSHSAAAIFFRQSMDPEYPFVGYECGSYREFAAGYCDGNRKARFGIHSQRRAQGSFYFRTAPQQPYVPRRQTNWLSGVGRMSSSKVSQVSQSPLVLRLWTNSWRRRERARERQRRDRDRESDRCA

SEQ ID NO: 2983 - DNA, 3127 bp, DROSOPHILA
ctatttaagccatttcagtaaataaatagtaaaattgtgacaacttcaatcgacaaattggattctcaaagccttatttacacatttttagttttccaaataagcaggaaatttcaatttagtttcaagtgttacaaaatattattattcatatagtttacatctattttttttagaaatattcattctgcaaattattcgactttttgctttctgaaggaaataagccaaaacatttttcaaaacaatatttacatgaggtcatctttgccacctgaattcattaccctcgctggctaatattataattaatgaaggctctatgcaaatttatgaaacggaaaatatctcaattaacgatgggatccgtgcgagaaagccttcataattcatcgatcagacataatgaaaatcgatttaggctgcagtcatcttcgtgctccattgaaagtgattttcggcgaaaactctcatggcgcagccattttggcacgtaaccaggcgacattttggcctggggccaaccaaaacaagaagatatagaggaaaactgcccacaatctaatacgcaaagtagcattgaatatacgcgaatgtaaaaatagaacaaagtgcaaaaaacgagcaagacgcagtcgaaggaatgttaaaactaatgaaaactgcggcaaatgtattcaattttccaaggtgcagaatgtttctgggaatattaatggttttgacactttggaagcattgtttataaagggttaacaattaaataaggcaaataacagcctacacataacatttgtttatctcaagggtttctaaatttaaacgccaaatcatctttgatttgctgatttactacgttagtctgtgtgaatatacccagttccacctgatacatgagcgaacttggaggtgctcagtcgtgaggtcggacgtcattgggaatcggctgtattcagtgcccgcaacgcattcctatcacatctctgctccgctccccttcttacaccttggccgcccgatggccgaaaatagaagagccaacgcgcaccactgtgctgcccatttcgatctgagggaatagtttcgattttagagacggaacttgctcagtcggtttgtagcttaccgccttgtcgaagtcgttggacattcccatggagacgagcaccgagtccggggccaaggagtgcgcctcacatatggatctgtgcacctgcattagggacacgaaatccggattgggtccattgctgtagtcaaaaccaaatgcaccaatggtcattatgcccatcaggttgaggtgtttaaggttgctcttgatgtactggtagagtgcaggagcatctttcgcctctattccgcttttaactagaggtcgatttaggaaagtaagtataaggtcgctagtttgggggcgtgagactcaccgtcttcaccactagtgttgatctggatgagcacctgcaatggctcctcaggggtgggctgtcgcttagaccaggctgcgtccagtttggtggccaacttctcgctatctacggtctggatcatatgcagatttggcacagaaaggatctaaataaacaatgagatcaataagataaagagaggtgctgataagagataaacgctgttatccgatcttggttatccaattgaccttgttgatcttgttgctttgcatgtggcctatgaagtgccacctgatgtcggggcacttggccagaatgtccgggtggcggctcttctcctccagctcctgtacatagttctcaccgaagtctctttgtccgccctcgtaagcctcgattacggcctccgctggctttgttttgcttacagcaacgagcagcggcctggcagcttgaacttcctgtgcgagagataaagtttttcatttaagaggtcattaataagtgggtcttaagttaacttactttgggccgctggaggagcacctcgtctatgcgcttcaacacgtgctgcaggccggctttgacgtcgaattccgccattgtgcgtcttagcatttaactaaaaaatgcgagatgaataatattctttatatataagtacagataaatagtagttattgttcttacaattggttaactcaatgataagaaacagcccttgcaaaaataaaaacaaaaccttcgagtcgatcagctgttcggcagtgtgacctgagtttactgaatataccaataaaatacttttagttttgaaaatacagatgaaggcggggagttttaaaagtaatttaacgcctaacaccaaagaggatattgtttttaaggcatatgaataaaatatttagttttagctttagctaagaaaaagtcgaaatccaattgcctttgctttggcagtaagtttcgccgcactttagctttcgaaaaccctgtgccggggagaaatgccttcactgggacgcacacagactcctcgacttcagccatggctgacgctattaggtgcgcctgcgagtcactgaactccgcgctgggctacctggtcacgatgaggatctccgaggtccgccactgcttcgagctcctcggagtggcgcacgtagaggtgctcgcaggtgtgattgttttcattctgatgcagttcaccaagttcacggccgtcctgatgttggccattctcctggcgtacggcattttctacctggtaagccaagtgttactactgctactgagccctcctaacgaaaccatccgcagtgggacaccttcttcccagaaatcagtcatctcggtcgcaggggaatgaagatgttccgaaacgtgcgcacctccgccaacttgcctccatttgcttcagacactgaggagacgcctggtaactaaaactagaactaaactacatcttacgaaatagcctcatatataacgtttatttctccaggagagtaccagatccgtccgaggagccagcactacaccactggcatgataactcccccgaacaccatcaacatgccgatgctcctgccgatggtacaaacgaataatctcaggacgacaagcctgcaaacggatcgtagaaggcaggaggaggagaacaggaggggatcccgtggaagaggacactcggcacatcaggaatcgcaggacac

SEQ ID NO: 2984 - DNA, 794 bp, DROSOPHILA
tttcttatcattgagttaaccaattttaaatgctaagacgcacaatggcggaattcgacgtcaaagccggcctgcagcacgtgttgaagcgcatagacgaggtgctcctccagcggcccaaagaagttcaagctgccaggccgctgctcgttgctgtaagcaaaacaaagccagcggaggccgtaatcgaggcttacgagggcggacaaagagacttcggtgagaactatgtacaggagctggaggagaagagccgccacccggacattctggccaagtgccccgacatcaggtggcacttcataggccacatgcaaagcaacaagatcaacaagatcctttctgtgccaaatctgcatatgatccagaccgtagatagcgagaagttggccaccaaactggacgcagcctggtctaagcgacagcccacccctgaggagccattgcaggtgctcatccagatcaacactagtggtgaagacgttaaaagcggaatagaggcgaaagatgctcctgcactctaccagtacatcaagagcaaccttaaacacctcaacctgatgggcataatgaccattggtgcatttggttttgactacagcaatggacccaatccggatttcgtgtccctaatgcaggtgcacagatccatatgtgaggcgcactccttggccccggactcggtgctcgtctccatgggaatgtccaacgacttcgacaaggcgatcgaaatgggcagcacagtggtgcgcgttggctcttctattttcggccatcgggcggccaaggtgtaa

SEQ ID NO: 2985 - protein, 249 aa, DROSOPHILA
MAEFDVKAGLQHVLKRIDEVLLQRPKEVQAARPLLVAVSKTKPAEAVIEAYEGGQRDFGENYVQELEEKSRHPDILAKCPDIRWHFIGHMQSNKINKILSVPNLHMIQTVDSEKLATKLDAAWSKRQPTPEEPLQVLIQINTSGEDVKSGIEAKDAPALYQYIKSNLKHLNLMGIMTIGAFGFDYSNGPNPDFVSLMQVHRSICEAHSLAPDSVLVSMGMSNDFDKAIEMGSTVVRVGSSIFGHRAAKV

SEQ ID NO: 2986 - DNA, 13023 bp, DROSOPHILA
tgcttggaggactggacaatttgtgctgatctgtcgccggttacgatgatcttatatacccgtagtgtcaagaatctgaaaagtggagcaataaaactggccaaaaagaacgtatacggatgcaaattttgtgcggggttcgtttaattgtttagatattgattttgggatgccattatcattgatatttgccagatttaccagagacgatcgaacaatgcgtgccgaagtcataacttatttgagacgcctttcaaatcgccaaaacaatgaggacgttgttccttttgcgacaggtgatcatctcacctggcgaatttccgcacctttgatgaattcttgtgcaaattgcttcattgcttcataaactttgtgctgggtttactgtcttcgttttttttttggctttttctatttttggctaaactcaatttatgagcccattgtccacgcccattatgattttcggttcaccgaaaataatgcaaatttatgcaaatttcagtgaagcttcctcaacacaaatagcgcaaaaacacaaaaattgtttgcttttggttttctcatacaaaatattttggcaatgtgaaaagtaacattattagtttttaattatgctataatcttttacacaactaatctctctttaatttcgctgtttaattgccctaatgcttttgagcgaatttcttttgatgttcgagagtcttttggtagtttaccttttttgtttaataaacatttatgtaaatctattgtttaaggccactttctcccagaaaaataaatatcatacgaaaaatggaaaacaatgaagggcttttgtttaagtttcattcatagataattagatgcaaagcatattattaatatatttaaatgtgtttaaattttataactgttataaatttgcttagcattaatcaacacttgcaatatcgattgtcgataggcgccgatagtcccgcccaagtactaaaaaacacagctgtttacatcgctccatctcgctcgctcgcttttcgctgtggatttctattttttttttttattgtattaaacaaatcgcaaaaataggtctttaatggcggtgtaatcgaatcgtagttgtaaacaaaaacaaataaaaggggcgggaagtgcgagacaacataaacatttggggaacttcgcattttgcaacatgagagcggtcaattagcaagtcaacaacaacaacaacaacatggcgcacctgcacctaaattcttcatgttgacgtcaacaaagtgaaatccgatcaagaaatcgtagcgatcgcagagaagggaccgccatacggattatcgggtgaataggaagcatcgaggaggaggaggattaccacgatccccaggatcatcaggagcagcagagtccccaggatccctagagtccttggactcctcaccacaccaggatgtactccgagtgggcctcgctgtctgcccaaatcacagccaacagctgcggcgcccagtgcttcagtgtgctcaacaaattccccgcctccgccggacgcgaagtggtcgtctccgtggtcaagcagctgggcaccaatctgggcatcacgcagaatgcagagcccagtcacctggtcaaagacgaagaggtgggtcatcgtagctgtcccacacgggatggtttactataaagcaggctactcgtgtagaaagctgtaaagataattgttagataaatgttttattacaattacttctatattatatactatagtcaatactatatattatatggtcaggaagggattttagatttcaggaaatctgcttattttttatgagaagcaaagtagtatccttaaaatgcctaaaacgaaatagtatatcttatatcaaattgaatcttaaaccggaagttaaactttcttcatacaattttcttaactttaagacttgcaaaaacattgcttacacacatgtccaacaaagcattagtttaatgagtgaaataatgtattagtaatgttctggaaaagcttccattaaatccataaaattgtgcatgtaattgccaaatgaatgaatgcaaactcaatttatattacctcaatctggaaacgaaatataattgttgtttgttggtttaatgtagaattgctatttatagaatgcttggaatgttctcatagaaaaatacgagttttccttggaatggaaaatgttgaaacttagataactcagattacttacaataactcgattcgattctaggtaaaatggtgcatggacgtgatctgcttcggactttcgcttcctctgcaggaacacgagacgatcaaggattgcgtgaatgtgtactgcgagtggctgacggcgctgcatccgcagcccaggatcagtgtaccgaagccgatatgcgaggatgccaatctctatgctcgccagatcatcaatcactttcacaatctgtttgtgccgcgccagggcgaaagtaagtagatgaccaccaggcccatggattttatgatttatatatgctgtcccttaaccccgctctaaatttcaagtcttgccatttctataccaaaccacgcttggtaggttgctcatgctctttacatatacacacgtacataggttgctcttgggaaaaataatgtctaagctgtgaaaatgctattaattctttgacaatatttgtcctacgagtagaggactagaatccattcgaatattaaaggccacaactaatacttacacttaatggctttcaggtgcagatacaattaaacggcaggcagtgctctgccatcgggtgctacgaactctgcagcaaactgctcagatatcgcagctaatggatcggcagacgtgggacacgctgcttctctttctgctggctatcaatgagatcctgctggcgccgcccaccgtcaaggacgatgtgggcgatcagctgtgcgagcgtgtgctatccgtgctcttcgaggtctggcttctggcctgcgttcgcagttttccctcaccgtcgatgtggaagacgctgcaggagtcgtgtgccatgtggcgacaccgtgtagccctcgtggatcaatggaatcgagtgaacttggcactaaccgctcgcctgctggagttcagctatggtcctgcgtttccacagctcaagaatggtgagtttcgttatgtaaatattataacataataatttgtaatcttcttaaacatccacagccgacgaggatggccagctgataccaattggaatgtccaacgactgtgtggcccagacttggtaccgcttcctgcgtatgattggcaatcccacggcgctctgttcaccacatatcatcagcaaatcatcacactttgttcagtgggcgttgacccatgaaaagggcgccgagacgcatcagcatccctgcctgcaacaactgccgcagatcttcctcaatgccatgaagggaatttccagtcaagtggacgcttttctaggtaagatcctgtttggaatttgggtgttgattcttttgggagcctggtacttgtgtaatgccactttcaattgtctttgtacaacttgaatgttaaaaacacaagtaccaggttccatgttgtcggtaaatccaatattgtcgctcttcaacgtttagcattagattattgaaaggctagctgagtatttctttctcttttctcttgttcgtttgtttatcgctggttttgctaatcccaaaaatttgtatctaaatcgaaaatgcctaactgaaattcgcttgaacaatcgtgcaaaaaaaaaaaaacaggcgtttatcagccgccgccgcagcaaacggatggtgtagtgacgaatctgctggaaatacggcactcgctcaacgaggccacctcctcgaccctgcagcagttcatccactcgagtagcgccacgaatattgcgaaccagcagaatcagccagcccatcaccatcatcacctccactatccgcatttgcatttacatggcgctggtagctttctgcgcgacaatttcatgagcaactcggccagctctgctctgaatgccataatgggtcaccatggcggccaccatggccaccaccatcagcagcagcagcagcagcagcagcagctccagataagtgcctcgcccaccagcagcctgacgacgagcggcagctccgccgtgggcagcaccagtgccggtggcagtcactccgccggagtcgttggcagcatatcctttggcgccactgaatcgcctggaccgggtcaggcctctgcctctgccacgcccacaccgccacttcagcgacgtctggcgaaaagcttcagcgtagcacctaccatcacacaacagaagggtgcggctctccacggagaatctctatttggataaccaccgaatgttgtattctttgttgtgacacgaaagttatgctaaaactttatcctggcagtggtagttgagggtatttagttgttagtaatatgactaaaacttcatgttgaagtattcaatttaaagatgtaatcaattttgttgtaaaattgtctgattatagaaatgtaagcccatttttgagagcttgtagctattgaatcttttctagcaatacttttatacaaatctcaatacagatcatgagcaaatacgtagtttagtttatatatgcaaattgataatgatcttaatggttttggcaacgacttacccatctgccagggtatctaaacttcggtgcaccgaagccaaccttttgtttcattttttttttgtgccatggcgtgcttctgaattgacctgacttggtttgcttatttttttgcttgcctagatgttgtttgccttgatccatcgccacatttctcccagccaagttcgcactcacgagttttgcattttagtttttttttttttttccatctttcgtattattttgtttggcatctctgtattttttttttttgtataatttgttccgtagcatgagtggaataatctcggtgtaattgcccggcgcggatgagtcgggccgagtaactgttgccactttccaccggcggattatgcattgtaatttatcaacgaacgcccacaattatatagcatgctccctttgtatctgtatctcgcgctccgcatatttgtatttaatttctctaacaatttctcacacttgctccacgctgctccactcacccatcgcattgcatctcaggcttgagcaagacctcgcttattggcctcaccggcggtggtgcacgcaacgcgatcagcagcagcagcaccaccaccaccaatgccggcagcacgggaggaacgggatcgggagatggatccgctcctgctccgctgcccacaactcccacgtccacgtcgggtccgccgtcggcgagtagcagcatcaactgtaagtgcattgggaaaacaccaaactgatcttggccctgtggttctccaacttaacttcgaacagtttaaagaacttcattttacaagtattttcttttgcgcctatgaaatattttaagaaacttgatttagatatgcacatgagtcaagatcaatctgctgtttttttagctcgtaaattaaccgataatatccatccgcggatggttatatattaactaattggatccattgttttgtgtgtgctgtgtgtgaatcgtttgtgagcttctaccgtgccgcctaactatctaacagatgttttaaccgccccccattgccgtgattgctacgctctctctctctctctaacaccgtttgctctctctttccatccctgtatatctgtctctctcactaccgcgatcgcagctctgccgttgacttcgatgggagcgggtgtcgagctggccgtggccagacccaaatgcaacagcattctccacgtattccacgagtggctcttcgaggcggcgcacatcggaggcgacacttggcggcaaaatcgtaaaagtgagttccggtatttgtaatataaattgtatgggtagtaaaattctttactacagttcgagctaaaagattacccaatctcttattaacactacatgtgtacatttttttttatccttcctcgaaaatagagcaagcatgcgaggccagtaaacggccatcgtcgatgataatggagcaccgcaagggatcgatatcgttgtcgcagcccaactctctgaacgatccgcaatcgttgccacccacgctgaccatcgacaagtatgagtccggccgagccgaggccattggaacgctgtgcaagatcttctgtgcaaagaagacgggcgaggagattctgcccgtctatctggcccgcttctacatggcattgcagcagtgcctgaagattacagagtcgcgggaatgcgacgagacgttggccagcatcctgctgcattcgagtgacctgtttcgcctggacctggatgggattaatgtgctgctgcccggtttcattgccgccttggaaatcgtactgcccgacaaggacctcaagctgaagacgcaatcgatggtctttaatcgcaccgaattgcgccgttcggcgattaacatcctgctgtccatcatggtgctgccgttgcactaccaaacgctgcccattcgggatttgacctgcgaatcgagcgagaagtatgtggtatagcttgttgtagctgctgtaattgatataacattatgttttaatttcgccagaatgtttaccttcatccaactgaagtcgcggctcatgaacatcttgatgaatgccctgcaggtcgagacggatgcccaaaacacgcacatgcttctgggcggcctgctgctctgcgttcaggatgccgtcaccttcgaggagacggaactgggcggcggcaatgccaatctctcgcagaactcgagtggtgtgcagcatcatgacgccaatctactgagttcgggttagtttctacagctccaagggcagagctcttgaactcattccattttgatttgtttgaatttttgtattatttaattgcccacctttttttattcgcatttcattttggcatttttgtgtgttttttttttttttttgtgggctgttgatgagcagcgtgctcggagcgttccgcttcgctggtcagcgctggcacagccagcttgggcggtcagacgacggccaccatgggagcgggatcgggctccattcgcgacaccgcctccgcccacgactaccccagtctgaccatatccgatgacatgtcattcgagttcggccaggaactggaaggggtgaccacctatggtaaactttgttttctttgtattttgattatatttatattaagttgttggctaaagttttttatagtctatattgttcagaatatttacataattattcttgtcagcttattggactcgaactaatacaattctttcttttagataatgcccatgctctatttgtgcgcgccacgtatttggtctgccatcgtctgatctcgtcgtggaagacggatctgaatgtttcgctggccgccttggagttgctgtccggcttggccaggttacatatccgggaaacaggtaaagtttgcttctcattttgatgtgcatatgctcctgcaaaggttttgtttcggatgctgatggaatttatgatataggattcattacaattgggataccaaatcctttgcaagagcatcaaaaggcttcggtggtgcaccgaggctgcactttcctttcctgattttaatgtcgtttgttttctgtccacctctgtttgtttattttcgaactgttaccatgtgcgtatcctttaaatgttaaatcccgctgtaaaaacctccaattatccacttaatccacttaatccctaactgtttgctttgctgtgcagccaggaaatttacaaatggtaattgattgacgaagccaactaacctaactaacgccactttcttctgtctttctttctttcttttttttgtcgcgtttctttttctaaccgccatcgaaatcgcaccaccaccactgcaccacatcccgaataaatcaaaaaataataacctaataataataatatgacccacctcatccatatcgccatctatcaactcacgttgattgcaatttgtttctatatataatatatgtgtatatttaatttgcatctccaaccgataacgaatgtatataaccccaacaaccaccaccaccaccaccaccaaccaccaaccaccaaacaccaaccactcatccaaatcgcccacgtagacaccttagtgaaaatatacgaagctagtcagaatctaacgataatctcctcagacgctctagagtgcaagcgggccgtgaagtggatctgtgactatatatgctaccagtgctcccgtccgccgccggcgcatagcaaggatctgcacagcaccattgtggcggcctttcagtgcaccgccgcctggctgatgcagcatccctatttgctgcaggacaaggattgcctgcaaacggtcctcgaggtggttgagctgggcatttcgggcaccaagagccagagcaagggcaccgatatacccaaatttaaggacgaaaaggagctaaagcccgcctcgatgagagtgcgagatgctgctgagaatctgctgacaattatcctcgagcaagtgggctatttccccagcgaatgcggtccagagtccatatcctcgctattggatgagctggcgctcatgaagcactgcaactctatggtgccggcggcggcggccagcagtgagcaggccattgccaagtttaagtactttgtgaccgagaactccaccatattggcactgctcgaggagccgttgggcaatgaccaggatccccaacccacagtgactcgtgagtgtctatcaatcgaaactttttgcttcactttattgatgaaaatttgtgactttatttagtgctcatacgcggtccctttggtcgacatgcctggaccatgcagttgcgtcatctgcctcgcagtaagtctgggattaagtaccatgccattaatcctggcaggcccatacccatgaacgatgtgacgcaacggctggatagcgagcaaaagaactttcccgacggcgtggacaaagtgcaaccgtgtgtggcggactactctatacccaccatcgaacaaatgcgcgagcaatacggcactgctgtcatacgggagctggagtcgttgctggagaaccagagcattcacgagaaactggcctgggcggaggcggacaccagtgcggatagtttgtcgcatgcccaagaatgtgtgccgccaacggtgtgccacgagttccatgcggcgcgtctatttctctcacattttggttttctgggattcgagacgcggaatccacagaatccagctgaggcactgggcaatccgccacagcgaccgctaatcgtgctggacaccaagtccgcagccttcgccgccgatctggatcgtttggacaagctgagtgcgaggacgcacgacagcgtttatgtgttctatgtgaaggtgagtcaatttcacatttccttacatttcgatttatatgctaattgattcaatatttgcagagtggccaaacgagtgcccagcagattatcgccaatatgggcgaggaatcgtctgccagccatgatccgcacttcgctagcatgctgcaaacgctgggctggccggttcaggtttcagaacactctggctggacgggctttgcccacaactcgtggtcactcaagggaacgcccgaggagcagctaaagtccactgccaacgagctgaactataatggatcacagagggtgctctactgggcggatgtgtcatcggaaatcgccttcgtggtgcccacgacatggaatctgcgttacaatagcgacacttgcgatagtggaagtatctcgagcacggatcagattggctccagcaatgtctggacacgcggagaggccgatagtgcggctggcctggcaaaatccaagtcaaggaatcttagcctagaactcgacacgaatcgcagggatgtaaaggagccagttccgccgacgcgacgaaaaggaaatgtgacgaaacccacactattggcccaggcgccggccaaaatctttttggtgtggctggagagctatgaggattacctaaactttccgctcgaggatctgctagcctatacacgcactggcgaggagctgcagacgcaacagttgcctcgcgcctccgactgtcacgtgatcttcgtgcattcgttgctctcgggacttctgagagtaaagttgcagggtccaccgggaaggatgagctttgccacgcccctggtcgatggcatggtcctgagccggcgggtagtcggaaatctggttcgacaaacggcattgaacatatcacgccgccggcgtctggacaatgataagtaagtgagcgggtaatccccacatatctgtgcatcataaaacctaactaataaaatctcatccctttgctttagctaccaaccgcctcatgtgcgacgacgactcaaggtgcaggacattgtccagaagtacaaaatggatctgagcgaggccgatctgttggcccatctgttccaacgcgcaatttagccggctatcggaagtattattaacccgctacctagtttaagagccagagaagtggtcttttctatattctgtattaacgtgtgcttaactaaaaccccaaaacaaaactgatccataatcggtgtccactgagtgttacccgattgattatcgtatgctaattattatttattgctaataaatcgaattatactttgtaaaagtatttgtaatattataagccatgcgtttttcgcctccgttttgggcaatccgttcaagctatgctggtagtggaaacaatggctctccatgtgtattcacataattggcagccacatccgaaatcaattttgtccacagcatgtgggtacgattcgagatgatcgcgtgaggagcaaatgaaagcaagacgtgttctaattgaaatgtttatatattgaaaactaaataaattagtaaaatctatgtttagtttaatattcaagttaatggtttaacaactccaactatgatgaattcatcttgtaatctcgtgagtgaaaggtccgtgcttcacgtcgccttctctttcgggttagcacagcatcttgttagtttcaactttgacttggatgtctgggagtcttggagtctgggagtcgaaactaaaaattgggtccactgatcggaggtggggcatttggacacacgctagcccggcatttcgcaactccagcgacgggcaatcaattcaaaacaaaactgttgccggccaaggggccatctcgtcatcatcaatgaaagtcgtgatgtaatcggctaacacgttacacattttgtggctggttttgcatatgtatatgtatgtatgtttgggccatttatttattaacaaataatataagttaatgatgaagaggccggattgccagctcttggcttttcattgtgcttttctcagccttgaaaatgaaattgggtaagcataacaagtttttgaagatcttcgtggtatttgttgagtttatttatttcttcaaataataatgatgtatttaattatttacaaattatttctttacaaatatttacgcctgagaggcaactaaaataaatgcattgttatgatgaacctgtcatttagaaataattgtgggaaaatagtgttacaataacttgaactgcattgttatttaagtgtgattgagttgattgttttgcaacaattatttaagtcttttatggaaagtgtctttggaatttgttaagccattaacaccatttgctttatttcgactttatggccagcttatttgtggtatgtaaataaaacactttaaattggttcaaattgtttattaacaaataatttaagttaataatgatggatgtttttttttctgataatgactgtgaagaattagcctaggaaaaaaaatacataacgatagaatagaagatagtgaaaaaaaaaacaattcatttggtctaactaactaggcgagctgtggatgcagtgcatctaccaggccgagggtggaccaccgctgctccagccaccggaagcggcacctccgccggagctccagccaccggaagcggcacctccgccggagctccagccaccggaaatggcaccgccaccagagccccagcctcccttggagccaccagcgctctgggattgctgctgctcctggacgcgcatcaccttcagggttccccgctgcaccacgtgtccgcttttgaagaaggctccctgcgcctgatcggccttcaaaatgatagccttgcccttggagccgaaggtgttgatcagctggccattgatggcagccacatcagcggatccaccaccgccgccgccaaaggaatcctcctgcagcaccaactggatgatctgcggcagaatggcattgaactgctgggtatcgaaggaggcgccaccaccgtaaccatgtcccgaagcatacgactggccgtaggagtgcgaatggccctgatcataggagtagccattggagccactggcagcatgataggcaatgggagcagctggcggagcaggggcaggaatcgaaatcggaatgggaacgggggcaggagctgggactggagccggggcctgttcgatgatcttgtatatctgggcctgctgaccgccataggatccgtgaccactggcgtagccatgaccatgaccgtgactgtagccatgaccttccgaggacacaatgccgccggctgatcctccagcgttgctgtagccctgaccctcctgcagaatgaccttgatgatctgcggtgagccaccgtgtccatgtccgtagccatgtccctgcgcatacccatgacctccgccgcctccctgggcatatgaatatccgtgacctccgccgccgccgccgccaccaccaccaccaccgccgcctcccgaactgggcgtggctatcacattgtaagtggtcttgctac

SEQ ID NO: 2987 - DNA, 5218 bp, DROSOPHILA
ctccatctcgctcgctcgcttttcgctgtggatttctattttttttttttattgtattaaacaaatcgcaaaaataggtctttaatggcggtgtaatcgaatcgtagttgtaaacaaaaacaaataaaaggggcgggaagtgcgagacaacataaacatttggggaacttcgcattttgcaacatgagagcggtcaattagcaagtcaacaacaacaacaacaacatggcgcacctgcacctaaattcttcatgttgacgtcaacaaagtgaaatccgatcaagaaatcgtagcgatcgcagagaagggaccgccatacggattatcgggtgaataggaagcatcgaggaggaggaggattaccacgatccccaggatcatcaggagcagcagagtccccaggatccctagagtccttggactcctcaccacaccaggatgtactccgagtgggcctcgctgtctgcccaaatcacagccaacagctgcggcgcccagtgcttcagtgtgctcaacaaattccccgcctccgccggacgcgaagtggtcgtctccgtggtcaagcagctgggcaccaatctgggcatcacgcagaatgcagagcccagtcacctggtcaaagacgaagaggaacacgagacgatcaaggattgcgtgaatgtgtactgcgagtggctgacggcgctgcatccgcagcccaggatcagtgtaccgaagccgatatgcgaggatgccaatctctatgctcgccagatcatcaatcactttcacaatctgtttgtgccgcgccagggcgaaagtgcagatacaattaaacggcaggcagtgctctgccatcgggtgctacgaactctgcagcaaactgctcagatatcgcagctaatggatcggcagacgtgggacacgctgcttctctttctgctggctatcaatgagatcctgctggcgccgcccaccgtcaaggacgatgtgggcgatcagctgtgcgagcgtgtgctatccgtgctcttcgaggtctggcttctggcctgcgttcgcagttttccctcaccgtcgatgtggaagacgctgcaggagtcgtgtgccatgtggcgacaccgtgtagccctcgtggatcaatggaatcgagtgaacttggcactaaccgctcgcctgctggagttcagctatggtcctgcgtttccacagctcaagaatgccgacgaggatggccagctgataccaattggaatgtccaacgactgtgtggcccagacttggtaccgcttcctgcgtatgattggcaatcccacggcgctctgttcaccacatatcatcagcaaatcatcacactttgttcagtgggcgttgacccatgaaaagggcgccgagacgcatcagcatccctgcctgcaacaactgccgcagatcttcctcaatgccatgaagggaatttccagtcaagtggacgcttttctaggcttgagcaagacctcgcttattggcctcaccggcggtggtgcacgcaacgcgatcagcagcagcagcaccaccaccaccaatgccggcagcacgggaggaacgggatcgggagatggatccgctcctgctccgctgcccacaactcccacgtccacgtcggctctgccgttgacttcgatgggagcgggtgtcgagctggccgtggccagacccaaatgcaacagcattctccacgtattccacgagtggctcttcgaggcggcgcacatcggaggcgacacttggcggcaaaatcgtaaaaagcaagcatgcgaggccagtaaacggccatcgtcgatgataatggagcaccgcaagggatcgatatcgttgtcgcagcccaactctctgaacgatccgcaatcgttgccacccacgctgaccatcgacaagtatgagtccggccgagccgaggccattggaacgctgtgcaagatcttctgtgcaaagaagacgggcgaggagattctgcccgtctatctggcccgcttctacatggcattgcagcagtgcctgaagattacagagtcgcgggaatgcgacgagacgttggccagcatcctgctgcattcgagtgacctgtttcgcctggacctggatgggattaatgtgctgctgcccggtttcattgccgccttggaaatcgtactgcccgacaaggacctcaagctgaagacgcaatcgatggtctttaatcgcaccgaattgcgccgttcggcgattaacatcctgctgtccatcatggtgctgccgttgcactaccaaacgctgcccattcgggatttgacctgcgaatcgagcgagaaaatgtttaccttcatccaactgaagtcgcggctcatgaacatcttgatgaatgccctgcaggtcgagacggatgcccaaaacacgcacatgcttctgggcggcctgctgctctgcgttcaggatgccgtcaccttcgaggagacggaactgggcggcggcaatgccaatctctcgcagaactcgagtggtgtgcagcatcatgacgccaatctactgagttcggcgtgctcggagcgttccgcttcgctggtcagcgctggcacagccagcttgggcggtcagacgacggccaccatgggagcgggatcgggctccattcgcgacaccgcctccgcccacgactaccccagtctgaccatatccgatgacatgtcattcgagttcggccaggaactggaaggggtgaccacctatgataatgcccatgctctatttgtgcgcgccacgtatttggtctgccatcgtctgatctcgtcgtggaagacggatctgaatgtttcgctggccgccttggagttgctgtccggcttggccaggttacatatccgggaaacagacaccttagtgaaaatatacgaagctagtcagaatctaacgataatctcctcagacgctctagagtgcaagcgggccgtgaagtggatctgtgactatatatgctaccagtgctcccgtccgccgccggcgcatagcaaggatctgcacagcaccattgtggcggcctttcagtgcaccgccgcctggctgatgcagcatccctatttgctgcaggacaaggattgcctgcaaacggtcctcgaggtggttgagctgggcatttcgggcaccaagagccagagcaagggcaccgatatacccaaatttaaggacgaaaaggagctaaagcccgcctcgatgagagtgcgagatgctgctgagaatctgctgacaattatcctcgagcaagtgggctatttccccagcgaatgcggtccagagtccatatcctcgctattggatgagctggcgctcatgaagcactgcaactctatggtgccggcggcggcggccagcagtgagcaggccattgccaagtttaagtactttgtgaccgagaactccaccatattggcactgctcgaggagccgttgggcaatgaccaggatccccaacccacagtgactctgctcatacgcggtccctttggtcgacatgcctggaccatgcagttgcgtcatctgcctcgcagtaagtctgggattaagtaccatgccattaatcctggcaggcccatacccatgaacgatgtgacgcaacggctggatagcgagcaaaagaactttcccgacggcgtggacaaagtgcaaccgtgtgtggcggactactctatacccaccatcgaacaaatgcgcgagcaatacggcactgctgtcatacgggagctggagtcgttgctggagaaccagagcattcacgagaaactggcctgggcggaggcggacaccagtgcggatagtttgtcgcatgcccaagaatgtgtgccgccaacggtgtgccacgagttccatgcggcgcgtctatttctctcacattttggttttctgggattcgagacgcggaatccacagaatccagctgaggcactgggcaatccgccacagcgaccgctaatcgtgctggacaccaagtccgcagccttcgccgccgatctggatcgtttggacaagctgagtgcgaggacgcacgacagcgtttatgtgttctatgtgaagagtggccaaacgagtgcccagcagattatcgccaatatgggcgaggaatcgtctgccagccatgatccgcacttcgctagcatgctgcaaacgctgggctggccggttcaggtttcagaacactctggctggacgggctttgcccacaactcgtggtcactcaagggaacgcccgaggagcagctaaagtccactgccaacgagctgaactataatggatcacagagggtgctctactgggcggatgtgtcatcggaaatcgccttcgtggtgcccacgacatggaatctgcgttacaatagcgacacttgcgatagtggaagtatctcgagcacggatcagattggctccagcaatgtctggacacgcggagaggccgatagtgcggctggcctggcaaaatccaagtcaaggaatcttagcctagaactcgacacgaatcgcagggatgtaaaggagccagttccgccgacgcgacgaaaaggaaatgtgacgaaacccacactattggcccaggcgccggccaaaatctttttggtgtggctggagagctatgaggattacctaaactttccgctcgaggatctgctagcctatacacgcactggcgaggagctgcagacgcaacagttgcctcgcgcctccgactgtcacgtgatcttcgtgcattcgttgctctcgggacttctgagagtaaagttgcagggtccaccgggaaggatgagctttgccacgcccctggtcgatggcatggtcctgagccggcgggtagtcggaaatctggttcgacaaacggcattgaacatatcacgccgccggcgtctggacaatgataactaccaaccgcctcatgtgcgacgacgactcaaggtgcaggacattgtccagaagtacaaaatggatctgagcgaggccgatctgttggcccatctgttccaacgcgcaatttagccggctatcggaagtattattaacccgctacctagtttaagagccagagaagtggtcttttctatattctgtattaacgtgtgcttaactaaaaccccaaaacaaaactgatccataatcggtgtccactgagtgttacccgattgattatcgtatgctaattattatttattgctaataaatcgaattatactttgtaaaaaaaaaa

SEQ ID NO: 2988 - protein, 1523 aa, DROSOPHILA
MYSEWASLSAQITANSCGAQCFSVLNKFPASAGREVVVSVVKQLGTNLGITQNAEPSHLVKDEEEHETIKDCVNVYCEWLTALHPQPRISVPKPICEDANLYARQIINHFHNLFVPRQGESADTIKRQAVLCHRVLRTLQQTAQISQLMDRQTWDTLLLFLLAINEILLAPPTVKDDVGDQLCERVLSVLFEVWLLACVRSFPSPSMWKTLQESCAMWRHRVALVDQWNRVNLALTARLLEFSYGPAFPQLKNADEDGQLIPIGMSNDCVAQTWYRFLRMIGNPTALCSPHIISKSSHFVQWALTHEKGAETHQHPCLQQLPQIFLNAMKGISSQVDAFLGLSKTSLIGLTGGGARNAISSSSTTTTNAGSTGGTGSGDGSAPAPLPTTPTSTSALPLTSMGAGVELAVARPKCNSILHVFHEWLFEAAHIGGDTWRQNRKKQACEASKRPSSMIMEHRKGSISLSQPNSLNDPQSLPPTLTIDKYESGRAEAIGTLCKIFCAKKTGEEILPVYLARFYMALQQCLKITESRECDETLASILLHSSDLFRLDLDGINVLLPGFIAALEIVLPDKDLKLKTQSMVFNRTELRRSAINILLSIMVLPLHYQTLPIRDLTCESSEKMFTFIQLKSRLMNILMNALQVETDAQNTHMLLGGLLLCVQDAVTFEETELGGGNANLSQNSSGVQHHDANLLSSACSERSASLVSAGTASLGGQTTATMGAGSGSIRDTASAHDYPSLTISDDMSFEFGQELEGVTTYDNAHALFVRATYLVCHRLISSWKTDLNVSLAALELLSGLARLHIRETDTLVKIYEASQNLTIISSDALECKRAVKWICDYICYQCSRPPPAHSKDLHSTIVAAFQCTAAWLMQHPYLLQDKDCLQTVLEVVELGISGTKSQSKGTDIPKFKDEKELKPASMRVRDAAENLLTIILEQVGYFPSECGPESISSLLDELALMKHCNSMVPAAAASSEQAIAKFKYFVTENSTILALLEEPLGNDQDPQPTVTLLIRGPFGRHAWTMQLRHLPRSKSGIKYHAINPGRPIPMNDVTQRLDSEQKNFPDGVDKVQPCVADYSIPTIEQMREQYGTAVIRELESLLENQSIHEKLAWAEADTSADSLSHAQECVPPTVCHEFHAARLFLSHFGFLGFETRNPQNPAEALGNPPQRPLIVLDTKSAAFAADLDRLDKLSARTHDSVYVFYVKSGQTSAQQIIANMGEESSASHDPHFASMLQTLGWPVQVSEHSGWTGFAHNSWSLKGTPEEQLKSTANELNYNGSQRVLYWADVSSEIAFVVPTTWNLRYNSDTCDSGSISSTDQIGSSNVWTRGEADSAAGLAKSKSRNLSLELDTNRRDVKEPVPPTRRKGNVTKPTLLAQAPAKIFLVWLESYEDYLNFPLEDLLAYTRTGEELQTQQLPRASDCHVIFVHSLLSGLLRVKLQGPPGRMSFATPLVDGMVLSRRVVGNLVRQTALNISRRRRLDNDNYQPPHVRRRLKVQDIVQKYKMDLSEADLLAHLFQRAI

SEQ ID NO: 2989 - DNA, 7079 bp, DROSOPHILA
tttacgtgttctcataagatatagtttatattaatgtatattcatatttttacccattcattatctcttggcgcatttagaatttaagttttttttttgcattttccttttttattttacggtttggtattacttataaacaaatttcatattatagctatagtttattagctagcgttgtgtaactttcctccgcagggccattacttacattgttaaatcgaaacgttaatgcaattgttttgttgtgtatgtctaacgcaatttatatgctctctatcttagttacatgattttgttgcgtaaacaaagggctgccccaactcccagctcccacatctcgcatcccatttgcccaccgctcgggaaatgcgcgcttaagtgtttaaaaatcggaaagatatatatgaacacaggcagcaaagtgcagaccacgaaagtatatatatatatatatatatatatatatatatatatatatatatatatatatatatatatatatatatataaatatatatatatagataggggagtaggcggtacagaaggttacataatataacataggagggccttataagtcagagcgttgcttaaagctagagaactgcacgtggtaatcgcaatcattttaccatcaacttaggttacaatgtgggtgccttgctgtgtggcatatgcttttgtatggattggattcgctagagctagagcctatagtctagggttagggacactcgctgaacgcggtgtcctttgtttcttttacacaaatattacacttacaatcgagttattatgtgttcatgatcggttctgcatgttctgcctgatttggtctgggacttcaagttaacaaagaaaaagttgagccggccaagagcaaatagtcaaatgcaaaacagaattaaatgcctgcgtgtcctgctaaccctcctcccaaacccttccgcggacccctaatcaaccgccgatctattggccaatcttcaggcagggatctcaaatcaattgaacagtgcggtttgttgcagtttcttgcagccaggttgcaatcgtttatgttctaatagtataaattaaattaatcataggctagttaattaataataagcgcgctcaacgttctaacatctgggagcagaaaccaaaatgtcaaaaaacaaacgaaaatgtacacacaaaaaaagaaaagcgctgcgctttgctatgctctgctcttcttctctcactgctcttgtcctccgtttctggcagggacctggtcatcctgccgcttggatacattcaacgtgttttaccgcatatataaagcaagtattatatatattaggtatatataactatatatactacatgtatagtttgttgagttctgttgttgtttgtctactgtgtcgtgtccagcgtcgcaacctaaacgataaaatattatttggcgttccccacgccaccgccccctccgccgctcggcataccgcctacgcccactccaccgccgccaccaccgcctccctgccgcatccgtatcgaaggccgacgctccggcgtgtcgtacggcggtctcgacgagttggtggccgccatcgagtcgtccatgttgagtccgttgccgccgatcagttggctgccgttaccgcctccattgccgcccagcatcgccagcgtttggccgccctggagttgctgttgcgctgcactgcctcctccgccacccagcgccgcattgaccttgtgctgctgttgttgatgcgaggaggcggctgccgctgctgccaccgccgctgctgcggccaccgcatcatgacccgcctggccgtccgctccgtcctgcgcctgctgaatcgcctggggattgcgaggtccgccaaacttaagcaggttccagtcaaacacatagtcgtaagtgaagcccaaacggtggaacaagttgcggaagagtttgcgcaggtggcagtaatcgggacgctggtcgaaatgcatctggcgacagaagttcagatagttgacgaactcgctggggaagcccttgcacagcaccacaatcgaggtggacagcttcttctccgagatcctctcgtacttttgcctcttgttggctgcctttaagccctgccagggcaaggcgcccagattgaagtacattaggacgtagcccagggactccaggtcgtcacgacgcgattgctcaatgcccaaatgtgtgttgatggaggcatagcgggcagtgcccgtgaggttcttgttttcccgatagggaatgtgcttcagcgaccgggcatcgcggaatttcttggccaggccaaagtcaatgatgtacaccaggttgccctttttgccaagacccatgaggaagttatccggcttgatgtcgcgatggatgaagtcccgcgagtgtatgtaatcgatgcgggagatcatctggtccgccagcagcagaaccgtcttcaacgaaaagcggcgtgaacaaaagttgaagaggtcctccagcgagggtccgagtagctccatcaccatcacattgtagtcgccctcgctgccgcaccagattatgcggggtatgcctatgccaccctgcatcgtcttgtagaactttgactcgatgtgcagctgggggtgtttggtgcggatgcactccagcttgatggccacctcctcgccagtgttgatcgtggtgcccaggtagatgtcgccgaacgatcccgatcctatcttgcggcccaggcgatatttgttacccacgcgcagctccattttgttacgtctgtttctgtgggtttctgtgtggtagagttcggactcctcgggttcctcggatttgcgttgcctttctgcgggaccggagaattgaaatttagttttaattttacaacacattgcctcgaaaagaaggctgtacgcttttcttactcataatactacacgctacacgaattgatcgatcccagttcagattagctgcgcttaaaatattatacagatttaaatatctacgccaaggactaaaacttttactttgtaatcgcgaaaggatattgaaaggttgctacgatgcaggcaaattgttgaattcgatcagaatgtaaatattcgtagtattcttagttgctttgactaatcatagaaatagcagcggcgtcacaggtttttacgagtaaatatgaatcaagtgacttcgaaaattcggctattgaccactagcaacaatgtgtgatattattagaagagattatttgcaagcaacaacacaatatcgaacgccttgttagcgatagtgataaaatattcgtcggattttgtttgctacaacttttgattcttctgacactatattgtgacacgtgatgacaaccctgctgttttgtacagtttgctaaaagtctaattttgagagctaacggagcttcgtgagtattttccaacacttctccacttttctcacctggcactgtcctttcgtctgagctcctttcttcttcttgttccgatttgttcaaggcagtcgcttatggctttgtattcgaagggttctgtaataggaggtactaagttaatttttttttagatcctcaacatggttaatcgaaattcgacccgtctcgcgatcacttatatatagagagtaatcccctgtttttatcgcatctgcagcgtaagcccgaaaaacgtgcagaattcgcttttgtttgtggtgataaggattgtggcacacagacatgaaaacaacgcacggcaacaatcgatatcgaaaatagaaaaccgttagctaagaataaaacaagagagagagagcgggagagaagtaagcttggcttacgttgacaacacaaaaatagcagagaaaagcgtaccaaaagcaattcgaaatgcaaatgcacagtgggcaaaaatgataagaacccgaacctcgcacaaagtaaaagtttatctcgtatatttatatttaagagtgagtgcgtcattgcattcggctgtgtgtattgattacgaatggggaaaacaacagatttaataagtgatgagtaacgataatttatatgcacagagcaaaatagcactactttttgacattcgtcacattattgttttagtcattttaatattatattgtactattataaaataaagcaaatgtgccgtagtgcttttacatccttgaatagatataattctttttttcaagtgtattttttacgtgacgacaccagaaacatggaggtgaatcagcaatcaggaaaagacaacgaagagattaacaacaaatagataaaagagacgtgtgtttgtgtatgcgtggagtaaacaatcggcgacaaaagggagagaagtaaaataaaacgcagcgactgtgaaaatgccacttaaatgacactttcagtggtggaaagcacaaacaaatagcgaagataaagcgcatggaagtcagaaaacgaagcaacaagccgaaagttttcacttgccggtcaaatatcacaaaaatttagtttaattgttttcggcggctctcactcactaaccccttcccactcctctttcccacattctgtgcgctttcttttaccgctcacgcatttcgatcgctctctctctttctctctctctctctctcctccttttcccgactctttatcactcactctgcggttctaacctcaaaacctgcctgtgtttgttgttgttttcgccttggctttgatttatttaaccgaaatgtaccgttttttatttgtatctcccatgttctacacagaaagaaatcactgtataagcactgtaagtcaaattgaaatgtggtattaattttaggagctttaatttgtttactggaaggctagcagggaaaacgcggtctttcctattggtaactaaatatttcccagggtatccagcagttgtttcggaccagcgggtaaacacgaattgattacaattgcaaaacagctgcacgttgcgttggcggctgccgaaaagcttccgcaaaaaaacgcactggagaacaaagaagatacaaaaaacagttgttccagcaggcgccacaaaagtaaaaagcttaagtaaacagggaagagcaaatggaaaaaccaaaaaccagagcaaaaccaacggggaaacctcagaaggggaaggaaacttgcaattaattgtcaaacgctaatggcctccgaaaactaacggcactccacgaatgcactgcgaataacggggctgataaggagcagccgatagcgggtggagaagggaaacttgaacgcacagtggaacaaattccgcacttaccgtggcttgtttttcttatattccttgtttcctattccgctttgcccacttcctctgctggcgacgctgcttttccttcttctaattcgactgaaatcgaaatcgaattttttaattggattgattctgccacaataattttcattttctttgttttagagcccagacgttgtttttgttgtagttgccacagtcgcacacaaacacacgcacacagtcgcactttttggggccacacgcaagcgcattttatgcaataattttaataatactgcattgctgccatatttcagttatttttatcgtttatcttcgagtcggttatgctgttcttctctgattttatggccacattgattagcatcttgttgccaatcaactcgagaaaattaaacgaaaccaaacggaactcggactcttattaaaaaaaccaaacttatgcgagtcgtttgccctggcaatagattcgtgcacactagtcgtcccgcccgcactcgcacggtttctaccgcgagcacgttgctatccctcctgcttcagcattttcacaccaacacaaagacgagggcactcactcacacactcgcactctcaatgagcactgaaatgctgttgggaaattcgagttttcctgcgcgtggtaaccgccgctttttcgctcgcaaacgggtctgtcgatccgaaacgctactgaccacttacgttttgcatcaacgctgcgctttcgtttcaatttttctggctatttcacatagatttcgacgattttttacaaatttacgccatcttgatattcgcagtgtgaccgcgccgataatgaagaaaattaccatctggtatttactcctcagcgaatgtctagaagatatgtaattgtgaaaaactgtgattcatatactaagttaagatagtccaaagttggtttcgaagtaccacattaagaaaatagcgcaagagtattggaaaatcaaaagaaaaacgaaattatatccttgcagctagccataagttcaaagttcgagtaactggaaagctgtgaaatagccaagttgacaacgctgtttttgttatatgggcacactagttcttacatagacccagtgctgccagatggacgaaaaatatttttgagctgcgccacctagcggatgagttggcgaaagtggtatccaggtggcgcccgaaacaaaaggtggcgccttatttcagaaatgcaattgaaaatatctaaagttattgaaagtttttgaattatgcattcaaaggcccatctgcttaattttattttcaaagagaatacaataaacaatacaaaaaaaaaaaaatcattctgaaatgatatttatactaatatacaaatttgataactcaataatatgtaaataaaatttatgtcttaatttgcaatgttcttaagaaaagttgttaactctttttacaggcttgtgctccaaattctcgtgtaaatagaaattgaaaatggatttcattggcatgtcttgcagttataggtagcatgccaattttgatgttacacagatgtatcgaaatacctgaaacgtatacttttattgcagcaatacgaataaagcaaaacacgtgtgaattccattagtccgcccaaccgctttccccatttaccctcacatcgtgcattttccggctgtgtaacccaagaaacgatgacataaaaaaaggaagcagatccagttatgtatgcatatatgagaaaatgtgtttttttttttttgggagtatgtgccaaggtgtgtttctttttaagtgggggtagggtagat

SEQ ID NO: 2990 - DNA, 2109 bp, DROSOPHILA
tgcgaatatcaagatggcgtaaatttgtaaaaaatcgtcgaaatctatgtgaaatagccagaaaaattgaaacgaaagcgcagcgttgatgcaaaactcgaattagaagaaggaaaagcagcgtcgccagcagaggaagtgggcaaagcggaataggaaacaaggaatataagaaaaacaagccacgaacccttcgaatacaaagccataagcgactgccttgaacaaatcggaacaagaagaagaaaggagctcagacgaaaggacagtgccagaaaggcaacgcaaatccgaggaacccgaggagtccgaactctaccacacagaaacccacagaaacagacgtaacaaaatggagctgcgcgtgggtaacaaatatcgcctgggccgcaagataggatcgggatcgttcggcgacatctacctgggcaccacgatcaacactggcgaggaggtggccatcaagctggagtgcatccgcaccaaacacccccagctgcacatcgagtcaaagttctacaagacgatgcagggtggcataggcataccccgcataatctggtgcggcagcgagggcgactacaatgtgatggtgatggagctactcggaccctcgctggaggacctcttcaacttttgttcacgccgcttttcgttgaagacggttctgctgctggcggaccagatgatctcccgcatcgattacatacactcgcgggacttcatccatcgcgacatcaagccggataacttcctcatgggtcttggcaaaaagggcaacctggtgtacatcattgactttggcctggccaagaaattccgcgatgcccggtcgctgaagcacattccctatcgggaaaacaagaacctcacgggcactgcccgctatgcctccatcaacacacatttgggcattgagcaatcgcgtcgtgacgacctggagtccctgggctacgtcctaatgtacttcaatctgggcgccttgccctggcagggcttaaaggcagccaacaagaggcaaaagtacgagaggatctcggagaagaagctgtccacctcgattgtggtgctgtgcaagggcttccccagcgagttcgtcaactatctgaacttctgtcgccagatgcatttcgaccagcgtcccgattactgccacctgcgcaaactcttccgcaacttgttccaccgtttgggcttcacttacgactatgtgtttgactggaacctgcttaagtttggcggacctcgcaatccccaggcgattcagcaggcgcaggacggagcggacggccaggcgggtcatgatgcggtggccgcagcagcggcggtggcagcagcggcagccgcctcctcgcatcaacaacagcagcacaaggtcaatgcggcgctgggtggcggaggaggcagtgcagcgcaacagcaactccagggcggccaaacgctggcgatgctgggcggcaatggaggcggtaacggcagccaactgatcggcggcaacggactcaacatggacgactcgatggcggccaccaactcgtcgagaccgccgtacgacacgccggagcgtcggccttcgatacggatgcggcagggaggcggtggtggcggcggtggagtgggcgtaggcggtatgccgagcggcggagggggcggtggcgtggggaacgccaaataatattttatcgtttaggttgcgacgctggacacgacacagtagacaaacaacaacagaactcaacaaactatacatgtagtatatatagttatatatacctaatatatataatacttgctttatatatgcggtaaaacacgttgaatgtatccaagcggcaggatgaccaggtccctgccagaaacggaggacaagagcagtgagagaagaagagcagagcatagcaaagcgcagcgcttttctttttttgtgtgtacattttcgtttgttttttgacattttggtttctgctcccagatgttagaacgttgagcgcgcttattattaattaactagcctatgattaatttaatttatactattagaacataaacgattgcaacctggctgcaagaaactgcaacaaaccgcactgttcaattgatttgagatcc

SEQ ID NO: 2991 - protein, 440 aa, DROSOPHILA
MELRVGNKYRLGRKIGSGSFGDIYLGTTINTGEEVAIKLECIRTKHPQLHIESKFYKTMQGGIGIPRIIWCGSEGDYNVMVMELLGPSLEDLFNFCSRRFSLKTVLLLADQMISRIDYIHSRDFIHRDIKPDNFLMGLGKKGNLVYIIDFGLAKKFRDARSLKHIPYRENKNLTGTARYASINTHLGIEQSRRDDLESLGYVLMYFNLGALPWQGLKAANKRQKYERISEKKLSTSIVVLCKGFPSEFVNYLNFCRQMHFDQRPDYCHLRKLFRNLFHRLGFTYDYVFDWNLLKFGGPRNPQAIQQAQDGADGQAGHDAVAAAAAVAAAAAASSHQQQQHKVNAALGGGGGSAAQQQLQGGQTLAMLGGNGGGNGSQLIGGNGLNMDDSMAATNSSRPPYDTPERRPSIRMRQGGGGGGGGVGVGGMPSGGGGGGVGNAK

SEQ ID NO: 2992 - DNA, 8094 bp, DROSOPHILA
agcacaaggctgtactccttgccgtactccgggcccttcttcttgctgttctggatcacgtcgttggccaggtacatgaaggtcagcttcttaggctccggcactgtttggggatgcatgtgtattagtaggtgtgctgcactgaatggccagtaactgccaggggatacccaccgttctccagctcccgctgccaggtccttacaatcgctgcactgtgttttcggtggtgaattagccacagggagagcgtctggatgctctgctggctgctgtttagctcggccagcttcttgagtagcgccgaatccgtgaaggccgacatggctgctgctgcttttccgccgcttttccgtacttattatcaaatcagtcgaacgattgcaatatttgcaagtttctgaaaaataaacagcttggaatgcgtatctatttttgaccaaaataccaaatacggctagatcgcaagccgcttcaaattacggcaactggtcacactcgctgtggcgggaaatcagttttcttcgaatttcaaccgaaattctcctgttcgattttttgctgtcttgttctcgaaagttgcaaagttggttgttgaatacactttgcaagaaatacattttaaagtaattgattttacctcaaagcagagttgccgtacaaatagggctgaatataccagcttccaacgtaaaccgctagagggagccagtacgaggcgccagaaaaatttaaatttgaatttgaaccttagagcaagcagaattatggtttatttaactagttttgataaattacaataatccagagcagacttttaataatttcacttgacaagcaagcaccctacggctgtgtcatcaatcaagtgccagcgccgccaaacacttttcacactgataagcactccactttcagcactcaaccatcgagaatccaagtgcgaacgattggacaggtgtggtgggctcgttggagccctcagttggtcgcagcagttggttggagtcggtcgcgtgtgttgatagcagctccggcgggcaattaagtcggacggaatcgaatcggggcgagcgcttatcgcggcaaaagagtaatttgtgatacctgtccgccgtgtattggcttgttggagcgcaacgcgcttaagtggtgttaattttttattaattattatcgtatttattacccaacgaaagtgaagtgcgaaatcggtcgcctcaagtgcccggccgtacgtgcaaagcccgtaaataaattacacagccatatagccctgatccttacctctacactcgctctcgcccaccgcagctgataatgcagacgaattccgcctgatcgattcccattcccatttcgattgcgatttggagtgcgagtgcgggtgagtttgatttacagaccattagctattaccactatcaacggcacattagacaaattgctaaattagctgctgttttcgccaccatatacgcacatacatacatgcatacgaacatacgaatcgcacagctcgcagcccgaaatccaaaatccggagagcttctccgcacacctccctctttctgttggctccgataagcgaagcccctcaattgactgattcaatgcctattgggggactttgcggctgaaactctgatagccgctagctaattgtttgatccgataataggcgaaataggcagccagcctctgattctgagtagctgccaccgaaaatgagcccgccacattgatcatctgatctcccatccacccaatccaatctgaactgaactgaactggcgccatcatggactcctacttcgactcggccatcgagtacaatcgatccaaccccatcagcctggccaggaccagcagccaggcccaaaccgtgcagaacgagaagaactgggagtggtcgtaccttgtggtgagtgcctcgtctgaaggatgcgtcgaaaacattcagcactgcagtggtggaaagttttattcccgcgtagctttatctttatatgggtccgccaatctttataagccatcactaaaatctgagtttacccaattgcaaccgaatgcaaagttcctgcgctttatagaacagctgaataggtagtgattcaccgttgcatatgtagtaaaaatctattttactgaactgaaaacttatgcaaattatttcaacttgaattatagtattttctcgagcgtccagtttgaaaagtctcaattaaggttaatgatgacagccattttagacaagtatgaatggcacttgttagagcaacgttagcaacgaacttaatcttagtctgtacgaagggcaaaagtaaaatatataacgtaaaaactactctacagttaatattgtaatgaaagccaggcacaacgtttaccaatgtacttgataccatctggcggttcttctttccatatgtcatactcatacctctaatcactcaaatcccacagagaaaatgtcgcaacctggagctggaggactcgtacgacctatacatgcgtcgcctgcgcgtcggctacctgtcgctgttcatcttcatccacgtggcggtgacggtgatccacacgctgctgctgctgaccacgccggagatcaagtacgtgtacgtggacatggtggcctacatgtgctccggcctggtcatctgggtggtgctgggcgtgaactttcgcagcgagctggtgagcaagcacggctgggtggtctacgccacctcctggctggcggtgtgtgtaatggtcctgatggacatcggactgaatgtttaccacgccaccagccacaacgacatcctgaatccgatctacgatgcgtatacgctgtacgccatatacatgttcatgccggtgccgtacctgctgcagccgtttgtccttggatcggcagtcaccttttgctacataataaactacagcttcgtgatcaccgccaaggatgacaaccaaatgcacagcatcctgaacgaggccatatacctgagctgtgtcaacctactgggcattttctttcgcctgatgagggatatagcgctacgcaccaccttcctcgatcgccggcagtatgtggaggagaatctcctgttgcgctatgccagggatcaggagcggagtctcttgcttagcatcctgcctgcccagatcgccgatcggctgcaggaggatgtgaagaaccgcatcgagcgatccaagcagcagcaccagcagcagtcgcaggtggatctgcgcaggagtgcggatagccagacccttaaaaggtggcgacaaccggaccatgggtgagttggatgatcccagtttaaattactgcatatattacaacaattctgcctttctccagcaccctcttcattgagccccacgaagatgtcaccgtcctctacgcggatgtggtcaactacacccacttgaccaccaccctggatgtgaagaagctagtggaggctctgcacgatctcttcgtgcgtttcgacattgccagcgaggagtacaacgtgctgaggatcaagttcctgggcgattgctactactgcgtggctgggctggccaatcccaatgcggatcacgccaagtgctgcgtggatctgggactgcgtatgatcaaggacattcgagatgtcaggtgggcacagcttcatgctaagcgttcttaaaatatgtatgtcattggccgtgttgtgataactcaccactgataactcgcatttcatgcggccggatgaaagctgtgattactgataacgattaggagggaactgttcaatcgaatcaatctatcataatggaattaaaggagtttgagctgttaagtatcaggcatatatttctttcatactcaactagcgactcaactcgactaaactttccttcttccttttcccgaatttaaccatttcaactggaattttgtgctgcattgaacgtgatgtcatgattgacccacgtactttaccaaacttgataaggcatacaaattcaaatggaaacctagtacccaaaggcagccctattaaattgaccaataaaagtcgtttgttggcttgctaatagctatttattgtgtgcttttgtggaaaacaaaaagtatatcctttcaatccttattttactttctccttagagagaagcgccatctgaatatcgacatgcgaatcggcgtccactcgggcgatgtcctatccggcgtaattggagccgccaagtggcagtttgacatatggtcgaaggacgtggatattgccaatcgcctggaggccactggagccacaggacgagtgcatgtgagccagaagaccctatccctgctggatggcgagtacttcttcgaggacggcaccgaaaaggctcgagaggatccggtgctgcagaagcacggcattcgcaccttccttatcaagtcactgcgcgtgagtattccccgaacggccctgcgttccttgccagcaccattatctcgaaccgaaagttgtaggcccccatgcatgacccgcgtcgcaggatgagggagcggcaggtgaagaagctgagcgaggccagcaaggccaactttatgcacaactccacgctccaccagtacaaccaggtgcgcaaccaggccaagctggagatgtgtcgcgagctggacaagatgcccatcggcaggatacagtgagtagtcctgtgcaagtcctcaaaatgtaatgcaatacttaaggacgtcctctttccaggctcaccaaagtcttccggcgaagcactcggctcacccaggacgaaatcgaagaagagacctttcgacgcaacatcagctcctgctgtctgttctttcgcatccgcaactgggagttccagtatatcaaggagccggatgtgatgctcaagtacagcattgctttggcttgggtcatttacatgggtctgctgaccatccagctgctgagcaaggagtaagtgatggctgtccttagtccactagttatttacctttgatgtccacttcagtgctcgctatcactactggtacatagatggcaccacgattatcctgctcaccatgctgctgatcgtgtcctggtacaagaagctctggatcatgtacatgtccgatgcggatgtgtcctcgccgaacggccggctcagtggcttcctcttccgcatgtcggatgagatgcagcgcaatgtggtcatccgggtggtgatgtacttcctgatcatcttctcctattgcgcggtggccattatgcaagtggtgggatgcagcagtgacgaggactacgcggatctggatccgacctacgacgagcgggttcagtgctttcatccttgggtgggagagtccccagattctgtgatgaaaagtttaattacacaaactaccttccctgcagatactcaccaattgcatgaccctggtaattggcatgtccttcctcttcacgcgaatccccttcatcatcaagtcctgcttctctgctttgataatgatcggctacgcggtgctggtggtgtccgagttcaacttcatctacgccaacagcccctccaccaatgtgaacttcaacgccaagtactcgcatatcctgctgatgatcataacgttcggcatttttcacttgatggagcggcagacggagttcattgccaaagtggattacaagtaactacagtgaactcacctcttacgagaatcgcttactcacacataattcatttggcagctggaaacggcagctaattaagaagcaggaggacgccctgatcaccaatgacaccattaaagtgctcctcaccaatattctgcccacacatgttggtaagtttgccaagtggccagctggtgacatactaactccatccgcccatccagccgacttctatctgtcgaatcaactgcagaacgagctctactacgaggagtacgataatgtggccgtgatgttcgcctcgatcaaaaacttcgacaccgacaagatcggactgcgggtgctcaatgagattatctgcgactttgacgatgtggtgagtagtagtctggcatcgttttccgtgaatcccccctagaaatagtacctaaatttaggcacttcgtaacgcagcatagcaatcttatcgaatcgtaatggaacgaagtgcgtcttcaattagatagcagtggcattcttttgagataaactccactcttgtcaattgaagggaacccttaaccataaataaatagaaagaaataaatatatctaattgaattatccgcttctccgcttatagttgaacaagtactcgcagagtctgcgcgtggagaagatcaaggtggccaactggacgtacatggcggcctgtggcctagacgtctctcgttcggagcaggtgaacgccccgcagatgaagttccgcaacgtttccctcatgcccaacgggcgcaggagtcgctacgacggagcacgaagctccaatgcggacggagtgcagcgggtgccgtacggaaacggcagcaacatagccctggatctcgacttggagcggggtcagtacgagggcaacgtgatcaccagcgggccgcgcatcagtagcacccacaacgggagcagcagcaacgaggtggtgcgcgtgatggccgagttcgccctggacctgatgcgcacgatgcgccgcttcaacacggagaacatgcagacggagtacgagggcagcaccgactacggcatgctgaggatcggcatctcgcacggcagggccatggccggggtggtgggcatctcgaagccccactatgacatctggggcaatcccgtgaacatggcctcgcgcatggactccaccggcgtgcccggccagattcaggtcaccgagaacacggcgcttaagctgcgcgagtttaacattcagtgcaactaccgcggcatgaccttcgtcaaggggcgtggcaacattcccacctacatcatcggcatcgacagcgaataccagttcctgccacatcgcccggccgcgccaaccaaagaagactagctgaaatttaccagagattagatttaggacatgcatgtatgtaaatatagagtataataggtttaggacagtcgcaaataaaagctgtaattcgaactaaacttgcattcagaatttctattttgttgattatgggaaaaaatacggtggctgtgtgtcaaaagtcaatcaaattggagcacacaactgggagattgccgtttacaataccaggcgaacagcaacactaggaggtgaccattgattttcccagcatccttgctctacagattatgatcgcttggtgcagcaaacctggaaatgtgcgctcacttgaggccaatttggttgggcaaattgggagatttttcgatttaagtaccaggcgaacagaaatcgcagaaggtgaccaattgattcctaacagaagcttgttaaagattatgtttacttggtgttaaaagccacgaatgtcccacgaatcgccgcaaattggtcggtctaaatcgaagaaattctgtttcctgataccaggcgaacagaaatctgcagcaggtggctggtcgaaatttttaatacttaatattccattgcatacttttgggctgcacgtatctgcggagtgaactgtgcagtgtggccgtattttttgaactgttctcaccaagcccaaaagtatgcaacagttttgggtgaaatttaaataagtttgtcccgcgccaagcccaaaagtatgcaacagttttggctgaaatttaaatacgttttgcccgttttatttgaatttcaaatgtctaccgtttataacggcctaaaaaccaagaattttgtaaaagtgacaaaagtgaaaaataaaaaaaccctttttattttatgtcataactttattataaaaacacaatttgtttacaatatacacactgacgaaatggatccggcctacagcaaaaatgtagtggactaccgctcgcttggcaacatgccgggctacgagtggaaactcctgcgggtatgccatgttgcggaaatagctttccaagtgtccaagtaccattcaattgcagtacaagtgccgcgagttgcgtctggaaggcgtttaccatcggcattgtcacctgg

SEQ ID NO: 2993 - DNA, 4148 bp, DROSOPHILA
ggttggagtcggtcgcgtgtgttgatagcagctccggcgggcaattaagtcggacggaatcgaatcggggcgagcgcttatcgcggcaaaagagtaatttgtgatacctgtccgccgtgtattggcttgttggagcgcaacgcgcttaagtggtgttaattttttattaattattatcgtatttattacccaacgaaagtgaagtgcgaaatcggtcgcctcaagtgcccggccgtacgtgcaaagcccgtaaataaattacacagccatatagccctgatccttacctctacactcgctctcgcccaccgcagctgataatgcagacgaattccgcctgatcgattcccattcccatttcgattgcgatttggagtgcgagtgcgggcgaaataggcagccagcctctgattctgagtagctgccaccgaaaatgagcccgccacattgatcatctgatctcccatccacccaatccaatctgaactgaactgaactggcgccatcatggactcctacttcgactcggccatcgagtacaatcgatccaaccccatcagcctggccaggaccagcagccaggcccaaaccgtgcagaacgagaagaactgggagtggtcgtaccttgtgagaaaatgtcgcaacctggagctggaggactcgtacgacctatacatgcgtcgcctgcgcgtcggctacctgtcgctgttcatcttcatccacgtggcggtgacggtgatccacacgctgctgctgctgaccacgccggagatcaagtacgtgtacgtggacatggtggcctacatgtgctccggcctggtcatctgggtggtgctgggcgtgaactttcgcagcgagctggtgagcaagcacggctgggtggtctacgccacctcctggctggcggtgtgtgtaatggtcctgatggacatcggactgaatgtttaccacgccaccagccacaacgacatcctgaatccgatctacgatgcgtatacgctgtacgccatatacatgttcatgccggtgccgtacctgctgcagccgtttgtccttggatcggcagtcaccttttgctacataataaactacagcttcgtgatcaccgccaaggatgacaaccaaatgcacagcatcctgaacgaggccatatacctgagctgtgtcaacctactgggcattttctttcgcctgatgagggatatagcgctacgcaccaccttcctcgatcgccggcagtatgtggaggagaatctcctgttgcgctatgccagggatcaggagcggagtctcttgcttagcatcctgcctgcccagatcgccgatcggctgcaggaggatgtgaagaaccgcatcgagcgatccaagcagcagcaccagcagcagtcgcaggtggatctgcgcaggagtgcggatagccagacccttaaaaggtggcgacaaccggaccatggcaccctcttcattgagccccacgaagatgtcaccgtcctctacgcggatgtggtcaactacacccacttgaccaccaccctggatgtgaagaagctagtggaggctctgcacgatctcttcgtgcgtttcgacattgccagcgaggagtacaacgtgctgaggatcaagttcctgggcgattgctactactgcgtggctgggctggccaatcccaatgcggatcacgccaagtgctgcgtggatctgggactgcgtatgatcaaggacattcgagatgtcagagagaagcgccatctgaatatcgacatgcgaatcggcgtccactcgggcgatgtcctatccggcgtaattggagccgccaagtggcagtttgacatatggtcgaaggacgtggatattgccaatcgcctggaggccactggagccacaggacgagtgcatgtgagccagaagaccctatccctgctggatggcgagtacttcttcgaggacggcaccgaaaaggctcgagaggatccggtgctgcagaagcacggcattcgcaccttccttatcaagtcactgcgcgcccccatgcatgacccgcgtcgcaggatgagggagcggcaggtgaagaagctgagcgaggccagcaaggccaactttatgcacaactccacgctccaccagtacaaccaggtgcgcaaccaggccaagctggagatgtgtcgcgagctggacaagatgcccatcggcaggatacagctcaccaaagtcttccggcgaagcactcggctcacccaggacgaaatcgaagaagagacctttcgacgcaacatcagctcctgctgtctgttctttcgcatccgcaactgggagttccagtatatcaaggagccggatgtgatgctcaagtacagcattgctttggcttgggtcatttacatgggtctgctgaccatccagctgctgagcaaggatgctcgctatcactactggtacatagatggcaccacgattatcctgctcaccatgctgctgatcgtgtcctggtacaagaagctctggatcatgtacatgtccgatgcggatgtgtcctcgccgaacggccggctcagtggcttcctcttccgcatgtcggatgagatgcagcgcaatgtggtcatccgggtggtgatgtacttcctgatcatcttctcctattgcgcggtggccattatgcaagtggtgggatgcagcagtgacgaggactacgcggatctggatccgacctacgacgagcgggttcagtgctttcatccttggatactcaccaattgcatgaccctggtaattggcatgtccttcctcttcacgcgaatccccttcatcatcaagtcctgcttctctgctttgataatgatcggctacgcggtgctggtggtgtccgagttcaacttcatctacgccaacagcccctccaccaatgtgaacttcaacgccaagtactcgcatatcctgctgatgatcataacgttcggcatttttcacttgatggagcggcagacggagttcattgccaaagtggattacaactggaaacggcagctaattaagaagcaggaggacgccctgatcaccaatgacaccattaaagtgctcctcaccaatattctgcccacacatgttggtaagtttgccaagtggccagctggtgacatactaactccatccgcccatccagccgacttctatctgtcgaatcaactgcagaacgagctctactacgaggagtacgataatgtggccgtgatgttcgcctcgatcaaaaacttcgacaccgacaagatcggactgcgggtgctcaatgagattatctgcgactttgacgatgtgttgaacaagtactcgcagagtctgcgcgtggagaagatcaaggtggccaactggacgtacatggcggcctgtggcctagacgtctctcgttcggagcaggtgaacgccccgcagatgaagttccgcaacgtttccctcatgcccaacgggcgcaggagtcgctacgacggagcacgaagctccaatgcggacggagtgcagcgggtgccgtacggaaacggcagcaacatagccctggatctcgacttggagcggggtcagtacgagggcaacgtgatcaccagcgggccgcgcatcagtagcacccacaacgggagcagcagcaacgaggtggtgcgcgtgatggccgagttcgccctggacctgatgcgcacgatgcgccgcttcaacacggagaacatgcagacggagtacgagggcagcaccgactacggcatgctgaggatcggcatctcgcacggcagggccatggccggggtggtgggcatctcgaagccccactatgacatctggggcaatcccgtgaacatggcctcgcgcatggactccaccggcgtgcccggccagattcaggtcaccgagaacacggcgcttaagctgcgcgagtttaacattcagtgcaactaccgcggcatgaccttcgtcaaggggcgtggcaacattcccacctacatcatcggcatcgacagcgaataccagttcctgccacatcgcccggccgcgccaaccaaagaagactagctgaaatttaccagagattagatttaggacatgcatgtatgtaaatatagagtataataggtttaggacagtcgcaaataaaagctgtaattcgaact

SEQ ID NO: 2994 - protein, 1180 aa, DROSOPHILA
MDSYFDSAIEYNRSNPISLARTSSQAQTVQNEKNWEWSYLVRKCRNLELEDSYDLYMRRLRVGYLSLFIFIHVAVTVIHTLLLLTTPEIKYVYVDMVAYMCSGLVIWVVLGVNFRSELVSKHGWVVYATSWLAVCVMVLMDIGLNVYHATSHNDILNPIYDAYTLYAIYMFMPVPYLLQPFVLGSAVTFCYIINYSFVITAKDDNQMHSILNEAIYLSCVNLLGIFFRLMRDIALRTTFLDRRQYVEENLLLRYARDQERSLLLSILPAQIADRLQEDVKNRIERSKQQHQQQSQVDLRRSADSQTLKRWRQPDHGTLFIEPHEDVTVLYADVVNYTHLTTTLDVKKLVEALHDLFVRFDIASEEYNVLRIKFLGDCYYCVAGLANPNADHAKCCVDLGLRMIKDIRDVREKRHLNIDMRIGVHSGDVLSGVIGAAKWQFDIWSKDVDIANRLEATGATGRVHVSQKTLSLLDGEYFFEDGTEKAREDPVLQKHGIRTFLIKSLRAPMHDPRRRMRERQVKKLSEASKANFMHNSTLHQYNQVRNQAKLEMCRELDKMPIGRIQLTKVFRRSTRLTQDEIEEETFRRNISSCCLFFRIRNWEFQYIKEPDVMLKYSIALAWVIYMGLLTIQLLSKDARYHYWYIDGTTIILLTMLLIVSWYKKLWIMYMSDADVSSPNGRLSGFLFRMSDEMQRNVVIRVVMYFLIIFSYCAVAIMQVVGCSSDEDYADLDPTYDERVQCFHPWILTNCMTLVIGMSFLFTRIPFIIKSCFSALIMIGYAVLVVSEFNFIYANSPSTNVNFNAKYSHILLMIITFGIFHLMERQTEFIAKVDYNWKRQLIKKQEDALITNDTIKVLLTNILPTHVGKFAKWPAGDILTPSAHPADFYLSNQLQNELYYEEYDNVAVMFASIKNFDTDKIGLRVLNEIICDFDDVLNKYSQSLRVEKIKVANWTYMAACGLDVSRSEQVNAPQMKFRNVSLMPNGRRSRYDGARSSNADGVQRVPYGNGSNIALDLDLERGQYEGNVITSGPRISSTHNGSSSNEVVRVMAEFALDLMRTMRRFNTENMQTEYEGSTDYGMLRIGISHGRAMAGVVGISKPHYDIWGNPVNMASRMDSTGVPGQIQVTENTALKLREFNIQCNYRGMTFVKGRGNIPTYIIGIDSEYQFLPHRPAAPTKED

SEQ ID NO: 2995 - DNA, 2872 bp, DROSOPHILA
tcggaaaactgttcatcaccaactcgcgtcggcagcgaattgtttttctgcatttcggaaaataagcttcaaaagagtataaaaagaccgagtaaagaccaaacgtaagcatactataactgccaagatggtgaaactaacgccggagctgataaaccagtcgatgcaatacataaacccatgccgggagcgcgagctggatttgcgcggctataagattccacaaatcgagaacctgggcgcaactctggaccagtttgataccatcgacttgtccgacaacgatctgcgcaagctggacaacctgccgcatctgccgcgcctcaagtgcctgctgctgaacaacaaccgcatcctgcgcatcagcgaagggctggaggaggcggtgcccaacctgggctccatcattctcaccggcaacaacctgcaggagctgagcgacttagagcccctggtcggattcaccaagctggaaaccatctgcctgcttatcaacccggtatccacgaagcccaactaccgcgagtacatggcctacaagttcccgcagctgcggctactcgacttcaggaagatcaagcagaaggaccgccaggcggcgcaggagttcttccgcaccaagcagggcaaggacgtgctaaaggagattagccggaagtccaagatgagcgccgcagccgccatagctgcagaggcggggaatggcaagggaaggggatcggaaggcggacgactggccaatccgcaggacatgcagcgcatccgcgaggccatcaagcgggccagctctctggcagaggtggagcgtctatcgcagatcctgcaaagcggccagctgccggataagtttcagcacgagatggaggcggtggcacagaacggggcggggcacaacggttcgggggccgtggccatggaatactaggactagaattatccgctcatctgtcagctaccttataaccgtagaccaatattttttaataaaacaccaaaagttgattcatcgcattctgcatttcggacactcaaaaacatatagaatcttctgttttcaactaagaccgctggccgaaggatctttcacggaaagattcgggacaatcggtcacaacagaaatgcatttacatgaccgtaattggctaaaagtttaacaatctacagcgagtacaaaggggacacaaaacgagaggagctgctggcttatgtggagagtggagtggtgtggtgtggacctggctcctggaatccggtattgctggggagtgttattaagatcctttcgccgccattatggcgtcgtagtgcaggccagtgtagaagatgatccacgtgaccaggaatccggcaaacgacgtcatgaacccctccttgatcagctcccatacccctccgtaggcgtcctcgtccacgttctgaaagtttatggcgtacaggtagacgatcccgcagctgatgccggcgaatctgggggcgcattggattgattaagtgaagtgactccggctatttataggttaaaggtagctctactcacagtacgaggcccagaaagcccttcagcggaacaatgccccagatgacgcccagaaagatgccgaatacctggcgtgaccagtagataacgtccaggaactcttcctgcgggagatgcgaaggattggattagcaatctagattcagcgccgggaactttgctcaccttgtcctcccactccgattttgtgatggcgcgcgcgcaaatttcccgtagtgtggagcttttggccgagtggccgttgcgctcgatggtatttgttttcgtcgccatagcttaattaagatctgacccaaatgagtttaaatttttttgttaattaattttttcactatcaaatgactaacgcgttttggcgaaatgaaaaccccaaatgcctgcgctgtcgataacaaaataccaaaaaccataccactcaagtgttgttaggcttctttacctaatggtgacaacactgcagtcagctgtttggttatgtgaactacgttttttcacaactactttttagttttcgataaataatgctgaaaataacaaagatctgcttggccagctccgccacaagtacaggtaagcaaatcccaacttgttgtaagccttttgtaattcatccgcactttgtactttcgcagctcagcgaagcattgctcttactgccccccgtgccattgatcagaagtggcgtgcagccaagggattgccggaaaacccaaatgcctttggcccactcaccaacctgcccgactacacgtacttagatggtaggcccacgccgctaggtgtaagtatacccctgaatagcctcaagtatcggcctaatcatttacatttccatttctaggccaaccagaagaggcgcctgattaagcagcaggagatcgccaccaggatcgtggagctaagtggggagctagagttcgccaagcagcgacatgaacgccttaaggcaaatgccgagtccgagaaacagcgcctcatccgcagcaaactgaagcccaagggccacttcctgctcaagaaatagcgtcctagtcttagccagtataagctatcataagtcacgtagtgaatggagacgaaattatacgatggtcttgtgatgtgaacacatgtttgcccaaaacacgtttcaaaaacgttcccaaatagcaagcgtggcgcagtcgacggttcattagacgtaccgctaatgagcaattaattgcagcggggcatcttaattgagtgttaaatcgccagtgacgcactcgccggagtagcgtgtcctggcatttaggcgaaatgaaagcgccgcccgcttttccaagcgctcgaagtgcagcccttgaggaggg

SEQ ID NO: 2996 - DNA, 741 bp, DROSOPHILA
tagtgaaaaaattaattaacaaaaaaatttaaactcatttgggtcagatcttaattaagctatggcgacgaaaacaaataccatcgagcgcaacggccactcggccaaaagctccacactacgggaaatttgcgcgcgcgccatcacaaaatcggagtgggaggacaaggaagagttcctggacgttatctactggtcacgccaggtattcggcatctttctgggcgtcatctggggcattgttccgctgaagggctttctgggcctcgtactattcgccggcatcagctgcgggatcgtctacctgtacgccataaactttcagaacgtggacgaggacgcctacggaggggtatgggagctgatcaaggaggggttcatgacgtcgtttgccggattcctggtcacgtggatcatcttctacactggcctgcactacgacgccataatggcggcgaaaggatcttaataacactccccagcaataccggattccaggagccaggtccacaccacaccactccactctccacataagccagcagctcctctcgttttgtgtcccctttgtactcgctgtagattgttaaacttttagccaattacggtcatgtaaatgcatttctgttgtgaccgattgtcccgaatctttccgtgaaagatccttcggccagcggtcttagttgaaaacagaagattctatatgtttttgagtgtccgaaatgcagaatgcgatgaatc

SEQ ID NO: 2997 - protein, 135 aa, DROSOPHILA
MATKTNTIERNGHSAKSSTLREICARAITKSEWEDKEEFLDVIYWSRQVFGIFLGVIWGIVPLKGFLGLVLFAGISCGIVYLYAINFQNVDEDAYGGVWELIKEGFMTSFAGFLVTWIIFYTGLHYDAIMAAKGS

SEQ ID NO: 2998 - DNA, 2916 bp, DROSOPHILA
ccttgccacacttctgcttcttcttacccccactcgaccctttgctgcacttttctttcccaaacccctcggcggaactggcggtttcacagaaaatttctcgcttgaaggacatctcaccatccaacaaatcctttctcaagatcctctggttcagccgcttctccaggtcttccaggaacgcacttctcaacggctgatcgagtcgatggctaagtgtatcacaagtacctgaagacaaaagacgagaatcatacattttttttgcagaagcatgagtaagtttagaaaaccggccttcctggcaaatcaacacgctctgcagctctttcggcgttctcccatagtcctgttttgatttctgcacaagattcagatccttcatgcatttcactatgtgatacatccggagacacctgctacaattgcagacacggaaacaggcatcagggtagtggctcaacgccagcgaggctcttttcaacatgttttttatgctttggttccaaaatttaacagataattttaagaacaaatcgggttaaaatgcaaaaactaagaggatttcgacccgatctgcgccattatgttccgaaaactgggaagtaaatgggcctgtatttgacgtaattatcacagtaagtgtgtgaaatagtgaagtagactattattaaaataataatattcttatgcggagtcgatatactgaattttttttattaggacggctaagacaaatcatgacggcatatactgaaaatccaggttttttattgttaagctactcattctcaagaaagtcttatttggcataaggttgcatttgactatacgatatatacggtatatattccgggataatatatagaattttcgaacactttacgaactgaaaagccagatgggaaaagtttttattaaccacaaatcaatcaaacatgttaaagaattccatatttttgattttttgatgagtccgcgctagttttgatcggtccatttacttctttttcccctttttggcctttttcctgcacatctctttttcggccatttttttgcatttttccttcgccgcaaggtttttgcatatttttatcattttcttaaacttcttcttctcggccagctttttgcattgctccctctccgcaacctccttgcactttttcttccaatttacagccttctttttgcatggatcctcttttttgcaaggatctttctttttgcaggggtcaactttcttgggttttttagcgcaaggatctttggggcaacagctttttttctcgcaaggatcttcttcttcacaaggcttctcttcttcgcaagtatcttttttcttgcacttatccttcttgagcaacttcttgcacttctttttcagcttatccttttcacatttttctcttgctgccagctctcggcactttttctttattttttccttgtccatcttttctttttgggctagttccttgcagatcttcgtaacatcgccatcattagcctgcatggtgatttctttgacaagcttctggcattcctttagcatcttttcaagatcttcacgcttttcttcctttaacgaaaggtttgattccttcctccggtcttggtgtttctccagatcttcccggaattttcggtgcatgggattggggagcccataatattcgttcttgatcacatgaatcactccaatggagccgtctccaaatttcttatgcttttgactaggctggctttcgggcttgagaatttctagtacgaacaagtataagttatctatttaagaggtcaccgtttgagctcttacctttttttcttaaatgttcatgtgcatttagatggtaggaccttttaacagaagtctgaaggcaccgataaactaacgcaggtctctttagcattataacggtaaatttagaatttttcttgtggaaaatgaatttttaacgaaaagctaagcaaaggaaataaccaaacttcacaatttttgaacactacccaaacatgttgacgttttcgtctaagaaaacttgtggaagtgctaaaaattatctaatgtgatttcttaagctacacattaggcgaagttcagaaggaactgaatgattcctactgaccaatgaataataatagaattaaactttaaaaggaatatgtgatttcagatccgtttcaacggtaatcacacttcactaatttctaattacatatttaagccgcaaatacttccaaactttacgtttataaaagcaatgttctttttttttaaatcatatttatttatatgatatataaatctatatatatatatatagatagattccttaacaaacatgaccgtctgactatcagtctgtccgtatgaacgacgaaatcttgccacggactcattactcgaaagctgggggttacatgctcattaactgttttcccccttgttatttttttaaataaataaaatctaatttttcggtaaaatgccgtattgtatattatgaaaaaaccatattttagataaagccgcgttgaacagagctgaatgaattaaaccaggtacgtatgtatttcattgaataatccgcgaaagcttcactttttcttgcatttgtcttttttagccattttcttgcatttttccttctgagccatttttttgcactttttctgcaactttttcattttttcttttttggccagttttttgcacttttccttttcggccaattttttgcacttcttttttaggtccccacccttttttttgcacggatctttctttttgcaaggatctttctttttgcagggatctttctttttgcaaggatctttctttttgcaaggatctttctttttgcagggatctttctttttgcaaggatctttctttttgcaagggtcttt

SEQ ID NO: 2999 - DNA, 876 bp, DROSOPHILA
atgctaaagagacctgcgttagtttatcggtgccttcagacttctgttaaaaggtcctaccatctaaatgcacatgaacatttaagaaaaaaaggtaagagctcaaacgaaattctcaagcccgaaagccagcctagtcaaaagcataagaaatttggagacggctccattggagtgattcatgtgatcaagaacgaatattatgggctccccaatcccatgcaccgaaaattccgggaagatctggagaaacaccaagaccggaggaaggaatcaaacctttcgttaaaggaagaaaagcgtgaagatcttgaaaagatgctaaaggaatgccagaagcttgtcaaagaaatcaccatgcaggctaatgatggcgatgttacgaagatctgcaaggaactagcccaaaaagaaaagatggacaaggaaaaaataaagaaaaagtgccgagagctggcagcaagagaaaaatgtgaaaaggataagctgaaaaagaagtgcaagaagttgctcaagaaggataagtgcaagaaaaaagatacttgcgaagaagagaagccttgtgaagaagaagatccttgcgagaaaaaaagctgttgccccaaagatccttgcgctaaaaaacccaagaaagttgacccctgcaaaaagaaagatccttgcaaaaaagaggatccatgcaaaaagaaggctgtaaattggaagaaaaagtgcaaggaggttgcggagagggagcaatgcaaaaagctggccgagaagaagaagtttaagaaaatgataaaaatatgcaaaaaccttgcggcgaaggaaaaatgcaaaaaaatggccgaaaaagagatgtgcaggaaaaaggccaaaaaggggaaaaagaagtaa

SEQ ID NO: 3000 - protein, 291 aa, DROSOPHILA
MLKRPALVYRCLQTSVKRSYHLNAHEHLRKKGKSSNEILKPESQPSQKHKKFGDGSIGVIHVIKNEYYGLPNPMHRKFREDLEKHQDRRKESNLSLKEEKREDLEKMLKECQKLVKEITMQANDGDVTKICKELAQKEKMDKEKIKKKCRELAAREKCEKDKLKKKCKKLLKKDKCKKKDTCEEEKPCEEEDPCEKKSCCPKDPCAKKPKKVDPCKKKDPCKKEDPCKKKAVNWKKKCKEVAEREQCKKLAEKKKFKKMIKICKNLAAKEKCKKMAEKEMCRKKAKKGKKK

SEQ ID NO: 3001 - DNA, 3162 bp, DROSOPHILA
gcttggccagcacggactggggcttcttgccggcgaggaccttcttcttggcatccttgctcttggccttggcggccgcggtcgtctttacggccgcgggcttcttggcagcagcaccggcggtcgctggcttcttggcggccggagcagccttcttagccgctggggcagcagccttcttgggcgcagcggcagctggcttggcagccgagggagcagcctccttcttgccggcagcgggagccgcagcagtcttcttctgctctggcttcttgtcgccaggcttggctgtaaacagaagagcgcggagtccacggattagtaaacatgttcggctctcgacgcacaaagttaggttaggcctgatcgatcagcaaggcaatgggacgctttccgactcatccagctccattcgaataaattcaactttggattgctcactcggttgctatactatcccattctgaacacacacttggacattcccacgcagacacaccgcacgtggccgaaactacggattatctgttcgaacacatttatgccttaaaatcacaatatttcgcacaaattcgattgccttctggtgggctgagctgtcgtctcccttttgctgatcgattcacgcatttttcgcatatttttgaatgaaaaatccttaccggatttctcggttggctttttgggtggcatttctacgagaaaaagaaatgaaaaggaaaactgaggggcagttgtcaaaaggcggaagcccgttttgacaggagggtggccagatagctggaatttggcacgcattcagtgcgtttggcaacactgctgcggcacttattagccgtgtctggcttgctatcttgacactgtgcgcgtgcaacacagccgcaaaaatgagtggcaacgctaacggtgtttaaaatgtaacggtacttgttgaattcgaatttaaagcgaaagaagtaaccaaattgtttaaaactgttttattcaatgtcttacgttaagctaaaaatacaagttgtgcaatctgcaggctagcaagtacagccacttttctgttgcgagaggcggcttccaaagaagttgcgtaaatctaaataagaataaatataagctgataggataagaattttcgaatagcggcttaccaaaagtttgcgatttaacagatgcctgagtggcctgttcctgaggcttattcttaatagacctaatttcctgcattacagcctcttcaaaggccagggcagcgatcctttggaataattccgtaactttgaagccagatcgcgccgaaacggaccaatattccgcctgaagctcggcggctgccaaccctgccagtcgttccatgcgtacaaactcctccttcgactgaaaagtaagtgctattacttgaatcttttgttggaaaggtggtttaccaagaggtctgcttttgtgcccaccaggaaaaccaagggtctcttgcttgcattgtagttgagtgcgctatttagccatttttttgccgactccagcgaatccttcttcgacatgtcgtaggtgaccacaatcactttggttatggatttgtattgttaaaactctctcctaatgatttaattagttggtacttaccactcgcattgcgataataggctccggcgatgcacctgaagcgctcctgaccagcagtgtcccacctgcaagtagagcacatttcaaaaccaaactgatagcgccttctaggcagttgacccacatttccagactgtagttgtgacccagaatgctgaagttctccagctcaaagtccacgccaatggtggccttgtagttcgactgaaatttgtcgtagcaaaatctgcggatgattgtgtaagttaattaatttagtaatgcctatatgccatgccatgctcaccgattgacgatggccgtcttgcccacggagcagtcgcccacgaagatgaccttgcagggtcgaaacttgggcttgcgaggcgcctctaggtagtagcgcacctgcgccccaaagtcccgctccttgctcagcggagtctgtgcggcactgtaggcgggtggcaggtgccgcaggtgggtgcgaggatcgtgcaggaccaccgtgggcggttggggtaacagcaggttctgccgcagtcgatggggcatggcggacgtctctattccaactaactaagcagctcaaattggggaagccagccacgtcgtcggcgtcatcgcctccgccgcaaaccacaaacttggtcggcttgaacttggtggctatcacatgcccaaggtgccgaaagctaccttacaccccctgctttgcattgcaaatgcaggtgctcgataagagcagctcgggtgtgggttagttccgatagggagaaggccttaagagctgagctttaatattgggctgccattgtatccatatcattaaaccttcaagcccgaaaggaaaacgctttggattggtatttggtggctttatttgtgtcaatcataacactcatacaatggcttatggttataatatcttgattaatctaatcaagcccttgtttgcttcgtcccacctggatagccaaagtagccgacgctcttcacctgcttgcggagatcgggttgcatggagagggccttgaagatggctctcttcagctgcttgtactgaaagtgcggcgggaatggcatgtcctcgaaggacaacatcaacaggttgcccgcctcgtttcccacggccagcgaacggccgcagtgggtgaatctggaaggcgaggagatgcgataggatcattcaaggagaagactctgaactcacttgaaggtggtgtagaagatgtcggcgtctatcaccgtggaggacaccggcttcatggtgctattgcgcaggtcccagatgtccacggtgctgcgactgagcgagaccaggatggtggagtgagtgcggctccagcgggcgcagtgcaccggggacaggtgatgctgaagggtcacgatgggcaacaggattccagccagccagatacgaatgcacctgatggggacgcatgagtgaggatagagaaacccggaacaaaatcgcagttgatctcaccagtcgctgccgcaagtgaggtacatccttggtgaccagggcgagaactccatgcaggcggcgggtccatcgtgcac

SEQ ID NO: 3002 - DNA, 931 bp, DROSOPHILA
agacgtccgccatgccccatcgactgcggcagaacctgctgttaccccaaccgcccacggtggtcctgcacgatcctcgcacccacctgcggcacctgccacccgcctacagtgccgcacagactccgctgagcaaggagcgggactttggggcgcaggtgcgctactacctagaggcgcctcgcaagcccaagtttcgaccctgcaaggtcatcttcgtgggcgactgctccgtgggcaagacggccatcgtcaatcgattttgctacgacaaatttcagtcgaactacaaggccaccattggcgtggactttgagctggagaacttcagcattctgggtcacaactacagtctggaaatgtgggacactgctggtcaggagcgcttcaggtgcatcgccggagcctattatcgcaatgcgagtgtgattgtggtcacctacgacatgtcgaagaaggattcgctggagtcggcaaaaaaatggctaaatagcgcactcaactacaatgcaagcaagagacccttggttttcctggtgggcacaaaagcagacctcttgtcgaaggaggagtttgtacgcatggaacgactggcagggttggcagccgccgagcttcaggcggaatattggtccgtttcggcgcgatctggcttcaaagttacggaattattccaaaggatcgctgccctggcctttgaagaggctgtaatgcaggaaattaggtctattaagaataagcctcaggaacaggccactcaggcatctgttaaatcgcaaacttttggtaagccgctattcgaaaattcttatcctatcagcttatatttattcttatttagatttacgcaacttctttggaagccgcctctcgcaacagaaaagtggctgtacttgctagcctgcagattgcacaacttgtatttttagct

SEQ ID NO: 3003 - protein, 305 aa, DROSOPHILA
MPHRLRQNLLLPQPPTVVLHDPRTHLRHLPPAYSAAQTPLSKERDFGAQVRYYLEAPRKPKFRPCKVIFVGDCSVGKTAIVNRFCYDKFQSNYKATIGVDFELENFSILGHNYSLEMWDTAGQERFRCIAGAYYRNASVIVVTYDMSKKDSLESAKKWLNSALNYNASKRPLVFLVGTKADLLSKEEFVRMERLAGLAAAELQAEYWSVSARSGFKVTELFQRIAALAFEEAVMQEIRSIKNKPQEQATQASVKSQTFGKPLFENSYPISLYLFLFRFTQLLWKPPLATEKWLYLLACRLHNLYF

SEQ ID NO: 3004 - DNA, 2393 bp, DROSOPHILA
tttccatgcagttcagcgagcacttctcctgtgaaatggatgggcatattgaaatcgctgatttccacatggagcttccccacgggcactcacctcggaatccttaacatcccgcgttgtaaagtcgcgtatgcaatctgtgaagcacgtctcggacagtttgttgtaggacattaggaagtcggaaaactgaaagttagaaccgaaaacatatcaaatgaaaaccacattgcatcacttggcaccgccggtccttggcatgagatggtatcttcgtgtcaactctgcttaccgtcttaatttgatccttgtccaactgatcgatggctatgttttccggtgtcttagccattttgttctgcgatattttattcaaaattgccgaaacgaaaaagggccaataataatgtgcctatataatagggacagctgggtgtgcagggttgccagatgttaaaaagccattccgtgttctcgacttatcgatatgttatcttttgaagtatgttatgtgaagtatctggttcggccgactcaaaaattaaccacatctagttttactcttaacatcgggtatatgaaattaagcaaatgtatccatacataaattaaggtatatttataataatactttaactaagtacccttaggttgtgaaacatttaatttaaactattaaatagaataaaatgatatttcaaagatcgatattcctataaaatatcgatagtcgcatatcttatggtcagcgctttacggtactgcacctcgttcacttttcaacactggagggcacgccatctttttttcctcacaaacacttttttctgctcctgctttgtgggtgtgctctttgaaaaaccaaggagaattccctcggaatagcatcaaaacaaactggaaaattgactttggacaagtccagtggtacaacaaataccaaaaatccattacagaaccggaggagcagcacctccagccacatacatattcatacataatgccacgctaccgtgaatgggatttagcctgcaaagtttacgtgggcaatctgggatcctcggcctccaaatacgagatcgagaacgcctttagcaaatacggacccttgcgcaacgtctgggtggcccgcaatccgcccggtttcgccttcgtcgagttcgaggatcgtcgcgacgctgaggatgcgacccgtggcctcgacggcacccgctgctgtggcacccgcatccgtgtcgaaatgtcatcaggccgttcacgagagggtcgcggcggtggcggtggaggcggcggtggtggaggcggatccggtggcggcggccgcggcggtggcagtggcgcccgtgctggaggcggtggaagggctggcgatggcggtggacgctataggtgagtacggcacaaaagcattacattttgcatccccagaataaaccagataaactaactaaccaaccaaccaaagcacccacttactaccactacccctctctcgagattatgaaatcataatttttgccattatgtgcaaaaaagtatgcaaaaatatatatataaataaacatatgtatacatatttatatagcgtgtgtgcttgtgtgtatgtatgcatgtgaaaaatcgattcgcgtatacatacaaaagcggtgccagccaaaatacacacagtcacacatacggtgggacaccactgttagccatacataaacacacacagtggcgtccgtgaaaaagaacagtcctaccgcgcgcacacagtggcgtccgtggccgacagtcctggttgcttttgctacgtcaatcgattctttttagctcgtattttgttttttaaggggaatcttgttttagtatcacatttcattgctcattatatgcaccccgaggtccatagtttaaagttcaaagagtatagctttaactagagaaaacgttttgtttgttgtttttagtaaaattacaaaatacaagaaaaatgaaaagaaaatacaagaaaacttagtaaaaacaaagtaaatcgatcgcttggagccagttttaatgtggtctcacaatcattttgcaggataaagtcttcttcttctactacaacaagcacaacaagaactactacaacaacaacatcaataataataataataatgataattaaaagaacaacaaagaaaaaagaaaaaacaacaacagctactactactagaacttctactactcctcttccttcaacaacaacaaccaaaagaacaacaacaacagctactacaagaacaactagtacaacagcagatcctgctcctcctattacacacatttcaccaacaacaacaacaactacagccaccactacaccaccaccatgcaataacaatttgttgtgcggccctaaccagaaa

SEQ ID NO: 3005 - DNA, 393 bp, DROSOPHILA
atgccacgctaccgtgaatgggatttagcctgcaaagtttacgtgggcaatctgggatcctcggcctccaaatacgagatcgagaacgcctttagcaaatacggacccttgcgcaacgtctgggtggcccgcaatccgcccggtttcgccttcgtcgagttcgaggatcgtcgcgacgctgaggatgcgacccgtggcctcgacggcacccgctgctgtggcacccgcatccgtgtcgaaatgtcatcaggccgttcacgagagggtcgcggcggtggcggtggaggcggcggtggtggaggcggatccggtggcggcggccgcggcggtggcagtggcgcccgtgctggaggcggtggaagggctggcgatggcggtggacgctataggtga

SEQ ID NO: 3006 - protein, 130 aa, DROSOPHILA
MPRYREWDLACKVYVGNLGSSASKYEIENAFSKYGPLRNVWVARNPPGFAFVEFEDRRDAEDATRGLDGTRCCGTRIRVEMSSGRSREGRGGGGGGGGGGGGSGGGGRGGGSGARAGGGGRAGDGGGRYR

SEQ ID NO: 3007 - DNA, 7637 bp, DROSOPHILA
tctctatttttttgggtgtcgagtgtcagtcgtagaaacagaaatcgaaccgaaaactagccgacaaacgcacacgcaaaataaaccataaagtggcccaaacgagccattggcgtgacttaatgatgcataaatacacgaggctcccacttccagactgggcttggctcgggtctagcctgagatacagataccagtgcacgggaagagaagtctcagaaaaaataccactttgaaatatatacctcaaaagttaaaagtttgtggagttatatgcatttggaaattttcattaaatgagcgaatgtaaatgaaatgtatcttcttcgattttcatgtctaattttttgcagtgtacaaatccagctcccgcacgcatctctatggccaaatgcggcttaattgcgcacatgcggctgtgggaccaatccaacgaaagtgagctgacaatcgccgggaagagaaaggggtaaaaacaaaagtgagccgccgtcgagataaccagaatttccagccagactcctctcatccttttttggcagtctgtgcagaatctcatcgcttttcactttttcctgtggatcgaactttggcttcagatcgaggagagtggcataaataaaagataagaagatactcgcaacacacttttggaaagctgtttaaaatacgaacttcaacacgaaatcaaaaataagaataatttgatgtcttggttatgagatgtacccgaaaagcatgctttattctttttagatctcattaagttatattccatttgtatatgtatatagttaataacaagagtcctttaagtattttagtttattttgcttcgattaatattgataatattaactcaattggaggaaatcatctgaattttgaagaacatgacaggcagttaaacacttgttcataacaagtactatttcagaaaaactgcattatctttctcttctgatatatgttatatttcttcatctccactttggattactcagtagtaccatagcacatacacgtacaacacgatcaacacgaatagcaagtgaatgagaaagaactcgatggccaaggtgaacagagccaggggcttgaaagccacgtaggtgatctggatgaacatggctgcccgagatctattgggttatgagagatttatgaccttcttactcctgtacggtgaaggtcaactgcttgctgcgcgaactctcgaatcggttgggcgtgtgcatgctgagcatggcggatatgccgagtcccaggatgccaaggagcagggtcacgacgaacagtccggccaggatgggtgccgacacgaatcctatgcagtcgtacacctcaccatattccggtcgtccgttgagccacggctgcacctggaaatcactgaggaggagactctggattgtctcattccgggcgggattcaggaagttaacgctttccgctgagcagcggtacgagaatcccagcggtgcggagggcagtgtgtactcatcaccacgtgctaccaggacactcttcagctcccggtactccacctccacattgcgcaacgtccaggatccccgaatgagggagaatttaaaacgcagcgtgcacttttcccctgaatgcatgaaagtgatgctcaatcgaccgtatcccttggcccgctgatcatcgaaggtaatctgcttgatgtgctcctccagcttcagagtgtcattggtcacccggagctccaggggtccgttgagactaagcaccgctttgttgccctcggccacgtagatgaaactggcctcagtctcctcggaaccttcagcagcctttgctttctcctcctcctcaccccctggagcagcctccctcttggccaggaagtgggcctcctcctcacggctgcccaagatgcccagcacttcaccgcgaccgtaggtattcacggcttcgttgtaggccaacagaatctcagagtcatcctcttctccgtgtcccgagagactcaccacctaggatatttatataacttttaattagttcattaacttttaaagtgaaaaactcacttcaatgttggcattcaagccgaagggttcagccgctagactcctctgtggcagataggtccaggctccgctcttaacgagattctggaacttgggatacctggtgccctccagtcggttggtagtgttgcgtacgaagaccacaattgccttggcctctgtgaaaagttgcgtcagcggtagctccctgctgctcgattccaccaaggcctgggtttgctgactggataccctggagtgaccccagaagatgaacggcccacttatggatgcactgcagctgccgattatcaggcacagcaaggtcgccacgagaatcagctgcattctggagtcggatggaaatgtgcgtctatcaccaaagactgcctggcctcgattgaatgggggatgtatgtatgtagtgaaaaatcgattgggcaagactcatgcgcagaaataaaccagaagtggtgggtctcgatgggtggtggattatgctcgagttctcatatagtaggtcagttcttctgagttatgtagggaacgtgaatccaccaccaattcgagtgccacgtgtttctgtaacggatctttagtttaaacatatgtatgttcaggaatttctccgacaggaagatgacaacatttaataactacgaatacattgcagggtgcagatcataaaatgtacaataatttacagaaacatagacgctaatctagtgactactgtgatattttacatcgatttgagtatttaacaaaattacattataaagtcgagttagaggaacctaaaggctaagccaatgactacaaaagctaatactaatggctttggttcgtttggagctgagcttgaggagtaaaagccacccttgaagttcttggtgcctgttggagagattagatattagatatattagatatttctatcgtatctagcacttaaattatacactcacgtttttcattggtatcccttacaccacaggtacgatatgatatggtcgcctttcgcttttggtttacataaccgggaatgaacagactaggggcatccaatcttccggcggctatcaatcgagacatatccaactccaatctgtgggccagaggccccttgaagtggatgatcatctggatgcaggctccaccgtggagttccttggtcttacgcgcatccacatccaacatccattccggaatgcccatcaccgatcgtaactcatccagaaactgggcactgaacgtaatagtttatgattgctcaattgaagcaggttagatttgaatgatttatgcttacactacgaatcgaggtggcttctgtaggtttatgtatttaatgacattatgatcgggttctatattcgcacaagcaaaccgctcatgggagtgatctggtccaaaaatcacaatagaacgcccaatggctcccacaggagcttccagaggaaagttggagtcggtcaggacgacgcgttcacctccaagatctggaaagcaatacatttagttacggtcttgaagtgatgtgttatcccaaacctattgtgcccaaacgggcgcccacatcgccaacgtagcagcgcaaaggattatccggactgcactcctgttcatagagatccaactaaaaagagagattcttcgtatcttgctatgttccttaaatatcacttgagaacatacattcagtggatccgccagctgggtatagtatggattccaaacatatcctccagccacacatcgcgtaattgtgggctttacggctgcatcaacgcccacgggattaacgaaaatctgccaattgtggtttctcgtggagttccggtcgtttttgcccggatgccgtagcttaacctctattaccgtctccgactggctaccatcgttgtggatgagctgagtcatcttaatgtaaccataggcgtatccagtgggatgatgaaacgaggcaatggctcgcagttccctagcctcactgggactgtagccacgctcaagagtactacaatacatagtttcatagtttatattaaatgaaaatctcaattaattttggttatctcacctgcaagcccatcgggcattcttttgcttcttctgaataaccacagatcttccaatgatactgttatatccaaatagtggaagattcgtatcgttataggcatcctcgaactgggttactccctcaagacctccgaactttccacttagatctcccatctcgtactgatctgtggttccccttttcggaggaggtgatgactttggactgacgtcgaaaggattccagtgaccatatagagtggatgcctcgcagggaaacgccaagttggcttccacgggtgtctaaaattgagagcttagattcacaatgtgtacattaacaggtttggtaataaataccctatggatgtaatatcctgtattatcctgaagccccttaagttgcacctccacattgctgacatcatactccgattgctgggtgatttccacccgaccgctgactgtcaacgaatctccatttgcgtaccactccttggccaccactttcctccggaaatgtccaatcacggccgaacaagccaatcgctctcctctggctttgggtccactatcctcatagataacaagagacttacccaggatactatgtcttccggagagcggaagattgccgtctacaaacatcttcctacttattttctgggcaactcttctgcctccagcgatggttagggttcccgatctggcatccatagcacccactctgcacatggaggctaaactgggtcggcagaagtcatccacactgcgattgccccaatccactcggaatggattatatacaggtcctgcggaaatgcatctctgttgccagtcatagaagtcctttccaggtgcattgctgtggattgcccaacgatgatcgtgggtagtattctgcgtggatccatccgcctggatgaggtactcaaataaaacggtagtatcctgccaaggctgctccgccgtctgccggaatatgactcgacccaccacaggatagcggaaaaggacctaagatataagcacaaatattaaaatacttagcatgaaatactattttatctaccaacctgagcagtaaccatgttctgctggtagattccatttcgttgatattgacttaggctcgaacagccccaaatcatcttcgtaatatttgtgacattagatcgattgaaagtgtatatgaccagacttctttgggcaatgctataacgtccttgaaggggcagaaatacgtcccagtagaggccattcaactcggagctcgttcctggtaagacatactgatgccaataacctttattgcgaccctgtagcttcccggagagatcgcccacgggatactgctcctgggttccataaccgggtgggggtatattctcgtttatctcccggggattatgcatgtccccagtggtcaggcagtagtcctcgtgacccatcctcgaaggcaccggcggcagactgtgaatccgaaaggcggccacatcttcggcgaacttgcgactgacatgctgggaaagcggtgctcccaaggtgaaattgaggaaagttgggtcgaacttggagcgctgcatgaaggtaacctctcccttgacaccaccagagttgatgaaagttctgcggttaacaaaaaaaaaatggttatactttcaaatagaatgggttgtaaaaaccactcacttatgtgtcaaaggttggacatggcgaatcttggtgcacgcgaggtacgaatctggatgttggttgtcaaaaagaaccaggtaaagagttctatggggaatggtaagatccgagggcagcagggccaactgagcatccctaaaaacgctgcgttgtggcgaacgaagggcattcttggccactccaatcctgcctaggcgtgcgtccagatcacctattcccttgccagctccacttccttggggatcgaaaacttgctgcaggaagttgcagttgtcctccgtgcgatggtggtcatgtttgaaaatgtccgtcacatagatcttccagtggtgctgggtgaacggtccagcttgacttctatcttcctccagagcagctggttgcgccctaatatggtaaagatccgagtagattagagtatctccaacagctccctccgccggggccagccagcggaaatggacagatccagcgacaggagtattaaaacgagcctctgccatgtgctccacggaactctggatggtggtgatggtggcacagatccgtgcattagcgttgacctctgtcagaaccagggacttcccccagattccccgatccccaatcaactgcatgtttcgctcccagctggaggtctcatttccgggcagtaccaggtactccaagtcctcgtcaaaggacaggacctgggagcccaaacgactcagttcgcagcgttcgtctgggtcaatattggagtagtccacggggaagcgacgtactccccaactccatacttggtcggggtactgcaaagtggcctccaggttggccttgatctccaccgtggtggcattcatttgccgaaaagtgatctctccatgaagacctctttgcgagatataagcgatcagatgctgtgcatcagctgagaggcacaaaaacgatagtgagagtggagtgttcattagtaaggtgagatatctcataggcgcagagagagaaatatgaatgaataatataattatatgcataaaatatagtgttggaaataaaaggttagtttactttcgaagcaaagtatacagcataggataagggcttagttcgccccaaatgtatatcacttttcttgcagtgcactcgagagtgtggtgagatattccagactcaaactgagatactttcgatttctttggccacgcaatatctgcatacaatgcaatcgattcccagcactcacctccactcattagtgatgcaatccagcagatggaagccatccacaaaagctgtcgtccacctggagccatggttctggttctacttacgccctgagtaaccagattattcgaaaagcgctgttcggaatggatgtggcaatgacaagcgtggctgactttcacatcgtagtgcgcatgcgtgcgcctcgaaactcgactgacaactggtcgctcgaaggttcgtgttcggttttggccatcgtcttggccaagtgtggggagtttcccactgcgctccacagcttcgttcagctccccagctttatcggtggttttgttttgacctggaactggtttccggcacggctcagctgagtcagatatgcagtaaggtactacatacccccaaaaaaccccttccctgagcaaatcaaacttcaatggctttgtgtttttttttcaagacgactctcttttgctttattccaagacttcgtcatcgtatcatcatctagttatgttgtataaaaacagttacttgttttctatttttagatgttttttgttttactcttgttaatattcctgaccgggttaaaagttttctgaattttttcatcttgccgtgtgtagctta

SEQ ID NO: 3008 - DNA, 4416 bp, DROSOPHILA
atgaatgccaccacggtggagatcaaggccaacctggaggccactttgcagtaccccgaccaagtatggagttggggagtacgtcgcttccccgtggactactccaatattgacccagacgaacgctgcgaactgagtcgtttgggctcccaggtcctgtcctttgacgaggacttggagtacctggtactgcccggaaatgagacctccagctgggagcgaaacatgcagttgattggggatcggggaatctgggggaagtccctggttctgacagaggtcaacgctaatgcacggatctgtgccaccatcaccaccatccagagttccgtggagcacatggcagaggctcgttttaatactcctgtcgctggatctgtccatttccgctggctggccccggcggagggagctgttggagatactctaatctactcggatctttaccatattagggcgcaaccagctgctctggaggaagatagaagtcaagctggaccgttcacccagcaccactggaagatctatgtgacggacattttcaaacatgaccaccatcgcacggaggacaactgcaacttcctgcagcaagttttcgatccccaaggaagtggagctggcaagggaataggtgatctggacgcacgcctaggcaggattggagtggccaagaatgcccttcgttcgccacaacgcagcgtttttagggatgctcagttggccctgctgccctcggatcttaccattccccatagaactctttacctggttctttttgacaaccaacatccagattcgtacctcgcgtgcaccaagattcgccatgtccaacctttgacacataaaactttcatcaactctggtggtgtcaagggagaggttaccttcatgcagcgctccaagttcgacccaactttcctcaatttcaccttgggagcaccgctttcccagcatgtcagtcgcaagttcgccgaagatgtggccgcctttcggattcacagtctgccgccggtgccttcgaggatgggtcacgaggactactgcctgaccactggggacatgcataatccccgggagataaacgagaatatacccccacccggttatggaacccaggagcagtatcccgtgggcgatctctccgggaagctacagggtcgcaataaaggttattggcatcagtatgtcttaccaggaacgagctccgagttgaatggcctctactgggacgtatttctgccccttcaaggacgttatagcattgcccaaagaagtctggtcatatacactttcaatcgatctaatgtcacaaatattacgaagatgatttggggctgttcgagcctaagtcaatatcaacgaaatggaatctaccagcagaacatggttactgctcaggtccttttccgctatcctgtggtgggtcgagtcatattccggcagacggcggagcagccttggcaggatactaccgttttatttgagtacctcatccaggcggatggatccacgcagaatactacccacgatcatcgttgggcaatccacagcaatgcacctggaaaggacttctatgactggcaacagagatgcatttccgcaggacctgtatataatccattccgagtggattggggcaatcgcagtgtggatgacttctgccgacccagtttagcctccatgtgcagagtgggtgctatggatgccagatcgggaaccctaaccatcgctggaggcagaagagttgcccagaaaataagtaggaagatgtttgtagacggcaatcttccgctctccggaagacatagtatcctgggtaagtctcttgttatctatgaggatagtggacccaaagccagaggagagcgattggcttgttcggccgtgattggacatttccggaggaaagtggtggccaaggagtggtacgcaaatggagattcgttgacagtcagcggtcgggtggaaatcacccagcaatcggagtatgatgtcagcaatgtggaggtgcaacttaaggggcttcaggataatacaggatattacatccataggacacccgtggaagccaacttggcgtttccctgcgaggcatccactctatatggtcactggaatcctttcgacgtcagtccaaagtcatcacctcctccgaaaaggggaaccacagatcagtacgagatgggagatctaagtggaaagttcggaggtcttgagggagtaacccagttcgaggatgcctataacgatacgaatcttccactatttggatataacagtatcattggaagatctgtggttattcagaagaagcaaaagaatgcccgatgggcttgcagtactcttgagcgtggctacagtcccagtgaggctagggaactgcgagccattgcctcgtttcatcatcccactggatacgcctatggttacattaagatgactcagctcatccacaacgatggtagccagtcggagacggtaatagaggttaagctacggcatccgggcaaaaacgaccggaactccacgagaaaccacaattggcagattttcgttaatcccgtgggcgttgatgcagccgtaaagcccacaattacgcgatgtgtggctggaggatatgtttggaatccatactatacccagctggcggatccactgaatttggatctctatgaacaggagtgcagtccggataatcctttgcgctgctacgttggcgatgtgggcgcccgtttgggcacaatagatcttggaggtgaacgcgtcgtcctgaccgactccaactttcctctggaagctcctgtgggagccattgggcgttctattgtgatttttggaccagatcactcccatgagcgtgcccagtttctggatgagttacgatcggtgatgggcattccggaatggatgttggatgtggatgcgcgtaagaccaaggaactccacggtggagcctgcatccagatgatcatccacttcaaggggcctctggcccacagattggagttggatatgtctcgattgatagccgccggaagattggatgcccctagtctgttcattcccggttatgtaaaccaaaagcgaaaggcgaccatatcatatcgtacctgtggtgtaagggataccaatgaaaaacgtgaaatgcagctgattctcgtggcgaccttgctgtgcctgataatcggcagctgcagtgcatccataagtgggccgttcatcttctggggtcactccagggtatccagtcagcaaacccaggccttggtggaatcgagcagcagggagctaccgctgacgcaacttttcacagaggccaaggcaattgtggtcttcgtacgcaacactaccaaccgactggagggcaccaggtatcccaagttccagaatctcgttaagagcggagcctggacctatctgccacagaggagtctagcggctgaacccttcggcttgaatgccaacattgaagtggtgagtctctcgggacacggagaagaggatgactctgagattctgttggcctacaacgaagccgtgaatacctacggtcgcggtgaagtgctgggcatcttgggcagccgtgaggaggaggcccacttcctggccaagagggaggctgctccagggggtgaggaggaggagaaagcaaaggctgctgaaggttccgaggagactgaggccagtttcatctacgtggccgagggcaacaaagcggtgcttagtctcaacggacccctggagctccgggtgaccaatgacactctgaagctggaggagcacatcaagcagattaccttcgatgatcagcgggccaagggatacggtcgattgagcatcactttcatgcattcaggggaaaagtgcacgctgcgttttaaattctccctcattcggggatcctggacgttgcgcaatgtggaggtggagtaccgggagctgaagagtgtcctggtagcacgtggtgatgagtacacactgccctccgcaccgctgggattctcgtaccgctgctcagcggaaagcgttaacttcctgaatcccgcccggaatgagacaatccagagtctcctcctcagtgatttccaggtgcagccgtggctcaacggacgaccggaatatggtgaggtgtacgactgcataggattcgtgtcggcacccatcctggccggactgttcgtcgtgaccctgctccttggcatcctgggactcggcatatccgccatgctcagcatgcacacgcccaaccgattcgagagttcgcgcagcaagcaatctcgggcagccatgttcatccagatcacctacgtggctttcaagcccctggctctgttcaccttggccatcgagttctttctcattcacttgctattcgtgttgatcgtgttgtacgtgtatgtgctatggtactactga

SEQ ID NO: 3009 - protein, 1471 aa, DROSOPHILA
MNATTVEIKANLEATLQYPDQVWSWGVRRFPVDYSNIDPDERCELSRLGSQVLSFDEDLEYLVLPGNETSSWERNMQLIGDRGIWGKSLVLTEVNANARICATITTIQSSVEHMAEARFNTPVAGSVHFRWLAPAEGAVGDTLIYSDLYHIRAQPAALEEDRSQAGPFTQHHWKIYVTDIFKHDHHRTEDNCNFLQQVFDPQGSGAGKGIGDLDARLGRIGVAKNALRSPQRSVFRDAQLALLPSDLTIPHRTLYLVLFDNQHPDSYLACTKIRHVQPLTHKTFINSGGVKGEVTFMQRSKFDPTFLNFTLGAPLSQHVSRKFAEDVAAFRIHSLPPVPSRMGHEDYCLTTGDMHNPREINENIPPPGYGTQEQYPVGDLSGKLQGRNKGYWHQYVLPGTSSELNGLYWDVFLPLQGRYSIAQRSLVIYTFNRSNVTNITKMIWGCSSLSQYQRNGIYQQNMVTAQVLFRYPVVGRVIFRQTAEQPWQDTTVLFEYLIQADGSTQNTTHDHRWAIHSNAPGKDFYDWQQRCISAGPVYNPFRVDWGNRSVDDFCRPSLASMCRVGAMDARSGTLTIAGGRRVAQKISRKMFVDGNLPLSGRHSILGKSLVIYEDSGPKARGERLACSAVIGHFRRKVVAKEWYANGDSLTVSGRVEITQQSEYDVSNVEVQLKGLQDNTGYYIHRTPVEANLAFPCEASTLYGHWNPFDVSPKSSPPPKRGTTDQYEMGDLSGKFGGLEGVTQFEDAYNDTNLPLFGYNSIIGRSVVIQKKQKNARWACSTLERGYSPSEARELRAIASFHHPTGYAYGYIKMTQLIHNDGSQSETVIEVKLRHPGKNDRNSTRNHNWQIFVNPVGVDAAVKPTITRCVAGGYVWNPYYTQLADPLNLDLYEQECSPDNPLRCYVGDVGARLGTIDLGGERVVLTDSNFPLEAPVGAIGRSIVIFGPDHSHERAQFLDELRSVMGIPEWMLDVDARKTKELHGGACIQMIIHFKGPLAHRLELDMSRLIAAGRLDAPSLFIPGYVNQKRKATISYRTCGVRDTNEKREMQLILVATLLCLIIGSCSASISGPFIFWGHSRVSSQQTQALVESSSRELPLTQLFTEAKAIVVFVRNTTNRLEGTRYPKFQNLVKSGAWTYLPQRSLAAEPFGLNANIEVVSLSGHGEEDDSEILLAYNEAVNTYGRGEVLGILGSREEEAHFLAKREAAPGGEEEEKAKAAEGSEETEASFIYVAEGNKAVLSLNGPLELRVTNDTLKLEEHIKQITFDDQRAKGYGRLSITFMHSGEKCTLRFKFSLIRGSWTLRNVEVEYRELKSVLVARGDEYTLPSAPLGFSYRCSAESVNFLNPARNETIQSLLLSDFQVQPWLNGRPEYGEVYDCIGFVSAPILAGLFVVTLLLGILGLGISAMLSMHTPNRFESSRSKQSRAAMFIQITYVAFKPLALFTLAIEFFLIHLLFVLIVLYVYVLWYY

SEQ ID NO: 3010 - DNA, 3251 bp, DROSOPHILA
cgcctacgcccttggatgtcaatgctcctattagctcacagggactgctggtaaagccacccaatgcctctgtgggaaactgatccacgaatatgcgttccatggacagctcctcaaagtcctcgaacaatcgaaccgagtagacgggcctcccacccgcactgaaactggcggacttgcggggaatcggcaaactggagttcacaaggataacgtcaaagacatagtactgcgtcatgttgatcttctagggaaactatcgctaaaaccaagttaaaattttctttactctctaaagatttggctaaaaacttatttaatttgttctgatataaaactccagtctgaataaaatcgatgtgttcaggatcagaaatgacaataaaaagctcaaaaacggagaactagagcttgtcaaatcgataatgtatctaaggccacttgggttcaagaattctcagcctgttcatgttttgagaaaaactgaataatattttgttgatttactaaccataaattacttactaagctaaataacttatcagctacaaagaaattgccttgtttagctccatatttgccaaactttgtgcacaatcttcgaacacttcgattagaaatgaactctgagtataagtataaagtataataagtacaaactgttttcctttcttatctcaagttaagctatcttatgatgcattgcttcttcttgaaggcttttatgcaagatattgtcaaaaacatgatgcaaatgatttgattcacttgttaggtaagtgaatacaatgattgcctcgattactcagttggaactcatattccaaatatttgccatttcgcatgcttatcagaaattaagtaataacttgttcggtttaaggtccgcagaggtgacacatatatgtacatatgtgcacacaactttggacaccttgtcgttcaaccaatcgctctaaaaatagctgaaatagtcttgcaaaaaataagacacctgtttggtttggtatataagtaaatgagtagcgcataattattgcctgaataatttaagatttacacaatggactactatacgttcaacaacaaggatgtgagtagcattctcgcaaggtaactatgaatttggaactgcacttggtggtgacaacaactaggtgtgtgcgtaatgcattcgcgcgcaggagtatggagtcctgccctccagtgcctccttcgcgggcagttcgctggccgaaagcgatctgatgcttgagatcgcgttgcttactgccgggcgttgatgatgtccacgaactcgggcttcagggaggcgcctccgaccaggaagccatctatgtcgggcttcttggccagctccttggcgttggcggcggtcacggatccaccgtactggatgcgcaggctggcggacacctccttggagatgttgtcgctcagccactggcgcaggaaggcgtggacctcttgagcctgcaattgggaagggaaaatatcagttctggaagagattagcctctgcgggcgaccttacctgatcgggtgtggcggtctggccggtgccaatggcccagacgggctcgtaggccaccaccacgttcttccagtccttgatcttctgggcgtaggcgcacatttggcgggccaccacctcgttggtcttgccggcctcgcgctcctccagggtctcaccaatgcaggcgatgaccttgaggccctcggccagggcgtgctcggccttctcggcgatcagggcgtccgattcgccgaagatggcgcgacgctccgagtgtcccaggatcacccagtcggcgccgatgtccttcagcatcgcaggggagatctcgccggtgaatgcgcccttggccaccttgtaggcattctggccggccagacccagctcgcagggcagcaggttgcgggcgtacatcaggtagatggccgggcagccgatgaccacctccgtgttggggtcgagggcggccgagctcagggtcttggcgatctcggcgatggacttctggtcgccgttcatcttccagttgcctcccacgcagaactttcggctcatgttgttgctgttgctgtcggtgcaatcggtgctgaaattggcgtagaactgcggatcgggggacaaaacaaggggactgctattagagtgtttggaactgataatttcaagtgggtaactcgatgactggaggctcgccgtcgacttttccactcagatttttcccagattcgagattaatcccggcacagagcacacacccacctcgaagttcgtctgcttatgtactaaccttcttttgaccttcgtaagtcttccactggcacttgaaaagctttgggaaaacagctgtgaatttgcccagcagagcttccgaaacgacggcttttagtacctccgccgtaacaccacccacagtgggtcggttctggtccatggtggggatggtgtggtggttccgatgatacgggaatcgctggagaagcgttactgatgcaatgcactggataccgttcctgttcagatcattgagtactccaggcggcatttctattgtggttacaatagtaagtaaggagtagtaaaagttattctgaaattatataaacggcttgttggggttttaaaaatgttgccggttttagatttagcagtgactccaaccatctgatggggaactttgagcaagtgagctccaatagttttggcgtcgcttccaaaaagctctggaaaagcttttatcaacaggcttgccaaaatccgctatactagcatatgtaaaagaaaaacttgtataccctaccaataggcatacatcgcatcaggacttatttaaccaacaaaaataaaacacaacatgaatgtacattctggtttaatcgctttatttaacttcaactttgaaattcatgtcgcatggcttaacttggttttcacagacgttcaggtatacataagctgacatatacacagtaaatactctaacaacattaaacatatgtatgtacataattaactagtccgtagaaacgtattatgaccatacactcaaaataaatgcgcatagctcctaatctctatatttcactaccgaactaattgatttagatccgatatagaatttgacaacgtttccgaaagagagcctaagagagctggaaagtacttaacgtaaaagctttgacttgcgagtatttcctcaggggtcaccccttacccctttcgcatccttgtgatcctc

SEQ ID NO: 3011 - DNA, 1190 bp, DROSOPHILA
ttaatctcgaatctgggaaaaatctgagtggaaaagtcgacggcgagcctccagtcatcgagttacccacttgaaattatcagttccaaacactctaatagcagtccccttgttttgtcccccgatccgcagttctacgccaatttcagcaccgattgcaccgacagcaacagcaacaacatgagccgaaagttctgcgtgggaggcaactggaagatgaacggcgaccagaagtccatcgccgagatcgccaagaccctgagctcggccgccctcgaccccaacacggaggtggtcatcggctgcccggccatctacctgatgtacgcccgcaacctgctgccctgcgagctgggtctggccggccagaatgcctacaaggtggccaagggcgcattcaccggcgagatctcccctgcgatgctgaaggacatcggcgccgactgggtgatcctgggacactcggagcgtcgcgccatcttcggcgaatcggacgccctgatcgccgagaaggccgagcacgccctggccgagggcctcaaggtcatcgcctgcattggtgagaccctggaggagcgcgaggccggcaagaccaacgaggtggtggcccgccaaatgtgcgcctacgcccagaagatcaaggactggaagaacgtggtggtggcctacgagcccgtctgggccattggcaccggccagaccgccacacccgatcaggctcaagaggtccacgccttcctgcgccagtggctgagcgacaacatctccaaggaggtgtccgccagcctgcgcatccagtacggtggatccgtgaccgccgccaacgccaaggagctggccaagaagcccgacatagatggcttcctggtcggaggcgcctccctgaagcccgagttcgtggacatcatcaacgcccggcagtaagcaacgcgatctcaagcatcagatcgctttcggccagcgaactgcccgcgaaggaggcactggagggcaggactccatactcctgcgcgcgaatgcattacgcacacacctagttgttgtcaccaccaagtgcagttccaaattcatagttaccttgcgagaatgctactcacatccttgttgttgaacgtatagtagtccattgtgtaaatcttaaattattcaggcaataattatgcgctactcatttacttatataccaaacc

SEQ ID NO: 3012 - protein, 247 aa, DROSOPHILA
MSRKFCVGGNWKMNGDQKSIAEIAKTLSSAALDPNTEVVIGCPAIYLMYARNLLPCELGLAGQNAYKVAKGAFTGEISPAMLKDIGADWVILGHSERRAIFGESDALIAEKAEHALAEGLKVIACIGETLEEREAGKTNEVVARQMCAYAQKIKDWKNVVVAYEPVWAIGTGQTATPDQAQEVHAFLRQWLSDNISKEVSASLRIQYGGSVTAANAKELAKKPDIDGFLVGGASLKPEFVDIINARQ

SEQ ID NO: 3013 - DNA, 13643 bp, DROSOPHILA
tcgcactcgcttttgtttttgcaatgcaggctcctgcacttgcggtacacacacataccagcagctgctacggccgccgctgcacacacacacacgcacagcgggcaaacgggcatctctctagctctacccgtctcgcttcaacccactgccgcgcgcattttcacatttcccgcatttgttgctacttcgcttgatttattcggcgttcatctgggcgttccgttttcactttcgcctggctggggcaacaacaagctcgcgatcgagtatctcagctcggccgtccgctgcgaacgagtatctgagtagctgagtaactgagtatctgagcgtgagtatctgtatccgagtgtctcgcggaatcggaatcaacacaaacagctgttagggctgcgatggcaagaatcgatagcttagcgataggaaatcgatagtttgggatttaaaaattgaacaaacaaaatcgtttattaacttgatttgggaaatcaaacaggtgtaattcatacatcagcgcagtctcctggcctcgcgttcagtttccagcagcgacaggatgtcgcccacgcgaacaggtcctttgacattccgaataatctggcggctttggtcgccgaggaactccacccgcacctgggtgcactgcccttgggatccagtgcgtccaaggatctcgaccacgcgagcgtactgaggcttgtccatgctgaatacgaaattcgagaattgttcgacaataaaagatttgaatttgaagctgtgagtgctgctgcctttccagtcgatgaaaatagaaaacctatctacccttctatcatccctggcgccacctgtaggccttgtagcgcaacataagtgcggacgcgaaccacaaggtgaccccaagtcgagctgccacctttcgcagtgttggcaatccagttggcatccccgaggcgagctatcgaaccagttcgatttcgaaccacgcaactctagcatgtaatcgttcgtctcgccgtctaacatttgtgtcgaactacattttgttttgccattcaataaatctattatttaccactgaataagcggcgccacggagccctaaaagagtgtgcgcgttccggagactcggcgcacagcggcccgcagcgatacgtccatgaaaatcgaacggcaacagcagcagcacccacaaccagcggaggcaacagcaacaaaatacacaaaataaagaagcagcagacggaaaagtgcacaaatggtgcagaactgagtggaaaggccaccgagcacagatttctcacagtgcaggagcccggagacgccgaaatgctctagagggcggcgcttcagcacgattttctccccgcggagagcccaaagttgccagcggacgaggatgactgctcctggcgaagcattaagttaagagacatacagccattgtttacagcaggcagctcagacaccgggataggataggataggatatgccctcgggccagcccacttgagttgaggagagcagaggagaggatcgggatccgtgcgcgaggagaggatctgcagccttgtttagcatttagtccggtcatcgtgccagcgccttgttaaccacactctcttgtttacgtttgcttgtttgttgaactccacaaatcgtccttccattaattgttagtcacgcgtccctctcgttgagcacactaatcaaaatgaaagcatcctcgtcgatatcgaaattgaagttgaaattgaaatcgaaattgaaagctaagttgcaattgaaatcgaagcgtccagccgttaaagctacaatcaaattacacccgtccaaacccacctcgtcatcgccattgccatcgtcaccgccatcgaagattggagccagggccgtcaggactgcgccaggatcagtcgtctgccatcccaattgagtgaagccgaggatacacgaatctaagggtgagtactgctcttggaattcccatgcacaatccataactaatgctattactttcttacgcagtttgtggattattggatttgcacaacttacttaaggactaatattaatactttaagaaaggcacaacataagtctgattaatgatctagttgtatcaagggaaatgattggaattagacaatttattcacgtctaactaatatctcaaatattaatagtaatttgaatgatcctttgtaagaaatgtgagcatatattttgcaataatagtaactttatgaaatgtatatttcattaaatcgaaggatgatacctgatcattgaaaaagtcatttagaacgccatgcaaattctaatcatccaactaaaatattgctcaattaattagtttgcagcacatttaatttatttctgaggtgtatgtgccaatgggatcccatagaaactgtatatatcttttaacttcattaacaaatcaattaattaacaaaacagtaaaacataattatattatcatcctgcattcatatccataatatacaatgttacctatttaacaatttacacatcctcttctttcaggtactgaatgtactgcatcaactgtaatataagctacgtaaataggaatttatgcgaataagagtaattaagtgaagcgtgtagttaaacatttctacaaaccggacataaaaagattcaaccatcttaaaggacttgcagcgctatggattgatatgttctcaagcgttggccatttctcacttgagtttaatcggttagtgttctatcaccctttatattcaaagcattctttagatttatttaggcgtttattggatgcacccgtgcgcgaaatattttctcccccacaaatccaatatgtatggcttattgaaaaaaaggaggcacttgggtggttgctactgattgatttaaagttcgctgtgttgaaaactaattcgatttgggctctgaaatgtaaatttatttaagctgagccaaaaataatatttatacaattttatctctattaaaataccttccaattttatctttgatgcaatatttatgactggcatataaaaaagtttttttgtttaatttatttatggtatttgtattatgttttggtttgaatgattatttatgagatgcacgagactaaagatttttcttaaaattattttcattgttttggacttactttcttggcgaacaaaaatatacccaatggccaaatctcttttctcccaattgataattgataatatccttatgtataaagcttgcctattatatatacatattttatatacatttatttatatatatgtatatttaaaacagagtaaaagtgttcataatttttttaactatcccataatgcttggtaaggctagaaacattagtcttcagataaaactttaactttaacatataacataaatttataccaaatggataacaatggctctaatcttttttttttccaaactcttaactatatgtttacaaccttagtctttcgaacaaatattttagtattatatattgtcttagcttatttcaaaatgatttcaattgatctaatcttttcttcatttcactattctttcaggaacaactggaaccattcggaataccaatatcttcccctgatttcatgttgaattttttatgcaaattacatatgtgagtatacaacttatttttactttgtcaatggttttgaagtttaagacaactacgattgcatgcgagaatctcagaaatataaactagtatgaaaaactgatttacattgatatacttaggtccttttccatttctcgaaacctaataatcatgacatcctgaagggttttaataaatcctttttaattggttattattcggaaactaccttttcactcaattgaaaaatcctcttagtgcaataaggataccatgatttcactattgtttattgggctgcagcactctgattaaggaattgaataagtttccgttgtctcggagaggagcaacagttgaccgcgcccaagtgcatccttcgggtccttcggtgtccttgtaatgggcgttgcacctgaaaagtaggcgcttccgcgctgaacttttccgcctgtgctggcaacttttgccgcgcacaaagtgccactattgaccttcggcaatactcgcagccgcagtgagtagtgcccgtgtttcccccagtttgccgggccagaccatgccggcgtggagtctagaccgccatcagacgccgttcatcgggcggttggttgagcaatggcggtcttaacctcattagaaacaaacgaggctgccgccggtcgctcctcccttcgtattgttttcaaacttattcgaaaataatttccacatttgtgtttaggggaggaatcggactccggaggtgggtcttccatctcaacccttgccccacccctcggctttcaggaaggactacaatgcgaacccaactccgctgctctgtttatgtacaataagaacgggcgggcgtctggtccttcctttgccttgccactctggcagtgggccaggatttggtctgggcttgggcagcagggcatagaatggggggaccagggtctggggactcaatctggacctgcgcatattggttgcacacaatgactcctattcgcctgctgccgtctcgcttgctccgccgcaaccacggacactctgaaaagaacatcctttgtgtgctgttgtacaatgtacatggagcatcatcatgttggaggtcgtcccagcaccgccactcgcactcctgctcctccgcagggcagtccatcaacagctggtcgggatattcaaggggcagtagtcctccactaagaaaaaatcctcgaaatggttgtattcgttcttaaaacacaaacatgtatagtgagtttcagaatcaaagtgcagtccagtacagaaagcttaagtttgtttgagggtctcagattgttcaattgctcgtaaataaactatttttaagtgataaagcaacttttaagctgtatacattcgtaactagcttaccaaaaagtaagccattgttcgtttttcagttttacaagttgcgatatagatacaatctggcttatagaactcaagagctctaatcgttgattgataatggtgaagtaagaatatttacaatttgtatattccagtatcgtgttgaattgattacaacccactttctcaatcccaaatagttaggtattgaagtactagatttttccctgagtgtcgatgtgctcaccgattaagttcgatttccgtacataaacgacgtaagcgccatactcgctgtccgcatgcaacaattgtgaatggaagaggctgtgggtgggtgcgcacgatgatgaggatcaagcggaggatgcggcagtggaggactggccaggaagcgcaaccccgaaatggtttatgtactctggctgctcggcatgggcgcacatacgtggctggcagggtgaaatctgccatcgctgtcaacgctggaggaggattcggattcataatcgcagctcgggacgcgggcactcgttcagtttgactttccgcttgtcaaggcattgtcaccgaatccctgtgctccgtggctcgtggcgagatttgtcaacaattagtggcgatagtaatccgaaaagtcgcgcggatccgaagtgagcaacctgtcgcggcattgtggatgcatcaaaggtgatttagtgtcatgcgttgggccgcagcatacctgcggtattgagatccttcggttgaaaggaaactaagccaaatccttcgagggctcctggcactgggcacctgggcaaccgttcgcagggaaaccctgggcagagcagtagctgtagcctccggcatgcgactggatgggaagccctcatctcacgctagacttacctgccaatcatcggaactcataacttgaaaagaatggaaagaattatccggcgaggcgtacgcaatctaatagggatagaaaaatcatcatcatcatctgccctcgagagggtctgctcatatttcattgttgttcctcggctcaacattcgctcgcagcaaaatcaataaggatttatttaattatttcataatttccgttcaactgcatccgcacaacaatgaaacaaactagttgctgccagttgcttcgccgggggttgaactttaactccgagtgccttcaatttgtaatccattcgtttatcgggcgagaccatgtcttcatggcttccaaaaacagtttacacgattctcaataggattgttttgggctttagatagtagccattcaccggcggcacatttaaatagtttagcaggaggctggatcaagacattattatgcaaatcaaattgaaattaactgccaaatactcctgtctcactttaactatagttttttgtgcgaaacacctttcttttcctggtttttccaagatacattcaatcagattggcaaacaatgtaaaattgggtttgaacaatgtcgttatccttctaaactttgtttaaaaccctttttcctatctaatttggataaatagttcaacgaattggtttagcttactattctatagagtctatcttggacttgtagatttttatgatatttaattatgatgataagtgatatttattaggatcttttttaacaagcatgtggtgtagcatggacttttactttaaaatcgtagagttcctggttagataaaactaaacttagtttagttttgtacaaaagagcaagatatccttttatctttgaactaataattgatctcgccagttttaagcataaaatagtttatgaaatacgcttagtacgttatgtaagtagaaagagcatggcatttctttagttccaagaaccattgcaagttttagaatttggaaaagttgtagccgttttaagtattccttgagtgattgtgaaaccgcttaggcaaccactcgcatcagtcaaaggtaattccctcttttggatgaatgttccgcaacccgtttcgccatttctccatttcgccatcgcggtggccttaaaaggcgccggcaactaactttctttgtgacccgagagaaagcagctacggggctttcagtagcaattacgccattaaggtcgagccgaatctttgatgtcggcgatggcacttgttagtcctgagatgcgcggcatgcgctgcaaggatgcaacggatgcaaaaggatgccaggttggtgagatggcgaaatgatgcaccaaagaggtgccgatttcccctgctgtttggcgctgtctttgtgcagcggatgccttggccacgggggagatgtgggcctcaagtggccgagccgtgggctgtcctactcctagaaagcgccgccatcgccaggccgcctcccgagtccttcgccgcgttcctttgcggtgccgagcgttttaattgtgcctttctttgttctttttgccgtaatggagtgctatgcaaatggcgttttgatgaatttccttggctctccgccggcgctatcgctttgtggatgcttgttggctgttcgcttccccagttgtcccggccctgcctgcctgcctgctcaaaacaacgaaaacaaacaagagcagctttcatcccctttcatcggctcgccgcctgtgtatgtgagtccgtaagtcatggttggcaggaaagtgctgcccaggctcatagccaaaccagaacccaaacccaaacccaaacccaaacccttctgctctccacttctcgccaggctctgctcatgtcctttgtgccatcttgttgttgtgtttgtcgctgctctgttgttggcggcaaacttatgcagtgatgaccgatttcagcagctaaaaagctagctatatggttagaaatcctatagatctacatataatagatgtattcctaaagtaaatctgttcttaatctgatagttagagaatggaacgaagtggaggtaaataagggaattaaatattttgaataaatgattaaatgatttagagctgattcgctacaagatctagtacttaatcatcagcttatatcattattttagctttcaaatgcgtttcatttgtacttggccaccatttagattgattttcaaccggaaaagagctgaacaaccagccctgagcagtgctcattgcaaatggggagggaaaaggaacaacgaagaaaagggaatatttttgatttaccaaaagcgcgacgcgatgcttactttctagtttccgcctgctctcgaacgcgtcagacagctcgaggaatccggaggcggccggggactttaaaggagcggagtccttgccaccatccccgagtttagcatgggtttattggggtgtgtgcccgagtggcaagcgagtgagtgtgtgcgtattttgtgttcaaattttgtacataatggattattgtccttttgcctttccgttctccctttgccatgcgccccgactgctgcattggtcgataacgtcaaccaatcaaaagcgccctcaaaatggccgccattcgattccgctcctcactttgccgatttgcgtgcgtcctcctttgtgaagaaaggcgaaggagccgtcgccgccaagtggtcattcattctggcttcgcatccgcatccttgaggatttcccatgcccattacggctccaattaccagtgcggtttcgatttcgatacctgcaccgcaaattgcgatcctgagatgcaaaagtgggccactagagtagtcagttgtgcattccttaaacttcatgcaaatacactttacttacgacttgatatactattgatattatgccttaatcagaactggaattcctcttgaagtcacacgaagaatacatccacttatacaatcctttgtgcttcttttgttgcaggccttgtctaattgccttccaaattcgcaaacgagcgcatcttccatgtcccagctatttgtaaaatacgggcgtttgtgatttgaaaccgagaacacgttcgttgatcgtaactggtaacttaagcgtaatattaggtaaatatttagcagcgatcgcttgtcgtgggaagccaatttagagtggcatgagtggccatccatcgggaatccggaaacatgatgataatgagtgtagtggcccacgaccaccagtacccggagaagagagccgtgttaaaaaggtgcttagaccagtggaatcattgtacatggaagtccgatatagcataatcataccttttctcagatgaccgaaggggtagcagatacctcgaagaattcgtcgccatcctacctgaactgggcccggacgctgaaccacctgctggaggaccgcgatggggtcgagctctttaagaagtacgtggaggaggaggcgcccgcctacaacgaccacctcaacttctacttcgcctgcgagggcctcaagcagcagacggatccggagaaaatcaagcagataatcggagccatctacaggtgagtggaatgcttagaagaatgccaaatgctcaatggtgaagcacttaccttgccgcccttccccacttgctaaagattcttgcgcaagagtcagctgtccatctccgatgacctgcgcgcccagatcaaggccatcaagacgaatcccgagatcccgctcagcccacacatattcgatcccatgcagcgccatgtggaggtcaccatccgcgacaacatctaccccacgtttctctgctccgagatgtacatcctctacatccagcagatgtccgcccagcaggagcgctgcaccagcagcggcgccacgggatcgggaagtgccgggagtagtggcagcggcggcagcagcctagcgggtgcctgtgccctgccaccgaccaccgcgtccggcaagcagcagctcccgcagctggtgccgcccggtgccttcatcaacctgccggtgagcagcgtgagcgggccgccagctggcacgtgcagtgccagcggcagtgtgtacggtccctcgacttcggccagctccagcggctcaataagcgccaccgacacactgccccgcagctccacgctgcccacgctgcacgaggactcggtgctgtcgctctgcgacgacttcgagaaggtgcagatgcaggagggcggcggatccctcggctctggatctgtgggcgcgggtgcgcgagcgcccgactacccgattcgcctcacgcgggacctactaatagcaactcagaaaagaagactggaaatccgacctcctgggtaagtcagctcagctctcttttgcccactctaaccgttggtggataacaaaacttaggctacgttgtatataagctagtatataacgaaatcgagcaagtcatagttaaactttctttagaagatcctcaaatagaatatagaaaccacacgagatccaccttactcttatgtttatgtttaagttctttattgttaatgatgattttctgtgattaactcctaatttgttatatttgtttcttttattttttacatatgtacatgaactctcacaaaaacacgcacgccaaaaacacgaacccacccgcatactatatactatatactatataccacccaccacactcattggaccttcaaacaccacccgcatatgcattgtacatatgattacctctacaccactgactcgatgaatatacactgcgttttccttatttgtttgaacatttttgtttgtggatcttgacgaatcccccacccacatacacacgatcatacaattgggcgccattgcatggaaactgtgtgttcctggtccgatctgcatgcgagtagtgcccacggttacgtgtacaatccaagcactaccaacacctcctatgtgccgaattcgcgggttgattcggagagggccagcgttagctccggcgggcgcaccgactccgacaccatgtcgatctccagctgttccatgtgagtaggagcgccagtagagaagccgtctccctaaagatccaattgggatgaatacctgacacgcggaacgaggagaccaattcacagcttgactgactaacgattcctcgtttcagggacggtcgcccgtacatccaacgcagacacagctccacggagagcaaggcgatccgccagagcgcgatggcaaacaaggagaccaacacctttcaggtaaaaggagaaacgatcatcgatggactgatctccatcaattagtttgattcacaggtgatacctcgcacacaacgactacattcgaacgagcacagaccactgaaggaagaggagctggtgtccttgctgatacccaagttggaggaagtgaagcgaaagcgagacctggaggaaagagctcgcgaggtaagtttaggatatgaataggttaaaagcaccaaacaccacactatgctaaatttccaaacagagaaatcccggtgctgctctgcttaccaacgaaagatccagtgccagcgatcgagccttcgccgaggcgatacgagagaagtttgcactggacgaagacaacgaccaagacattctggaccagcatgtgtcgcgggtgtggaaggaccaaacgccgcaccgctcgccgggaacgatgtcgccctgcccacccataccgtcgcgccgacgtacagccacccacgattccggaatggtcagcgatggcgccatgagtctaagtaagcctaacagaacgattaagggaataacaattttctaaaccaaaatccacccacaggcggacactcaatgaagcactcaaagtccatgccggatcacagttcctgctcgaggaagttgacaaacaaatggccttccatgaacacagacagtggcattagcatgttctcggccgacactgttaccaagtacaaagatgcgaggtaggtcaaattggcttcaatactaaccccaccacccactaaccaaacaaatccgctaaagttctcgatctggctctagcacggcctcgaaactggaggaggcgaaacgaagactggaagacgagccgcggcgctctcgtcgatacgcccaaccgccgatgcagcacctgtcgcaacagccactggcctccttcagcagcagcagcagtggcggcagcatcagcctgccacaccagccaccgcctctgccggccaagccgccggagacgatcgtggtgttctcgttctgcgaggagccagtgccgtacaggataaaaatacccggtactcagccaaccctgcgtcagtttaaggactatctgcccagaagaggtcactttaggtaaaatctacttatacactcgacgaactcaatgcttactaactaatttgtggcatccataggttcttcttcaagacgcactgcgaggacccggacagtccagtgattcaggaagagattgttaacgactccgacatactgccgctattcggagacaaagcgatgggtcttgtcaagccatccgattaatattaagcatttagcgtagattttgtattaaggcaaatcgtgagtgtggcttggtgcactgatgcactcggcaagatacgaatacgataacgaacgcaccaagtgtacgcatcttagagctagcaactggagaagctatttccgacaaatcaaaagctatatatgtacgggcgaccggcttttgtaagcatcacaaactactctctgcgggggcaatgtatttttctgtacaacaaaaactgatctattcaccagccacccaaacaaaggtggtggttggttctacgtttgtaaatccataacgagaatattcggagctattggtaggagagaacgatcctctttatgttcacaccttggcggccgtacgttcagagtccgaaaagcgtttcagtcccgcagccagggactgagatctttaggaactactgcacaaaatcacattattaggaagatttatgggtttacctcgattgggatttgtttgttaccttttactaactacggactgcctgcaataaattttgttaatatttttgtaatgtgcattttatgatgatgatatgatgatattaacaaagttctattcaactcgacaaaaaatcaaaagataatctgttttatttttgtatatctatagcacagcatacacacttaactttatgtatttatacaatgtattgtaattgcgtcaattgcatctaccgatctaccattaggcacatttcatttggggctcgatcagtccagcagcgaccaatactggaatacaatgggtgggtggtttattggcccttggccggaacggacgaggtcgatcgattgatttattcaaataagttaatgcatacacacacacttactatacatatttttttaagaaaactgaaataaccgcagaaatatgcaagtaacggataaatttattatatcaaacatattttatttgtgagcaaaatgcatatagatttaataaaaaagtacatggatagaacgtaatgatccaaatgatttcgcttgcattcggttgggtggtgatcacgatgatggtcgatgatgggttgggccttacacaatatataattatctattatatatattcaatatagtgggctaaactggcgtgcagtcgtctctctgaacgtgggcatcatagttctgctcgttgatgaaagtatgcgtgcacttggagcagtggaagcggcgatggcggttggtt

SEQ ID NO: 3014 - DNA, 3677 bp, DROSOPHILA
ccgtctaacatttgtgtcgaactacattttgttttgccattcaataaatctattatttaccactgaataagcggcgccacggagccctaaaagagtgtgcgcgttccggagactcggcgcacagcggcccgcagcgatacgtccatgaaaatcgaacggcaacagcagcagcacccacaaccagcggaggcaacagcaacaaaatacacaaaataaagaagcagcagacggaaaagtgcacaaatggtgcagaactgagtggaaaggccaccgagcacagatttctcacagtgcaggagcccggagacgccgaaatgctctagagggcggcgcttcagcacgattttctccccgcggagagcccaaagttgccagcggacgaggatgactgctcctggcgaagcattaagttaagagacatacagccattgtttacagcaggcagctcagacaccgggataggataggataggatatgccctcgggccagcccacttgagttgaggagagcagaggagaggatcgggatccgtgcgcgaggagaggatctgcagccttgtttagcatttagtccggtcatcgtgccagcgccttgttaaccacactctcttgtttacgtttgcttgtttgttgaactccacaaatcgtccttccattaattgttagtcacgcgtccctctcgttgagcacactaatcaaaatgaaagcatcctcgtcgatatcgaaattgaagttgaaattgaaatcgaaattgaaagctaagttgcaattgaaatcgaagcgtccagccgttaaagctacaatcaaattacacccgtccaaacccacctcgtcatcgccattgccatcgtcaccgccatcgaagattggagccagggccgtcaggactgcgccaggatcagtcgtctgccatcccaattgagtgaagccgaggatacacgaatctaagggtactgaatgtactgcatcaactgtaatataagctacgtaaataggaatttatgcgaataagagtaattaagtgaagcgtgtagttaaacatttctacaaaccggacataaaaagattcaaccatcttaaaggacttgcagcgctatggattgatatgttctcaagcgttggccatttctcacttgagtttaatcggaacaactggaaccattcggaataccaatatcttcccctgatttcatgttgaattttttatgcaaattacatatatgagtggccatccatcgggaatccggaaacatgatgataatgagtgtagtggcccacgaccaccagtacccggagaagagagccgtgttaaaaagatgaccgaaggggtagcagatacctcgaagaattcgtcgccatcctacctgaactgggcccggacgctgaaccacctgctggaggaccgcgatggggtcgagctctttaagaagtacgtggaggaggaggcgcccgcctacaacgaccacctcaacttctacttcgcctgcgagggcctcaagcagcagacggatccggagaaaatcaagcagataatcggagccatctacagattcttgcgcaagagtcagctgtccatctccgatgacctgcgcgcccagatcaaggccatcaagacgaatcccgagatcccgctcagcccacacatattcgatcccatgcagcgccatgtggaggtcaccatccgcgacaacatctaccccacgtttctctgctccgagatgtacatcctctacatccagcagatgtccgcccagcaggagcgctgcaccagcagcggcgccacgggatcgggaagtgccgggagtagtggcagcggcggcagcagcctagcgggtgcctgtgccctgccaccgaccaccgcgtccggcaagcagcagctcccgcagctggtgccgcccggtgccttcatcaacctgccggtgagcagcgtgagcgggccgccagctggcacgtgcagtgccagcggcagtgtgtacggtccctcgacttcggccagctccagcggctcaataagcgccaccgacacactgccccgcagctccacgctgcccacgctgcacgaggactcggtgctgtcgctctgcgacgacttcgagaaggtgcagatgcaggagggcggcggatccctcggctctggatctgtgggcgcgggtgcgcgagcgcccgactacccgattcgcctcacgcgggacctactaatagcaactcagaaaagaagactggaaatccgacctcctggtgcccacggttacgtgtacaatccaagcactaccaacacctcctatgtgccgaattcgcgggttgattcggagagggccagcgttagctccggcgggcgcaccgactccgacaccatgtcgatctccagctgttccatggacggtcgcccgtacatccaacgcagacacagctccacggagagcaaggcgatccgccagagcgcgatggcaaacaaggagaccaacacctttcaggtgatacctcgcacacaacgactacattcgaacgagcacagaccactgaaggaagaggagctggtgtccttgctgatacccaagttggaggaagtgaagcgaaagcgagacctggaggaaagagctcgcgagagaaatcccggtgctgctctgcttaccaacgaaagatccagtgccagcgatcgagccttcgccgaggcgatacgagagaagtttgcactggacgaagacaacgaccaagacattctggaccagcatgtgtcgcgggtgtggaaggaccaaacgccgcaccgctcgccgggaacgatgtcgccctgcccacccataccgtcgcgccgacgtacagccacccacgattccggaatggtcagcgatggcgccatgagtctaagcggacactcaatgaagcactcaaagtccatgccggatcacagttcctgctcgaggaagttgacaaacaaatggccttccatgaacacagacagtggcattagcatgttctcggccgacactgttaccaagtacaaagatgcgagttctcgatctggctctagcacggcctcgaaactggaggaggcgaaacgaagactggaagacgagccgcggcgctctcgtcgatacgcccaaccgccgatgcagcacctgtcgcaacagccactggcctccttcagcagcagcagcagtggcggcagcatcagcctgccacaccagccaccgcctctgccggccaagccgccggagacgatcgtggtgttctcgttctgcgaggagccagtgccgtacaggataaaaatacccggtactcagccaaccctgcgtcagtttaaggactatctgcccagaagaggtcactttaggttcttcttcaagacgcactgcgaggacccggacagtccagtgattcaggaagagattgttaacgactccgacatactgccgctattcggagacaaagcgatgggtcttgtcaagccatccgattaatattaagcatttagcgtagattttgtattaaggcaaatcgtgagtgtggcttggtgcactgatgcactcggcaagatacgaatacgataacgaacgcaccaagtgtacgcatcttagagctagcaactggagaagctatttccgacaaatcaaaagctatatatgtacgggcgaccggcttttgtaagcatcacaaactactctctgcgggggcaatgt

SEQ ID NO: 3015 - protein, 745 aa, DROSOPHILA
MSGHPSGIRKHDDNECSGPRPPVPGEESRVKKMTEGVADTSKNSSPSYLNWARTLNHLLEDRDGVELFKKYVEEEAPAYNDHLNFYFACEGLKQQTDPEKIKQIIGAIYRFLRKSQLSISDDLRAQIKAIKTNPEIPLSPHIFDPMQRHVEVTIRDNIYPTFLCSEMYILYIQQMSAQQERCTSSGATGSGSAGSSGSGGSSLAGACALPPTTASGKQQLPQLVPPGAFINLPVSSVSGPPAGTCSASGSVYGPSTSASSSGSISATDTLPRSSTLPTLHEDSVLSLCDDFEKVQMQEGGGSLGSGSVGAGARAPDYPIRLTRDLLIATQKRRLEIRPPGAHGYVYNPSTTNTSYVPNSRVDSERASVSSGGRTDSDTMSISSCSMDGRPYIQRRHSSTESKAIRQSAMANKETNTFQVIPRTQRLHSNEHRPLKEEELVSLLIPKLEEVKRKRDLEERARERNPGAALLTNERSSASDRAFAEAIREKFALDEDNDQDILDQHVSRVWKDQTPHRSPGTMSPCPPIPSRRRTATHDSGMVSDGAMSLSGHSMKHSKSMPDHSSCSRKLTNKWPSMNTDSGISMFSADTVTKYKDASSRSGSSTASKLEEAKRRLEDEPRRSRRYAQPPMQHLSQQPLASFSSSSSGGSISLPHQPPPLPAKPPETIVVFSFCEEPVPYRIKIPGTQPTLRQFKDYLPRRGHFRFFFKTHCEDPDSPVIQEEIVNDSDILPLFGDKAMGLVKPSD

SEQ ID NO: 3016 - DNA, 3737 bp, DROSOPHILA
cgtacggccacctactcaatttacggatgctccgtcggcggttcagtccgaggatccatcgctggcgcccacacagccagtgagcccggcgagccctcctggcggcgatggcgtgggtggtgctctaggctggaacgtggctgacagtactggtggtggttcactgtatcctaatatacgtgagtattaaaattatggagttttgtggattttcttttaaattataaaagcttcttagtagggttatatatctttatttattaaaatattctattttcattttgcagcgccaccgcagtttgtggagacacagtaccgggcaccaacgatcgccggtagggacgactccgagcatacgcagatgatcggcgacggagccttcgcacctcggtatccgactttccagtttaataatgccacagcaccgccagctagccagtgattgaatctctaagctagacccacaatgatattcttaaactttgatgtcgaactattttcttctggctgtctctgtttctggagggttagctttcgcaatttttatcggctttgcatttatgaaatattagctttccgtccaaatagaaagcataaacaggtgcagtcaaaataaaaaaggtctacctatacaaagtttttgaaatgcttaacttctgtttataattaaatagctttcggacagtaaatacaaagaattgggtctttattattttgactgcatctgtgtttaatttaataatcgtataaatacgcacaattgtcaattccgatttaaactgctcaaatttaattttttctgtttttttttaagccagcaatagtgcctaaaactgatgtacgactataatcgtaataaaacacaaaagataatgaaggtttgatacatgggcatagccaaatcctgggagccaaaaatgtgttgagccttgaggaacttgttttatacggagcattgggagatttaagaacttggaatgatggtgctatcgttccatatttacttcttctttttcttgcagtattcattcagttccctggcctttcttgctttcttctcacacttgcactgttccttcagagctatttttttgcatttggccttgaggatcttcatcttctttttcctttgtctaagcttcttttcggctatttttttgcatatctgaaaaagtccttcgggattggctttcggcttcggtggtgagggtggtgcggctttagatggtggaggggatggattagcagcttttggtggttgggcaggaggcggagatggcgttttagcgatctccttcttcacctccttctttacctcctgtttgatgttctctttgacatccgttttagctactggagcagatttgctagcattcttcttaacttgggctgcttccttgaacttgtatttagcgcatacatcaacttcttttggtttttgctgtttgttgattttcttgcacattgcttttttcgctttctctgcgctttcagccttttttctgtcctgctcagcttctcgcaaggctttgagtcggtccgcctccagcttagcggccttttcgcattccgccttctccttgttggccttatcctttttcgcctgcttgcggcacttttgaatcgccgccattttcttacactgctctttcatttgcttggcccgggcttttgcggctaggcccctaagttttatctgctttgccttcgccttctttctcgcttccttggccatctttgcgcactgtctctttaattcgcaaagatcttcttcaggcccttttttggcttcctcttcggcccttctcctggcctcctcttcttcgcgtttcctttcttcttcggctctctttcgggcttcttcagccaatcgggcgcactcttgcctttctttttcttctcgacacgctcgtttgatggcttctattttcgcctgcttttcgcaattcatttgatcggccattttctggatggccttgtttagcttttccaactcttcctcctcgtcggggcatttcttcttacattcttcttcctgttcacaatctcctctttcttttttgacgcacttcatgcattgctctatttccttctttttctgacattttttcaccttggccatttttttacactttttcattgcgaccttttccctgcacttgtttaactttttctgagccttaaacttcttgcacctctttttaagcttttccatgtcatcatctccatcatcgcctttctttccaccacccttgccacacttctgcttcttcttacccccactcgaccctttgctgcacttttctttcccaaacccctcggcggaactggcggtttcacagaaaatttctcgcttgaaggacatctcaccatccaacaaatcctttctcaagatcctctggttcagccgcttctccaggtcttccaggaacgcacttctcaacggctgatcgagtcgatggctaagtgtatcacaagtacctgaagacaaaagacgagaatcatacattttttttgcagaagcatgagtaagtttagaaaaccggccttcctggcaaatcaacacgctctgcagctctttcggcgttctcccatagtcctgttttgatttctgcacaagattcagatccttcatgcatttcactatgtgatacatccggagacacctgctacaattgcagacacggaaacaggcatcagggtagtggctcaacgccagcgaggctcttttcaacatgttttttatgctttggttccaaaatttaacagataattttaagaacaaatcgggttaaaatgcaaaaactaagaggatttcgacccgatctgcgccattatgttccgaaaactgggaagtaaatgggcctgtatttgacgtaattatcacagtaagtgtgtgaaatagtgaagtagactattattaaaataataatattcttatgcggagtcgatatactgaattttttttattaggacggctaagacaaatcatgacggcatatactgaaaatccaggttttttattgttaagctactcattctcaagaaagtcttatttggcataaggttgcatttgactatacgatatatacggtatatattccgggataatatatagaattttcgaacactttacgaactgaaaagccagatgggaaaagtttttattaaccacaaatcaatcaaacatgttaaagaattccatatttttgattttttgatgagtccgcgctagttttgatcggtccatttacttctttttcccctttttggcctttttcctgcacatctctttttcggccatttttttgcatttttccttcgccgcaaggtttttgcatatttttatcattttcttaaacttcttcttctcggccagctttttgcattgctccctctccgcaacctccttgcactttttcttccaatttacagccttctttttgcatggatcctcttttttgcaaggatctttctttttgcaggggtcaactttcttgggttttttagcgcaaggatctttggggcaacagctttttttctcgcaaggatcttcttcttcacaaggcttctcttcttcgcaagtatcttttttcttgcacttatccttcttgagcaacttcttgcacttctttttcagcttatccttttcacatttttctcttgctgccagctctcggcactttttctttattttttccttgtccatcttttctttttgggctagttccttgcag

SEQ ID NO: 3017 - DNA, 1659 bp, DROSOPHILA
atgttgaaaagagcctcgctggcgttgagccactaccctgatgcctgtttccgtgtctgcaattgtagcaggtgtctccggatgtatcacatagtgaaatgcatgaaggatctgaatcttgtgcagaaatcaaaacaggactatgggagaacgccgaaagagctgcagagcgtgttgatttgccaggaaggccggttttctaaacttactcatgcttctgcaaaaaaaatgtatgattctcgtcttttgtcttcaggtacttgtgatacacttagccatcgactcgatcagccgttgagaagtgcgttcctggaagacctggagaagcggctgaaccagaggatcttgagaaaggatttgttggatggtgagatgtccttcaagcgagaaattttctgtgaaaccgccagttccgccgaggggtttgggaaagaaaagtgcagcaaagggtcgagtgggggtaagaagaagcagaagtgtggcaagggtggtggaaagaaaggcgatgatggagatgatgacatggaaaagcttaaaaagaggtgcaagaagtttaaggctcagaaaaagttaaacaagtgcagggaaaaggtcgcaatgaaaaagtgtaaaaaaatggccaaggtgaaaaaatgtcagaaaaagaaggaaatagagcaatgcatgaagtgcgtcaaaaaagaaagaggagattgtgaacaggaagaagaatgtaagaagaaatgccccgacgaggaggaagagttggaaaagctaaacaaggccatccagaaaatggccgatcaaatgaattgcgaaaagcaggcgaaaatagaagccatcaaacgagcgtgtcgagaagaaaaagaaaggcaagaggccgaagaggaagccaaaaaagggcctgaagaagatctttgcgaattaaagagacagtgcgcaaagatggccaaggaagcgagaaagaaggcgaaggcaaagcagataaaacttaggggcctagccgcaaaagcccgggccaagcaaatgaaagagcagtgtaagaaaatggcggcgattcaaaagtgccgcaagcaggcgaaaaaggataaggccaacaaggagaaggcggaatgcgaaaaggccgctaagctggaggcggaccgactcaaagccttgcgagaagctgagcaggacagaaaaaaggctgaaagcgcagagaaagcgaaaaaagcaatgtgcaagaaaatcaacaaacagcaaaaaccaaaagaagttgatgtatgcgctaaatacaagttcaaggaagcagcccaagttaagaagaatgctagcaaatctgctccagtagctaaaacggatgtcaaagagaacatcaaacaggaggtaaagaaggaggtgaagaaggagatcgctaaaacgccatctccgcctcctgcccaaccaccaaaagctgctaatccatcccctccaccatctaaagccgcaccaccctcaccaccgaagccgaaagccaatcccgaaggactttttcagatatgcaaaaaaatagccgaaaagaagcttagacaaaggaaaaagaagatgaagatcctcaaggccaaatgcaaaaaaatagctctgaaggaacagtgcaagtgtgagaagaaagcaagaaaggccagggaactgaatgaatactgcaagaaaaagaagaagtaa

SEQ ID NO: 3018 - protein, 552 aa, DROSOPHILA
MLKRASLALSHYPDACFRVCNCSRCLRMYHIVKCMKDLNLVQKSKQDYGRTPKELQSVLICQEGRFSKLTHASAKKMYDSRLLSSGTCDTLSHRLDQPLRSAFLEDLEKRLNQRILRKDLLDGEMSFKREIFCETASSAEGFGKEKCSKGSSGGKKKQKCGKGGGKKGDDGDDDMEKLKKRCKKFKAQKKLNKCREKVAMKKCKKMAKVKKCQKKKEIEQCMKCVKKERGDCEQEEECKKKCPDEEEELEKLNKAIQKMADQMNCEKQAKIEAIKRACREEKERQEAEEEAKKGPEEDLCELKRQCAKMAKEARKKAKAKQIKLRGLAAKARAKQMKEQCKKMAAIQKCRKQAKKDKANKEKAECEKAAKLEADRLKALREAEQDRKKAESAEKAKKAMCKKINKQQKPKEVDVCAKYKFKEAAQVKKNASKSAPVAKTDVKENIKQEVKKEVKKEIAKTPSPPPAQPPKAANPSPPPSKAAPPSPPKPKANPEGLFQICKKIAEKKLRQRKKKMKILKAKCKKIALKEQCKCEKKARKARELNEYCKKKKK

SEQ ID NO: 3019 - DNA, 5161 bp, DROSOPHILA
cagttgttttctacaaaaaatttaaaggcaatcgttacacacaagtagaatcataaatcataagtataatatcaattataaattagtttctcacaaaagcttacaacctcgttggttttaaagaggtgacctaccgatttcttcttcttttcctcctcttcctcctcgtcatcatgctttaaaagccattcgcccatgtccaactccatgtatccgtcttcgtcaaatttgatacgtttgttggctgctcccttaatggcatccacgtccaccagcgaggccttcaagcgttcgatcttcttgcgctccatggtgcgcttcatcaccacgtacttgaggtcctgcgtctgcatgagggccaattgctcgggcgtgtgctcgtccttcgtgtccttctcgtggtgctcatcgttggacagcttggagttgatcatatggtggtagaactcatcgggattcttgttctgcgcccggcggtacaatagcttcaaggtcttttgctttttctgtgcgtcgatggctcgcttcttgtagtcctttttcttctccaggaatcccagatgctggcgcgactccggctggtggcgctccctgtgcaccttctggttgcttttcgacgcattcttccacgatgacatcttcaatttatgctaatcctcgacagcaatcaaatatgttctgttttgataaacgtgcgcttggggaattagagatgcacaactactcgataaatgtatcgcattgactcaaaacatcgaatgtggtgttaatcgggaatttttaaaaaaatctcattggtagaaattcaagctgccttcttgaagacatcaatacaaatcccacccgaattctacgatttaagacttcgtgtaaacaacattcatgtgcatttcacaatggtaatatgattgacgatttccgtgacattgtaaagtagatagttgagtcgcgactatcgacaaagcgcccatctctaaaccgcacacgtgcattttgaacgggcaacaatttcatttgcattatttacttcggaaaaccggagtttttaagtgaaaagtgaacgcaggaaagccgaagcatggtgaagaagaaaatagacaaccggatacgcgtgatgatcgagaatggggtcaagctgggccaccgaaccatgttcatcgtcatcggggacaaggcgcgcgaccaggttcccattctttacgacatcctgaccaagtcgacggtcaaggcgcgacccacggtcctgtggtgctacaagaacaaggatgaggccatctccaagtgagtatccaactgtagaactattacacagaaactcagctaactagatacatttttagtcatggcaaaaagcgagcaaagaagattgctgtgggcaaagtggatgtcaatgaggcggacctgttcgattcctttcgagtggccaccaccattcacggcagatactactccgagacgcacgcagtcctcggacgaacctacggcgtgtgtgtgctccaggacttcgaggccctgacccccaatcttttggctcgaactgtggaaacggttgagggcggcggtctgatcatcctgctgctgaagacactgcagtcgctgaaacagttgtacaccatgagcatggatgtgcacaagcgattccgcacagaagcccatcagacggtgacctgtcgattcaatgagcgactcattctctccctggcggactgcaagcgctgtctggtggtcaacgatgacctcaccgtgctgccacttagctccaagaccatcaacgtggagccagtgaatgtaagctgatgcttgtaaatcttctaaagcagctaataccatttgtttctaaactttcagcccgcaggcgccggtcgatcgcccaacgaggctagcctcaaggagctgaaggagagcctgctcacagttcaaccagcaggagctctggttaatctctgcaagacctacgatcaggccaatgccgttgcccagttcattgaggcgctggtcgacaagcaactgaagccgcccatgtccttaacagcggctcgtggtcgtggtaaatcggccgccctgggtctgtcgattgccgccgccgtcgcctttggctatgtgaacatctacgttacctcaccgcatccggagaacttaatcacgctctttgaatttgtgctcaagggcttcgatgccttggagtaccaggagcatgctgactacaccattatacgctccaccaatgccgactacaaaaaggcgataataagaataaatattacgagaagcagcaggcagaccattcagtacatagctcccagcgatactcatctgctgaacgcagccgatcttctgctgatcgatgaggcggctgccattcctttgccgctggtaaagaagatgatcggtccgtatttggtattcatggccagtacgataaatggatacgagggcactggcagatcgctgagcttgaagctcatttcccagctgcaaaaggataacaatgcaaggccgccactgaaactggaggaatcgattcggtatcaggagaacgacgacatagaaaagtggctgatcaacctgctgtgcttggatgccagtacggtgccgagtattagctcgggctgtcccacgccggatgcttgtgaactgtactatgtggacagggacgccctgttttcgtatcacaaggctgccgaggcctttctccatcgcctggtctccatttatgtgtcctcgcactacaagaacacaccaaacgatttgcagatgatgagcgatgccccggcgcatcatctattctgtctactgggtccggttcagcgaatggacgccctgccagagatattggtggttatccaagtggcactggagggtcagatctccgcccagagcatcagcgattccctgggcaggggcaagaaggcggcgggcgatctgattccctggaacgtagccgagcagtatggcgatcgagattttcccaagctgtgtggcgttcgcattgtgagggtagccacgcatccgaattaccagaggatgggctatggcaagcgggccattcagctgctcaaggactactatgcaaggaagcacactaatctggaggacggtccagttgccagcaaggatgctggtaaaggtgagtgcacgcacgccaatggtttattatgcactacataatactttaaattttgcataggtatcgaggaagtggaggaggaggaacttagtctgctgaaggaacaaatccggccacgtagtcgtatacccacacttctgcagcgcttgcacgaacgtgtcccggaacacgtggactatattggcacatcctatggcctcaccaccgagctgctgaagttctggaagaacgccggctttgtgcccgtctatttgagccagaaatctaacgaactgaccgccgagcatagctgcattatgctgcacacgcccaatgccacgccctggctgggcctgtactaccaggacttccgcaggagagtcctcaagttgatgggaaagacgttcagggaattcgagacgaaactctgtttggccttgctgaagaacaagtccgtggacacggaaggtagtgcactgaaagtactcgataagccaatgctggatgtttacttcttgccgcacgatctgcagcgcttggagagctacgcccgccagcagtccgagtttcgtctaatcatcgatctgctcacggacattgcccagctgtattttcagggcaggatcgatggtctgcagcttgacctggtgcagcagggcatccttttggctctgggcgtgcagggcaagactgtggatgcgttgggtctggagctgaatatgccgggtaaccagttgttggcgaaatttttcgatgccatgaaacggtgcaatcagtgcttccggtcggtactggaggagcatatcgaaggcggcatgctgcgggaggcggatctgtccaagggcgaggaactgcaaccgctgactctgtccctcgacaaggagctggatcaaaccgctcagaagctgagcaagcagcagcgcaaggagctgaagcgcctgaaggccgagcagctggacgaattccaaatcaagggcaccgaagaggattggtccaaggcgctggaaacaaacggaacaggcggtggcagcgggctgctctccgtcaagaggtaggtgcgcctattttttttaataatgtgcttaatacataaccacgtttatttatttgtctccagtttcgttttattataaacatcactcagttaaaaaaaatataacttatttcgtatttgcctctctttcgtttcagtggcgtaaagcgactggatggaccaatcgagacgcgtgaggatggcgacctggcagctccgctgtccaagaagaaaaagaagaacaatccgaaacagagacgcagtcagggcaagtccctgatctagagttcataatttttttcgtttggggggaaaaagaatgtggattttaattctatagaaaagtacatattgttgtaagctccgttaaaaataaagagacctaataactgaactatatcttgatattggcagtagccttggctgcagcggcggccgccctgcgccgttccttgaggtcattatagctaacgcccggctccttgtgggagttgcgctcgaagcgcttgaccttggacttcttgcggctgacgagctttgtcgtgggcaacatattgttgcgttgcagcgtgtggaagcggtccttcagcagactgctctcagtcttcacgttgcgcagatttccggcgatatcctcgggcagatttacgtctaggtctggctcctcgaacttgtgacgccccaggcgtttcggctcaaacttggccttctcggcgcgctgcttgcggcgcttctttagatcattcaggtcctcctcctcatcgtctagctcgtggcgaatcgatttgatgctgaatgaagaaacacaatagagattagagatggaccacaacgccatcagttagaaacttaccgtatcaggtcagccgtctgttgcttgagcttcctcttgagctctgtttgacgcgccagctccttttgcttgagctcgttgcggcgagcctgcttgctcttctttttgttctccacgggagcgttgattgtgtgatatggcttttcatcatcgtcctcctttttcttcc

SEQ ID NO: 3020 - DNA, 2982 bp, DROSOPHILA
ggcaacaatttcatttgcattatttacttcggaaaaccggagtttttaagtgaaaagtgaacgcaggaaagccgaagcatggtgaagaagaaaatagacaaccggatacgcgtgatgatcgagaatggggtcaagctgggccaccgaaccatgttcatcgtcatcggggacaaggcgcgcgaccaggttcccattctttacgacatcctgaccaagtcgacggtcaaggcgcgacccacggtcctgtggtgctacaagaacaaggatgaggccatctccaatcatggcaaaaagcgagcaaagaagattgctgtgggcaaagtggatgtcaatgaggcggacctgttcgattcctttcgagtggccaccaccattcacggcagatactactccgagacgcacgcagtcctcggacgaacctacggcgtgtgtgtgctccaggacttcgaggccctgacccccaatcttttggctcgaactgtggaaacggttgagggcggcggtctgatcatcctgctgctgaagacactgcagtcgctgaaacagttgtacaccatgagcatggatgtgcacaagcgattccgcacagaagcccatcagacggtgacctgtcgattcaatgagcgactcattctctccctggcggactgcaagcgctgtctggtggtcaacgatgacctcaccgtgctgccacttagctccaagaccatcaacgtggagccagtgaatcccgcaggcgccggtcgatcgcccaacgaggctagcctcaaggagctgaaggagagcctgctcacagttcaaccagcaggagctctggttaatctctgcaagacctacgatcaggccaatgccgttgcccagttcattgaggcgctggtcgacaagcaactgaagccgcccatgtccttaacagcggctcgtggtcgtggtaaatcggccgccctgggtctgtcgattgccgccgccgtcgcctttggctatgtgaacatctacgttacctcaccgcatccggagaacttaatcacgctctttgaatttgtgctcaagggcttcgatgccttggagtaccaggagcatgctgactacaccattatacgctccaccaatgccgactacaaaaaggcgataataagaataaatattacgagaagcagcaggcagaccattcagtacatagctcccagcgatactcatctgctgaacgcagccgatcttctgctgatcgatgaggcggctgccattcctttgccgctggtaaagaagatgatcggtccgtatttggtattcatggccagtacgataaatggatacgagggcactggcagatcgctgagcttgaagctcatttcccagctgcaaaaggataacaatgcaaggccgccactgaaactggaggaatcgattcggtatcaggagaacgacgacatagaaaagtggctgatcaacctgctgtgcttggatgccagtacggtgccgagtattagctcgggctgtcccacgccggatgcttgtgaactgtactatgtggacagggacgccctgttttcgtatcacaaggctgccgaggcctttctccatcgcctggtctccatttatgtgtcctcgcactacaagaacacaccaaacgatttgcagatgatgagcgatgccccggcgcatcatctattctgtctactgggtccggttcagcgaatggacgccctgccagagatattggtggttatccaagtggcactggagggtcagatctccgcccagagcatcagcgattccctgggcaggggcaagaaggcggcgggcgatctgattccctggaacgtagccgagcagtatggcgatcgagattttcccaagctgtgtggcgttcgcattgtgagggtagccacgcatccgaattaccagaggatgggctatggcaagcgggccattcagctgctcaaggactactatgcaaggaagcacactaatctggaggacggtccagttgccagcaaggatgctggtaaaggtatcgaggaagtggaggaggaggaacttagtctgctgaaggaacaaatccggccacgtagtcgtatacccacacttctgcagcgcttgcacgaacgtgtcccggaacacgtggactatattggcacatcctatggcctcaccaccgagctgctgaagttctggaagaacgccggctttgtgcccgtctatttgagccagaaatctaacgaactgaccgccgagcatagctgcattatgctgcacacgcccaatgccacgccctggctgggcctgtactaccaggacttccgcaggagagtcctcaagttgatgggaaagacgttcagggaattcgagacgaaactctgtttggccttgctgaagaacaagtccgtggacacggaaggtagtgcactgaaagtactcgataagccaatgctggatgtttacttcttgccgcacgatctgcagcgcttggagagctacgcccgccagcagtccgagtttcgtctaatcatcgatctgctcacggacattgcccagctgtattttcagggcaggatcgatggtctgcagcttgacctggtgcagcagggcatccttttggctctgggcgtgcagggcaagactgtggatgcgttgggtctggagctgaatatgccgggtaaccagttgttggcgaaatttttcgatgccatgaaacggtgcaatcagtgcttccggtcggtactggaggagcatatcgaaggcggcatgctgcgggaggcggatctgtccaagggcgaggaactgcaaccgctgactctgtccctcgacaaggagctggatcaaaccgctcagaagctgagcaagcagcagcgcaaggagctgaagcgcctgaaggccgagcagctggacgaattccaaatcaagggcaccgaagaggattggtccaaggcgctggaaacaaacggaacaggcggtggcagcgggctgctctccgtcaagaggtag

SEQ ID NO: 3021 - protein, 967 aa, DROSOPHILA
MVKKKIDNRIRVMIENGVKLGHRTMFIVIGDKARDQVPILYDILTKSTVKARPTVLWCYKNKDEAISNHGKKRAKKIAVGKVDVNEADLFDSFRVATTIHGRYYSETHAVLGRTYGVCVLQDFEALTPNLLARTVETVEGGGLIILLLKTLQSLKQLYTMSMDVHKRFRTEAHQTVTCRFNERLILSLADCKRCLVVNDDLTVLPLSSKTINVEPVNPAGAGRSPNEASLKELKESLLTVQPAGALVNLCKTYDQANAVAQFIEALVDKQLKPPMSLTAARGRGKSAALGLSIAAAVAFGYVNIYVTSPHPENLITLFEFVLKGFDALEYQEHADYTIIRSTNADYKKAIIRINITRSSRQTIQYIAPSDTHLLNAADLLLIDEAAAIPLPLVKKMIGPYLVFMASTINGYEGTGRSLSLKLISQLQKDNNARPPLKLEESIRYQENDDIEKWLINLLCLDASTVPSISSGCPTPDACELYYVDRDALFSYHKAAEAFLHRLVSIYVSSHYKNTPNDLQMMSDAPAHHLFCLLGPVQRMDALPEILVVIQVALEGQISAQSISDSLGRGKKAAGDLIPWNVAEQYGDRDFPKLCGVRIVRVATHPNYQRMGYGKRAIQLLKDYYARKHTNLEDGPVASKDAGKGIEEVEEEELSLLKEQIRPRSRIPTLLQRLHERVPEHVDYIGTSYGLTTELLKFWKNAGFVPVYLSQKSNELTAEHSCIMLHTPNATPWLGLYYQDFRRRVLKLMGKTFREFETKLCLALLKNKSVDTEGSALKVLDKPMLDVYFLPHDLQRLESYARQQSEFRLIIDLLTDIAQLYFQGRIDGLQLDLVQQGILLALGVQGKTVDALGLELNMPGNQLLAKFFDAMKRCNQCFRSVLEEHIEGGMLREADLSKGEELQPLTLSLDKELDQTAQKLSKQQRKELKRLKAEQLDEFQIKGTEEDWSKALETNGTGGGSGLLSVKR

SEQ ID NO: 3022 - DNA, 3485 bp, DROSOPHILA
tagtgacagatgacgcccaccgtcacaccactgatggccatgtgggcagtgcgcgtggattcgaagcgctcgatttcgccgcaatagatttccaggtgctgttctaggacgtcacccacacagctcagggtcagcgagatgcccacgttggtgaagaggaggaagcggctactgaatgcactcgcatgccattcccgcagcttctgaagcgctccaaagccgatggtgctggtggtggtgctgctgcctccaccgggcgcagctcctccggctcctccagtcgcgctgctgttccgtggccaactcattcgcaggctgcgctggccgcgaatggctctggacaggattaggccacgggccgggcagccacgcaaggattgcatgctgtccggcacggatttctaaatcttagaggtcggttgtgttgtgttcttctattcgctagccggttatgcgatatctatatgcccaccatttgcgggccttccattatgttagcggtataaaaaaatttgatgttctttcggggttctggagttagcttagaaagttatacacattgtttttcgaatttttttgcctgatttgacttttgaaaggttgttgcaacagcaacaacaacaacaatcacgtgtagggaacagctgttacgacgagggctagttggcttaagttatcgatagtttaacaatcgtagccaattgaattttaaaaaatttaaataataagcccttgatatgttaaagacaaaaaagatatcaaaacaacttaaatttgtaaaaaaaaagtgtaattttcaacaaagaattttaaaagagaccgataatgccttgcttgtctggttgaaaatattcgtttgatatataaacaataaaataaaacagaaacgtagcacaaatgaccaatacttaataaattcaaatattttgcaatactctattcgccagccctaagtccacttgtattcgatagccttgcatcgatagcgcagaatgcagtgacaaccctaggaagcattccacagtgttttgttgtttttttgtgcaagcgacgcattaaccgtgttctatatacaaatcgggcatatatatttatatatatctaccatatcggattgcaaagaccccaaagctcaaggaaaatcccctgacaccggacacctgaccaggattccccaagtggagtcatcttcaaacagctgtgaaaaaggtactgcgttgtcgttgttattcctgcgtttcgcaagtggagcccaaaatagcaaaaagcgcatcgcagatatatttatagataaggagtattacaaggccaggtagtaatcgaaactacccgtattataacccgcatttgataggaacaaaggaggagcacaacaaacacacgcatacacacgtacgtactcgggagagcgagcgagacggggtgcgaccagaagagcgagtgaggtagaggagggagcacaatgggacgcattttcttggaacatcttgggggtctgaaactcttcaattgcgcccaatgccacacgaacctgaccaaccgcagtcaattgatcagtacccgattcacaggcgcaacaggtgagtccaacaagtgctacagacacattatgattatgcaataataatccaatcgaatgcccacaggacgcgcctatctgtttaagcgtgtggtcaacctgaccttcagcaacatccaggaacgggtcatgctcacgggtcgccacatggtgcgcgacgttatgtgcaagaattgtggagccaaacttggctggatgtacgagttcgccaccgaagagtcacaaaagtgggtaaacgcggataggcagcttgtcactagggattctgggttatacaagtagttagtagttactaacttcatgtggaagaaatatcctttgaatgaactttctgcgactgccaccacacaagacatcttactaatgctccaatttatctcttagatacaaggagggtcgcgttatcctggagtacgccctgatcacagaggcagagggctttccgtcggaggccgccaccacgagtcattgagccgattgaatatacagccggaaaacgggaaccacgcattggcgaaccttgtgtagccctaagtattgagtagatggccacaggcgatggcctctatgcattagacctagattagagatcgccgtagtcggctccggtgttcgggataccgaagaccgatatatcggttgcacatccgccacggagcacatgcgactacggccctgtcttaacgtgacttaaacgtaattgtaggcacatctagcacgtaagcagctgcggcgcccaattctaccatttaaatgtcatgaggctgaagtgctaaaacgaaaaagatgggctgctactcagctggaacatattcgaaactgatgatccacacttgtctttttcaaacaagatctctaggccgtaatcaatcagcaataaagtaccacaataatcgaatagtagataataatcgtcgggattccgtcaacgcgtttctttactcagctattttgacaaatgcaggaaaatgcatcatctcagttgtctaaactagttaagattgtttgtaacagctataacacctaaagtttgccagtcttttgagccatggccagtgcgttctcgtgggcaataacctggaactcctggaaacgctgcgagacgcgttggttcatcttcagatacttttccatgcagttcagcgagcacttctcctgtgaaatggatgggcatattgaaatcgctgatttccacatggagcttccccacgggcactcacctcggaatccttaacatcccgcgttgtaaagtcgcgtatgcaatctgtgaagcacgtctcggacagtttgttgtaggacattaggaagtcggaaaactgaaagttagaaccgaaaacatatcaaatgaaaaccacattgcatcacttggcaccgccggtccttggcatgagatggtatcttcgtgtcaactctgcttaccgtcttaatttgatccttgtccaactgatcgatggctatgttttccggtgtcttagccattttgttctgcgatattttattcaaaattgccgaaacgaaaaagggccaataataatgtgcctatataatagggacagctgggtgtgcagggttgccagatgttaaaaagccattccgtgttctcgacttatcgatatgttatcttttgaagtatgttatgtgaagtatctggttcggccgactcaaaaattaaccacatctagttttactcttaacatcgggtatatgaaattaagcaaatgtatccatacataaattaaggtatatttataataatactttaactaagtacccttaggttgtgaaacatttaatttaaactattaaatagaataaaatgatatttcaaagatcgatattcctataaaatatcgatagtcgcatatcttatggtcagcgctttacggtactgcacctcgttcacttt

SEQ ID NO: 3023 - DNA, 1117 bp, DROSOPHILA
acaaccctaggaagcattccacagtgttttgttgtttttttgtgcaagcgacgcattaaccgtgttctatatacaaatcgggcatatatatttatatatatctaccatatcggattgcaaagaccccaaagctcaaggaaaatcccctgacaccggacacctgaccaggattccccaagtggagtcatcttcaaacagctgtgaaaaaggaacaaaggaggagcacaacaaacacacgcatacacacgtacgtactcgggagagcgagcgagacggggtgcgaccagaagagcgagtgaggtagaggagggagcacaatgggacgcattttcttggaacatcttgggggtctgaaactcttcaattgcgcccaatgccacacgaacctgaccaaccgcagtcaattgatcagtacccgattcacaggcgcaacaggacgcgcctatctgtttaagcgtgtggtcaacctgaccttcagcaacatccaggaacgggtcatgctcacgggtcgccacatggtgcgcgacgttatgtgcaagaattgtggagccaaacttggctggatgtacgagttcgccaccgaagagtcacaaaaatacaaggagggtcgcgttatcctggagtacgccctgatcacagaggcagagggctttccgtcggaggccgccaccacgagtcattgagccgattgaatatacagccggaaaacgggaaccacgcattggcgaaccttgtgtagccctaagtattgagtagatggccacaggcgatggcctctatgcattagacctagattagagatcgccgtagtcggctccggtgttcgggataccgaagaccgatatatcggttgcacatccgccacggagcacatgcgactacggccctgtcttaacgtgacttaaacgtaattgtaggcacatctagcacgtaagcagctgcggcgcccaattctaccatttaaatgtcatgaggctgaagtgctaaaacgaaaaagatgggctgctactcagctggaacatattcgaaactgatgatccacacttgtctttttcaaacaagatctctaggccgtaatcaatcagcaataaagtaccacaataatcgaatagtagat

SEQ ID NO: 3024 - protein, 121 aa, DROSOPHILA
MGRIFLEHLGGLKLFNCAQCHTNLTNRSQLISTRFTGATGRAYLFKRVVNLTFSNIQERVMLTGRHMVRDVMCKNCGAKLGWMYEFATEESQKYKEGRVILEYALITEAEGFPSEAATTSH

SEQ ID NO: 3025 - DNA, 2988 bp, DROSOPHILA
gaacttctacggtgaagggcatattttgtcaaatttacaatgcatgagcatacgtgtgcacacataaagttgtctgctatcactgtatgcgtagaaaagagcggttcgctgtagcgctcttcgctctctcgctctctaacaaaaattcgagagagcctggagccacctctagagccacggccaaaaaattgtgtgccaaaaaaattgtatggcgttacgcatcttgttattctagtgtctttggtactaccaacaattcacctttagtgcaatcgcaaatgtttttggcgagataaggagttgttgaaaagctttgtttggtatataaagagaaactaagcggcaaaacgatcagtgttaatacaaacctaatcaagaacagtgcacagtcgcaatgttgtttacaatcgcccttgtgggcgtggttttgggcttggcctacagtttgcatataaaaatcttctcatattggaagaggaaaggtgttccacacgagacacctctgcctatagttggcaacatgaggggaatcgtgaagaagtaccacttccgcgatatcaaccaaagaatttataagaagtttaaggggcagggtcccatcgccggaatgtacattctttaagcgaaccgccttgatcaccgatctagatttcatcaagcaggtgatgatcaaggacttcagctacttccaggatcgtggcgctttcaccaatccccgagacgatcccctcacgggccacctgttcgccctcgagggcgaggagtggcgagcgatgcggcacaagctgacgcccgttttcacctccggaaagattaagcagatgtcgaaggtgatcgtggacgtgggtcttcgcctgggcgatgccatggacaaggcggtgaaggaggccaaagtggaggagggtaatgtggagattaaggatctctgtgcccggtttaccacggatgtcatcggatcgtgcgccttcgggttggagtgcaacagtctccaggatccaagcgccgagttccgacagaagggtcgcgaaatattcacaagacgtcgtcattccacgctagtgcaatcctttatctttaccaacgccaggctggctaggaagttgcgaataaaagtgctccccgatgatttgacccagttcttcatgtcgacggttaagaacaccgttgactaccgcctcaagaacggcattaagcgcaatgacttcatcgaacaaatgatagagcttcgagcggaggaccaagaagctgccaaaaagggtcagggtatcgatctctcccacggcctgaccctggagcaaatggctgcccaggccttcgtgttctttgtggccggcttcgagacatcctccagcaccatgtccttgtgcctgtatgagctggccttgcaaccggatattcagcagcggttgagggaggagattgaaagtgtgctagccaatgtggacggcggggagcttaattacgacgttctcgctcaaatgacgtatttggatcaagtgctgtcgggtaagtaccgatccgccttagctaaacaaactgattttaagccaaaacctctttcagaaactcttcgaaagcacccactgcttccccatctcattcgagagactactaaagactaccaaattcccaactcagatattgtgctagacaagggcattcttgccctgattccggtgcataatatccaccacgatccggagatatatcccgagccggagaagttcgatcccagtcgcttcgacccggaggaagtcaagaaccgccatccgatggcctatttgccctttggcgatggaccaaggaactgcattggtctgcggttcggtaagattcaggctaagattgggcttgtgtcgctgcttcgacgattcaaattttctgtatcaaatcgcactgacgttcctttgattttttcgaaaaaatcttttctgttgactaccaatgacggcatttacctaaaagtcgaacgcgtttaaatgtgtaaattatctgaaattaaaaaaataaaagataagaagcgtaaagtacacctgaaatatttggaaagttatttattgaaatattttgttaatgtccaaactgtgaccgaaactttgttaattaaatacaaaaaatgcccgcggctaaatcagataccaaatcaaattaaagttgtgtttgactaaatttattagttcgttcagcagccagctaactgatcgaaactttttcggctaaaatgtaattttggccactttattcactttacatttgtgcacggagctggccaccaggcagtaagtgtaatgaattttaaaaggaaagtatctaatgatacttacttctcagttgaatatatgtgtacttggcatttaaaagcaattttgtctagaatgttttagcattgctcccgaacccgaatagaaacctcaaaaagaataacaaagtattctcccgctaatctggagccaaaatccggctaaaacttttccgtgactcgcccactaatttgctcatttctcatgcgttacttgccagctgctaaccgagtacgactgttttgacagaattgcatgtgctgtgcaatatgttcgcccaggattcgccaggattcgtgggtgggaggacagaggatggagtcattcagccaggaggaagtttttgccacggcactttttgatagtgcagtcacgccacagaatccttggggcaacgaaacaaagcaaggcaaggcaaggcaaggcaaaaaaaacttggagctgcaaaacaaatggaataattagccggaataagatgaacttgctcacggcaccaggagaactcatagaccaggtgcagtggattggtattggtattcgtattcgcagtcccccgtagataaccaggcatttgtatctcttccagctctctgtttttccagccctggcaaaaaagtgaaaaataagaccatgaatgcctccagtatcctgcaccgcctgcttgggctgggtggttgtatctggggcg

SEQ ID NO: 3026 - DNA, 1353 bp, DROSOPHILA
atcaccgatctagatttcatcaagcaggtgatgatcaaggacttcagctacttccaggatcgtggcgctttcaccaatccccgagacgatcccctcacgggccacctgttcgccctcgagggcgaggagtggcgagcgatgcggcacaagctgacgcccgttttcacctccggaaagattaagcagatgtcgaaggtgatcgtggacgtgggtcttcgcctgggcgatgccatggacaaggcggtgaaggaggccaaagtggaggagggtaatgtggagattaaggatctctgtgcccggtttaccacggatgtcatcggatcgtgcgccttcgggttggagtgcaacagtctccaggatccaagcgccgagttccgacagaagggtcgcgaaatattcacaagacgtcgtcattccacgctagtgcaatcctttatctttaccaacgccaggctggctaggaagttgcgaataaaagtgctccccgatgatttgacccagttcttcatgtcgacggttaagaacaccgttgactaccgcctcaagaacggcattaagcgcaatgacttcatcgaacaaatgatagagcttcgagcggaggaccaagaagctgccaaaaagggtcagggtatcgatctctcccacggcctgaccctggagcaaatggctgcccaggccttcgtgttctttgtggccggcttcgagacatcctccagcaccatgtccttgtgcctgtatgagctggccttgcaaccggatattcagcagcggttgagggaggagattgaaagtgtgctagccaatgtggacggcggggagcttaattacgacgttctcgctcaaatgacgtatttggatcaagtgctgtcgggtaagtaccgatccgccttagctaaacaaactgattttaagccaaaacctctttcagaaactcttcgaaagcacccactgcttccccatctcattcgagagactactaaagactaccaaattcccaactcagatattgtgctagacaagggcattcttgccctgattccggtgcataatatccaccacgatccggagatatatcccgagccggagaagttcgatcccagtcgcttcgacccggaggaagtcaagaaccgccatccgatggcctatttgccctttggcgatggaccaaggaactgcattggtctgcggttcggtaagattcaggctaagattgggcttgtgtcgctgcttcgacgattcaaattttctgtatcaaatcgcactgacgttcctttgattttttcgaaaaaatcttttctgttgactaccaatgacggcatttacctaaaagtcgaacgcgtttaaatgtgtaaa

SEQ ID NO: 3027 - protein, 437 aa, DROSOPHILA
MIKDFSYFQDRGAFTNPRDDPLTGHLFALEGEEWRAMRHKLTPVFTSGKIKQMSKVIVDVGLRLGDAMDKAVKEAKVEEGNVEIKDLCARFTTDVIGSCAFGLECNSLQDPSAEFRQKGREIFTRRRHSTLVQSFIFTNARLARKLRIKVLPDDLTQFFMSTVKNTVDYRLKNGIKRNDFIEQMIELRAEDQEAAKKGQGIDLSHGLTLEQMAAQAFVFFVAGFETSSSTMSLCLYELALQPDIQQRLREEIESVLANVDGGELNYDVLAQMTYLDQVLSGKYRSALAKQTDFKPKPLSETLRKHPLLPHLIRETTKDYQIPNSDIVLDKGILALIPVHNIHHDPEIYPEPEKFDPSRFDPEEVKNRHPMAYLPFGDGPRNCIGLRFGKIQAKIGLVSLLRRFKFSVSNRTDVPLIFSKKSFLLTTNDGIYLKVERV

SEQ ID NO: 3028 - DNA, 2917 bp, DROSOPHILA
ttgaggaaaagtcactgacggtggctagcagggggctcccattgatggcaaacgcgcgacaatcaacacgaggcggtgctgatatcgcacagcagtgggtggctggttggtttgggtggactttcagtgtggttcgagtacagagttacttggatttcgggttcggttcggttgggctggaggattagtaatggccaggacaaaggtgggcagaggagcagcatcattttgatgataccaaatgctgatgacgataccgtcctccacgaaacatcatccgccaacccatcaacctgccacgccgcccaatccaaataccatttcctttttggtgtgggacgttgtttgcttttttgtgggcgtcgctgctgccacttagtaactcacccgcagtttattattttcaaaatatttaaattttttggtaataagcgaaaaatggttttaatataaccgaatgggcgtaccgaagcgaacgtgcctgatgaggatgacgatgttcatgatgctgcttatgtttcgtaggtaatccacctggtggagttttgggaagagggcgagttttgaggacattacagggatgattagtctactgtacgcgcacagattatcccgaaaataaagtcacctacaggacagtctcttcagattagaaaatgtttcccaaattctacatatacacatatataataaaaattaaatttttaaacgaattgaccttatctaagttttatttatttccaaaatttaattatatctttgatcatatgattcgatttacatgatagaatctcgttgcgcaatcagtcaacttttcttatcaacatctgaacgaacttaacaaatgttagctttgacggaattaagatattggatcactgttaggagttcaactctgcttgactgggatatacacacacatatatatattatacttatatatatatatgtgtgatatattgggagaattaggctgtagtctattgatctcgggccggtattattgatcctcgggggactccacactcctgccccaattgttgtactgctgctgatttttcttatgttgctgctgttgcctttgttgctgttgcatgtgcattaattgcaaatgttgctggcgattacgtgtattatccgaagattgccgctcctctgtgcgcgccacactgtgtttgctctgggcgttgcgtttatatgtcctgaccgtttcctcccaatcacgacccatcacctcacgggatatttcatccggactgcgcatgaattgcttgcgcaacgatgtcggctctgtttgacggaaattcggtcgataggcattgggatcgcgaggatttaaccattttgtatcgatatagctctgatccctccacatattatcctcccgattgatgcgtcgctcgaaagcaccagtgttgacgccacgcgaataggagctggcatcacttatcaccgtcgatgtggcactggcacgcgaaacgccagcccttggcgaattgggctggctattgccgtcaccccgtccccacgaatctgaggccatagtccttcgaaggtcaatccatccgccgcctaaaagcccagtcaagctgggtcgcacaatgtggcatagaggataagacgaacgctgcatgattctgtaatcgaaaacgaagttattatactttttactttttgtttgtttgaaacccttcgcctttaatgtctagaaataaatatcacatatttcaggacattacgtccacacagaaaattttttttaacactttcgcgatagccatcaaacgattccaaaatctgaaaacgtacctagatatacacaaatgatttgtcttgcaaaatcttattgcaccatatgtttgttaaatttggaattttagtaaacttttttacgataagatttagagtctggtcttgccggttgaaatttttaagactgaatgagaaaatctcagagtctctgccaaatgccttgacaggctatgtaacactaaagtcaaggctagctaattttagaaaatgtaactttagtaagcaagtttatataatgagattttattatattgtatattttcagataaacttatgcaattcaaccattctggtaagtcacaaatatttattttattacaagcaaattctttaagcccgtggcgtaaaatcgctgaaatgttaccaaattccctttattttccacaacaaagcaatgattattcatatacatttgcccatgtatgtgagtataattatagcgaccagttcttgaagcaattgcaattttgtggtcgtacatccgcctgggaaaatccaactgaacacggccactactgacgaccattaacttgcctgggctggtactttcgagccaccctttttcgacttaaacgttgacacttgaactctttttgatttcgcatatgtgcgtggtctctgaacaatggcacaattatgttaaatatcgacaagtggccatccaactgctgcttttgttgtggggaaatattaaacacttgtggggcggtcgccaacaatcgaaattcttggagcaaaacaaaattaaaattaaaaatggtaaaatgtttaaaaaagaggttaagcacctcgagagggcaatgttgaagttagggggagaaaacggtttcatttaattttttttttttttcaaaggaaacaaaacatattttgttcgttttcttactatgtaaaaattgtaaacagcattttttttctttgaaatattgtatctttcttgattggcactttcaacataattttatgtacaggacaaaccctttctgttacttctatcgatctccaacgtagaatttcaaaagaaagcattttcttcttgttggatataacttaattatgcaatctaaatgcattgaatcacctcaaccaaatgacaataatcata

SEQ ID NO: 3029 - DNA, 745 bp, DROSOPHILA
caagaccagactctaaatcttatcgtaaaaaagtttactaaaattccaaatttaacaaacatatggtgcaataagattttgcaagacaaatcatttgtgtatatctagaatcatgcagcgttcgtcttatcctctatgccacattgtgcgacccagcttgactgggcttttaggcggcggatggattgaccttcgaaggactatggcctcagattcgtggggacggggtgacggcaatagccagcccaattcgccaagggctggcgtttcgcgtgccagtgccacatcgacggtgataagtgatgccagctcctattcgcgtggcgtcaacactggtgctttcgagcgacgcatcaatcgggaggataatatgtggagggatcagagctatatcgatacaaaatggttaaatcctcgcgatcccaatgcctatcgaccgaatttccgtcaaacagagccgacatcgttgcgcaagcaattcatgcgcagtccggatgaaatatcccgtgaggtgatgggtcgtgattgggaggaaacggtcaggacatataaacgcaacgcccagagcaaacacagtgtggcgcgcacagaggagcggcaatcttcggataatacacgtaatcgccagcaacatttgcaattaatgcacatgcaacagcaacaaaggcaacagcagcaacataagaaaaatcagcagcagtacaacaattggggcaggagtgtggagtcccccgaggatcaataa

SEQ ID NO: 3030 - protein, 210 aa, DROSOPHILA
MQRSSYPLCHIVRPSLTGLLGGGWIDLRRTMASDSWGRGDGNSQPNSPRAGVSRASATSTVISDASSYSRGVNTGAFERRINREDNMWRDQSYIDTKWLNPRDPNAYRPNFRQTEPTSLRKQFMRSPDEISREVMGRDWEETVRTYKRNAQSKHSVARTEERQSSDNTRNRQQHLQLMHMQQQQRQQQQHKKNQQQYNNWGRSVESPEDQ

SEQ ID NO: 3031 - DNA, 5098 bp, DROSOPHILA
atccctcatgctgtgctccaatgcccaaaactaatcgctgtccatggttatttacaggtgaatctcgccagcaagcagctggagcacacgctcaacgagttcgaacagctattcctcaactcccgcaagttcatgatgggcgacaacatttcgtatgcggatctcagcgccatctgcgaaatcgatcagccgagtgagtagaagaatacaagaaatccattggcgcacctgatactaatgccttggcatatgcctgcttcgcagaatccattggctacaatgcgttccagaatcgcaacaagctggcgcgttggtatgaaacggtgcgcgaggagctgggtccccactacaaggaggtgctgggcgagttcgaggccaagctgaagggcagtggcagtggtcagcagcagggcgtcgcccaggcggtgaagcaatagctaggaccgtccgccgccaatattgtttagttccctaaggcaatcgactatttaaccagattattttttttttttttgcgctacaactattgcatttttgtgattatacttgctcttcctatccaataagtcttagcctttccatcacacttgttttaacaataccatttgtgtcacgtaatgctcatctgtttaaacgtacgagaaaaacttataatcttatatataaacttagttgttaattatgtattttaattattcgtatataaagtacgcttatgtttgtttaaatatcgactttttttcgcgaacatagaacagaaagatgccatacatttacatttacgctttattcgactcgattaacatttgtgttggggggtggattcgctctgggagcggtgctcgcggttgtgcggaatactaggggtgtgtctgcaccatacgtctatatatgaggtgtacaaaataggatctgcctggtcatatcacaattgaaatttgtatacacagattgagaaatgcttgctgcccatgcacaagagaactttcacttcgccgctttacttcatcgtcggatcggggaatgcatcgcgcggcggcttgaagctcagcatcatgatgtgtcgcgcatacgacttggtggcccggaaaagggaatcggtgccatggaggcgatccaagacgcccagcacgccgaaacagttgttgaatctgtcggttggcaaggaaaacagcatattagcctagtttatatcactagttgccaatcaattactttaaatggtgaaaatcatgcgcctcgggactgggaaagaacggcagatgatagccggagtgggcgttgagtgttgaaaggatggccagggcgaaccacagccacgcggtggccacatggctgcccatgagaaagacgcccaggaagggcggcaacaggttgctaaagatgtgctcaatgggatggcaatagatggccgtcaccgagatgggggccgtccactcatgatgctgcttatggatgtacttgtagatgtgcttgtggtgcagcagacggtgcgaatagtagaatcccagctcctccatcaggatgcacacggtcagctcaaagcagacccagtggaatgtgggcaggtcacgaatgtcgctcagtccacggatctccattagtcgatagctggcataggccaatggtatgcccacgaatatctggttgcagaccacgcaccagatcacctggaattcggaggggtcagacagtgggatcaattgaatataaatttctcgatcgatcgatcgattgcattacctttagcagacgacgaacctccacgggctcattggtgcccggctggatcttgtacttgcgcagacaggcgggccgattggtcaggtccatgaaggtgtacagtgtgcccacggtccagtagacgagcatcgtgaatatggtggtaccgaagacccaaagaaccatgggctcgtcgcctggaagatttgtttatttcaaattgaattaatagctggcgataaaagagtctataagtgatgccttaaagtatgcaaagttataattggaatccaaaatttaaatagatgcatagtgaattgattcatatgagaatggatgttattaaatctataaatgtataaagaaatatccaagcaacagctggatataaatcatatgtagaccgtaaaaaaaagcaggcaaataaacccataaagataagtggcttaagtaaagttcttaacgcaatgaatcgtgtgaattgtaaattgtaaacgctgtaaggaaaatgcaataaaacgggcctatgaaccctgtttactcagcttctgactttgagcttaagcaaaatcggttaaccgatgagcccggaacattgagcccattgtgcaatgcgtgaattaacgtatttactctggccaaacagagttatggttaaataataagtgtggctaacccgattggggtgtgtgagtactaaacatttgtttgctgaagaattcaaatttgcgtgagtaacgcggcgattcatttcgcctaattggcagcacttctggttgcatttgtatctgtatctcttgcatgtgtctctttgtatctttgtgcccgtatctctgtgtctgtgcgatggaattagtaaacaaaacagttgttgttgacattttgctgtgtcgcccagtggctgagagttgcaatttgcacagtatcgcccatgtacacaatgtacacaaagagaggagcaaagtttacctgtcaacttatccattcttttaccctttgttttggatatgatacttgttagattcacttaccgaacgagtcgatgaatttgtcccactgcgactgccagaaatcaccggaggctccccaaaagctctgcagatgcctggcatagatataagaaacctccatgaatttatcctccatggctcgtaatctcagtgtgtatatgtatatgttctggttcttgcagaattggctttctcccgattcttcgctctctctctctctctctctctcgctttcttcacgcaaatcgcgtgtcttcgctgctgagcgtcgcaaaggcaactggcgattttgatcgcagggaaaagcgcagctcacaaaaccgaagctcaacttagttccacactctcgccaaaaaaaaaaaatgagaaagagagagtgtggggaagaaagcagaaaaccgaactttggatgcccttctatgtcgtttgtgatctagaaatctatggtatgctatgctaacctcgttcataaaggcaattcgagtagattttcgccttagaaagcctatttcatgattgcactttcaatttgtctattattctatagcaatgaagagtatacgcttaaataactaaacaaacacgctgattactattccgttctcttcacctgggaatatagtgaaatctaatgcaactcttatataatggtccactctgaggtcacaagggctatcgactcagaatgcggattttaaattttgcatttttgagcaaaaaaaaaaaaaacaaattatgatatcaataagcttataataatgcaatcattgccccaaaactattttcagctattatctttactaattgggtaagttggcccagaagcttccatttagattgaaaatctgtgtgaaaattactaagccctaaacgaggagaggtgccagaaggcgggagaaagcggactcccgcccagaatcccgataattaccaggtgagcacgttgcggaacagaatgaaggcggccagggcgcaggtgatgatgaagatgacgctgtgcagcgaggacagccaaacgtcggcggtgcgggcgtcatcccagttttgcagcggtgaaccaggcaatggtgtctgttccttggcattctgggggatcaggggattattaattattattattattagtatagagtagatgtgattccagccggcttacatcattcaggttgaggtagaccggcggcagacccgccttgtccttgacgattccaccgcccaacgaataggaggaggaggatgatgatgatgaggaactgttcccagagcttcccgcttgctgggacaccgaaatgggcgaggatgcggataatgagccggatgagaggcccatgctatttggcggttttccgtgcaccggatttgacatatttacgtcttaatctcgagtagtttcccggtttttcttactttccttccgaaactttcccagtcaagttgctctctcgctctcttcgtagattttccgttgctttcctattgtttttgttgtggcttttccgttgtccttgacatttaacgcatttcgatttttcgattgtttggcagcccatgtgcgtggaattcgaaacgaattcggcctgctggcaagcgcactgaataaataataataattataaataattgttaactttgcaacatgaaacgtttgtacaaaacaaaaaaaaagtgcgagcgattatttttgaattttcctaatcaagctctctcgctctctctctctctatcgctatctcgcacgcagtgtgaccatgccaagcatggccaataatataccacagactgagcgaggacatctaccctgtacgtagcctaggtactcatcccgaaaacaaaatctcgcttggcaacactgcgcgcagtgcataaacaacaagaaagaagaagaccgccgacggagagaaaaatcgaagttgcattggtattggtgtctcgccgtgtgcatgtgacagcaagtgcagttagtttctaactaatcgtttcagggatttgggatggcacgcaaagagtagatatcactgcaaatcggacacaaatctgcatcccccgtcgttggactgcgcgatttagcatccggaggctgcggctagcccgctgcgctacacccgccgcaccaccccgccctcacttcgcccacaaatggaggagtcgggtccgccaagcaatccgtctccggttgcgtcacgtggccgcggacgtggtcgcccgccgaaagtggcgctttccgcgttgggaaatacgcccccgcacattaatccatcgttaaaacacgccgatgcagaggcatcgcccacggcgccggaggatcaggattccggacagagcgagtgccggcgcagttcgcgcaagaaaatcatcaagttcgatgt

SEQ ID NO: 3032 - DNA, 1221 bp, DROSOPHILA
atgtcaaatccggtgcacggaaaaccgccaaatagcatgggcctctcatccggctcattatccgcatcctcgcccatttcggtgtcccagcaagcgggaagctctgggaacagttcctcatcatcatcatcctcctcctcctattcgttgggcggtggaatcgtcaaggacaaggcgggtctgccgccggtctacctcaacctgaatgataatgccaaggaacagacaccattgcctggttcaccgctgcaaaactgggatgacgcccgcaccgccgacgtttggctgtcctcgctgcacagcgtcatcttcatcatcacctgcgccctggccgccttcattctgttccgcaacgtgctcacctggcatctgcagagcttttggggagcctccggtgatttctggcagtcgcagtgggacaaattcatcgactcgttcggcgacgagcccatggttctttgggtcttcggtaccaccatattcacgatgctcgtctactggaccgtgggcacactgtacaccttcatggacctgaccaatcggcccgcctgtctgcgcaagtacaagatccagccgggcaccaatgagcccgtggaggttcgtcgtctgctaaaggtgatctggtgcgtggtctgcaaccagatattcgtgggcataccattggcctatgccagctatcgactaatggagatccgtggactgagcgacattcgtgacctgcccacattccactgggtctgctttgagctgaccgtgtgcatcctgatggaggagctgggattctactattcgcaccgtctgctgcaccacaagcacatctacaagtacatccataagcagcatcatgagtggacggcccccatctcggtgacggccatctattgccatcccattgagcacatctttagcaacctgttgccgcccttcctgggcgtctttctcatgggcagccatgtggccaccgcgtggctgtggttcgccctggccatcctttcaacactcaacgcccactccggctatcatctgccgttctttcccagtcccgaggcgcatgattttcaccatttaaaattcaacaactgtttcggcgtgctgggcgtcttggatcgcctccatggcaccgattcccttttccgggccaccaagtcgtatgcgcgacacatcatgatgctgagcttcaagccgccgcgcgatgcattccccgatccgacgatgaagtaa

SEQ ID NO: 3033 - protein, 406 aa, DROSOPHILA
MSNPVHGKPPNSMGLSSGSLSASSPISVSQQAGSSGNSSSSSSSSSSYSLGGGIVKDKAGLPPVYLNLNDNAKEQTPLPGSPLQNWDDARTADVWLSSLHSVIFIITCALAAFILFRNVLTWHLQSFWGASGDFWQSQWDKFIDSFGDEPMVLWVFGTTIFTMLVYWTVGTLYTFMDLTNRPACLRKYKIQPGTNEPVEVRRLLKVIWCVVCNQIFVGIPLAYASYRLMEIRGLSDIRDLPTFHWVCFELTVCILMEELGFYYSHRLLHHKHIYKYIHKQHHEWTAPISVTAIYCHPIEHIFSNLLPPFLGVFLMGSHVATAWLWFALAILSTLNAHSGYHLPFFPSPEAHDFHHLKFNNCFGVLGVLDRLHGTDSLFRATKSYARHIMMLSFKPPRDAFPDPTMK

SEQ ID NO: 3034 - DNA, 4035 bp, DROSOPHILA
cacctcctgccagatgtccttctcgacatcaagcttcttgttcttcttgtcggccagacgctgttccagttttacgtagtactgagctcgatcgctgttggcctggcgatggcgcggcttggttggattgcacacctccagctcgatgttacgtccgttcttcttctggcgcacatggttgctgcagggatttcaagataaatgagatcgcctgtcagggatatgctgcaaactcaccgcttggcaatgggatcttggactttggatgtgttctccaaagcctggtaactgcgcatgggcttcttggcattcagcttccgcttttgcttcacactcagaacggtggccttggtcttcgggaggctggagtccacaacgaacagatcctcatcctgtttatccgcgaacgttctgtaataagcgcagtacgcaaatgaatgattccggatggccacattgtttacccgctaactcacccaacgcgctcctcctggcgctgatcttcgaggaactgctcgacatcctggatgtctgttttgcgccatgccgatttgttcttcttcgagatgcgcttcttctttgtcgctggctctacggccgtcatttctccggattatttggaaattatcaaagtacaaaaaacaaatgttgagcggcacacgtgcaatctgcacaggctttccagcacgtttggcgtcgtttgccaacactggcagctagttgctgtcagctgcttagagatggcaaaaatcaagtgtgctaagctacaaaactagagttggaactctatatataaatatgaattaaactattactatatgcatttggttttaatagcttggattaatttctatcaatggagcaacaggaaagtagcttaaaagcgacgctagctctttaccagctggaaactggcttgcgcatctctaaccctgccttcactcggattcaaaacacctgtgtgcgtgcatgtgcctacatttgtgtgcgtgaccaactgagctgctgctgctgtgcattgtaattcatttcgaatttatagccacccgcgatccgaatcaaaatcagtagcacttgcgacgagctggcggtcaaaagggcaaaaccataaacgtcaccgaaaactcacgcacgtgtgtaaagtgtgaaaaacgccggtaagtgagagcagcgacgtcgactgcgacggaggcgtagacgcggctgacgtgtaccaaacaaaacgcggtaaacaaacttgtccgcttatttttatttgtatttggatactcttgcaaagggtgtgatcacttagacattccgaacgatctaatgtctatatcctatagctcttaaggcagtattaattaataattaattaaaaagataatcatataaatgcgagggtattcaagcatcagcaagcagcctgctcacgttttttttccaattgctattttctttttttctatttttgtttttcaccgattacgccgtgttatcgccgcgctgaaatagtttaactcgttacaaatagcagatcgcgatctccggcagcgacagacacactttggacaccaccacgatgagcacctttcccagcttcgcggacatttcggccaaattctcggaggcgacgctggacgagatcatccgaaacgcgggcggcacccggcacacctcgtacaaatttggcccaagtggcaagaagggcgacgcctatctgagccgtgtcttccgcatcaccatctacggcgtcaaggaggcggaagagggccaggatgagaagcaactagagatcagtgtgatcgtgaaggccatgcccgacaatctgcaccgtcggcgactcttccgttcggtgatattcttccgcaacgagatcaacttctacaccaaggtgttgccggccatcgaggcattccagaagtcccgccagcccgcgcctaagaagcccttcgtggagtacccccgctgcctggccagcctgtgcgatggcgtcaacgatttcatcgccctggaggatgtgggtcccaggggctacagggcacctgtacggttagtttattcctcctcctcctcctccacccctttcgtatgaaatcagctttctataaataagtgtaactacactatctgtcgacttcccatacaatagattatttcaatatctaccattaataccattaacccttattgattataaattatacaactacatttacttcaattaccttaccttaccttgcagtcaagactacatttcgctggaagatgccctgctgacgatgcggaccctgggtcgtttccatggcgtggccctggccttcaatgccctggatagcaagaacttcgagaaggctgctggttcgctggaggagacctactatggcgaacacacccgcgagtggtacacgggcttcctcctgctggcggagaatgtggccacggacgccgtcaagcagatctatccgaatagcaaatacgagactgtggccacaaacttcctgcagccgccgctgttcgatgatctgatcaatctggtgtccactcgctccaagttgagtgtcttcgggcacggcgattgctggacgcccaactttctgaccaagtacaacgaacggggacaatcggaggagatcatcatcattgatttccagttggccaggtgctcctccttggccctcgacctgagcttcttcatctattcctgcactagccaggagctgagggaacagcactacgatgagctgctccgcgcctacctggagagcgcccaggatttgattcaggatctcggtggcaatgcagagtctatcatctcctgggaatcactgcaagaggagctaaagaactttggtcgctttggttgcggcatgggcatcgaatcgctgccgatgacgatgatggaggacgatgaggtggccgatctggatggaatcaaggagaacgccattctcaccgacatctggaatatcacacccttcaaggagtccgccaagcagcagcgactggctgatatcttcaagcacgccatcgatcagggctacattaagtgagctcattaatttctatgataaaatcgaattcatatagtattgggtatttcgtaattgtaacccatataatgtacaaaactgtaactccagataattaaaagcatattatagacacattttggattggattaaaagcagatctttatgggcaataactgatgaataaaataacatagtttgaaaggtatgtacatggtatgtgctggtgctaaaactaggttcggaacgaccgatttagaggcactgtccttcgtggaggacgcaccagtgcggaataactgcatccgcatggattccgcgcgccaggagtcgctcccggtagcggtagaatcttctttgggccaacagggctgaagactttggatttgaccacattcgctcggctgctgctccagctcgcggccagattcgggattctgtaggggattggattgggtttaattaaatgggtttggttcaccgtttggttccctagcgtttacatacccagtgagttctgatccacatactcgctccacatgcacacctcaccgccgagaacctgatccttgctgcgaccaacgggcatgccactggagtacacggtgcgccagttgtagtacgatgtgctgccccagaagccgtgatccaggtaccaggcattcttcgtggacacaatcagtcggtagcctcgctgcaatagctcccgattgagggcatcctgtgactccacccatgtctggattatgaaccgctccttgggcaggtaggtctcgatgtaccggggattggtgaggtgactggaccagatgatcaccgacttcggctccttgatgcccggatacatacgctcgttaatctcgtcccatgcattgaggttccgctgatggaattgcgaccacagccgcaggaagctctgctcgctgagatcgtagccacgtgcccgcatcccatcccgaatctcgtcggtgttattccagcagggaaggaacacctcgtcgccgcccatgtgcagggtctc

SEQ ID NO: 3035 - DNA, 1502 bp, DROSOPHILA
agctgctgctgctgtgcattgtaattcatttcgaatttatagccacccgcgatccgaatcaaaatcagtagcacttgcgacgagctggcggtcaaaagggcaaaaccataaacgtcaccgaaaactcacgcacgtgtgtaaagtgtgaaaaacgccgtttaactcgttacaaatagcagatcgcgatctccggcagcgacagacacactttggacaccaccacgatgagcacctttcccagcttcgcggacatttcggccaaattctcggaggcgacgctggacgagatcatccgaaacgcgggcggcacccggcacacctcgtacaaatttggcccaagtggcaagaagggcgacgcctatctgagccgtgtcttccgcatcaccatctacggcgtcaaggaggcggaagagggccaggatgagaagcaactagagatcagtgtgatcgtgaaggccatgcccgacaatctgcaccgtcggcgactcttccgttcggtgatattcttccgcaacgagatcaacttctacaccaaggtgttgccggccatcgaggcattccagaagtcccgccagcccgcgcctaagaagcccttcgtggagtacccccgctgcctggccagcctgtgcgatggcgtcaacgatttcatcgccctggaggatgtgggtcccaggggctacagggcacctgtacgtcaagactacatttcgctggaagatgccctgctgacgatgcggaccctgggtcgtttccatggcgtggccctggccttcaatgccctggatagcaagaacttcgagaaggctgctggttcgctggaggagacctactatggcgaacacacccgcgagtggtacacgggcttcctcctgctggcggagaatgtggccacggacgccgtcaagcagatctatccgaatagcaaatacgagactgtggccacaaacttcctgcagccgccgctgttcgatgatctgatcaatctggtgtccactcgctccaagttgagtgtcttcgggcacggcgattgctggacgcccaactttctgaccaagtacaacgaacggggacaatcggaggagatcatcatcattgatttccagttggccaggtgctcctccttggccctcgacctgagcttcttcatctattcctgcactagccaggagctgagggaacagcactacgatgagctgctccgcgcctacctggagagcgcccaggatttgattcaggatctcggtggcaatgcagagtctatcatctcctgggaatcactgcaagaggagctaaagaactttggtcgctttggttgcggcatgggcatcgaatcgctgccgatgacgatgatggaggacgatgaggtggccgatctggatggaatcaaggagaacgccattctcaccgacatctggaatatcacacccttcaaggagtccgccaagcagcagcgactggctgatatcttcaagcacgccatcgatcagggctacattaagtga

SEQ ID NO: 3036 - protein, 425 aa, DROSOPHILA
MSTFPSFADISAKFSEATLDEIIRNAGGTRHTSYKFGPSGKKGDAYLSRVFRITIYGVKEAEEGQDEKQLEISVIVKAMPDNLHRRRLFRSVIFFRNEINFYTKVLPAIEAFQKSRQPAPKKPFVEYPRCLASLCDGVNDFIALEDVGPRGYRAPVRQDYISLEDALLTMRTLGRFHGVALAFNALDSKNFEKAAGSLEETYYGEHTREWYTGFLLLAENVATDAVKQIYPNSKYETVATNFLQPPLFDDLINLVSTRSKLSVFGHGDCWTPNFLTKYNERGQSEEIIIIDFQLARCSSLALDLSFFIYSCTSQELREQHYDELLRAYLESAQDLIQDLGGNAESIISWESLQEELKNFGRFGCGMGIESLPMTMMEDDEVADLDGIKENAILTDIWNITPFKESAKQQRLADIFKHAIDQGYIK

SEQ ID NO: 3037 - DNA, 3600 bp, DROSOPHILA
taatattttttacaaaatatattgcaagataagctaacaaattttccgtttaattaaatatacattttttatattatattaacaccttgattttaaatttgtctctatttttacaaaaaggtttaaattaaatgtcgggttgttctaatgtaacaacaatatagttgttcttctttcgagaggggtgattgtagagattgtaggtggaaaacaaagtattggcagtcgtccacacgtagccaactattggaacaattgaaaagagtgcgcgattgtatctaggtgggtccgaatagtatcttgttagctgagctgatacaattgtaaatgccgagatttaaattcacttttttcttttatttttacgtttatatttgttttcgttgcgtattattgaggaaatttgcacataaactgaaaacgagacttgagctcaggcagattgccaaacaacatgaacgcagacagcaaaaaatctgaaaaataacaaacccgaaaaatatctaaaataacaaacaaggaaatttcatggaagcaatatccgccagcggcagatgaaggggatgctatgtgtatttgcccagacgaagtgcaacagtattaatgtagatacatgcatatgttggcagctcccctgcaacttcatttggtaaaatgggggaatttggcaaattcgaacatctcctcggctaggacggttgcctttctatcaacatgattatgcataggccttcttagactttttagctttatattgtaaaatacagaacccgatttatctaattagtagcttgtagacaaaaatcgttcttaatatttgatttttttttttaattttgtcaatggtattatcaatacgtatcaatataatattaatagtaatacactacaaaacttagaaccaacaacgaaatatgtatgctaacatcgttttcttaattactgttatacagagaaagccttttaacctaaaatcacagctggattttaagcaagaaaaatgaatgacatggaggagattcctaagacgggtaatattaaataaaatatgtcacgcaagtcttacatatgatatttttttgtgatagtgccacgcttggggttgcgacacctgcaggcaggtctgctcttctatggactcgcggcgaacacagtcctccagctaaacgtaagcgtggcagtagtggcgatgaccaacgaaactacatcaaataatagcgacccgcccgtgggtaagcgaaaagctagcgccaagcacccagctcacctgtttccccacccacccattttagcactacaactggtcggaggagaagaagtcgtacatcctgtcgagctactactggggctgcgctctggcccaattcccagctggttatctgtgcaagcgctttggctcaaaggcggttctcttctggggcacgctgggatcatctctgcttagcgctctcacgacctacggggtctatgcaggcggctggaaggcgtactgtgcgattcgtctgctgcaggggctttgccaggtgacatggccctgcattcaccagcacttggctaactggtgtcccacggcggagcgaacgcgtctgggagcgtttgcatacactggctttgattgcggcaatgtgttagccatgtatggagcgggtatgatagccagttcatcgctggggtggcctgggatcagctactcggcagccggcttgggcctgatttggtgtggcctttggctgcttctgggagccaataaggcaagtgacgcccggttcataggggaggcggagaaggcctatattgtgggagatattcagcgatccgaaaggaaggggcccaaaaaaatggagattccctggaaaggcatttttacctctgttccagtctacgcccttctctgcgcccgttgtgctgacagctggggattgaccaccatgcaaaccgagttacctacatacttgagcggtgtcttgaaactcgatatgaagagcaacgcggttttttcggctcttccctttctgctcatgtgggtaatgtgctatgtgtacttgattattgcagatgtactgctgcgtaagaagtggatgagcttgacaacgttgagaaagacctacacgagcatagctctttgggcgccggcctctataatgctttccctagttattgtgggggaagggcaaaagaccttggtccttgttttggtaaccctcagtgtgggtgttagcagcgcagctacgattgggagtgagctgaatacgattgatttatcaccaaaccacgccgggatcctggccggcctcatgagcagcttcaccaatttgatggccctgctgactcctcttgtggtgggcgttttagtaacggaccccagtcagcggagccaatggcagatagtttttagcctggctgccggagttctgtttactggtaatgtgatttttttgatctgggggactgctgtgacacaaccatggaacgagtccaaggaatctcggcgggaactagagccggaggagaagccttttcaccgcgctaaactcgagataggaactgataatactgatggcaatgtagtaggcttaaaactaaactgtacaagcccttaaaaaatatattcagaaaaatttcagtgttttttattttaatttaagcggtcaacttcttgatatttctttctaaattttaaaagcaggagatactgcctgtgatttatcgtgtaaggcactggtattgctttttaattagaaatgtattttatatctaaaataagtgcattccaaaaatacatatgtatgtatgttatattactgctggataaacgtttagaaaattaatttttgttatttattcatatgcggactaacccaggttcaggatggaaaactaaatgccacaagatttataatacaatgtctataaattatatttccctatggcgttggggcgaattgatctagagtatactagactatctttaaataattattgtgcaatataataggttgatggaatttcaagatgccaacttcataaacttttactgacaatttctaatcataatttacgacaattaggacgctgtatcggtagattcttatttgtccggcttagagaacttataccctttcccaccttttttcccgggcacacacctgagcagaaggcaacttagatccgaaggcttctgtaaagaagacattaaaccatctaacttctgccagaaataaataaataacaacagctgctaactttccggttgcggaacaagcgtgctttgttgcatatttataggcgcataaaatattgtcgtttatttttaatttaatgacaagaaatttgtacggcctcccatctcttttcatcctggtaatggcctgtagcaattgcaatctatcttcctgtttcgctctccatttacgacaaagcaaagcaattacaaaaaccagtatcacatggaccagaagcgataatcagcagggagacagggctgggatccacggatagccagagcacaccgcagccgccactttggtcagcgtgccatctgtcaatggctcatacagggggcgggcgcgtacgctgctgcacttaaaagaatttcatccc

SEQ ID NO: 3038 - DNA, 1479 bp, DROSOPHILA
atgaatgacatggaggagattcctaagacggtgccacgcttggggttgcgacacctgcaggcaggtctgctcttctatggactcgcggcgaacacagtcctccagctaaacgtaagcgtggcagtagtggcgatgaccaacgaaactacatcaaataatagcgacccgccccactacaactggtcggaggagaagaagtcgtacatcctgtcgagctactactggggctgcgctctggcccaattcccagctggttatctgtgcaagcgctttggctcaaaggcggttctcttctggggcacgctgggatcatctctgcttagcgctctcacgacctacggggtctatgcaggcggctggaaggcgtactgtgcgattcgtctgctgcaggggctttgccaggtgacatggccctgcattcaccagcacttggctaactggtgtcccacggcggagcgaacgcgtctgggagcgtttgcatacactggctttgattgcggcaatgtgttagccatgtatggagcgggtatgatagccagttcatcgctggggtggcctgggatcagctactcggcagccggcttgggcctgatttggtgtggcctttggctgcttctgggagccaataaggcaagtgacgcccggttcataggggaggcggagaaggcctatattgtgggagatattcagcgatccgaaaggaaggggcccaaaaaaatggagattccctggaaaggcatttttacctctgttccagtctacgcccttctctgcgcccgttgtgctgacagctggggattgaccaccatgcaaaccgagttacctacatacttgagcggtgtcttgaaactcgatatgaagagcaacgcggttttttcggctcttccctttctgctcatgtgggtaatgtgctatgtgtacttgattattgcagatgtactgctgcgtaagaagtggatgagcttgacaacgttgagaaagacctacacgagcatagctctttgggcgccggcctctataatgctttccctagttattgtgggggaagggcaaaagaccttggtccttgttttggtaaccctcagtgtgggtgttagcagcgcagctacgattgggagtgagctgaatacgattgatttatcaccaaaccacgccgggatcctggccggcctcatgagcagcttcaccaatttgatggccctgctgactcctcttgtggtgggcgttttagtaacggaccccagtcagcggagccaatggcagatagtttttagcctggctgccggagttctgtttactggtaatgtgatttttttgatctgggggactgctgtgacacaaccatggaacgagtccaaggaatctcggcgggaactagagccggaggagaagccttttcaccgcgctaaactcgagataggaactgataatactgatggcaatgtagtaggcttaaaactaaactgtacaagcccttaa

SEQ ID NO: 3039 - protein, 492 aa, DROSOPHILA
MNDMEEIPKTVPRLGLRHLQAGLLFYGLAANTVLQLNVSVAVVAMTNETTSNNSDPPHYNWSEEKKSYILSSYYWGCALAQFPAGYLCKRFGSKAVLFWGTLGSSLLSALTTYGVYAGGWKAYCAIRLLQGLCQVTWPCIHQHLANWCPTAERTRLGAFAYTGFDCGNVLAMYGAGMIASSSLGWPGISYSAAGLGLIWCGLWLLLGANKASDARFIGEAEKAYIVGDIQRSERKGPKKMEIPWKGIFTSVPVYALLCARCADSWGLTTMQTELPTYLSGVLKLDMKSNAVFSALPFLLMWVMCYVYLIIADVLLRKKWMSLTTLRKTYTSIALWAPASIMLSLVIVGEGQKTLVLVLVTLSVGVSSAATIGSELNTIDLSPNHAGILAGLMSSFTNLMALLTPLVVGVLVTDPSQRSQWQIVFSLAAGVLFTGNVIFLIWGTAVTQPWNESKESRRELEPEEKPFHRAKLEIGTDNTDGNVVGLKLNCTSP

SEQ ID NO: 3040 - DNA, 4150 bp, DROSOPHILA
ctccacgtcatgtgttctcgggcaaatcgcagtcgtgcttccttacgagcatgattgagaggtgtttttttttttcatttgtaatctgttcaagtatttgcaactttgaataattcgttttaccgtggccacactagcatttacaccgcatttttccttaatttttccagcagaaaggtgagaatttgaggcagttcgtagtataagtggcctctcttatggtattgttgcatacaatatttttttcctcctttcattttttccattagtcggcttcattgcggagaaaattactcacaacgttttgacttcgaccgattttcttggctattacaaagtgttttaagccagattcaatatagcctttgatttgaactttttcaaaatcggataaaggtttttcgcggcccattttagaaaaagatgataaaagatgatttaaattttagaatacaaaaaaaaatttaactctttacaatcacgcggtcaaacaaaaagtgaagtcaaaagtgtaaaaccaaagacactagaatattaatattaatatattactatatataataatattaattaataattaatattatatattattcaagtgtctttggtaaaacctattcagatgagccaagaatagtccacacattgagcaaatttcacgattagagcaaaattccgaattaccgttgcatttttcccattatttttttcttgcacataataagtaaggaattgaaggttcaaaacaaaaaaaaaaaaattatagaaaaaaacgcaattggaccaaagaaaaactaaaaagagaaatgtgagaaagatttttcaaacctattcagttgagcggcactgtacatatctggccgaacacaggtccagatcgactcggcaagtaatcctagtcaacaatgtatttatattctttacagggtcgaaaacgcctttcattcttttgtttcgtatagtatcgtagttcttaagcagtttagcgcatttcaatatctgcactttcctagaatctcagcctgtctagccttacctgttgtaggtgtgcgcactttccgcgcggaagaagtagacgtggttcttaaaggaaagcttgaagacgaactccttctgaacggcatcttggtgaccaggaggacccaccgtgtaacccaatagcggcagactagccagtgcgaactcgtcctggtagctcttgtaaaagtacagacaaaaggacgtgaacaccacccagagcttctgccagccggagctattcttgaactttcgcagcagataaccggacaactggtgctcggcggctatcaggtgatcgcccagtcctacggtggcgccacgatgccaacagacgtgcagagccgtattgcttcgggatggctgcgtcctgttttgctgctgttgctgcagctgcaacttctgctgctgcgtagtcagcggaccgccgccgttcacactgctgttcaggctgctgttgttcccgttgctcagaccgaataggtccaggccctcctccgaggagcctgaaaataaagtggaaataacattactgggtgctttgtcgaagaaggattttgggatttgggtgcatcttcttgcttacgcggccatgcatcgtgcttttcttgccagcacaaaaaacaaaatggagaaaacagggagtttaacaaaaggttacgttaaagttaaacgttttttacttgttgagtgtaatagtttagccgctcgaccaaagcttttggtttataagtatttacttggatattaactattcgcggtagcttggttcttaaagctattcaattcatatatgggactttgtttagaacgctacattagaaacaaaacctagcgaatcgcatttatacaaatatatatactcactgcagttcttgagcgtcgttagctggagttgcatgttgggcggtcggtttttaatatccgcggccgccttggagagctcggccagccagagggtcttttcagcggtggtgcccgcactcactgtgatggcacactgtccgccgaagatggagaaggtgttgtgctcggcgttctcggtgagtaatgaacgcacaggaacgtggcctaaaatgcggaagctctggtccagcggggacttcgaaccgtagagcagcaggtcggagaacaagaagaacatcctctgctgcagaccgcgcttggagtgcttcagaaggcatccctggcggatgaggcggcgatggggctgaaccaactgctcgaagttgatgtcgcgttgcagttcacacagctccacaaagtttgcagagtcgggaagctgggacctaatacccttggtgctgcgaacgagcaagtggtgcacggccatagcatcggcatagtcgatatgctcctccccatagtagtcgcagagccgctctaagatcagttggtagtgcaacaggcggttgaggggcttcagtagaagttcgccgatgggtagatagcaaaccttttgctgctcaaactccttgtacacctgacggaagcgttcatcgccttcgtacatgtcgttcatacagtgcaagatgtccaggtgcgtctgcacgtactcatcgtagatgggcagagcggccatgtgcttcatcatgacgtctccgatgcggtgggcttcgtggcctcctcttccctcccactgcaccatgcggtgttcgatgtcgcgcaggaagagattgtggtgctgggccagggagtcgagcagctcgaacagcggctgcagctgctccacatccccgagactcagcacctgtcggaaggttgtgttcagcacatctagatccttcttgtacgtacgttccgtcatcaacagctccttggccaaaaagtagctgggctcggtgggccatttccgctttttcacttctgcctcaatatcgtgttgtgtgctcagggtatgcccatttccgtttccgttcccattctggtgcgaggcggtggcaacgcctgtggctagctcctgtctcttagcgtgctggatttctgcctgtattacgtcatatgttcctgcctcagatcgggatagtgacgaagacttatccgatcctaaggtgaggtcgtaccgcgttggtggagtggtgatttcaccgcgcctgtccaacgacatatttccatttattccatagtacccatctattaaaaaaacaaaaacaggaaatcaaaataattcaatcataaaaagtcaacgattttaggcatcggttaaaatcagaaaaagcaaaaggcacgcattatttcagtcatcaagtgcaaagctttaagcataaataatatactagaccgaaatcgaagaaaaagtagtgcgacaaaaaatggttaaggctaacataacattaaagtagactaacagtaaaaacttaaataaataactaaataacaaactatttaagttatttaaaaacaaacttattagtaaatcactaagtcaatatgtatttatttatagataaatataattaaagtctttgataacttttattgattaattaagttttatttattacgtttgtttctatataattttaatttaatgcttgttaaatggattgctcgtgtacatttcatcgtttttcgttactataatactttcaacattttttctgttcgtttttgtgatcttgttttatgtgagaaaaaggttttaatttaacttaaatctgaatttgttttcattttgtgttgagttttcttttaacttcttaaaaatgtagctaagattttctgtaatttccttttcctagacaaataaatttagcatcaaagttttgatttaaaaatagaaaaaaagatagcttcggcatgccgaagcatatatacctttgcagtacatctacattaacaaagaaatgtatgtatgtaccataccgtatttacgatcaaaagcaacgaagttaaatttttgattgccattttttcgattaataaaaaggttgggcctgtttcgatttatatactacctgcaaagatgaatcttccatgcagataggtttaaattgagaggtttagttttcgtagaagggacggacggacaaggctgcatctactcggcatttggtatgaagtatatacatatatactttatgtggtcgcatatgcttcgtttactgcattgcaagcccctggatgaaattaa

SEQ ID NO: 3041 - DNA, 1747 bp, DROSOPHILA
atgggtactatggaataaatggaaatatgtcgttggacaggcgcggtgaaatcaccactccaccaacgcggtacgacctcaccttaggatcggataagtcttcgtcactatcccgatctgaggcaggaacatatgacgtaatacaggcagaaatccagcacgctaagagacaggagctagccacaggcgttgccaccgcctcgcaccagaatgggaacggaaacggaaatgggcataccctgagcacacaacacgatattgaggcagaagtgaaaaagcggaaatggcccaccgagcccagctactttttggccaaggagctgttgatgacggaacgtacgtacaagaaggatctagatgtgctgaacacaaccttccgacaggtgctgagtctcggggatgtggagcagctgcagccgctgttcgagctgctcgactccctggcccagcaccacaatctcttcctgcgcgacatcgaacaccgcatggtgcagtgggagggaagaggaggccacgaagcccaccgcatcggagacgtcatgatgaagcacatggccgctctgcccatctacgatgagtacgtgcagacgcacctggacatcttgcactgtatgaacgacatgtacgaaggcgatgaacgcttccgtcaggtgtacaaggagtttgagcagcaaaaggtttgctatctacccatcggcgaacttctactgaagcccctcaaccgcctgttgcactaccaactgatcttagagcggctctgcgactactatggggaggagcatatcgactatgccgatgctatggccgtgcaccacttgctcgttcgcagcaccaagggtattaggtcccagcttcccgactctgcaaactttgtggagctgtgtgaactgcaacgcgacatcaacttcgagcagttggttcagccccatcgccgcctcatccgccagggatgccttctgaagcactccaagcgcggtctgcagcagaggatgttcttcttgttctccgacctgctgctctacggttcgaagtccccgctggaccagagcttccgcattttaggccacgttcctgtgcgttcattactcaccgagaacgccgagcacaacaccttctccatcttcggcggacagtgtgccatcacagtgacaagaagatgcacccaaatcccaaaatccttcttcgacaaagcacccagtaatgttatttccactttattttcaggctcctcggaggagggcctggacctattcggtctgagcaacgggaacaacagcagcctgaacagcagtgtgaacggcggcggtccgctgactacgcagcagcagaagttgcagctgcagcaacagcagcaaaacaggacgcagccatcccgaagcaatacggctctgcacgtctgttggcatcgtggcgccaccgtaggactgggcgatcacctgatagccgccgagcaccagttgtccggttatctgctgcgaaagttcaagaatagctccggctggcagaagctctgggtggtgttcacgtccttttgtctgtacttttacaagagctaccaggacgagttcgcactggctagtctgccgctattgggttacacggtgggtcctcctggtcaccaagatgccgttcagaaggagttcgtcttcaagctttcctttaagaaccacgtctacttcttccgcgcggaaagtgcgcacacctacaacaggtaaggctagacaggctgagattctaggaaagtgca

SEQ ID NO: 3042 - protein, 562 aa, DROSOPHILA
MSLDRRGEITTPPTRYDLTLGSDKSSSLSRSEAGTYDVIQAEIQHAKRQELATGVATASHQNGNGNGNGHTLSTQHDIEAEVKKRKWPTEPSYFLAKELLMTERTYKKDLDVLNTTFRQVLSLGDVEQLQPLFELLDSLAQHHNLFLRDIEHRMVQWEGRGGHEAHRIGDVMMKHMAALPIYDEYVQTHLDILHCMNDMYEGDERFRQVYKEFEQQKVCYLPIGELLLKPLNRLLHYQLILERLCDYYGEEHIDYADAMAVHHLLVRSTKGIRSQLPDSANFVELCELQRDINFEQLVQPHRRLIRQGCLLKHSKRGLQQRMFFLFSDLLLYGSKSPLDQSFRILGHVPVRSLLTENAEHNTFSIFGGQCAITVTRRCTQIPKSFFDKAPSNVISTLFSGSSEEGLDLFGLSNGNNSSLNSSVNGGGPLTTQQQKLQLQQQQQNRTQPSRSNTALHVCWHRGATVGLGDHLIAAEHQLSGYLLRKFKNSSGWQKLWVVFTSFCLYFYKSYQDEFALASLPLLGYTVGPPGHQDAVQKEFVFKLSFKNHVYFFRAESAHTYNR

SEQ ID NO: 3043 - DNA, 31562 bp, DROSOPHILA
gatgtaactgccagttaccaaagtctgcgtctgtatttgtaactgcgagtgagtctgtataggtttaggtggctgtgtaagtgcggatgtgtgtgtgtgtgtgtgtgtgtgtgctggttacccgctaccgttataatgagttttcaagtggttccctgcataggcaggtaatttcattctaaggcctaatgatgtatcttccgtgggcggaaacttgcacaatgaaaaggggcgttgcagagggaaggggctgaaattccatcccaactatgttagttaaacggattttaagtgcagtgattatgattgcatatttaaactattttatgatcttggaaccattacgcataattgtgtgtttcgaactaaattgctactataaattggtatatggctgtattagcttaaaggtggaactgtatgctaacatttttaagggtatatacaatattttatgaaatacccacccactataaagcagataatatagggctatatttaaatataagctcattggcttcttccttttcctcaccaactagttgtgacgttttatctaatggcaactacaaactaattacaatcgataagggcaattcaggctattaaattcagagataataggaaatatccaatattaacgtgtacttgcccaccggctgctatcgaaacaagctgagcgataagcaaatattctgcaattatgcacattttattggaaattgttagttggcaaaggcgcagcgaattcaaattgcgcgccaaaggcgtgggaatttaaaattctgaaataaggtcgaatttccccctactcgctgggatcaaaaagtggcgagttcgaggtgcacacattaaaagagcaaaaataaatacgaaatgctcttatacacgccgttctcttcgccgcgcaaaatgtgtatgtgagcgagcagctgccgcacttggacggcgaattcatctgcacgccgcaaacgcggcgaatgtatccgtctctttccctgtcatcatcatcagtcgccgtcgtcgtctcgtcgctgtggtttttattccgattgtggccatgcaaaaagaggcaaatatctgggaaaattaagcaatatcctaagtgaaacaaactaaaacatgagttaaacagtgtgtgaactaggaacctatgaaaaaccgaaataaaaaccgtgaaaatcgcatgaaaagccaggtgtttagttggtggttagaaaagaaagaactggcttctctgtgcgcagcagccgccttttttccgaacctaaaaacctataggcaatccatcagatacttttgtatctcttgagcaaagatacgctaaaaaaacagtgttaaatgaagttaaaagctgccgagtggacggcagtccaaaacaaacaataaaaccaacatttgtgtcacatcagaaagaaataacgaaccgaaaaacaccataatataatcccatatgaattcaacaagaattatagttccaaatttttttagtgctgctacctcttcttcagcttcttgtttttgttgctccctttgttcgcctttgttgttgttgctgctgctgctgttgcgaatagcattttgtgtacctttcaagaaatcaataaaacaacaaaaacgagtatctctctctctctcgccgaggaactctctctctctctctctctctttatatatctgtgttttctgtgttttgttgacattttgccgctttgtctgcggcgaatgaagctcggcttggaaaatatcataatttagcatattgagcagatgcgaaattggacaaaaaccaccggatggtggcgcagaaaacaaagaacccctgtgaaattttaaaaaattataaactgcgcaaattcgctgacagttaaatgacacaattccggctggaaactgtttttttttggggctgggccgcaacattttctgcagcgaattcgtaacccccacctcgtgtcaaccgtacttcgcatccgtatccgtagcacgtgcactgcgagtccggctctattgatttttcgcacatcccacgggcgcccattttcccgtttttcctcggctttccacccgtttcccggttccggattctcggcgctagctgcatatgcgcatgttcactccaagcattttcatctattttcgcaatcccagtgcactgaccttagcccatgactgtcaacattttcggacacactgcgcggaatattgtgattccagcgcaaatgcagttgaaatatatagctatatacttaactatgatgcaattaatgattgtaattggttaataatgcaggtttcttgacaaataaatgtatgaattaagtggaaaaatcttataacaacaaaatatgtgttagttattttcacttttctttcaaaacgatcattcatttttctcggtgcaccagctacttttccgtcacttgactgcatgcatttaggtacacatttgtttggcttacaaattaacgccattcgaagtgttggctggataaacaaacaagtgattttatttcattgcgttcacaatgtgggccattcataagatgcgattggggactccggtgtgtaaacaaactgaaactgctggtactacagctgaatcagaatcccaaacagaaacagatccccaagtggggcacctcctcctcggaagtggaaatggatgtgggttatcagagaatctcacgctaattacgaggtgggagttagatttgtttggtttgcaggtagtgggattgcagcacgcgagtgcttccaggaaaaggcattccatttcgtttgggaattggaaaattgttcgaaatattagcgctaataattgcttagaataggaacgccgctctagagaaataaaatttggtttttgacaatttgtatacagcttgtttgaatttgaaatgaaaactcactcattttaacaagtaatcggcttatgtaggttttagcggaccaaaaccgtagtaagatctacttccgttgaagaagcccacgcatttccacattttcttccggttacctgggatattacttcccatcccgagccattttccctttttatcataaccccaagacagacaaattgtctattatttgaatggtttttgtatctacgggcggggcactgaataatggacatcatgcggggctcatgtcgtcacgatatgtcaatatgtccagattttgtgaacacagaaagaagaacgacacaacccactaaaaaaaaaaaagaagtctgaagaggcgacttcccactggttttggcctgcagttgtcaggcaatttgccttctgccaattgatttttccactttgcccgctgtatttttagtgattttcaattatctgtcagttgttgtcgggtcgggtcggcggataattcaaatcatggtcgagttcttgcgctgtagaatcgagctgtagaatctgtgttgtccactcgcgagtctttgacccgtttagcgttattaagcacttactggccacaaatggccgacaattgtcgcttgattggccaatttccccggttggatcagagacttcgacccgtttaaccatttcattttatggttttccccgcccgccattttccttcctcgccgcatattcaataatcttttgtgtttctatttttataaagcgcccttttacttgtggcactccagaaccagcacatctgtgtctgtctggcagagagaaaaatacagatatcgaatgtcaatagcaacttgcttatgctctagaagattagtcagccatcaagaaaattcggattctcaatctatagtagaaacacaaatcaacacttaagttaactttaaagatataaaagtggaactgaaggaaaccaatttaatttcaaatctccatgctactatattccctcttttactccataatttctcgcagtgcagtgctgaagactacacttaaagctccggctcgttggcttactttttgcatgcggcaatttgatgagctgctaattagcagctgcgattgtggttgtgcttggggatgtggctgtggttagctggccaaacaccaaccaccacgcgttactacagcagatatagtatggttcaagcgactcggagaccccgagaatatagcgtgttggggctaattctgaatgaatcagcacgagctcccagtaatttgcactttgttcagtgcaattggagaagccagccgagtggaggggaacggaaaagcgatggaatgtttcacttatccggtgtcgttgtggttctgagcatgcaaattgcagtgctcaatttgggcttatggtttgagatcgattagctaagcatacattcaggtgtgcacatcacagatttggtttactcatggactctggaaggaatgtctttttaagactgatctattcttattaaaacattcaatatgcatacatacgcatacgatatataagctacattttccgaacatttgccagccgcattcgttgatcgccttcggcgtttgctctacgcccaatcattaattttacgcaacttttcgcctcagccgccttaaccccctgatagcccactggctcatcttaacccacagctggcgcacacatgtcgtcgcaaagtcgtttgtgggcattgccaatttgttgtcagactcttcgaatttggtgtatatatgggcatatgcctatttatacgcgcccagcccgtgtgagtacacttatggcgggcagtgtatctttaatgcggctgcatcttcgccggcggatgaaccccattgaactctttgcgttgcgagggatacgaaaacaataaagcgcaggaaagtgtgaagaaaatgcgaaaaaaagcggcaaagaacagagaggagaaagaaagagagagagagagagaaaactgagagacaatggcagaggagtattgaaaaaatgcaataaattatcataaataaaagtaaaacaaaaagaggcagagcttttgcttgatggggttcaacacgggttaagattttttttctttttttttttggttggcccgctttgaaaaatgtgttacacaagacagcaataacaacaacagcgacttttactacatgggctgggtacaacaaaagtgaatcatcgcaaacaaaccgctataaaaataataatagcgctaaatgattataacaataaaataaatgaaaattgtggggacagaattgaattgatgaaatcactcgttgagttagtcatctcaaataataaattttttgcattatctgtagtgccaaaatggaaatcatttaagccgaacaaattaagaactaagcatagtaaaaacacaagcaagcacaaactataaaacaacgcacaaaaatgttgtaaacgaaaggagaaacactgacaaacaccaagtcctactaaacagtgggacaaaagcgcacaataagtgaacgaaaaaaaaaacccaaaaccaaaaaacacacacgcacaaaatcgtgaaatcaaacgtagatcatcacaacgaccaacgaatcaaaatgccacgcccccagcaccacgcccttctgagagcaatgctgaagttgttgctcttcgccagcattgcggagcactgtgccaccgccctgcccaccaactcctccaactcgccatcgtcgccatcgcccttcaccgccgcctcattgccgcccaccactgcatcgtcgtcatcatcaccggcggtcattagtaccagttcttccgatcgcaatctggccgatctagtcaatccggaggccgaaacaaccggatccggctgggaatcacttgagactgaattcaatctggccaccactgtggacagcagcacccagaagacggaaaaggagccggtgctgggcaccgtagccacctccattgagcagcaggatcagccgccggatgtgccagccaccacgttggccttcgccaatgcgtttccggttccggtggccggcgaaatgggaaacggaaatggcaactataacgatgccacgcccccgtacgcagcggtcgacgacaattatggtaaatagttacacagcttctataaaatatatctaaatgaaaataaataggtagaaggcaatcatcaaggtcgccaaagtatctttgggttaagaaaacataagagcaacaatgaaaccgtgattcattatggagttcgtgcttcaattaaaattcatatttgcagcgactttaaattaaccatcaatcaagtcagagtcacaaaaattcgagcaatcttgggggaattgaacagcaattaaacctaatgatataacccctgcccctttcaaaatttaagctgcaaataagctgcccgagggcagccagaaaaacgctccgttatcaacgacaaacgaaaaccacaagttcgatgggctttcgacaagaattggcaattatagttgctaaactgggttcattgacaccgcacttttacgaactttctcagccaacgaaagccttaacccctgaccgcccctgctttaacccgctaatcccccgtcggcgaagaagaacttgtagttactcagttattatctgctgaaggaacaacaacaaagtacacagataaatccaacacaacagcagcaacaacagcaattgcatacttcaaggcaattaagagagttttcatttccggtttggcacgcagccccttcgtcattcgtgggcgggggcaacggaaaagtgggcgggacaacgtcaacaactgcctgccttcctgtaatatggcaaaattctcacgcaaaactttgagctttggccaaatgaattatttaacattgtttttgtcgggccgagttcttctgcacagagagaaaaaggatttgctatataacattattcttattgtactaatattatatcttctatattctatatctccgtattataatatatcttcatacaatatataaatcaaattaattcaaatattatatatcttactattgctctgctttgcccaatttgacaatcttttcttgttctgtaatcaactattactggctagtatatttatatatactttcctggcctggccaatgaaatatgtctgggcgaattgacaagcagccgtctgtctgctcgttaaaacttggccagcgggtgccaaacagccacaattcattggaagtgagccatgtttcacaagcccctgtcagggttttcctcgttttcctcgcttttctctcgttttcaacacaacgggacacgcgatgcgcacaggacacaaaacaattaacaacttaacttttatggcccacaattatttggtattttattgttaagctgcagccaactatttttatgggcatgccattaaattggagctgccagctcttaaagaggtctcaagaaaatcgcccgagatgaatttgcatgccacccgccggaatctcccagcgatttgcgtgcccctgagccaaacagactgacagctggcaaatcgcagagccgtgtcctgaaaactggccaaactggctgcctgatttgctgaccgcacgcaaaacccgtattaagttgcactttgggggcaggtgctgcgaccacgcccccctcaaataaataagaaaatatggggcacaaggtgtgggcgtaatgaggacaaaaggagttagttattcgattcaaccgactcaaggttccttttctatgatttattgaagcctcaggcgaactgatgactgcgagcagcgaaacattttagttaaaaacccaaagcaacgtacataaatcaaatggggccataaaaccttgatttaaaatgcaatcacagccatagcaatttcgaaaactatgaaaatagcagctaactgccaattagctcgtccagtcaaatagatcagctggaaacgtgctgtgccagcagagtgaaaattaagtaaattttatataaatggaatgcctcgctgcctcgctcgtcagtaattactaattactatttcagtcaaacaaattcattagtttcttacccagaaattactttccagcgagaatgtacatatatagtatcttgttctgagcaataaacgtgaatggatggaaaatttaaataattaaacttctgatcgcagcaattaacaaaacaatcagttgataagaagtgcgaagttatgtaattttttgttaactcatcccgctcgaaacactttaattaataaacctgctgaattcgggtttttcacaaatcatttttcagacctgcctgctgtgaaattcccaccgagtcattagtttaattaattgtttgccccaacttttgtgcagccaagtgccagaggcaggctcctgctgctccaccatataccataccatatatttcgccggctgtcgagagttaattttccgtaaattcattttcacttccgaggcgcagctgagagctgtcacaatttggagtaacactttcggtctcgtggccccgatgaaaagtgcagctcatcaagtgagccacccacccacggtacgcatttccctgggaaaacgggccaagtacccagtgcttgagaggctcgaaattggaattggaatttacggaggcacggggctggcaatccgtcccccaatccgtcctcaagtgagtgtgcgaataatatctgtcagatacttgcagttcgcgcactgaatgctgccaacgaaccgtttttgatagtcgcaaagtgtcgcgaaacagatgcaattaatgggattgaactataaagtatattaaacgttaacttttgattcttgataatgtgaatagtgtgcggctgaaaccgcaacgccagcaattcgaacttaaatattccactcgcagcttgaacttgcagcaaagtgcttgccacatagactggaccatgtccatgatctgtgcacatatagtatatagtatcatactactatatatagccgcactcaaagtccaaagtcggacatgtcgcaggcgcaaggtttgaaagtttctaatacaaattggcacaactttcggcttgtcaacggcaaacaggcagcaactttgctgcgtactctcgtattttgacaaatgatttgcgtctctgcggaaaagccaaaaaaaaaaaaaaaaaaaaaacgatgaagaaaatagggaggaaaaacaaaaattcttaacgaaaataactacgtaaaaccgagtggagctgagaaaactttgattttgaactttatccagatccagtgaaaactttctctccatcgacccgtggaaatttcacaggacactgagttatgaacatgacttgtcaaaaaatacattaaaagtgcaaagtagtggagctggcttctcggcgaggatgaaaacaatcatttagtagccagcaaatttggcccaactgaaaagcataaatcattgaactttttgccagccaccatctctctctactgctacatacattcttacatattttctatcctggaaaacagccatcaatcatttggctggctttgctgctgtcttgattttaatttgcaacatggctcaaacacacgcgctcgaggactttcaggacttttgttgcacaaccgaaaggcgtgaatcgtgctcaaggctccattggcacgactcagcaatgataagccagctgactagacttcccaaggactttttattcctgatggggagtgaacaatgccaggagtttattcactttgagttgcgcttttcacgacctgtcactggcgtttttcctctgcggttgccactcccacgtgtggtgcaaaaaaggccagatatccacacaaatatgttgcctacttatcggctgtcgctaatttatgaactcccacaaggtccttcgttggaaaatgactgacaaaaaaagttgtatgatgcttgtatactcttatacttatatgcaggcgataaaagtaccattaaaatgaaaaacatgagcatctataaatgttcccttgataaaaccaccgatttcagattacattttcataattggtgggctttaattgagagggatttccgaatccaacaagcataaacaaatatgacatttcgaagttcttctaaaaataaatgtccttcttctttatccccaaaacacacttggcaatggagtaatgtccttattctgtaaacgaaaacattttgatagatggcctctgtcgcagcgacaaacaaaactggagaaaaacgaaatcaaaatcaagaacatagataagccctttttttctgggaaaattctcggctttttatagcccgaccacgtgccaacccgcatttagacacgcccactccactcaacgtcagtgggcggtgggagagagatagaaaaatgttgcctcggcgacaacttccgcctaactgcacttcaacatgtcaatttctctaccacccgctgcccatccagatatccagatggatggatatggatagaaaacaaaaaaaaaaccgaagtagaaaatcaaccccctgaccgaaacgcctacgaaaaatggcattcgaggaggtaaactcacagctcggcttgcatgtgtgcgctggcattttccccatttccccatcccttgccagcactccaagtcacttgtcatggaggccttttgtctgccaaaaaccccagctcccaactgagcggcgctttaaatcataaacaccttgttagtgcaacaactcgacactttgaacgtgacattgatgcctgtttttgtgccgccgaacggagcccaaaacagtttccgtgtctcaagcatcgaaaaacaagcgaactccggccggaaggttgggtctgcccatgtggatgtggctgttgaaatgagaatgaggggcagaaataggaggaggatgtggccgtgttggccagaggtgatggtgcttccatgtgcaacttcctgccgataaccttttgcgcacacacacatgccacaaaagccgttgccatcgttttagccttatcgctccgctcttggccatgaagcacaggcaaatgcagccatcagcagatccgtgactccggaccagacagccgcccttaattagccaacgtatgcccaagtactccgttaaagatcggcttaaagttaagccagaaaattgtattttaatgtttgaaacaaaagaaattatattgaaagtctattctgattctattaaatgtgtttattagcttaaataaatattaatattcccttcccgtacaagttattcccaaccatttctatttccggtttctatattcaacatgacaataaacatttcgtctagcaaccctttggggcaacacacgagttctgttctctggttttgacccaaacaagacacatgtcaaaggttttcaaatgttgcaaattagaggacattagagttcggaataaaaaggcgatacaaagggcgatatcggtagacttcaactgacaagccgagtggcagaagcactttgaaacaaatactctaagcgtttgcccatttgtcagtggcactgcgagtgtaagtgtgtgtgtgcgtgtgtgtgggccacttgaagtgtgtcagttgtgttttggccctttctttgtgcatttgacagtgctttgagtttaaacagggccagcggcacattatggctacatttctgtccgaagacttgccattaagcaaattacagcaatttgatacaaatgcctgctcgagaaacggcttataatcagacgtataacatgagttcaacaaacttttcgggaaatttggtggaaatcaaaataattgaaggacattttagcgggaaagttagtaaatctctaggcagatacttctgcactttaaagttcacagtttccagcccgtttcttctgcaatcaaagttctcaaaggatccccccacacacaaccacacacacacacacgcacacagacacatatgcgcattcaaaatggccgccacgttacttccgctaagtgccggatccttttggtccattcactgtttgctcttgaccatcaaagctttgggggacaaaacttggcagcatttttatttttttcacagcttgtcgctgatgttttttttttgcctccgtttcgttttcgggctttatttcgcataatttttgcgcctttgtgcgaattctcggggcggtggagcctttgacgccatttgaaaggcagtcacctgagttttttttttgtttttttttttttttgccttcatttgtttggcgtgtgtgtgtttattctctaattgtttgtttgttagctcgctcgctcttatttactcaccgcccgggccgtcgcctttgtttagtttttacgtctggccaaatccgtaaagcagctcgtagctcgtaaagttgggcaacaacaatgaggcgtacgaggagcaacaactaaataaggcatatggccaacaacaatgcggcccactcttaacttgtttttatatatcttcatgttcgagccttagtttttcccgcttctcctgctgctgtttcttgcttcttgctcgccgagccatttgttgctgtatatatatatgagtattttttcgaggctcagacaacttaatgctatttgctcctcacacacacacaaacacaccttgaagtcctcgagcttctgcctgcttttgtttggagtttttaacaacttgagcacgtcgtcggtattggtttttccagccaccacacccgttttcccagcgatttcccacctccgactacattttcctagttatattttttctacttcctgcctttgcctttgtgaaaataatcacgcgcgcgcttttgagtgagcacagcagccccttagttttcccgggctttcctttccggattttcctttgctttttcacacttggttacttccggcgcgatggttgagcaaatagtgggaaaggcgcatctattgttttcttttaatttgcccagacatgtcaaacgtggcgcctgttccccgagttccttgagctcaaagtaaaggactaaggaatcggatttccgtagggttggcggtctgtagggaaatttaattgtaattaattactagttattgtgttggaaatgtagaaatgccttgaattttaagcccctttgattgattgatagggcatatcaaagcgcttgttcctggttctcaattatttatgttttattcgccaaacaagaaccaatcaggagctccaagtgtccacagagtcacctgtcgagcagctgtcttctgcgagtggcaaacctattaacttttctctccccttttcccattttcctgctgctgcaaggacatttatcgctggctgagtgtgtgtgtgtgtgtgtgtgtgtggagcactttgttgcttaattgattttaatacaagctccccccgctccttttgcgccatcggtcctcaagtgagtcgtcgttcgccttcatagttcgagttcgagtctataaattggctttttcctttccctttttgcagatgcagcagctgcctgtccatttcccatttccatttccgtttgcaattgcaggggcacaggccaaggatgaagtacaagaagaaatcgaagtgaaaggggtggagaaatgctagtgaaaggagcatgggtgggcaaaggtagcggcaaagcaaaggcaaagaaagtagaaatgccatttattgaattgtataaatttctatacatcgacagcgactgtttattctgcccagccaactgttcatgtgtgggcatctctttttcttgctggcctacacgcagagaaataatatattcaatatctgagcaaagcacttaatgtttaggtacataagtaatacattgtggcatacttttagactttttcaatggaaacatcgtgtaggagagtgtcagaggaatcatattaagttaccataaaaccctcctccccccaattttcgctcagtgcacgaggcaactcggggtgtgtgtttggctaagctttatcgcatttgcatggcaaaagtctcgggcggagtagggtcaagtggccgttaccgttcttggtcccgccctcgggtcactcatttgttcttttgattgcagagcgtttttgctcgttggccgggcttttgttgtattagtaaaataaattaccatttagtgctttttgccacttgcacacacacaaaggcaacacacacgcacgcacacacacacacacacaagtaccctttggctgtcacacatggtcgagtgttgtcctttggcttgcaaatgaaattattgccagggcttttgcattcgctggtttgctggattataagccaccatctgtgtatcggtgtgtgcctgtatgggtatgtgtatctgtgtgcatatgtatctgtgtgtgttgccccactggcaagtgcaggccataataaattgctagcaatcgcatttacgtttctttatgcgcttcgattacgatgcgctttacttgcgccaattcttttcttctgttccccctcgtaattgaatatataattttttcatccctctcccttgcacacaaacacacacacgcagaacacacacacagaacacacacacccacacacatgattcgcctggcatttgaatataaattgttttatctgcttctgcaaaatattcatttcaatttattttacttttctttattcgattgctcggcttcctgctctttttacgattgtattctccctcttcctgttttttctttattaaataaattatttatgcattgtcatttggcttgcgccattttctatgtgcagacgccgctaagtatgccaacatattttgtttacaaattcgggattactttcgaaaaagttgttgagtttgccgagagacttttaatacattaaacagctgcgacgactttgataactcacgagttggggaatcaacttttatggccgtaaattacacaaatcaagggtacattcgaaagttatataaatatgagcattttaaatatttaaaatctaaaaaaaaaatctaaaaaaaaagaaattttataagattttcttagagattaagtttcataacggaaatatcaaagagggtatcttttattatacacccaccccttaacttttgtttgactttgtgcttctaagccgaagcatatgcaacatgggcaaatttaacttttgacttttgtactcatccccgccacttatttactctcatttgcagtgccaagcaaaccgcagaatctaaccatcttggatgtttcggccaacagcatcacgatgtcctggcatccgccaaagaatcaaaacggagccatcgccggttaccatgtgttccacatacacgacaaccaaactggcgtggagatcgtcaagaactctcgcaattcggtggaaaccctcattcacttcgaactgcagaacttacgtgagtttaactacgttttcatttggggcttatttggcgtaaaaggttttcaaacttttaatttattcactcgataaatttgcgaaagtcccggtcgatcaaagggttttccccgcctattctcgccaattggtgacccccgtcaagttccgaactcgaacagtttaatactgtcaacagtcgaacgcccacgttgtgaaaagcggcacacacttttccgcgtcgcccccgccgcgaaatggaaaatgggaatggaaaaccgcttgagcctgccgaaggacctacctattattagccataattgaggctctagccaaattgtttgccagctgctttgtaattaaatagttgcaagtgctcgcttgccactttttgtttgccaacaacaacaacttttgacgcttataatttgcacaccccaaaagtcgtctaattttcctgattaaggcgtgtgggccagagaatacatccgcaggatatgccgcatcaggagcagctacttagaaggatcctggtagaaaagtggctcggttttttggaggtttttaggcgcctccggggccaccatgcaattaacttgctacaaagttatgcgccgcattccacactctcatgcagctacagccacattgtttaatttaattacacgtcttcggatgcaggatgcacctgctaacttctgctcgcaaatttcgtggcaaaggagcctcctttttgcggcatgctgggccgccatggcaacgtttaattatttccaaatttaatccaagtagatgtcagcccgtttctcttcttaattaaatccaatttaagctgacagcgccgcttgaagcaatacccttttgctttctgttttttctcgccatgaaaaatcaattcactgttattgttgccactgtcccttgcatttaccccgcgtaaaatttaattataaagccgcacagcagccccctttccttccattccattccattcccttctcctgcaaccagtgacatgcggcgacgcatctcataataatgagcagcgaaaagatgcccaccgctcaatttaaggcggctggtggcaggtggcatgtggcaagcggcgtggcaggtgctccacatactcgcgggaaaaacaactgacattccctggaagtatttacgaccaataaatgcctcaactgtcgcatccaaatgcattcgactgcaaatgaagcaaattaaaggcttacgcaggtccttgaataattatgatttcttttgaatttccactactatagttaataaagaaggtacttatatatgtaatacgtattttcaggaccctacaccgactaccgtgtgatagtcaaggcattcaccaccaagaacgagggcgaaccctccgatcagattgcccagcgtacggatgtcggaggacccagtgccccggcgattgtgaacctcacttgtcactcccaggagtccatcacgattcgatggcgaagaccctatgagttctacaacaccatcgacttttacatcatcaagacgcgtttggctggccaggatacgcatcgggatatcaggattaatgcctcggccaaggaactggaaactgcggtaggtttttatatttaaactatagttttgttcagatattgtgcaactttaaagatatgtttgaatttactaacaaacgccagaacaatgtatttctgtatagaatggcgaaataaatgtaagtgaattagtccctttggagtctggcgctaatatttcatgcgcaagttttcgtgaaaataaaagagttttcccgcgctgttagccaacattttgttggcctgccaagtgggcaacaatgtagacctcacctaccacccccctgcgttatgtcaatcgagtcggcttatcgcggccatttggcccgttctgcggcccataaaaaaaaaaggagaagttctatgataaacggcctaatacagacagatattcaagggggagcggcagtaataattgcatttttatgcagcaaacaacaaacggcatagaataaagcccacctgccacggcacctgtaaatatttcataaaaaattctacatgcaaaaaatgcaacattcacacacacattcacacacacgcgttgcaaaccgcccacctgcgaaaataaattaaatttatgttgtttttcctgtccgcctttgtgccgcgtcttccctttttatttagcgcctgaaatggatggaggaaaaaataaaaaataataaaaaaaatatacgccaaagtaaataaataaaaacgaaaagtttgtcgtggggaatgtggcgaggcaaacaaatttcgcaacaataaaatgttatcatactcatatctgactttttccatatctgaaaactagttggatccttgtttagtcctgtgttttacccttccgccccaggatctcctgtcctctgtcgcccggcttttgtttttggccagttaaaaatatttttgtaattgaaatattctgcagcggcaaacaagctggctgttgaacaactaaacaacagaaatggcaataattctacctttgtttttcattgttactatagtttgcgtatataaatgccaaatatttggcttttccgtatgaaggagacagaattcgaagttagatggaaactaaattagaaaattggctcgtacgcaaggaaaattctgatttggataaactaaattagtatgcattttagaaatttgttgacgcgttttcattaactgcagaaattttcaaggggtcaaacatcaaacattgaatatttgttgtatttcgaaatgaaataatatatcctttagtttatcctttcaaatttacatttgcattaataaaacacgatactaatactactcttttgcttatttccttgcagatgattcttcaaaacctaacaaccaactcgtattacgaggtcaaagtggcagcggcaacgttcagtgtcataaatccaaagaaaattgtgctgggcaaattctcggagtcaaggattgtaagtagcgcataaagatatcaagtgcaatccgcagagcgaaccaacacctgccacatggcggaaaaacttggcattttgttttgggccaaacgaaaacgctgggcggagaggggggtggcagggggcgtggcatgccataaagttggcagcctcgccgttgtcagtttccatatcagattacatgtccaaaaagaaagcaggttggttttttttttgctgagtaggtgtaacagaaagttattttgttgcgaaaattccaaatttttctaggctgtgctgtgctgctcaagtaactttacctttttatgcgaccacctatttggtttctatgcattattgagttctcaccgaacggaccccggggcgtatgcgtaatgggaatcttaggcgcgtttaatggactccacacaacaatggaaatagtcacagtctcaacattgtctacactacaacaaattgtagctttttagagtccataatttcaaattttcaaaggattttcaatcaaaaaaatcattttcgtacaattgcacaaagaaatattaaagaaaagtcgatttttcgctgaatatgtagtgggtaaaccatatcctttgaacaacgaggaaggcttcttcctgtgcacctgcgtttattgacatttcaacctgtcataacaacatccttaatgacattccacacaaaagcagacgcaccgcctccccccaccactgcacacacacacacacacacaagccgcaaactttgttgcatgcataaaatataatccaaagttgtggcagaaatatagcaatttagttgacctcaagtttgtggccaaaggggtggggtcaactgggcggggcacacgccctcataagtatgcagcaatatttttcgtggctctagctgccttactccacaccccctcctaccatcccgctcattcataattcattgccattgttgttgttggcccgcctgaatttcaaatggcctgcaccttttggccgcatttacatggcccgctgccattttccgctcggcgcacacaaaaagtccccaactccgctcgcaaatggcgctcatttaaatcctttctttttcgggtggcagcaaaaatcgtatgcaaaatgcggaaataaacaagcgcaaataaagagtgcgcgaaaaacaaacaaaggcagcggaaaatcaacaaaaaaaatacaactccagtacgatgataacactgaggcacacacatttgtaacgcattcgtttcataaacaggagtacacaggaaacaaatgtagctgtgtaaaaagatcacaaagcatgcgtttatagagtatatggtatcagcggatcaacacacatatatcttatgtcctaatggaatattcaaatatcttataagctctactataaattttcatcttttctatcaacagatacaactgcaaccgaactgcgagaaattgcaaccgctgctgcggcagtcgcataatgactacaacctggccgttctggtgggcatcatcttcagctgcttcggcatcatcctgatcatcatggccttcttcctgtggaggtaagtggcgctctgtgccgtgatttcccgaactgaatcctaaaataaagccctagatacagatgaagcaagtgcagatgcagcagctgtcttcttgagagaatcgcgtgccgttccataaataaaactgagaaaagtgttgtcaaagtgctgagtgcaaagccctgtaactcccacccactaccctgaatggaatttaaaaataaaccgaaaatgaaccaggcaccagttgcagctatagaatctcggaatttagaatctcccaacttatagtagaatattctcggaatttgcgcttataatgactcgtggttattccgcagtacaaaaattatctgtgttgcgctactgacttcattaaatggcatacttatccaattaccgaatgaaatgcagaaaaagccctaatccttttagaccaattcataattatggcaatcactcgaccgttctctctgtcctccttttcgaacaaacagcaaatagcagataccacgacgaacttgaaacgaaaggtggggtggttggttggttgggtctttggtcgctctcatatttcctggaaatgttaattaaaattcaaatcacaaaaaaacacgagagtccgtggcgaagccaaagacaaagacaagcaaaacaattttaagttacttaaaatctttattaaatgtaagagtggttaacccattggccagaacccagcaatcctcatgcccatacccatccggatacggattcgcatttgccgggggcagtggcaaacatttgagacgacaaaatgtgttggggaaaatgaaaagcgtttttataccagcagcatgccccaacccgcagccaacttcaatggcaggaatttttgcatattttctctgtcgaagcgattttttatgctgtcgcgagtatgccaaatgaaagttacccacgcccacagttttattttcattttttttttttttttgttaccccttctcgggttgcctaacaaattaatgccattttatttattttttacaaataccctgcgggtagagcagagtagaacgcaaaacagcgtgaggagctggaaaaagcagaaggttggagtgttgccatcccattcttcgagttgcccaagttttagagcggaaaaaattatattttattaagcaaacaaaggcgaatttctacaatttccttttcaatgcaaacaaatccaaagtggcggcgactgggtgagaggcgagaggcagccagaacaaaagtcagccagcaaaagaaaaaaaaaaggaaaaagcccgagaaaagcggtgggaaaacatgaaaagaagggtttcgcgttttttttcttttcagctagagggtgggtggaaatcttctcgcagaactcaatctcaatacgaggcccttggcaaaatcatttacattcgcatttacttttgcagagcactaatcaacgtttagtggctgccactaggaggcacgaatgccgcaaagtcaaggggtgtggaaattattttaataagcgctgtggcaggctcactaagtcctaaccgccacacactccggaaaactggcaacttgggcggcaagtggaaatactttgcaatttcttgtggcaacaatttgctggcggcagcgataagcatgatttttagccatggaaaaaccgctttttagagcaggaaaaatagtttagcgaataacttagacgtcatgcagtagtaaatcattattgtgcggttttataccccggtatctataaactttcaaacttagttgattattacggaagcaataggtatttgatagtcgagctgctcgacaaggttctcacctactaaataataaatattagaaatgagaaaacaagatgtcagtagttcactgtcttcttgccagcggccagaactattttccatttgcattccgacaccgaatcataaaaagtttcccctctaccgagaccccaccgtacgtggacttgtgtgttacttttttcttttcatatcgaatgcagttgggaacattgtttttgtgtcgacggctttatttgctggcaaatgtgtgtgtgcgtgtctgcttttccgaatagaacttttccttccctatgccgaaaatagaaaagcgagcagaaagtcggacaagatattgtttttggacaacgtattggtaactgttgccaaaaaagttccatttcatgacatcgctgcaaaaagtcaaagtgtgtaaggggtgcaaggtgtgtgagggtggttcggaaaagggacagatttcctctagttttccccaatttccctttgcgctgactttatcaacggtatcgatgaaccaactgccagcgttatcaactttccatggctaaataacgcccaatgcaacttttattgaggaagttgtctggctcaatcgatcgattaacaaatattgatttccacccgtaaggcagcaagcatttactgattaactaactacgtggctgggcagcaacaatagcagtagacttaattaagcaaaaacgggggagaaaatgcattgcatttgtaaatagcgtatgcaacttaaaaggtcaaatcaatgtcatatctagataggattatagaatttcaactggaatcgccacagttgatactccctacaagctaccacacaagtttttttacttcaatttctttaactacgaatatatgtaagtttcgaaaactatatatattttaaaactttccttcgtaagcaatgactactgtacgaaagtgggaagggcaactgactttttacgactggcagtaaaaatgtgccagttgttatcaaacagctgatgaggcaaagctccaaaagctcgctctttcttttttctatatctctcagtcgggttaaagatcggggtgctgaggaaaagctccaccacagcgccgatcgccaattgcctagagttcagttctccaaagcacgcgcgtgtataagcacgtatgtagattcatagatacatatatcggtagcaccaaaaaaaaaaaaaaaataaagaatcgagcaaaccaaccgcacaataataaaccttatcaataaacaacgctgcgaaagagaagcgacaagtgacgaaagacatagccagtagtgtgctcgtttcgtcacaacaagagcagcctcattgaggcaaattcgtgtgacggcgtggtgttcgtagttattgcgtactatttttgcagtgaactggcgacactgcagttgccaatatgacgagtgacgtaatttgtgcaagtatgtaggcgcagatcgcgggtacacgcagcgaaaaagggagccacactctacacacatatgtcgtcaggtggcggggaaaagcgctgcagcagccccatgctgcatgccacatcggaaatcggtggtgcaactactgcaacgccgcgcctgctgcgccgcaagtcgcagcgcggaaattggtttacgtaagtttttcgcagccctcacgtgtgtgccaaactaaagacgaaatgccgccaaacagttaaagttattaactaaatgccaggctgcataccaaatgcgcggctcaatgtggcgggcggaagttgacaaatataaataaatagattttttggtgcgtaatagagaagcgagaaaaacaagagtcttcgataaacaagcacagaagtcgagaaaaacatatgtaaatatatgtgcatactagagtatgtggcggtggaatttcttattttctagccgctttccttagccatttgggtactatttacttttccgtcgacagccaaagtaaacaaagccgcatcgcaacgccatctcccgttgataagaattattgaaataattatcaaagttctcgagtttttttttttatgccacaaaacttcgcagagtaaacagtaaaagtgacttcttttggaatttcccaaaaacgacagatcagtatcgctttcaaaacttataagaatggagcgcaaatcttgggaaacaaactttttatcatcgaatggcagatggggaaatgtatgagttggatatggaacccccatagatagaacgcttatcatgtattttacgattgctggataatatatgtattactcagcctaggtgccattggatctgctatatagtcccttttaagcggaaactagacataaatcgattcgatttgtatcaatacatgcattcacaagaccacgattattaagagccatattcttggcaaagtgcaacgagccacaacacgaaacagaatgaaaagttggcagtacagtgcggaccattggtgaattgccattatgtcgtgcactttctcccaaggctgcgatgcgagtgaaatggccaactttttgctggcaagttgccaagttgtgctggctgctctgctctgcgagtgcacttgcaggcgaaagttggtccaaagttctgcgcgctccttgtaatcgcttaagccaattacaagaacttaacctcaatttgtatatagcaattgaacggccataatgcctgcccgccttttccccattattgtcactcacttggagcggctttggtccgctggcgagtgtcctggcgaaaggattcagtcgcactgtgctcatgcctggctgaaagcgaatgccattagtgctgaccaccgcctatccgcttcctgcttcccactatccacctggccgccacagcattctcagcattttcacctgcttatttatgcattctgattttgtgaggagcttgtcgtcggccacgcccacctgacacctttcgctgatttcgtcccaactgattgcagctgcttcatagtttccagggctctcaactctggcaaagaaaattattttctccctcttaaatagaatttgcactagctgcaaagtagccttcgaattataaggatacttttgccactggtcactggtgggatttccgctccaggaaactaatgggatttaaagaacaggagaatccttctgcacactgtacacttaggtgaatgggaatagttaattttgggacactcttgctatttgtattgataagttgctggtttggagaagaaacaatcctttgtaacacttggcacttccttcaactcctttcagcagaaagtgcttccatgcggcctactactatctggacgacccgccacaccatccaaatgccccgcaggtggactgggaagtgcccgttaagatcggcgacgagatccgagcggctgtgcccgtcaacgagttcgccaagcacgtggcttccctgcacgcggacggggacattggattcagccgggagtacgaggccatccagaacgagtgcatcagcgatgatctgccgtgtgaacactcgcagcatccggagaacaaacgcaagaatcgctatctcaacatcacggcctgtaagtcgtagttctattagataactaccttttatgactgcttgaaacttgaaaccttaatggcatgtttttattacaaataattattgttgaacaacttgtaaatcacagatgaccacagtcgggtgcatctgcatcccacaccgggacagaagaagaatctggactacatcaatgccaacttcatcgatggctaccagaagggacatgccttcatcggcacccagggtccattgcccgacaccttcgattgcttctggcgcatgatctgggaacagagggtggccatcatcgtgatgatcaccaatcttgtggagcgcgggcggcgcaagtgcgacatgtactggccgaaggatggggtggagacctatggcgtaatccaggtcaagctcatcgaggaggaggtcatgtccacgtacactgtgcgcaccctgcagatcaagcacttgaaggtgggtataccttaagtagcttcaatagttcactcaattaacaaaaatatgacccaaaatctcagctcaagaagaagaagcagtgcaacaccgaaaagctggtctatcaataccactacaccaactggcccgaccacggaacacccgatcatcccctacccgtgcttaactttgtcaagaaatcctcggccgccaatcccgcagaggctggtcccatagtcgtgcactgcaggtgggctattcaacttcaaaggagtccaagtattggttctataattactatgttatatcttaatctacttttttagcgctggcgtcggtcgcactggcacatacatcgtcctggacgccatgctcaagcagatccagcagaagaacatcgtcaacgtctttggctttctgcgtcacattcgtgctcagaggaacttcctggtgcagaccgaggagcagtacatattcctgcacgacgctctggtggaggccatcgcctcgggggagaccaatctgatggccgagcaggtggaggagctgaagaactgcactccctacctggagcagcagtacaagaacatcatccagttccaaccgaaagacatacacattgcatccgccatgaagcaggtgaactcgatcaagaaccgcggcgccatcttccccatcgagggcagtcgggtgcacttgacgcccaagccgggcgaggatggcagcgattatatcaacgcctcgtggctgcacggcttccggcgactgcgggacttcatagtcacccaacatcccatggcgcacacgataaaggacttctggcagatggtctgggaccacaatgcgcagaccgtcgtgctgctctcatcactggatgatatagtaggttgcattagatttcccatcgaattgcgatactaatcccaatgtactccgcagaactttgcacagttttggccagatgaggccacgcccatcgagagcgatcactatcgcgtcaagtttctgaacaagaccaacaagagcgactatgtgagccgcgactttgtcatccagtcgatacaggacgactacgagctgacggtcaagatgctgcactgtcccagttggccagagatgtccaatcccaacagcatctacgacttcatcgtcgatgtgcacgagcgctgcaatgactatcgcaatggacccatcgtcattgtggataggtgagtctaaggagggaatattttgtgcttgtgaagtcatctcaaattgttgcatctttccttccttaagatatggtggcgcccaggcgtgcaccttctgtgccatctcctcgctggccatcgagatggagtactgcagcacggcgaatgtgtaccagtacgcgaagctgtaccacaacaagcgacccggggtgtggacatccagcgaggacatccgcgtcatctacaacatactttcatttttgcctggcaatttgaacctgctgaagcgcacggcgcttcggactgaattcgaggatgtgacaacggccacgccggatctctatagcaaaatatgcagcaatggtaatgttccacagcatgtcatactgcagcagcagcagctgcacatgctgcagttgcagcagcaacacctagaaacacagcagcagcagcagcagcaacagcagcagcagcagcagcagcaacaacagacagcactcaatgagacagtcagcacaccaagcaccgatactaatccaagcctcttgcccattctgtcattgctaccgcccacagtcgctcctctatcctccagttcatccaccacaccaccaccaccaagtactccaacaccacagcccccacaaaccatccaactgtcatcgcattcgccatccgacctgtcccaccagatctcatccacagtcgccaatgcaggatcaccagcaactgcaagtgcaggcgcaacaccaacgactccaatgacaccgacagtcccacccacaatacctacaataccatcactcgcatcccagaacagtctaacccttactaatgccaatttccatactgttactaataacgctgctgatctgatggaacaccaacaacaacaaatgctggccctgatgcaacaacaaacgcaactgcaacaacaatacaacacgcacccgcaacaacatcacaacaacgtcggtgacctgctgatgaacaatgcggacaactcaccaaccgcttcaccaacgatcaccaacaacaatcatataaccaacaacaacgtcacaagcgcagcagcgacagatgctcaaaacctagatattgtaggctaaactaaagataaatttacagagagggaatttaaatcattttataaatgtttaaatataaatacttaaatttaaaccttacacctacgtacatagcgatgtatttattaaagtctaagtcgtttaagtgagaacagagcgtctagcgctgtgtccataaattattcaacaattcgtttgccctgtaagctcatattttactttaacttacacacccacactcagttgtttcccccaaaactatctaaattattttgtcttatgtagtagtttttatatcgtaaacataggtttttatacaccatactttacccacatttagtcacgagggaaaaacaaaacaagaacgaaagtcaaaagccgcagtgaagaacaagaataatcgcaaatctaaagtggaaacgtagtggaaatgcacaaatcgaacaagtagagttaataacatatttgtctaatcatttaaatacgctgattacacataactaacgttaatgcaggctaatgctgcacacacttgtgccatgatttttttaagctctcccaagcaaattcctattaaagtaatgaatattagttgttgaattgaattagttgattgagcaatcaatttgcattttaattcgaatcgattcagtccgtcctagtatctgttattcttttcattttgccttcctaacaattggttccactttaagacagtttaatgcaaaatgacaaacttaagcgaacctagctacaaattaattgcgaatttagtgggcactaagccgaattaccgagcactctacaccacccacaccacacacatcactgtaaatcccaatcaaagctaagtaaatcacacgatttccgcacaaagcacaagagcatcacgaaaatttgtaaatacagcttagatcagataaaagatactgtataaatgtcagaagtcagagaacccttcacactctgcaaagctaataatattgtaaaaataaaaactaatttaagcgaacgcgacaactataagtgtaaatcggcaaagtagtcgcaagcaaagtattattaaactatatgatacgtgtgaaaagtgagataaaagaaaatcccaatgaaaacccaagcttaagttttgttttcctctatcgatgcgtaaatctagcctgtacagttctcttaaagttagacccgaatgaattatgattaaacctagcactctgaatggccatagccaaatggtttggagctctccaaatcgggcagttagaaagtatataccccccacaagtaatttagtgaatatttttacattttatatgtaaagtattggtggaaatgaagaacatacgaaacgatgaacaaacatgttttaaagactggttttttgtacactttaacttgaataagcatgcatactgatactgattatgtaaatgattattatgaacgaatgtcaaaggtccttcagttgcccctccccgcccccgcaagacctgtcccgaatgtagtttccactcaatcgcatgtagtcagactacttgcggatgcagaccgaggatttgggagcacacttcaatatccgatcgtatcaatccaatcatttgtcagctgataccaaataggcggctctacatgttaaacaaccaactaatgaccaattttgtgagattatgtttcttaggcactagacccgacttaggctaagactacttaaacgctagaagggcttgtaaatttctcataccgacaccggcggtggtaacaaatgcttcatctgtaatataacgacaagaatcatattatttcgatacaatactaaggcaggcaatactatgcattttaactgttaaacacacataaatagtagtgcgtatgatgcaactataggtggatatttccatgcattatgtacataatgttgtaagtgaaaagaaagaaagaaagaaaagcttaatcaactgcattgcgaatgaagcaacgaacaccttttgtgtgatcacacagagttctaccgaaatctcccaattaaatgtgcacactcttttcgagcaaatggaatcctttccgcgactaaactaccttcacacattaactaaagtaattgagaacgatagaaacaaggccacagatacaacagatgattatctctaattgacggtgttatgcaatttataaatgtgatgaatgtcaaagttaagcgtaaacaatttaaaagcaagcgaagaaaatacaaaaacacaaaaaaaaatacaaataaaaataaatataaatataaatataaatataaacaaacgattcatgagaaagagctgaatgtagcgagaacttaagtatctaagcatgcccacgattttagagctaagcaaatagatgaagatacaaatacaaatacaaatacccagaggcagaccataggttttaaagaacgaacgaagcatttgccccacatcctgacaggttaccgcagcttgtagaggccattgcagccggaggagtcgccacagagatcggacaaaatctcgcgataaacagaattaatgatatgagtatatgtatgtatatgtatgtacacctaagctaatcgtaagccaatgaaagttgaaatggactaaagatacatggaacagacaacattgaaagcgtctaaataaagaacatcaaattgcaagctcaccctatctgggcggacgtgtctccacggtgaactccacgtgcatcaacccgaactggctgcggggcaaaacatccggtgtccaggtgaccaggactccattgccgacgtagtcctgcggaatagaggtttactaacgagctcttttcatttcgattcccaactcacctttggtgccgcttcgaagagtatcttaaccatataaaggctgagtctcgggtagactatacgcttcttcggctgacccggcacctgtggttccatcggtggacgtacgtagggaacgaagtgaccttctgcatgccgctcgaaggcgcgatccaactgcagctgtacgttggaggtgctaaagatgcgcttcgcggtgtgcggactcgcaaagtgccaggtgtacttgctgaggcctttatgtttgcccgactctatcacagttagcttgtccaacggacgtcgcttgactccagtactgaagctcttgcaaaaatgcgaaaaggtttccttgtgcacatggaagttctgttgcaccaagcgcttggtaagcgtgttgctttccgtttccaatggctcgcaactgtcgtttagcagctcgatcacatgatccagccatgccgagtaggatagagccggctgaacggaagcgtccaagcaagcggatgcagctgacgctgcaccattcacgattaactcccttttggccggcagagagggctgcttcagggacttcacttcggtcactatttccgagaacttgaccggtgccttcttgaccatcgatatggtggccagctcaatgggcagctgatcggcgaccacagagggcgtggcctcggtgaaaatgggcggagcagctaggatgttgtagggttcactgatcaagggcagttctatatcctcgctgcatatatccagctggtcggtgggctggaactgatccatcagctcgatattgcagtcggttagctcgatgggctccgcatagacatcgaggttggaca

SEQ ID NO: 3044 - DNA, 6650 bp, DROSOPHILA
gtcatcatcatcagtcgccgtcgtcgtctcgtcgctgtggtttttattccgattgtggccatgcaaaaagagtgccaaaatggaaatcatttaagccgaacaaattaagaactaagcatagtaaaaacacaagcaagcacaaactataaaacaacgcacaaaaatgttgtaaacgaaaggagaaacactgacaaacaccaagtcctactaaacagtgggacaaaagcgcacaataagtgaacgaaaaaaaaaacccaaaaccaaaaaacacacacgcacaaaatcgtgaaatcaaacgtagatcatcacaacgaccaacgaatcaaaatgccacgcccccagcaccacgcccttctgagagcaatgctgaagttgttgctcttcgccagcattgcggagcactgtgccaccgccctgcccaccaactcctccaactcgccatcgtcgccatcgcccttcaccgccgcctcattgccgcccaccactgcatcgtcgtcatcatcaccggcggtcattagtaccagttcttccgatcgcaatctggccgatctagtcaatccggaggccgaaacaaccggatccggctgggaatcacttgagactgaattcaatctggccaccactgtggacagcagcacccagaagacggaaaaggagccggtgctgggcaccgtagccacctccattgagcagcaggatcagccgccggatgtgccagccaccacgttggccttcgccaatgcgtttccggttccggtggccggcgaaatgggaaacggaaatggcaactataacgatgccacgcccccgtacgcagcggtcgacgacaattatgtgccaagcaaaccgcagaatctaaccatcttggatgtttcggccaacagcatcacgatgtcctggcatccgccaaagaatcaaaacggagccatcgccggttaccatgtgttccacatacacgacaaccaaactggcgtggagatcgtcaagaactctcgcaattcggtggaaaccctcattcacttcgaactgcagaacttacgaccctacaccgactaccgtgtgatagtcaaggcattcaccaccaagaacgagggcgaaccctccgatcagattgcccagcgtacggatgtcggaggacccagtgccccggcgattgtgaacctcacttgtcactcccaggagtccatcacgattcgatggcgaagaccctatgagttctacaacaccatcgacttttacatcatcaagacgcgtttggctggccaggatacgcatcgggatatcaggattaatgcctcggccaaggaactggaaactgcgatgattcttcaaaacctaacaaccaactcgtattacgaggtcaaagtggcagcggcaacgttcagtgtcataaatccaaagaaaattgtgctgggcaaattctcggagtcaaggattatacaactgcaaccgaactgcgagaaattgcaaccgctgctgcggcagtcgcataatgactacaacctggccgttctggtgggcatcatcttcagctgcttcggcatcatcctgatcatcatggccttcttcctgtggagcagaaagtgcttccatgcggcctactactatctggacgacccgccacaccatccaaatgccccgcaggtggactgggaagtgcccgttaagatcggcgacgagatccgagcggctgtgcccgtcaacgagttcgccaagcacgtggcttccctgcacgcggacggggacattggattcagccgggagtacgaggccatccagaacgagtgcatcagcgatgatctgccgtgtgaacactcgcagcatccggagaacaaacgcaagaatcgctatctcaacatcacggcctatgaccacagtcgggtgcatctgcatcccacaccgggacagaagaagaatctggactacatcaatgccaacttcatcgatggctaccagaagggacatgccttcatcggcacccagggtccattgcccgacaccttcgattgcttctggcgcatgatctgggaacagagggtggccatcatcgtgatgatcaccaatcttgtggagcgcgggcggcgcaagtgcgacatgtactggccgaaggatggggtggagacctatggcgtaatccaggtcaagctcatcgaggaggaggtcatgtccacgtacactgtgcgcaccctgcagatcaagcacttgaagctcaagaagaagaagcagtgcaacaccgaaaagctggtctatcaataccactacaccaactggcccgaccacggaacacccgatcatcccctacccgtgcttaactttgtcaagaaatcctcggccgccaatcccgcagaggctggtcccatagtcgtgcactgcagcgctggcgtcggtcgcactggcacatacatcgtcctggacgccatgctcaagcagatccagcagaagaacatcgtcaacgtctttggctttctgcgtcacattcgtgctcagaggaacttcctggtgcagaccgaggagcagtacatattcctgcacgacgctctggtggaggccatcgcctcgggggagaccaatctgatggccgagcaggtggaggagctgaagaactgcactccctacctggagcagcagtacaagaacatcatccagttccaaccgaaagacatacacattgcatccgccatgaagcaggtgaactcgatcaagaaccgcggcgccatcttccccatcgagggcagtcgggtgcacttgacgcccaagccgggcgaggatggcagcgattatatcaacgcctcgtggctgcacggcttccggcgactgcgggacttcatagtcacccaacatcccatggcgcacacgataaaggacttctggcagatggtctgggaccacaatgcgcagaccgtcgtgctgctctcatcactggatgatataaactttgcacagttttggccagatgaggccacgcccatcgagagcgatcactatcgcgtcaagtttctgaacaagaccaacaagagcgactatgtgagccgcgactttgtcatccagtcgatacaggacgactacgagctgacggtcaagatgctgcactgtcccagttggccagagatgtccaatcccaacagcatctacgacttcatcgtcgatgtgcacgagcgctgcaatgactatcgcaatggacccatcgtcattgtggatagatatggtggcgcccaggcgtgcaccttctgtgccatctcctcgctggccatcgagatggagtactgcagcacggcgaatgtgtaccagtacgcgaagctgtaccacaacaagcgacccggggtgtggacatccagcgaggacatccgcgtcatctacaacatactttcatttttgcctggcaatttgaacctgctgaagcgcacggcgcttcggactgaattcgaggatgtgacaacggccacgccggatctctatagcaaaatatgcagcaatgtcgctcctctatcctccagttcatccaccacaccaccaccaccaagtactccaacaccacagcccccacaaaccatccaactgtcatcgcattcgccatccgacctgtcccaccagatctcatccacagtcgccaatgcaggatcaccagcaactgcaagtgcaggcgcaacaccaacgactccaatgacaccgacagtcccacccacaatacctacaataccatcactcgcatcccagaacagtctaacccttactaatgccaatttccatactgttactaataacgctgctgatctgatggaacaccaacaacaacaaatgctggccctgatgcaacaacaaacgcaactgcaacaacaatacaacacgcacccgcaacaacatcacaacaacgtcggtgacctgctgatgaacaatgcggacaactcaccaaccgcttcaccaacgatcaccaacaacaatcatataaccaacaacaacgtcacaagcgcagcagcgacagatgctcaaaacctagatattgtaggctaaactaaagataaatttacagagagggaatttaaatcattttataaatgtttaaatataaatacttaaatttaaaccttacacctacgtacatagcgatgtatttattaaagtctaagtcgtttaagtgagaacagagcgtctagcgctgtgtccataaattattcaacaattcgtttgccctgtaagctcatattttactttaacttacacacccacactcagttgtttcccccaaaactatctaaattattttgtcttatgtagtagtttttatatcgtaaacataggtttttatacaccatactttacccacatttagtcacgagggaaaaacaaaacaagaacgaaagtcaaaagccgcagtgaagaacaagaataatcgcaaatctaaagtggaaacgtagtggaaatgcacaaatcgaacaagtagagttaataacatatttgtctaatcatttaaatacgctgattacacataactaacgttaatgcaggctaatgctgcacacacttgtgccatgatttttttaagctctcccaagcaaattcctattaaagtaatgaatattagttgttgaattgaattagttgattgagcaatcaatttgcattttaattcgaatcgattcagtccgtcctagtatctgttattcttttcattttgccttcctaacaattggttccactttaagacagtttaatgcaaaatgacaaacttaagcgaacctagctacaaattaattgcgaatttagtgggcactaagccgaattaccgagcactctacaccacccacaccacacacatcactgtaaatcccaatcaaagctaagtaaatcacacgatttccgcacaaagcacaagagcatcacgaaaatttgtaaatacagcttagatcagataaaagatactgtataaatgtcagaagtcagagaacccttcacactctgcaaagctaataatattgtaaaaataaaaactaatttaagcgaacgcgacaactataagtgtaaatcggcaaagtagtcgcaagcaaagtattattaaactatatgatacgtgtgaaaagtgagataaaagaaaatcccaatgaaaacccaagcttaagttttgttttcctctatcgatgcgtaaatctagcctgtacagttctcttaaagttagacccgaatgaattatgattaaacctagcactctgaatggccatagccaaatggtttggagctctccaaatcgggcagttagaaagtatataccccccacaagtaatttagtgaatatttttacattttatatgtaaagtattggtggaaatgaagaacatacgaaacgatgaacaaacatgttttaaagactggttttttgtacactttaacttgaataagcatgcatactgatactgattatgtaaatgattattatgaacgaatgtcaaaggtccttcagttgcccctccccgcccccgcaagacctgtcccgaatgtagtttccactcaatcgcatgtagtcagactacttgcggatgcagaccgaggatttgggagcacacttcaatatccgatcgtatcaatccaatcatttgtcagctgataccaaataggcggctctacatgttaaacaaccaactaatgaccaattttgtgagattatgtttcttaggcactagacccgacttaggctaagactacttaaacgctagaagggcttgtaaatttctcataccgacaccggcggtggtaacaaatgcttcatctgtaatataacgacaagaatcatattatttcgatacaatactaaggcaggcaatactatgcattttaactgttaaacacacataaatagtagtgcgtatgatgcaactataggtggatatttccatgcattatgtacataatgttgtaagtgaaaagaaagaaagaaagaaaagcttaatcaactgcattgcgaatgaagcaacgaacaccttttgtgtgatcacacagagttctaccgaaatctcccaattaaatgtgcacactcttttcgagcaaatggaatcctttccgcgactaaactaccttcacacattaactaaagtaattgagaacgatagaaacaaggccacagatacaacagatgattatctctaattgacggtgttatgcaatttataaatgtgatgaatgtcaaagttaagcgtaaacaatttaaaagcaagcgaagaaaatacaaaaacacaaaaaaaaatacaaataaaaataaatataaatataaatataaatataaacaaacgattcatgagaaagagctgaatgtagcgagaacttaagtatctaagcatgcccacgattttagagctaagcaaatagatgaagatacaaatacaaatacaaatacccagaggcagaccataggttttaaagaacgaacgaagcatttgccccacatcctgacaggttaccgcagcttgtagaggccattgcagccggaggagtcgccacagagatcggacaaaatctcgcgataaacagaattaatgatatgagtatatgtatgtatatgtatgtacacctaagctaatcgtaagccaatgaaagttgaaatggactaaagatacatggaacagacaacattgaaagcgtctaaataaagaacatcaaattgc

SEQ ID NO: 3045 - protein, 1214 aa, DROSOPHILA
MLKLLLFASIAEHCATALPTNSSNSPSSPSPFTAASLPPTTASSSSSPAVISTSSSDRNLADLVNPEAETTGSGWESLETEFNLATTVDSSTQKTEKEPVLGTVATSIEQQDQPPDVPATTLAFANAFPVPVAGEMGNGNGNYNDATPPYAAVDDNYVPSKPQNLTILDVSANSITMSWHPPKNQNGAIAGYHVFHIHDNQTGVEIVKNSRNSVETLIHFELQNLRPYTDYRVIVKAFTTKNEGEPSDQIAQRTDVGGPSAPAIVNLTCHSQESITIRWRRPYEFYNTIDFYIIKTRLAGQDTHRDIRINASAKELETAMILQNLTTNSYYEVKVAAATFSVINPKKIVLGKFSESRIIQLQPNCEKLQPLLRQSHNDYNLAVLVGIIFSCFGIILIIMAFFLWSRKCFHAAYYYLDDPPHHPNAPQVDWEVPVKIGDEIRAAVPVNEFAKHVASLHADGDIGFSREYEAIQNECISDDLPCEHSQHPENKRKNRYLNITAYDHSRVHLHPTPGQKKNLDYINANFIDGYQKGHAFIGTQGPLPDTFDCFWRMIWEQRVAIIVMITNLVERGRRKCDMYWPKDGVETYGVIQVKLIEEEVMSTYTVRTLQIKHLKLKKKKQCNTEKLVYQYHYTNWPDHGTPDHPLPVLNFVKKSSAANPAEAGPIVVHCSAGVGRTGTYIVLDAMLKQIQQKNIVNVFGFLRHIRAQRNFLVQTEEQYIFLHDALVEAIASGETNLMAEQVEELKNCTPYLEQQYKNIIQFQPKDIHIASAMKQVNSIKNRGAIFPIEGSRVHLTPKPGEDGSDYINASWLHGFRRLRDFIVTQHPMAHTIKDFWQMVWDHNAQTVVLLSSLDDINFAQFWPDEATPIESDHYRVKFLNKTNKSDYVSRDFVIQSIQDDYELTVKMLHCPSWPEMSNPNSIYDFIVDVHERCNDYRNGPIVIVDRYGGAQACTFCAISSLAIEMEYCSTANVYQYAKLYHNKRPGVWTSSEDIRVIYNILSFLPGNLNLLKRTALRTEFEDVTTATPDLYSKICSNVAPLSSSSSTTPPPPSTPTPQPPQTIQLSSHSPSDLSHQISSTVANAGSPATASAGATPTTPMTPTVPPTIPTIPSLASQNSLTLTNANFHTVTNNAADLMEHQQQQMLALMQQQTQLQQQYNTHPQQHHNNVGDLLMNNADNSPTASPTITNNNHITNNNVTSAAATDAQNLDIVG

SEQ ID NO: 3046 - DNA, 5302 bp, DROSOPHILA
cggagtcacaaaatgtaggaagtttatggtttataataattgattggattgctggcgcaactttggcgtccccgaaatttgaagtgtgttgtgagtgcttaacccacatgagtgcaaaattgccatggcaacgtgaatcgaacacgaacagcaacacccacacagagaccattgaagatccgcgcattgtggcgcagtattgcatcagcaactgcgtaagtgcagcacattgactccatttttgttttgctgatgaaatcgcagcgcgatttttgtttcttgtgaaattccgctctatgcttgccaagcttttgtttgttggttgcatgaattcggtaaacgcgacagttacttcccggaattcaaacggaaaggagctttccgcgaagcgtcctcaatcaatttcgagatagagatagagaataataacgcagctgacgcggtcaaaacaaaagcgcttgtgtagaaaatcaaatgcgaagcaaacgcggcgaggacaagacgcgaaaagctgtcaaaactacgcgccgaaaaaggaaagggtctggtcgatcagaaatccgctacgcaacacagattgcgtatctacataaaacgtaataatttaattgtgtgggagttatctcacaattaagaaggttcgtttttaaactaagtttccttatttgaacaacaatcgtagaactaaagaggtgtgtttgaattgtggaaagccaagcattaattgttgaataaaattatcaaacgtcgcggcttcgcatcaaaatcgtgaaaaagttaacttttatagttccagtgtcgaaggacgtaatggcgtgtgacgtaattaaacattgtatatcctgccttctaattgcaaaaataaagtaattagaattaaaacctataaatttaccatttatcgttagctttagtaattaaataggttcgtaataacatcccgcattaaatatttaggtaactttcttcttgtggaaattcactaagttaatttttttaagctcaacccccacttgctaaacaaaaaatacgttccatgaaagaactcaaacgccctagggtaaggtattgcgaaagcttttgaagtattcaggtgcttgttcttcggtcaacaaagcaaaacaatcgggagcaggttataaacaaaatcgaaaggcacccaaaagcggagagcacaagtacgcacacaactacgaactacaactacaaagcacagcactcagaacccagatagccgaacgaacaacaaattcgacctgggcaaatgaaaagcgcagccaaaatcgatattttgtgccagcgtcgcgcgcaaataggagctgctttagcgcttaatatctcgaataaactcgagcggattggtttgattagtgagccaaatatagggattatctggtaagatgtttggaacttgtcgtattatcgaccttctgttccacctgcccccgcgcgtgggctcgaaacaacggccagagtcgtggcaaacataaacaagcattttcaaggtcgctgcaagtcaaagacggccaaaaaaacaaatggggaaaatttcagttttgatggatacacataagcaaacggttccatcaaaaagatacatagaagttgaaaaataattgtttttaaagtgaaacaaatgacgtggtgtcgaaataaaattaaaaaaactttagtacaatattaaaagttatttcaacccaattatattgggtaattctcagactaaatacagtacagtatgagtaaacaaatcaaataatatttacttatgcatgtatctcattgctattatttcagccacggctgttcgaaaatctgtatgtatgtacataagtatgtacatatgtacattttcgatgtcgcaattggcccaaaaaatgttttcttctcaagacaaagagttcctttgtctaaacagaatttttaccatttacctcatctgaattttgtatttatatgatccacgcttcccttttgcagcaacacattatggagtccttcctgagtctctttgatcccaatcaggacgacggcttcgaggaagagcccgagctcaatggcaacagcagcggcggcggaagcagcagcagcgactatgagacggacgccaatgccaacgagtgcagcgtagtgagcgggatgcccaccgagcggggcaacctgatcttcgacttcgagcagggaatgctgccaccagagccgcagctcggaaatgtggagtacaagctgaagctggtcaacccgtcgaagcagcgattcgagcacctggtgacccagatgaagtggcgtctgcgcgagggaaacggcgaggccatctacgagattggagtatccgacgccggctatctgcagggactcagcgacaaggacatgaatgcctcgctcaccacgctcaagcagatggcccacagcctaggagccagtacctcagtgctgcggcgaaagaccatcgccgcccgacgcgccgtcgccgaggtactggtccgtaagatccccgacgaccagcacaacatcgaggttcgggtggcggtgctcggcggagctgatgcaggcaaatccactttgctgggcgtgcttacacaggacgagctggataacggacacggccgggcgcggctcaatatgtttaggcacatgcacgagattcagtctggtaatatgtcgttataagcactaaacacagatataaattaaattaagatgtttggcatccattttaaattgtcatcaataaggaatatatcagttgtactacattattcatacatctctcgtttacaaacttttttttaaattatatttatcactcacaaagtccggtttgtttgcttgaaaattaccaatttgctcctcttttccttaaggccgcacctcctgcatctcccacgagacgcttggcttcgatgcactgggtaatgtggtcaactacaagtacaatgagatgatgacggcagaggagattagcgacaggtccagcaagctggttaccttcatggatctagccggacaccgacgctacatgcgcaccaccgtgcaggcactgagtggatactcaccccactacgccatgctggtggtatcggcgggcagcggttgcaacgacaccaccgaggagcacttggctatcgtgcgggcactggacatgcccttctttgtattggtcacgaagacagatatcacatcgccggacgcgacggtacaggagttgtgcaacctgctcaccaccattgggtgccggaaggttccctttgtggtgaccaacacggatgaggccatctccgccgggtcaaaccagatctccgagaacattgtgcccatcttttgcgtatcgaatgtgaccggcacgggactcaacctagtcacaaagtttctgtacgtcctttcgcccggaatcagcaacgccgagaaggatcgactcgagcaggagtcttgcgagttccaggtggacgagatcttccgggtctctgacgtcggacccgttgtgggcggtctacttgtccagggcgtgctgaccgagaatatggcaatgaagattggtccgcttcccgatggtagctttcatcccgttactgttaatactatccaccgaaacaaggctccttgccgagttgtccgagctggtcagagcgcttcgctgtctttcagtatggatcaggatgtgcccacgctacgaagtggcatggttcttttgggtgatattggaaatagtctggatgagccctacgggaccttcttcttccaagtgagttgctagttttcatttatcgttaccaaataaatacatcaacttccctttgcaggccaaggtgtccgtgctgttccacgccacggccatctatgtcggcttccaaaccacagtccacataggcagcattcgccagacggccgtcattcggggcattatgggcggcgagcgactgggcacaaacgattgtgcttcggtgatgttcgagttcgtcggccacccggagtacgtgcgtcctggaatgcgcatcctgttccgcgagggcaccagcaaaggaatcggagttgtcacgcaggtgtttccggtcaacaagacaggcataaagtagagaagcgggccagatggatagttccaatgacatatctatatatctcaaacaaagatgacatgtacatatacttaattagcaattagagggaggcgttaaatcttaggcagatcttctgtacacttagtttcgggttctgtgatttttcgtttaagctcggctcacaatcggatgttgtgagtaatccttctcaattaaccttatttcattaaaatccaccccaaaatgcatacaatgttgctttcaattcgcgtccgagccaaagagtataaataattaccgaagtattaatttttttccttctagcagatgtacatatatatgtacatatgatcaaaaccgactaactttaagcaacatttaccatcaattctatggtatacaaagacgaaaaagtgctcaacaatttgtttatttctgtctactgctaatgtgctcatcttgactactgttatcacttgttgccgggacactggcgccaccttcaatttcctccgccttggctggcacttcggatgtgaaccggaagaggacgggcacctctcctatggagggatttccgttcgcttccaacaggcgaatccacgagagcaatgagtcctttgtggaggtgcctgtggcacagatggccataatggttccgtcgtcctgttggtggacagagcgcagctttcccagctggttgtgtcgccttggtggagcacgaccaaagaagggtacttcgatgtgggagacatcgtcctcgtccagctgccgctcatctaattcagacaggaactcagaatctgcatcagcgcgcagggtaaagtagttgatccggcgattcctaagccatatgtgaaagggtccctcgatgtacagagctttctggcgagagtgctcccgcagcagtttctcctgctcgggactcattccgctcacgatccacgtatcgtcaatggcatccttcagctcgctggtctcgaaaaccgtgattttggaccgcaggtcgaccgtgcacatccgctctagcgccagcttggccatttccaatgtatcatccggaacaggatcgggcagtggccacggtgataggttcttaaactttggcatccagtacatcatgcgccaatacttgcgcagtggatgtccctgcctgccaaacacattaagcagcatcgcctccatctcgtgatcgggcatcaccccgcaatcttccatctgctcaagcagatcaatgatacactgct

SEQ ID NO: 3047 - DNA, 2448 bp, DROSOPHILA
gctcaacccccacttgctaaacaaaaaatacgttccatgaaagaactcaaacgccctagggtaaggtattgcgaaagcttttgaagtattcaggtgcttgttcttcggtcaacaaagcaaaacaatcgggagcaggttataaacaaaatcgaaaggcacccaaaagcggagagcacaagtacgcacacaactacgaactacaactacaaagcacagcactcagaacccagatagccgaacgaacaacaaattcgacctgggcaaatgaaaagcgcagccaaaatcgatattttgtgccagcgtcgcgcgcaaataggagctgctttagcgcttaatatctcgaataaactcgagcggattggtttgattagtgagccaaatatagggattatctgcaacacattatggagtccttcctgagtctctttgatcccaatcaggacgacggcttcgaggaagagcccgagctcaatggcaacagcagcggcggcggaagcagcagcagcgactatgagacggacgccaatgccaacgagtgcagcgtagtgagcgggatgcccaccgagcggggcaacctgatcttcgacttcgagcagggaatgctgccaccagagccgcagctcggaaatgtggagtacaagctgaagctggtcaacccgtcgaagcagcgattcgagcacctggtgacccagatgaagtggcgtctgcgcgagggaaacggcgaggccatctacgagattggagtatccgacgccggctatctgcagggactcagcgacaaggacatgaatgcctcgctcaccacgctcaagcagatggcccacagcctaggagccagtacctcagtgctgcggcgaaagaccatcgccgcccgacgcgccgtcgccgaggtactggtccgtaagatccccgacgaccagcacaacatcgaggttcgggtggcggtgctcggcggagctgatgcaggcaaatccactttgctgggcgtgcttacacaggacgagctggataacggacacggccgggcgcggctcaatatgtttaggcacatgcacgagattcagtctggccgcacctcctgcatctcccacgagacgcttggcttcgatgcactgggtaatgtggtcaactacaagtacaatgagatgatgacggcagaggagattagcgacaggtccagcaagctggttaccttcatggatctagccggacaccgacgctacatgcgcaccaccgtgcaggcactgagtggatactcaccccactacgccatgctggtggtatcggcgggcagcggttgcaacgacaccaccgaggagcacttggctatcgtgcgggcactggacatgcccttctttgtattggtcacgaagacagatatcacatcgccggacgcgacggtacaggagttgtgcaacctgctcaccaccattgggtgccggaaggttccctttgtggtgaccaacacggatgaggccatctccgccgggtcaaaccagatctccgagaacattgtgcccatcttttgcgtatcgaatgtgaccggcacgggactcaacctagtcacaaagtttctgtacgtcctttcgcccggaatcagcaacgccgagaaggatcgactcgagcaggagtcttgcgagttccaggtggacgagatcttccgggtctctgacgtcggacccgttgtgggcggtctacttgtccagggcgtgctgaccgagaatatggcaatgaagattggtccgcttcccgatggtagctttcatcccgttactgttaatactatccaccgaaacaaggctccttgccgagttgtccgagctggtcagagcgcttcgctgtctttcagtatggatcaggatgtgcccacgctacgaagtggcatggttcttttgggtgatattggaaatagtctggatgagccctacgggaccttcttcttccaagccaaggtgtccgtgctgttccacgccacggccatctatgtcggcttccaaaccacagtccacataggcagcattcgccagacggccgtcattcggggcattatgggcggcgagcgactgggcacaaacgattgtgcttcggtgatgttcgagttcgtcggccacccggagtacgtgcgtcctggaatgcgcatcctgttccgcgagggcaccagcaaaggaatcggagttgtcacgcaggtgtttccggtcaacaagacaggcataaagtagagaagcgggccagatggatagttccaatgacatatctatatatctcaaacaaagatgacatgtacatatacttaattagcaattagagggaggcgttaaatcttaggcagatcttctgtacacttagtttcgggttctgtgatttttcgtttaagctcggctcacaatcggatgttgtgagtaatccttctcaattaaccttatttcattaaaatccaccccaaaatgc

SEQ ID NO: 3048 - protein, 604 aa, DROSOPHILA
MESFLSLFDPNQDDGFEEEPELNGNSSGGGSSSSDYETDANANECSVVSGMPTERGNLIFDFEQGMLPPEPQLGNVEYKLKLVNPSKQRFEHLVTQMKWRLREGNGEAIYEIGVSDAGYLQGLSDKDMNASLTTLKQMAHSLGASTSVLRRKTIAARRAVAEVLVRKIPDDQHNIEVRVAVLGGADAGKSTLLGVLTQDELDNGHGRARLNMFRHMHEIQSGRTSCISHETLGFDALGNVVNYKYNEMMTAEEISDRSSKLVTFMDLAGHRRYMRTTVQALSGYSPHYAMLVVSAGSGCNDTTEEHLAIVRALDMPFFVLVTKTDITSPDATVQELCNLLTTIGCRKVPFVVTNTDEAISAGSNQISENIVPIFCVSNVTGTGLNLVTKFLYVLSPGISNAEKDRLEQESCEFQVDEIFRVSDVGPVVGGLLVQGVLTENMAMKIGPLPDGSFHPVTVNTIHRNKAPCRVVRAGQSASLSFSMDQDVPTLRSGMVLLGDIGNSLDEPYGTFFFQAKVSVLFHATAIYVGFQTTVHIGSIRQTAVIRGIMGGERLGTNDCASVMFEFVGHPEYVRPGMRILFREGTSKGIGVVTQVFPVNKTGIK

SEQ ID NO: 3049 - DNA, 2435 bp, DROSOPHILA
aacgtttaagttattaagataaccagtgaaagcgagaaaaagaggaaaataagaacagtaaatcaacacattttgtatgtccaaactgaatttattaaacatctaattaaacatgtataaaagtatcaaaaagtcattattaatattaaaatgcttatgttaataggaagaatggattaaacctatgcaaacatttttgtcacaatacgtgctttttgggcaccatcttatttttcgagtaagagaggcactatgttctggataaaccaggccttggatatggccaagtgatcaccttcgacgccgagaaagacaagttgtccttgtcgatgcatcttgtccagtcccagctttaggaaaaaatgtacatttcatattagaacgttaggtgatagatatgcatacgtacatcctgatagactttgctctcagtaaagggctggatgactttgttctgcccagtggtgtagtattgaaaccactgggactccttcggctggacaattgtgtcgtttaggaactgcaccatcacaaatctgcaaagcagaggttaataatatttgataaatgtataagtataatacgcgcttacttcttaagcttttgcagattctcaatgtagaacttgttgatgaagagctcgttgttaatgtccgcgagaaatgtgctgcccaggcggtatttgttctccatgatcgggtcgtgccagtaggtggcctgaaccaatgccttctgcacttcactgggtgtatggtatgcaagagagaagagagaattaacacggaaacgacaaggatggcgacatggtggtgttggattaataagcatgtaaattccaggaattatattatattaggattccttaacaacagatagactcacggtgcgtaggcggcgttgtccagtagcctcgtgatataatcacagggcttttcggttaaggtggggcacatgggcagtccgaagatgccctggtgctgcccaccgagtgtgataaggttcctcattggcggattcgggcaacgttcggcaaccgcacgcagaaactggccgccttgcgagaatccgatggcgtggtatcccttggccaggtgctcatcctgcagtagttgcttgcaaacgtaatccacctgttcgttgggatgtatgaagaagccgctctgccagtctatcaaaacattgccgccgatctgcagggatcgcacatagccgccctttgtttgctccacgatcaggttcataatggcacccaggctgaagggtacgcagcaggtgtcgcccattccgtgccacagaacgaccggcaggacctccggattggttcctcctttcgtcgggctccaccatatgtagctcagcacgagggaaaagatcaggaacagcaaaaataaaatgcatgaaaaacgagaacagcagatagaaatcattgttgttggagtgcaatttttgcaaatcaaattagtcgtctgctatcgataatatatggttcgataatataatcgggatatttcatgtacgggatgtacctggtcttatttatacctaaaggtaatttcgtactgcgtgctttaacgcaacatgaaaaatactgcaactatttttcctttcaaggcaacaggcttgactatataactgttcaattaggtgcatttttcgaagccctcgtctacattgctgcatttattggtactttattgtgcagctgtgaacagaaaatttacattttccaacactggcgtctaagcaaaagtagaatgttgtgaataccccgaacggtaaacaaatgctaaacagctgatagcaataacacattttattcagcgagtttgtttctttcgatttaaactcgagttttaatgtggtttactatttaaacgtgacaaagtactattgttaagtatgccaaaacacggcttaagttgtttataaaaccggatgctggctcataacctaggtttccataaaaagcgccttttttcaaacatgaaggctgttttacaggatcggggtgtcataggcttatccctcgaagaatgcgatttggaaagaactttgcttggaggacagagtttccggtaagcgctatccatactaataatgaacatatgtactcaaaacaactttacatgccagatggcgatccatatgcgatggtaatagaacgaaatatggcggagtggtgttcaacacctactgggtgctccagcaagaagaatccttcataacttacgaggcatacggaaccagcagtcctttggccacgaaggactattcttccttgatatctgactacctacgtgttgatttcgacctaaaggtcaaccaaaaagattggttaagcaaagatgataactttgtgaagttcttgagtaagcctgtgcgcctcctttctcaggagccgttcgaaaacatttttagcttcctttgcagtcaga

SEQ ID NO: 3050 - DNA, 952 bp, DROSOPHILA
caacaacaatgatttctatctgctgttctcgtttttcatgcattttatttttgctgttcctgatcttttccctcgtgctgagctacatatggtggagcccgacgaaaggaggaaccaatccggaggtcctgccggtcgttctgtggcacggaatgggcgacacctgctgcgtacccttcagcctgggtgccattatgaacctgatcgtggagcaaacaaagggcggctatgtgcgatccctgcagatcggcggcaatgttttgatagactggcagagcggcttcttcatacatcccaacgaacaggtggattacgtttgcaagcaactactgcaggatgagcacctggccaagggataccacgccatcggattctcgcaaggcggccagtttctgcgtgcggttgccgaacgttgcccgaatccgccaatgaggaaccttatcacactcggtgggcagcaccagggcatcttcggactgcccatgtgccccaccttaaccgaaaagccctgtgattatatcacgaggctactggacaacgccgcctacgcacctgaagtgcagaaggcattggttcaggccacctactggcacgacccgatcatggagaacaaataccgcctgggcagcacatttctcgcggacattaacaacgagctcttcatcaacaagttctacattgagaatctgcaaaagcttaagaaatttgtgatggtgcagttcctaaacgacacaattgtccagccgaaggagtcccagtggtttcaatactacaccactgggcagaacaaagtcatccagccctttactgagagcaaagtctatcaggactgggactggacaagatgcatcgacaaggacaacttgtctttctcggcgtcgaaggtgatcacttggccatatccaaggcctggtttatccagaacatagtgcctctcttactcgaaaaataa

SEQ ID NO: 3051 - protein, 306 aa, DROSOPHILA
MISICCSRFSCILFLLFLIFSLVLSYIWWSPTKGGTNPEVLPVVLWHGMGDTCCVPFSLGAIMNLIVEQTKGGYVRSLQIGGNVLIDWQSGFFIHPNEQVDYVCKQLLQDEHLAKGYHAIGFSQGGQFLRAVAERCPNPPMRNLITLGGQHQGIFGLPMCPTLTEKPCDYITRLLDNAAYAPEVQKALVQATYWHDPIMENKYRLGSTFLADINNELFINKFYIENLQKLKKFVMVQFLNDTIVQPKESQWFQYYTTGQNKVIQPFTESKVYQDWDWTRCIDKDNLSFSASKVITWPYPRPGLSRT

SEQ ID NO: 3052 - DNA, 3355 bp, DROSOPHILA
aaactgaaactagagagcggccaaatcaatccggagtccatgcccgataggatcgtggtggagccaacacgcagcgaaatacccaagcaggaggctttgcgattcatcgaggagctcattgagcacgaggatgccctcttcatggagcgagacttcatccaactttcccagcagctgcgcgaatgtttgggcctgcggcgcgccaatgtgggcaaatgcctggagatcctcgagcagttcaaggaggtggagttcaccaagttgatgctgctgcgcaatccggagtgcgtggacataatgcgccgacttcgccggtatgtgggcaatctggagctctggaaaatggacctgtccgacgaggtggagttcaaggagagggcgcagaccatacgcaaggtctcctctggcatatacgatggcttcaagagtctcttcaatccggagcccgagagcgaggacaacttttggatcgacttctgcgaaaaggtaaaaatctacaagacctatacgaaaaatatcaacgaaaaccttcgcgtcgggatgaacgagcgcggatataatagcctggttttggccaaggaggccgccgcttcagccggatcggctccacagtaaatgatcgaggaccagttctgctggaccaattacatgataaggtaggatgggaaaccgcaaaccgctgagttgaaacacatcttcaagaatcctctttcttgcagttactcgtaagcgttacaaaccaggcaacttaaagaccgtgctttggatgacaaagttttgatgagccaagtgggctatgcttaattctaggttaaaaattcagctaaattccttaattctgtttgcctgccaggtgcatgtcgtgttacgctgcgctgatggggcttttcctgctgcatccgcttattaccagactaaaaaaaaggtttttgcttcgaaacccctaaatattttctaagtttgtagatgatttgaataatattgaattaaatatagatggtacatacaattcgcaacggctgttttatttcgtcgttatcctaaacattctaagtaaacattaaaacaaaaaaaaaaacaatctacgaagtttaattcttagtctagggataagtaatcattagaaagttagggagctctattcctagcattaattaacctataagtgagcacaattagctctccctggcgtctcctattccatccggcagaatggcgaacatggcctccgattccggcaaacagggcgagtcgtagatcttgcagatgcgggtttcgcctttacccttgcgcagatacagccgcgtggttgaggagtgggccatgatgtgcccgccaatgggcttcttggcatcaaacatgccgggtgcgccgtccagcgaggcagtaacctggttagtaattaccacagccactccgaactcatcggccaggcgttgaagcatgcgcagaaataagcccaaatggttttgcctggcggccagctccccgcgaccaatataatcggatctgtagagcgccatggcactgtccacaatcagcaaagcgtatctggactcaaagagcatgcccgccgccatctggatgagcttggtctgctgatctgagttgtgggcacgggtgaaggccacattgtccagcacctcggattcattcagtttgtacctttgcgcgatggcagccaaacgctccggacggaaggtgttctccgtgtcgatgtacatgcacttgccctcgccgcccttctggctgatgggcagctggcaggttactgccagagtgtggcacaattgggtctttccgcagcggaactcgccaaagatctcggtaatggatcccgtctcaatgccgccgcccagcagtttatccagctccttggagcccgtgctcagctgcacgacatcggcacgcatttgatagaaggtgcgagcactaaggaagcccagaggcaccagtttgttagcctccgtgatgatctgctccaccttgccgccgcccaagccgggaatggccatcagttgcttcttggtggcattggccaccgactccacggtgtgcagactggcctgctggagcagcttgatgtccttggccgtgatgctgccgccctaggaggaggatatcgtagggaatgcccataataatcctggtcgagatcgcagcctactcactattaacttagtcacgctgagtggaccttcttcctcctcctcttcctgctgtgcctgaacattcgttagcttctccatttgacagtttcgaagttaaatttgactatttgttgtttcgagtttcgttatttaaattgcacgtcttgcgtgagagaatttcgacaaagactgcgcggcgcgcaattcactgcaaaatcagtttgccaatcgccccgaacgcacaaaactctatcactacagaggatcccgcttaaaaggaacgcgcaagatcaccatggcgaactattactatttcgacatcaaactgtgagtagaatgatgttctgcggtcattaatataaacttggttgttattaaattcagtaaatatattcatttatttaatagtaaacttcgggatccgactgcagttgctttgaccccatctctgtttcgaagctgcgttcttgacgccctggacagtttcttctgcgaggagaaacccacactggagatcgtgaagttctgcgcccagcaacatcgtgttatctttcgagtgccagagcaactgcacgacatgacccgcatatccattgagctcatcggtcactaccagcagataccctgtcattttgagatcttggaaacatccaaatcatcgctggactttgagaagagcattgaaaagactgtcgcggttgtgtccgatgattaggactagcgaattgtaatactcagtgtaatatacattataaccgtcatgaagaatttgaatttgaatcctaactgattttactgtgatctgatttttttgtcattcacaacgaactgaaatgatttctgtgatggctactaaatgagattaaaaagcggaaaaaccccataaacttgtaaccattttaataaaattgcatttaagtagttccaataacaatttaaatgttttaataaatggctataattttagctattttataactactcatgtccgttgtgagccgagctggcatctctggcggcgcacagctgtttgagaagcagaaagaaacagcaaaaaaggggagtaattacataaaaaaaacacactgaccggcaacttttggacgacttttcccgaagattccgccaaaaaaagaggggcactggcacttgcacccaaagcatgagtggttaccaatatctggacgtgaagatgtgagttccgg

SEQ ID NO: 3053 - DNA, 1292 bp, DROSOPHILA
attgcgcgccgcgcagtctttgtcgaaattctctcacgcaagacgtgcaatttaaataacgaaactcgaaacaacaaatagtcaaatttaacttcgaaactgtcaaatggagaagctaacgaatgttcaggcacagcaggaagaggaggaggaagaaggtccactcagcgtgactaagttaataggcggcagcatcacggccaaggacatcaagctgctccagcaggccagtctgcacaccgtggagtcggtggccaatgccaccaagaagcaactgatggccattcccggcttgggcggcggcaaggtggagcagatcatcacggaggctaacaaactggtgcctctgggcttccttagtgctcgcaccttctatcaaatgcgtgccgatgtcgtgcagctgagcacgggctccaaggagctggataaactgctgggcggcggcattgagacgggatccattaccgagatctttggcgagttccgctgcggaaagacccaattgtgccacactctggcagtaacctgccagctgcccatcagccagaagggcggcgagggcaagtgcatgtacatcgacacggagaacaccttccgtccggagcgtttggctgccatcgcgcaaaggtacaaactgaatgaatccgaggtgctggacaatgtggccttcacccgtgcccacaactcagatcagcagaccaagctcatccagatggcggcgggcatgctctttgagtccagatacgctttgctgattgtggacagtgccatggcgctctacagatccgattatattggtcgcggggagctggccgccaggcaaaaccatttgggcttatttctgcgcatgcttcaacgcctggccgatgagttcggagtggctgtggtaattactaaccaggttactgcctcgctggacggcgcacccggcatgtttgatgccaagaagcccattggcgggcacatcatggcccactcctcaaccacgcggctgtatctgcgcaagggtaaaggcgaaacccgcatctgcaagatctacgactcgccctgtttgccggaatcggaggccatgttcgccattctgccggatggaataggagacgccagggagagctaattgtgctcacttataggttaattaatgctaggaatagagctccctaactttctaatgattacttatccctagactaagaattaaacttcgtagattgtttttttttttgttttaatgtttacttagaatgtttaggataacgacgaaataaaacagccgttgcgaattgtatgta

SEQ ID NO: 3054 - protein, 336 aa, DROSOPHILA
MEKLTNVQAQQEEEEEEGPLSVTKLIGGSITAKDIKLLQQASLHTVESVANATKKQLMAIPGLGGGKVEQIITEANKLVPLGFLSARTFYQMRADVVQLSTGSKELDKLLGGGIETGSITEIFGEFRCGKTQLCHTLAVTCQLPISQKGGEGKCMYIDTENTFRPERLAAIAQRYKLNESEVLDNVAFTRAHNSDQQTKLIQMAAGMLFESRYALLIVDSAMALYRSDYIGRGELAARQNHLGLFLRMLQRLADEFGVAVVITNQVTASLDGAPGMFDAKKPIGGHIMAHSSTTRLYLRKGKGETRICKIYDSPCLPESEAMFAILPDGIGDARES

SEQ ID NO: 3055 - DNA, 6287 bp, DROSOPHILA
acgtttgtcatatcagttgggcgattcagttcttgactttctatcgaaaaaacgtaattgaaaaaaagaaatgtatatgctaagtcatcgatagcgattagtaaaatcaatgtaatgtcataatgtttaaatgtaaaagttatagcatccaggtaactggtagagcaaatcgtaaacttcctccaagtttatacatatatagtaaaggtccccgctgtagataaccaaaatcgagtgccagtagtgcaattttaaaacgatccccaacaacctgtagcatcacgacatccccatgatccatgtcgaggtcagcagatactattttatgagcctcagagaggtcaacgatgtacatacatacatgcaagcccaagtcccgaaaacagacagacatacatacatatacacatcattgtaactgactacatatgtaaaaatgcttaaaatatttgtgataaagtaataatgttaatgataaggaataaaacgtaaatatattaatgagaatacattgagtttgaattaaagcaattcgagttgtattttcattgctgggaggcacaaggtttcctaaattctttttttagcaatctaaaaacgttaccatatcttcactcatttgaatgattttttgataccaatacaaaattattttgtagcaaagcagatgtttttgagcttgcaagatagctccatcgagattggaattaagttctatgctggctaataaacttatttgagtaaaatttaccaaaacgaattctcaacactaaagtactaaagtaaagtatggaaatgtaggacatgcagatgaccgccttcgcaaccccatttattgttaaaaatacgttactatttaaatttgaaaaatgtgtgccgttcacaatggacgccccgtcagccagtgttggtaagggtgcgcagcaactggataggtcagtgtccaaaagggactaacgcgtggcgagcataaacatctgtttgtcggagtcacaaaatgtaggaagtttatggtttataataattgattggattgctggcgcaactttggcgtccccgaaatttgaagtgtgttgtgagtgcttaacccacatgagtgcaaaattgccatggcaacgtgaatcgaacacgaacagcaacacccacacagagaccattgaagatccgcgcattgtggcgcagtattgcatcagcaactgcgtaagtgcagcacattgactccatttttgttttgctgatgaaatcgcagcgcgatttttgtttcttgtgaaattccgctctatgcttgccaagcttttgtttgttggttgcatgaattcggtaaacgcgacagttacttcccggaattcaaacggaaaggagctttccgcgaagcgtcctcaatcaatttcgagatagagatagagaataataacgcagctgacgcggtcaaaacaaaagcgcttgtgtagaaaatcaaatgcgaagcaaacgcggcgaggacaagacgcgaaaagctgtcaaaactacgcgccgaaaaaggaaagggtctggtcgatcagaaatccgctacgcaacacagattgcgtatctacataaaacgtaataatttaattgtgtgggagttatctcacaattaagaaggttcgtttttaaactaagtttccttatttgaacaacaatcgtagaactaaagaggtgtgtttgaattgtggaaagccaagcattaattgttgaataaaattatcaaacgtcgcggcttcgcatcaaaatcgtgaaaaagttaacttttatagttccagtgtcgaaggacgtaatggcgtgtgacgtaattaaacattgtatatcctgccttctaattgcaaaaataaagtaattagaattaaaacctataaatttaccatttatcgttagctttagtaattaaataggttcgtaataacatcccgcattaaatatttaggtaactttcttcttgtggaaattcactaagttaatttttttaagctcaacccccacttgctaaacaaaaaatacgttccatgaaagaactcaaacgccctagggtaaggtattgcgaaagcttttgaagtattcaggtgcttgttcttcggtcaacaaagcaaaacaatcgggagcaggttataaacaaaatcgaaaggcacccaaaagcggagagcacaagtacgcacacaactacgaactacaactacaaagcacagcactcagaacccagatagccgaacgaacaacaaattcgacctgggcaaatgaaaagcgcagccaaaatcgatattttgtgccagcgtcgcgcgcaaataggagctgctttagcgcttaatatctcgaataaactcgagcggattggtttgattagtgagccaaatatagggattatctggtaagatgtttggaacttgtcgtattatcgaccttctgttccacctgcccccgcgcgtgggctcgaaacaacggccagagtcgtggcaaacataaacaagcattttcaaggtcgctgcaagtcaaagacggccaaaaaaacaaatggggaaaatttcagttttgatggatacacataagcaaacggttccatcaaaaagatacatagaagttgaaaaataattgtttttaaagtgaaacaaatgacgtggtgtcgaaataaaattaaaaaaactttagtacaatattaaaagttatttcaacccaattatattgggtaattctcagactaaatacagtacagtatgagtaaacaaatcaaataatatttacttatgcatgtatctcattgctattatttcagccacggctgttcgaaaatctgtatgtatgtacataagtatgtacatatgtacattttcgatgtcgcaattggcccaaaaaatgttttcttctcaagacaaagagttcctttgtctaaacagaatttttaccatttacctcatctgaattttgtatttatatgatccacgcttcccttttgcagcaacacattatggagtccttcctgagtctctttgatcccaatcaggacgacggcttcgaggaagagcccgagctcaatggcaacagcagcggcggcggaagcagcagcagcgactatgagacggacgccaatgccaacgagtgcagcgtagtgagcgggatgcccaccgagcggggcaacctgatcttcgacttcgagcagggaatgctgccaccagagccgcagctcggaaatgtggagtacaagctgaagctggtcaacccgtcgaagcagcgattcgagcacctggtgacccagatgaagtggcgtctgcgcgagggaaacggcgaggccatctacgagattggagtatccgacgccggctatctgcagggactcagcgacaaggacatgaatgcctcgctcaccacgctcaagcagatggcccacagcctaggagccagtacctcagtgctgcggcgaaagaccatcgccgcccgacgcgccgtcgccgaggtactggtccgtaagatccccgacgaccagcacaacatcgaggttcgggtggcggtgctcggcggagctgatgcaggcaaatccactttgctgggcgtgcttacacaggacgagctggataacggacacggccgggcgcggctcaatatgtttaggcacatgcacgagattcagtctggtaatatgtcgttataagcactaaacacagatataaattaaattaagatgtttggcatccattttaaattgtcatcaataaggaatatatcagttgtactacattattcatacatctctcgtttacaaacttttttttaaattatatttatcactcacaaagtccggtttgtttgcttgaaaattaccaatttgctcctcttttccttaaggccgcacctcctgcatctcccacgagacgcttggcttcgatgcactgggtaatgtggtcaactacaagtacaatgagatgatgacggcagaggagattagcgacaggtccagcaagctggttaccttcatggatctagccggacaccgacgctacatgcgcaccaccgtgcaggcactgagtggatactcaccccactacgccatgctggtggtatcggcgggcagcggttgcaacgacaccaccgaggagcacttggctatcgtgcgggcactggacatgcccttctttgtattggtcacgaagacagatatcacatcgccggacgcgacggtacaggagttgtgcaacctgctcaccaccattgggtgccggaaggttccctttgtggtgaccaacacggatgaggccatctccgccgggtcaaaccagatctccgagaacattgtgcccatcttttgcgtatcgaatgtgaccggcacgggactcaacctagtcacaaagtttctgtacgtcctttcgcccggaatcagcaacgccgagaaggatcgactcgagcaggagtcttgcgagttccaggtggacgagatcttccgggtctctgacgtcggacccgttgtgggcggtctacttgtccagggcgtgctgaccgagaatatggcaatgaagattggtccgcttcccgatggtagctttcatcccgttactgttaatactatccaccgaaacaaggctccttgccgagttgtccgagctggtcagagcgcttcgctgtctttcagtatggatcaggatgtgcccacgctacgaagtggcatggttcttttgggtgatattggaaatagtctggatgagccctacgggaccttcttcttccaagtgagttgctagttttcatttatcgttaccaaataaatacatcaacttccctttgcaggccaaggtgtccgtgctgttccacgccacggccatctatgtcggcttccaaaccacagtccacataggcagcattcgccagacggccgtcattcggggcattatgggcggcgagcgactgggcacaaacgattgtgcttcggtgatgttcgagttcgtcggccacccggagtacgtgcgtcctggaatgcgcatcctgttccgcgagggcaccagcaaaggaatcggagttgtcacgcaggtgtttccggtcaacaagacaggcataaagtagagaagcgggccagatggatagttccaatgacatatctatatatctcaaacaaagatgacatgtacatatacttaattagcaattagagggaggcgttaaatcttaggcagatcttctgtacacttagtttcgggttctgtgatttttcgtttaagctcggctcacaatcggatgttgtgagtaatccttctcaattaaccttatttcattaaaatccaccccaaaatgcatacaatgttgctttcaattcgcgtccgagccaaagagtataaataattaccgaagtattaatttttttccttctagcagatgtacatatatatgtacatatgatcaaaaccgactaactttaagcaacatttaccatcaattctatggtatacaaagacgaaaaagtgctcaacaatttgtttatttctgtctactgctaatgtgctcatcttgactactgttatcacttgttgccgggacactggcgccaccttcaatttcctccgccttggctggcacttcggatgtgaaccggaagaggacgggcacctctcctatggagggatttccgttcgcttccaacaggcgaatccacgagagcaatgagtcctttgtggaggtgcctgtggcacagatggccataatggttccgtcgtcctgttggtggacagagcgcagctttcccagctggttgtgtcgccttggtggagcacgaccaaagaagggtacttcgatgtgggagacatcgtcctcgtccagctgccgctcatctaattcagacaggaactcagaatctgcatcagcgcgcagggtaaagtagttgatccggcgattcctaagccatatgtgaaagggtccctcgatgtacagagctttctggcgagagtgctcccgcagcagtttctcctgctcgggactcattccgctcacgatccacgtatcgtcaatggcatccttcagctcgctggtctcgaaaaccgtgattttggaccgcaggtcgaccgtgcacatccgctctagcgccagcttggccatttccaatgtatcatccggaacaggatcgggcagtggccacggtgataggttcttaaactttggcatccagtacatcatgcgccaatacttgcgcagtggatgtccctgcctgccaaacacattaagcagcatcgcctccatctcgtgatcgggcatcaccccgcaatcttccatctgctcaagcagatcaatgatacactgct

SEQ ID NO: 3056 - DNA, 2253 bp, DROSOPHILA
taggaagtttatggtttataataattgattggattgctggcgcaactttggcgtccccgaaatttgaagtgtgttgtgagtgcttaacccacatgagtgcaaaattgccatggcaacgtgaatcgaacacgaacagcaacacccacacagagaccattgaagatccgcgcattgtggcgcagtattgcatcagcaactgccaacacattatggagtccttcctgagtctctttgatcccaatcaggacgacggcttcgaggaagagcccgagctcaatggcaacagcagcggcggcggaagcagcagcagcgactatgagacggacgccaatgccaacgagtgcagcgtagtgagcgggatgcccaccgagcggggcaacctgatcttcgacttcgagcagggaatgctgccaccagagccgcagctcggaaatgtggagtacaagctgaagctggtcaacccgtcgaagcagcgattcgagcacctggtgacccagatgaagtggcgtctgcgcgagggaaacggcgaggccatctacgagattggagtatccgacgccggctatctgcagggactcagcgacaaggacatgaatgcctcgctcaccacgctcaagcagatggcccacagcctaggagccagtacctcagtgctgcggcgaaagaccatcgccgcccgacgcgccgtcgccgaggtactggtccgtaagatccccgacgaccagcacaacatcgaggttcgggtggcggtgctcggcggagctgatgcaggcaaatccactttgctgggcgtgcttacacaggacgagctggataacggacacggccgggcgcggctcaatatgtttaggcacatgcacgagattcagtctggccgcacctcctgcatctcccacgagacgcttggcttcgatgcactgggtaatgtggtcaactacaagtacaatgagatgatgacggcagaggagattagcgacaggtccagcaagctggttaccttcatggatctagccggacaccgacgctacatgcgcaccaccgtgcaggcactgagtggatactcaccccactacgccatgctggtggtatcggcgggcagcggttgcaacgacaccaccgaggagcacttggctatcgtgcgggcactggacatgcccttctttgtattggtcacgaagacagatatcacatcgccggacgcgacggtacaggagttgtgcaacctgctcaccaccattgggtgccggaaggttccctttgtggtgaccaacacggatgaggccatctccgccgggtcaaaccagatctccgagaacattgtgcccatcttttgcgtatcgaatgtgaccggcacgggactcaacctagtcacaaagtttctgtacgtcctttcgcccggaatcagcaacgccgagaaggatcgactcgagcaggagtcttgcgagttccaggtggacgagatcttccgggtctctgacgtcggacccgttgtgggcggtctacttgtccagggcgtgctgaccgagaatatggcaatgaagattggtccgcttcccgatggtagctttcatcccgttactgttaatactatccaccgaaacaaggctccttgccgagttgtccgagctggtcagagcgcttcgctgtctttcagtatggatcaggatgtgcccacgctacgaagtggcatggttcttttgggtgatattggaaatagtctggatgagccctacgggaccttcttcttccaagccaaggtgtccgtgctgttccacgccacggccatctatgtcggcttccaaaccacagtccacataggcagcattcgccagacggccgtcattcggggcattatgggcggcgagcgactgggcacaaacgattgtgcttcggtgatgttcgagttcgtcggccacccggagtacgtgcgtcctggaatgcgcatcctgttccgcgagggcaccagcaaaggaatcggagttgtcacgcaggtgtttccggtcaacaagacaggcataaagtagagaagcgggccagatggatagttccaatgacatatctatatatctcaaacaaagatgacatgtacatatacttaattagcaattagagggaggcgttaaatcttaggcagatcttctgtacacttagtttcgggttctgtgatttttcgtttaagctcggctcacaatcggatgttgtgagtaatccttctcaattaaccttatttcattaaaatccaccccaaaatgc

SEQ ID NO: 3057 - protein, 604 aa, DROSOPHILA; identical to SEQ ID NO: 3048

SEQ ID NO: 3058 - DNA, 5820 bp, DROSOPHILA
gttaatgataaggaataaaacgtaaatatattaatgagaatacattgagtttgaattaaagcaattcgagttgtattttcattgctgggaggcacaaggtttcctaaattctttttttagcaatctaaaaacgttaccatatcttcactcatttgaatgattttttgataccaatacaaaattattttgtagcaaagcagatgtttttgagcttgcaagatagctccatcgagattggaattaagttctatgctggctaataaacttatttgagtaaaatttaccaaaacgaattctcaacactaaagtactaaagtaaagtatggaaatgtaggacatgcagatgaccgccttcgcaaccccatttattgttaaaaatacgttactatttaaatttgaaaaatgtgtgccgttcacaatggacgccccgtcagccagtgttggtaagggtgcgcagcaactggataggtcagtgtccaaaagggactaacgcgtggcgagcataaacatctgtttgtcggagtcacaaaatgtaggaagtttatggtttataataattgattggattgctggcgcaactttggcgtccccgaaatttgaagtgtgttgtgagtgcttaacccacatgagtgcaaaattgccatggcaacgtgaatcgaacacgaacagcaacacccacacagagaccattgaagatccgcgcattgtggcgcagtattgcatcagcaactgcgtaagtgcagcacattgactccatttttgttttgctgatgaaatcgcagcgcgatttttgtttcttgtgaaattccgctctatgcttgccaagcttttgtttgttggttgcatgaattcggtaaacgcgacagttacttcccggaattcaaacggaaaggagctttccgcgaagcgtcctcaatcaatttcgagatagagatagagaataataacgcagctgacgcggtcaaaacaaaagcgcttgtgtagaaaatcaaatgcgaagcaaacgcggcgaggacaagacgcgaaaagctgtcaaaactacgcgccgaaaaaggaaagggtctggtcgatcagaaatccgctacgcaacacagattgcgtatctacataaaacgtaataatttaattgtgtgggagttatctcacaattaagaaggttcgtttttaaactaagtttccttatttgaacaacaatcgtagaactaaagaggtgtgtttgaattgtggaaagccaagcattaattgttgaataaaattatcaaacgtcgcggcttcgcatcaaaatcgtgaaaaagttaacttttatagttccagtgtcgaaggacgtaatggcgtgtgacgtaattaaacattgtatatcctgccttctaattgcaaaaataaagtaattagaattaaaacctataaatttaccatttatcgttagctttagtaattaaataggttcgtaataacatcccgcattaaatatttaggtaactttcttcttgtggaaattcactaagttaatttttttaagctcaacccccacttgctaaacaaaaaatacgttccatgaaagaactcaaacgccctagggtaaggtattgcgaaagcttttgaagtattcaggtgcttgttcttcggtcaacaaagcaaaacaatcgggagcaggttataaacaaaatcgaaaggcacccaaaagcggagagcacaagtacgcacacaactacgaactacaactacaaagcacagcactcagaacccagatagccgaacgaacaacaaattcgacctgggcaaatgaaaagcgcagccaaaatcgatattttgtgccagcgtcgcgcgcaaataggagctgctttagcgcttaatatctcgaataaactcgagcggattggtttgattagtgagccaaatatagggattatctggtaagatgtttggaacttgtcgtattatcgaccttctgttccacctgcccccgcgcgtgggctcgaaacaacggccagagtcgtggcaaacataaacaagcattttcaaggtcgctgcaagtcaaagacggccaaaaaaacaaatggggaaaatttcagttttgatggatacacataagcaaacggttccatcaaaaagatacatagaagttgaaaaataattgtttttaaagtgaaacaaatgacgtggtgtcgaaataaaattaaaaaaactttagtacaatattaaaagttatttcaacccaattatattgggtaattctcagactaaatacagtacagtatgagtaaacaaatcaaataatatttacttatgcatgtatctcattgctattatttcagccacggctgttcgaaaatctgtatgtatgtacataagtatgtacatatgtacattttcgatgtcgcaattggcccaaaaaatgttttcttctcaagacaaagagttcctttgtctaaacagaatttttaccatttacctcatctgaattttgtatttatatgatccacgcttcccttttgcagcaacacattatggagtccttcctgagtctctttgatcccaatcaggacgacggcttcgaggaagagcccgagctcaatggcaacagcagcggcggcggaagcagcagcagcgactatgagacggacgccaatgccaacgagtgcagcgtagtgagcgggatgcccaccgagcggggcaacctgatcttcgacttcgagcagggaatgctgccaccagagccgcagctcggaaatgtggagtacaagctgaagctggtcaacccgtcgaagcagcgattcgagcacctggtgacccagatgaagtggcgtctgcgcgagggaaacggcgaggccatctacgagattggagtatccgacgccggctatctgcagggactcagcgacaaggacatgaatgcctcgctcaccacgctcaagcagatggcccacagcctaggagccagtacctcagtgctgcggcgaaagaccatcgccgcccgacgcgccgtcgccgaggtactggtccgtaagatccccgacgaccagcacaacatcgaggttcgggtggcggtgctcggcggagctgatgcaggcaaatccactttgctgggcgtgcttacacaggacgagctggataacggacacggccgggcgcggctcaatatgtttaggcacatgcacgagattcagtctggtaatatgtcgttataagcactaaacacagatataaattaaattaagatgtttggcatccattttaaattgtcatcaataaggaatatatcagttgtactacattattcatacatctctcgtttacaaacttttttttaaattatatttatcactcacaaagtccggtttgtttgcttgaaaattaccaatttgctcctcttttccttaaggccgcacctcctgcatctcccacgagacgcttggcttcgatgcactgggtaatgtggtcaactacaagtacaatgagatgatgacggcagaggagattagcgacaggtccagcaagctggttaccttcatggatctagccggacaccgacgctacatgcgcaccaccgtgcaggcactgagtggatactcaccccactacgccatgctggtggtatcggcgggcagcggttgcaacgacaccaccgaggagcacttggctatcgtgcgggcactggacatgcccttctttgtattggtcacgaagacagatatcacatcgccggacgcgacggtacaggagttgtgcaacctgctcaccaccattgggtgccggaaggttccctttgtggtgaccaacacggatgaggccatctccgccgggtcaaaccagatctccgagaacattgtgcccatcttttgcgtatcgaatgtgaccggcacgggactcaacctagtcacaaagtttctgtacgtcctttcgcccggaatcagcaacgccgagaaggatcgactcgagcaggagtcttgcgagttccaggtggacgagatcttccgggtctctgacgtcggacccgttgtgggcggtctacttgtccagggcgtgctgaccgagaatatggcaatgaagattggtccgcttcccgatggtagctttcatcccgttactgttaatactatccaccgaaacaaggctccttgccgagttgtccgagctggtcagagcgcttcgctgtctttcagtatggatcaggatgtgcccacgctacgaagtggcatggttcttttgggtgatattggaaatagtctggatgagccctacgggaccttcttcttccaagtgagttgctagttttcatttatcgttaccaaataaatacatcaacttccctttgcaggccaaggtgtccgtgctgttccacgccacggccatctatgtcggcttccaaaccacagtccacataggcagcattcgccagacggccgtcattcggggcattatgggcggcgagcgactgggcacaaacgattgtgcttcggtgatgttcgagttcgtcggccacccggagtacgtgcgtcctggaatgcgcatcctgttccgcgagggcaccagcaaaggaatcggagttgtcacgcaggtgtttccggtcaacaagacaggcataaagtagagaagcgggccagatggatagttccaatgacatatctatatatctcaaacaaagatgacatgtacatatacttaattagcaattagagggaggcgttaaatcttaggcagatcttctgtacacttagtttcgggttctgtgatttttcgtttaagctcggctcacaatcggatgttgtgagtaatccttctcaattaaccttatttcattaaaatccaccccaaaatgcatacaatgttgctttcaattcgcgtccgagccaaagagtataaataattaccgaagtattaatttttttccttctagcagatgtacatatatatgtacatatgatcaaaaccgactaactttaagcaacatttaccatcaattctatggtatacaaagacgaaaaagtgctcaacaatttgtttatttctgtctactgctaatgtgctcatcttgactactgttatcacttgttgccgggacactggcgccaccttcaatttcctccgccttggctggcacttcggatgtgaaccggaagaggacgggcacctctcctatggagggatttccgttcgcttccaacaggcgaatccacgagagcaatgagtcctttgtggaggtgcctgtggcacagatggccataatggttccgtcgtcctgttggtggacagagcgcagctttcccagctggttgtgtcgccttggtggagcacgaccaaagaagggtacttcgatgtgggagacatcgtcctcgtccagctgccgctcatctaattcagacaggaactcagaatctgcatcagcgcgcagggtaaagtagttgatccggcgattcctaagccatatgtgaaagggtccctcgatgtacagagctttctggcgagagtgctcccgcagcagtttctcctgctcgggactcattccgctcacgatccacgtatcgtcaatggcatccttcagctcgctggtctcgaaaaccgtgattttggaccgcaggtcgaccgtgcacatccgctctagcgccagcttggccatttccaatgtatcatccggaacaggatcgggcagtggccacggtgataggttcttaaactttggcatccagtacatcatgcgccaatacttgcgcagtggatgtccctgcctgccaaacacattaagcagcatcgcctccatctcgtgatcgggcatcaccccgcaatcttccatctgctcaagcagatcaatgatacactgct

SEQ ID NO: 3059 - DNA, 2209 bp, DROSOPHILA
caaacgcggcgaggacaagacgcgaaaagctgtcaaaactacgcgccgaaaaaggaaagggtctggtcgatcagaaatccgctacgcaacacagattgcgtatctacataaaacgtaataatttaattgtgtgggagttatctcacaattaagaagcaacacattatggagtccttcctgagtctctttgatcccaatcaggacgacggcttcgaggaagagcccgagctcaatggcaacagcagcggcggcggaagcagcagcagcgactatgagacggacgccaatgccaacgagtgcagcgtagtgagcgggatgcccaccgagcggggcaacctgatcttcgacttcgagcagggaatgctgccaccagagccgcagctcggaaatgtggagtacaagctgaagctggtcaacccgtcgaagcagcgattcgagcacctggtgacccagatgaagtggcgtctgcgcgagggaaacggcgaggccatctacgagattggagtatccgacgccggctatctgcagggactcagcgacaaggacatgaatgcctcgctcaccacgctcaagcagatggcccacagcctaggagccagtacctcagtgctgcggcgaaagaccatcgccgcccgacgcgccgtcgccgaggtactggtccgtaagatccccgacgaccagcacaacatcgaggttcgggtggcggtgctcggcggagctgatgcaggcaaatccactttgctgggcgtgcttacacaggacgagctggataacggacacggccgggcgcggctcaatatgtttaggcacatgcacgagattcagtctggccgcacctcctgcatctcccacgagacgcttggcttcgatgcactgggtaatgtggtcaactacaagtacaatgagatgatgacggcagaggagattagcgacaggtccagcaagctggttaccttcatggatctagccggacaccgacgctacatgcgcaccaccgtgcaggcactgagtggatactcaccccactacgccatgctggtggtatcggcgggcagcggttgcaacgacaccaccgaggagcacttggctatcgtgcgggcactggacatgcccttctttgtattggtcacgaagacagatatcacatcgccggacgcgacggtacaggagttgtgcaacctgctcaccaccattgggtgccggaaggttccctttgtggtgaccaacacggatgaggccatctccgccgggtcaaaccagatctccgagaacattgtgcccatcttttgcgtatcgaatgtgaccggcacgggactcaacctagtcacaaagtttctgtacgtcctttcgcccggaatcagcaacgccgagaaggatcgactcgagcaggagtcttgcgagttccaggtggacgagatcttccgggtctctgacgtcggacccgttgtgggcggtctacttgtccagggcgtgctgaccgagaatatggcaatgaagattggtccgcttcccgatggtagctttcatcccgttactgttaatactatccaccgaaacaaggctccttgccgagttgtccgagctggtcagagcgcttcgctgtctttcagtatggatcaggatgtgcccacgctacgaagtggcatggttcttttgggtgatattggaaatagtctggatgagccctacgggaccttcttcttccaagccaaggtgtccgtgctgttccacgccacggccatctatgtcggcttccaaaccacagtccacataggcagcattcgccagacggccgtcattcggggcattatgggcggcgagcgactgggcacaaacgattgtgcttcggtgatgttcgagttcgtcggccacccggagtacgtgcgtcctggaatgcgcatcctgttccgcgagggcaccagcaaaggaatcggagttgtcacgcaggtgtttccggtcaacaagacaggcataaagtagagaagcgggccagatggatagttccaatgacatatctatatatctcaaacaaagatgacatgtacatatacttaattagcaattagagggaggcgttaaatcttaggcagatcttctgtacacttagtttcgggttctgtgatttttcgtttaagctcggctcacaatcggatgttgtgagtaatccttctcaattaaccttatttcattaaaatccaccccaaaatgc

SEQ ID NO: 3060 - protein, 604 aa, DROSOPHILA; identical to SEQ ID NO: 3048

SEQ ID NO: 3061 - DNA, 2567 bp, DROSOPHILA
gcaatgccgctactgccccaagagcttctcgcgcccggtgaacaccctgcgccacatgcgcatgcactgggacaagaagaagtaccagtgcgagaagtgcggcctgaggttctcccaggacaacctactctacaaccaccggctgcgccacgaggctgaggagaaccccatcatatgcagcatctgcaatgtgtcgttcaagtcgcgcaagaccttcaaccatcacacgctcattcacaaggagaaccgcccaagacactactgctccgtctgccccaagtccttcaccgagcgctacaccctcaagatgcacatgaagacccacgagggcgacgtcgtttacggggttcgcgaggaggcgcccgccgacgagcagcaggtggtggaggagctgcatgtggacgtcgacgaatcggaggcggccgtcaccgtcatcatgtccgacaacgatgagaacagcggcttctgtctcatttgcaataccaacttcgagaacaagaaggagctcgaacaccacttgcaatttgatcacgacgtggtcttgaaataagctacattgcctacaataagtaattgtttatctttccctagtgtatttcctcctctttgtacttgattattgtagattcctacaaaatataatttactggtatttcaattactgcgtttcatttagacagaagcatttccgataataattgtacactgttctgtaaaaataattgcgaatatatatatgatttcatataaacaacctctttcaatactaagggggaaaaatgtaaaatatataacaaaattccctgataaggattgatgctgtctagttttggcacgtcaaggaatttatattggtctaatatctcgaggcagttgctatcagaaagaaagaccgcaatggtctggattaactgatatccatccagataatgcacatgttatcaatggtgctgctatcccaatctcagaaatgacaattgaactcggcactcgcacatcattttttaactaaaagtccggtatattaacgtttacaaatgtgtattccgaccacgttacaagaactctcaagaatcttaagcttactcgttctcttgagaacgcaggcgaccgttggggttggtgaggcggaccgacagctgcttggcgcgctcgacaatctccttgcgcttcttggaggagacgccgtgggcgatctcgccgcagtaaacgcggttctgcatgagcaggacctccagctcgcgcacgttgtgcaccaggaacttcttgaatccggtgggcagcatgtggcgggtgcgcttgttcgatccgtaaccgatgttgggcatcagatactgtcccttgaagcggcgacgcactctgttgtcgatacccttgggcttgcgccatttgtgctgcaaggagacatgttgattaaacacgggtacaatttggcacaatcctcgttggcactcaccgacagcttagcatatcgatccgactggtggcggatgaagtgcttggtgcgcttcttcacgatcttgggcctgtatgctgggcggatggtcatcttgaagctggaaggacacaacaaaagtagccattagtgcactgacccactggaaatatcacttatcaagctaataacacacaaggtgtcccactaatgcataattcaaccaggttgggctagcttcttgggcagtatccattgagtttccggtgtgtcgccccacgaattcccatcacaaacagaagccatttggcgaactctcacaggaatcgatccgaattcggtcgaaatacgagccgcacacttgcgaacagcgcacggactaacgcagttcaactcgaaaccgccaaaaacgacaattacggcttaaaattaatggaaatacacgtgggcccaaaatcacgcacataccttgccggaaaccagaagcgaaaagaaaaagctggtggtgtgaaaaaacatcgatacgtcgtgcgtcgatgattcgccgatagtttcgttcatggcgatgccaagcgatatattgcggatcatcgtgtaatgaatttaaacttgggcgcgtcaaataaggtgttgcaggtttaatcactatccgagcaactgcgacgattgcaactatgtgcaacaaaatatggaactattttcagcttggtggagtttgttatataattaaatatgctttgcctcttgacccactgtgcagtgtgaacatatttcatttacacactggatgcaacagctgttcaatagatgttttgcagcaccgtcatctgataaaaaacgataagaaagctgggaatgaaaaagtaaaaagctgacagaagcgatcaaggagcaggtgttcccgaggtttaggaggctaatacaaaagcatccaagtcgtggatttagagcacccaatgcataccagcacatgataagtttctgatccatagggtggtctttgcgtcagtggaacaagtacacagggtgattcggtcaaaataaagtgacagtgctgttaaacgcactgctaagaatattttaattatacggtgttatattaagtttgtaaattaccgaaaagggcgagtac

SEQ ID NO: 3062 - DNA, 505 bp, DROSOPHILA
tgtccttccagcttcaagatgaccatccgcccagcatacaggcccaagatcgtgaagaagcgcaccaagcacttcatccgccaccagtcggatcgatatgctaagctgtcgcacaaatggcgcaagcccaagggtatcgacaacagagtgcgtcgccgcttcaagggacagtatctgatgcccaacatcggttacggatcgaacaagcgcacccgccacatgctgcccaccggattcaagaagttcctggtgcacaacgtgcgcgagctggaggtcctgctcatgcagaaccgcgtttactgcggcgagatcgcccacggcgtctcctccaagaagcgcaaggagattgtcgagcgcgccaagcagctgtcggtccgcctcaccaaccccaacggtcgcctgcgttctcaagagaacgagtaagcttaagattcttgagagttcttgtaacgtggtcggaatacacatttgtaaacgttaatataccggacttttagttaaaaaa

SEQ ID NO: 3063 - protein, 134 aa, DROSOPHILA
MTIRPAYRPKIVKKRTKHFIRHQSDRYAKLSHKWRKPKGIDNRVRRRFKGQYLMPNIGYGSNKRTRHMLPTGFKKFLVHNVRELEVLLMQNRVYCGEIAHGVSSKKRKEIVERAKQLSVRLTNPNGRLRSQENE

SEQ ID NO: 3064 - DNA, 3063 bp, DROSOPHILA
agcgaattatctggctccacaatgatcttcagtttgcggcaggcgcaggcgtagctgctcttcttcttggacaggccattggccgagacggtgacgtgcagtcgagccgctggaaaggattcggagcgctcgcacttgacggcgaatgtggagtgattcaggcgctgcacacccggcaggtgctcctcctcctccgcgtacttgtacagctgccaaaggttctgcttctgctccaggctaatgttcaggttccacagcacctcgcgggacacgcggtagacctgcgccttcgcgaactcggcgcccagctcccggcaagctttcacatggacgcagtccgtcggctcgcctcccgttcgcttgcacgactccacgaagcactccgccttgctggacaccactgcagcgtccggctgcagcgacagcgtgacgtcctggatgaccacaaagttgcgcggctgctgctccttctccttggtcctcagcgagtagacagtggagcctggccgcagcgacaccagctgcacggcatcgagaacgttcctgcgctgcggacactcggaattcttgcagagcagcgcccggttgccattgatggcgccgcagtgaacacacttgcgaacgccgcgcatgactcttgcatcttaaattcccggaaaatggctataaaatgcgtttcttagttttcgcaaaagtttgccggcttttgatttgcgtggcgcagtgtgaccgtttcgcgcgctgatgccagcagggctggcacacacattctacatatgtgtgcattaaattaattttacttttgaattattgctacagtttttgcatacactacatatattttacatttatttttcataacatttgggctattccagccagcttgtgtaggcagtgctgcgcagccctggtcgcatcagccgcttgttatcgataaccaaattggctactttaataggaaatttgttatttcaatttaaaaagttgactttccgctaaaatgacgcatccgctggaggcgccgcagcgcagccgcaaataccccttcgtgcatatgcgcatcgcggaccacagcgcactggacaccatcgaggggcgccacaactgccgcctgtgcaaccgatcgcgcaagttcttctgctacagctgctgtgtgccggttggcgagctggaggagctgctgccacgtctggagctgccgctccaagtggacatcattaagcacaaaaaggaaatcgacggcaagagctcggcggtgcacgcggccgttctggcgccggcgcacgtgaggatccacacatttccggacattcccgactatcgcgaggaggcgggcgtagtgctcatattcccaagcgccactgcgcttgcggtgccgcagctcttcgcgcgcaatgtgcagcttcagatcggcgacaactacgggctgcccaagggccaccacatgggcaccatgctgcgcaggcgaatggacgaggtggaggtaaaggagctgcaggaggaggtagatgagccggagacggtgcgacgaacctggacgctagacaacctgcccgtccgccgagccgtcttcatagacagcacatggaaccagagtcgcgggatctacgcggacgccagggtgcgcggcctacgaacggtggtgctgcagaatcgactgtcgcaattctggcgccaccagcgcggcagtccgcgctggtatctggccaccatcgaggccattcaccagttcctcctggaggtgcacatcaatgcctggggcctgaacaccgcctatcgcggactcgataacctggagatcaccgcgggcttccatcagctggcagagccgctgaccaagacagctgccagtgagaatgtgggcagggaggcgccctacaatgggcagtacgacaatctgctcttcttcttcgcccacatgtacgatctcatccacaagtactatgaccacaacgacctcatcgcctaccgacgacccatctagcgttctaatggacatacatatgtatatatatatattatattggatgtagtgagaagtacacgtaactgctggcctaactaactactgatcccactgattctactgcttcttcttcttcttgccctcgtcgccggactcggagctcgacgacttggcgtccgtatcgatgggtttctgccatttgagcgcattgcgacggtacagcggccacggtggaatggtgatctgtgcaggaatctcgtgctgttagcaatggagctactaacacgacagctactcaccagcgaggagagcacaaatccggcgcccaggatgtacacggtctgtgagaactgctgcacgaaggctccgtagacgaggcccacaattccgaagaacgtgatgatgaagcgcgaccagcgctccgcctttccctgacccgcgaagtcctgcggcggtagagtgccgtgttagtgttatgtgctaatggttgcgaagcatacctaccatatgcgtctggatgtccaacattttgtgcaattcacaagctgcgattcaacaattttcggcgtaaacaattttcttttgcggcacgtcagcagccgaatggtgtgaccgtgccgagcgaaaaatgccaaggggatgagaatatactggaatttggaactcggtgaatttcccattatttttgtacatgcttatttccctctttttcaaaataagtgtgtttgaaaaatagcgaaattgtttgtagctttcaattgtgttttattattttaaatttaaaatatgcaaacaaaacggagattattactctctaaatgatgttttcctttgcagagtaagctcttgaaacaaaataaataagttcagttcaccttttcttatgcaaaatatgtaaaataagtttatagaaggcaaaaatgttgcatctttaaatgatttatataattttaaaccacgccaattaatgcaaactaatagcccatttaaaatacttaacttcatttacatatatgtatgcatgcatatctttaatgcaattatagtcattttattgaaaaggcttgcgatgtgaataatcgctcgttgttcataca

SEQ ID NO: 3065 - DNA, 1063 bp, DROSOPHILA
atgacgcatccgctggaggcgccgcagcgcagccgcaaataccccttcgtgcatatgcgcatcgcggaccacagcgcactggacaccatcgaggggcgccacaactgccgcctgtgcaaccgatcgcgcaagttcttctgctacagctgctgtgtgccggttggcgagctggaggagctgctgccacgtctggagctgccgctccaagtggacatcattaagcacaaaaaggaaatcgacggcaagagctcggcggtgcacgcggccgttctggcgccggcgcacgtgaggatccacacatttccggacattcccgactatcgcgaggaggcgggcgtagtgctcatattcccaagcgccactgcgcttgcggtgccgcagctcttcgcgcgcaatgtgcagcttcagatcggcgacaactacgggctgcccaagggccaccacatgggcaccatgctgcgcaggcgaatggacgaggtggaggtaaaggagctgcaggaggaggtagatgagccggagacggtgcgacgaacctggacgctagacaacctgcccgtccgccgagccgtcttcatagacagcacatggaaccagagtcgcgggatctacgcggacgccagggtgcgcggcctacgaacggtggtgctgcagaatcgactgtcgcaattctggcgccaccagcgcggcagtccgcgctggtatctggccaccatcgaggccattcaccagttcctcctggaggtgcacatcaatgcctggggcctgaacaccgcctatcgcggactcgataacctggagatcaccgcgggcttccatcagctggcagagccgctgaccaagacagctgccagtgagaatgtgggcagggaggcgccctacaatgggcagtacgacaatctgctcttcttcttcgcccacatgtacgatctcatccacaagtactatgaccacaacgacctcatcgcctaccgacgacccatctagcgttctaatggacatacatatgtatatatatatattatattggatgtagtgagaagtacacgtaactgctggcctaact

SEQ ID NO: 3066 - protein, 309 aa, DROSOPHILA
MRIADHSALDTIEGRHNCRLCNRSRKFFCYSCCVPVGELEELLPRLELPLQVDIIKHKKEIDGKSSAVHAAVLAPAHVRIHTFPDIPDYREEAGVVLIFPSATALAVPQLFARNVQLQIGDNYGLPKGHHMGTMLRRRMDEVEVKELQEEVDEPETVRRTWTLDNLPVRRAVFIDSTWNQSRGIYADARVRGLRTVVLQNRLSQFWRHQRGSPRWYLATIEAIHQFLLEVHINAWGLNTAYRGLDNLEITAGFHQLAEPLTKTAASENVGREAPYNGQYDNLLFFFAHMYDLIHKYYDHNDLIAYRRPI

SEQ ID NO: 3067 - DNA, 4556 bp, DROSOPHILA
taaaagtgaatacaattttttgcagtgcagttagcgtctcgctttacttcctctttatggttggctttttgtgttttccaatcagattagcatggtaaggggttaagagtacggggttaccaccgctgggaggggaccacatgaaagggtcaataatgggactcgagacgaagatgctgacatttatcaaacggaatatgcgatgcgtacaaccattagacactgcccactgatggacgtcggacgatggacaggcgagacgtgatcccagatacggctcatcaagtgcattgtcgtgggacaataaagggttaatcggctaacagagagattgcaatattatcttctgagcaaattggagttgggaagacagcaaaaattagcgaaagtagatccaaatattaagtgtatcaattgtaaggcgtatcacttgattccgcactctactcaactctccaaggacctctgtaatctgataggcttactgaaccaacagagagtagaaacaaagttttgctttattgtgattttacgaaataacctacaacttcaccattcccaaaaacacaatttctttttccttaaacattccagttttaaacaccttttttacagttttttcgttgtaagttggccaaaatatgtcacaaggctgaaaaacgcacttttttagtcagctggggtcctcagctaaagacccatatcaatatttgctttaatttggaaaaataatttttcggccaaatttcgcattttttgtaaggggtaacatcataaaaaatcgaaaaaattttcaaaccaaaaatttctctaaatgagttacccgtcgtttaggaatatttttacaagttcaacgaggtattccactccacaattggacgtgtctttcccaagatatagcactttttctgtgaaatccccatcgaaaattatcaacaagaataaaatcaccctcgttttccatctgaaaaaactccctcaaaaacaaacgcatatacagtttatttcgttacatatatattgttatttatttaagaacttgctcgtctaattgacagaaaaatataaagatataggatgtattgaatgggttgtgctgagtgtcttactatgcgaatgagcgattccacttaagcctaggcgaaatctcggcgattgcataatgtggagccccctcccgaggtgtacggaaatcacaagtggttgataagaaagaacagacgtggaattttgctgtgctggtttgaggatcgcagtcgaacggataatttattggccagtcgccgacttggctggtgatgatttaatagcggaccctcgggaaggctctctgggctgacagataacagataactcgactggctgataattttgatgcgtgactgggcgctgcgccttctctatctccacctccttacagggtcttgtcgaacaggaactcgcccagttcgccgttggtgtccatcatcttcttgagagtggtcagcttgccggcgagctcgcgctgtccgtggagctgctcctccagatagacaccggtcaggtagtccaccaggtggtagtggttgtagggcttgttctcgcaggtctggatcagcttgcggatggacttggtcaccttgatctccaggtcgagggcgtcggacagggcggcggcaccatcggtccactcctgcttggccacagtctgtgggggattcgccaggattagctgggcttttgggttttctaggcgagtcgtcgacttaccggcacattgatcagatcgctgactccctcggtcagttgaccgcgcatggacaggtactccaccagcttggatccgtgctcacgttcctccttggcggccttgaagaagtgctcggcgaatccagggcggttgacggtgtcgcgggagaagtaggcgcccatggccaagtactggtaggaggcgttgatctcctcctggatctgattgcgcatgccctttatgcaggcatccttcatgtccacccagtccttggtaatctcaggaacagccagggagcctgcaatgggataaggttgggttaagtcgggggaccacgataacaatatatggctagtattcagctttaaaaaatttatttttgtaatcagaacttaggtaaattttaatattttaaaaacctttgcactcttggtcttgaccttcatggcttaggttttgtttttcttttagttgatgctcttctcgctccctttgaagctctctcacgaaactcttgctttcttgcttggctgaggggtagggcgttgttggttattgcatttaagagggcgtaattgcataaacctttgaaattgcgcttgaaatgccgctattctagggcacaaaaaccgtgtgcaaaactgtaatggcctactctcccactctctctctctgtttttgtaactgcattggtaacgtgcgcagctctcgccgccatagtaacggcatttgttttcgtgtagtgccgtgtgcaaaaagcatggttcaccatgctagctcactcggcccgtaaaagccgtgtgcaaagagcgccttgaaatgtaacaacaaaaagtcaagcttatttataccgcaatattcatggaaatgaaagcgaaattcgcattatttaattatgaaaatttatgtataaaaactggttatcatttccccaaagcgcaacggaagtatcaataacttttaaatcaactggtttggtaacttcacttcattgacgaaagagagtgaaagagcgtcaaagagaaacggcgcatgctcttttcaacgcattacaaatgttttgcttctctttgcgtattgcgtcgaaatttattgttttttttccgatgacctgcctttgttttgtttgaaattctgatgaataaaacgtaacattagtacttacacttgaaatctccataggcctgggccaccacggccaacaggagcaggctagcaattagtttcaccatctttgatcgtcgaacgtagtctttacacaaaatcacagaacaaaaatttgtttttcactttagtttgatttgcttgaaatgcacaaatgagaatgaggcgactcgagttgagctacaatgttaaataggcgttgaaattgaaaatctagctgcctttacacacactggcgcagaaggcgtcgcctgcttcaatttgatgggcttgattgggattattttcgacttctcgaatgctttccagtaccttctgctgacagctttaatctgatttttcagtggagctaaggcctttctacgttgtgttttagcgaactcgaaagcgaactgtcgctccgaacggcgcacaaaacacttttaagcgcgcgcgctctcggtttttcttcgtgtgtgtgtgagtgatgggagagtgtgcactgttatcttttcaacatgtcgcccgttctttgttaaccgtttaaatggctgataattgaatattcccgataattgccgcactcaatgtgatacacacgtcctcaatatgggtatactttgtataaagtcgggtttcctagtcagataatccccacttactaagaagtaaatttatcaaatgcaatatggccgctcttttgagatgcgcatcagctgttctttgtttttgttttggccgtgggagagcaccacgtcatgtgttgccaggcggtttaattattgctgacaatttaattcacattttgtcaagttgatttgcacgttcgaaggggggatcagtcacccactttgataactgctaatatggcgacggctcttttttacgtgtcgcttgcagagctccaagaatgacacttgataagaaggatacatggtgggaaaacttacaaattacataatttgtttgttgattggggaaaccctacattatctccgaacccagcaataatatgtattgtaaatagcaacagtctcaagctcgatgctgctgtgaattaccaatatatcaaaacttaaaacattatcttaggaggtagatggtttatctgcagtttattttcaattctcatcgttagctgataaaactctcaggaaaccacttgaaatccaaagtgcagcgtccatattttgcacacgctgacaaccctgtcgtgagtcaccttccagcaggcgcagcaacaacagcactggcagcggccatatttgaatgacaccgaaatcccgcactgagcgcaaaacaacacatgcccatgcacgctctccaaaaccacacacacacagccatatcgatcgcatagaaagagacgtacgcgacgctataaacagcagttgattttcagagtttcaccaagaagcacataaagcgattgaattattaataaaagcacaggcactggaagtgagttttaatattactaactaactactttgtgagtgtttagttacgaaaactagaaaataatattctggaaactgtgtttttaaaccgaccaccatataaatttaaaaaccaaaacattccattggtggtggttttgttgttaaaaaagagcacagaaaattcaagaaaacgctacgacgcaaaacgaaaaaactcgcccaaaatgaaaacaaaagtgtct

SEQ ID NO: 3068 - DNA, 1627 bp, DROSOPHILA
catttgataaatttacttcttagtaagtggggattatctgactaggaaacccgactttatacaaagtatacccatattgaggacgtgtgtatcacattgagtgcggcaattatcgggaatattcaattatcagccatttaaacggttaacaaagaacgggcgacatgttgaaaagataacagtgcacactctcccatcactcacacacacacgaagaaaaaccgagagcgcgcgcgcttaaaagtgttttgtgcgccgttcggagcgacagttcgctttcgagttcgctaaaacacaacgtagaaaggccttagctccactgaaaaatcagattaaagctgtcagcagaaggtactggaaagcattcgagaagtcgaaaataatcccaatcaagcccatcaaattgaagcaggcgacgccttctgcgccagtgtgtgtaaaggcagctagattttcaatttcaacgcctatttaacattgtagctcaactcgagtcgcctcattctcatttgtgcatttcaagcaaatcaaactaaagtgaaaaacaaatttttgttctgtgattttgtgtaaagactacgttcgacgatcaaagatggtgaaactaattgctagcctgctcctgttggccgtggtggcccaggcctatggagatttcaagtgctccctggctgttcctgagattaccaaggactgggtggacatgaaggatgcctgcataaagggcatgcgcaatcagatccaggaggagatcaacgcctcctaccagtacttggccatgggcgcctacttctcccgcgacaccgtcaaccgccctggattcgccgagcacttcttcaaggccgccaaggaggaacgtgagcacggatccaagctggtggagtacctgtccatgcgcggtcaactgaccgagggagtcagcgatctgatcaatgtgccgactgtggccaagcaggagtggaccgatggtgccgccgccctgtccgacgccctcgacctggagatcaaggtgaccaagtccatccgcaagctgatccagacctgcgagaacaagccctacaaccactaccacctggtggactacctgaccggtgtctatctggaggagcagctccacggacagcgcgagctcgccggcaagctgaccactctcaagaagatgatggacaccaacggcgaactgggcgagttcctgttcgacaagaccctgtaaggaggtggagatagagaaggcgcagcgcccagtcacgcatcaaaattatcagccagtcgagttatctgttatctgtcagcccagagagccttcccgagggtccgctattaaatcatcaccagccaagtcggcgactggccaataaattatccgttcgactgcgatcctcaaaccagcacagcaaaattccacgtctgttctttcttatcaaccacttgtgatttccgtacacctcgggagggggctccacattatgcaatcgccgagatttcgcctaggcttaagtggaatcgctcattcgcatagtaagacactcagcacaacccattcaatacatcctatatctttatatttttctgtcaattagacgagcaagttcttaaataaataacaatatatatgtaacgaaataaa

SEQ ID NO: 3069 - protein, 205 aa, DROSOPHILA
MVKLIASLLLLAVVAQAYGDFKCSLAVPEITKDWVDMKDACIKGMRNQIQEEINASYQYLAMGAYFSRDTVNRPGFAEHFFKAAKEEREHGSKLVEYLSMRGQLTEGVSDLINVPTVAKQEWTDGAAALSDALDLEIKVTKSIRKLIQTCENKPYNHYHLVDYLTGVYLEEQLHGQRELAGKLTTLKKMMDTNGELGEFLFDKTL

SEQ ID NO: 3070 - DNA, 2718 bp, DROSOPHILA
ctgaacttctccgggcagctggggcattgtatgttgaccgtgtattcgccggagctttcgttgtcctgctcctggtcctcgccatcggatattatgtactctattgcgccgtccagatgttcgtcaaagtcactcatggtatcttccttaaaaaagtcttcctcctgggcctcttgcttgtcatgtggcaacagatcctcctcctctatctcgtgggccacctcctctatctcgtgggccacctcctctacctcgtgggcttcctcttcgttaatgataatctcgttgtcgatatctagctctaagtctacggagtggaactcatcctcctcctctgattgtttgataatgaaggtgtgctcctcttcggccacttcctccacgatgccggcgggaccgaccagggtgacggtggtgcccacgctctccagttcctgctcctcctcgtcctgttgctgtgcctcctcaatattcccatcgaatttgcttatggtggtctctcggtcgagatcgtcctctttgtaggaggtctgcttgtggtccttggacatgtagggactgtggatcagttccaggatctcccctcgcagcttgcgcgctatttgtatggacttgtggtatctggcgagcttctcgcagcacttcttgcagatcgtcgacgattcctccgtgaggacgtaattcgtgccccgggtgcactgcagtaccagttcgctgatcagcaccggcggatgtccgacggtatcggtgtgaatgtccttcggtacgcgtaccgagaattgacaaatgcagcaattcatatttgattgaaatttatttacactttcggggcagtgtgaccgtgccctgaagaaggctccgattgcacagctatcggttatcgacgatgtgatctggttcaatttccaaatttgaactttggctgctaaccaacaaagcagatctgaaactcaaaatcaaaagctgaaaatttgtaacacccagcgaaaaaacaaatcgatatgtagccatgtatttactaattttttgttgtattataaattgccaacagggcagttaggaaaaataaaacaagctttcaaacgccttcactgatacgcgttcagattctttttgggcaagatgatgttgtaatgctggaatttggtccaagacagcagtatgtccttcgtcctgccgtgcggcgcctccccaaaagtctgcaggcagtctctttagtaatcaggttgatcgtagccaacttcatccacttaccttgcagcacccgtaaattttcattactttcttgtcctccttgttgctgatgaaccctccacccaggcatttggcgcaaattccaattttgtccatctccttttggatttcctcaaagatttcctctggcgacagaacgattagaacacgtattagctatactgattattagaactaaccgtggtccttggaggcggatcctcttacaatggtcctgccgaacctagttaaaccgtgcatgtgaatcatcatcaaaaggtacttgttcttgcctttagaaagctgaactctaggaacatttatcaaaagggcgtttacgcgcgaagaactttgccttcgaaggggcttcaacaattgtgaaacaggtgccaaaagattcaaggttttcattttggaaaaattttaggaaaacgcactggaatttagatgaaatattccgaaaagaaactggtatgaacggtagcaaggctccagctagactgattttgtcagaagccttccggtcgtatgctaaattcaagactgacacgaaaatcggagcacatgtgatcattcaaaaagtactaagcccttgtatcttgtgaaagaaatttttgtatgaactaaactataaatgcaaaattactcttctttctactctctccagaaatggaaatatcaaccatattccgccaattacaatcgcctgttcgattaccccttaataatattgaaagagcgctacttttatattctattttctttttattagtactgaatttccattttcgaaatttatgcaactttattgtttaacggttatcttaaagtccttataagtggtccacgcttgaagtatattccttgtccttgtgtgatcagcaccgccgaaagtctagggagacccatcaagaaccattagccggtgcttcaaggaccaaggatcctctacttaccctggaggtgccatagatcttaatttttttattttctgcctcgttgagaatccttccaccaccgaggattttggcacatatgccctcgggttccagctcctccaaaatcgagtcgaagaccgccactgaaagaaggatttgtaagactgctcaaggttaagcgtccagcagtggaaactcacagtgattgtcaacatcggcgccacggacaataactcttccatacttcgtgaagccatgcgtatgaatattcaccaacaaataacgattctgacccttggttatcttgacccggggaacgcctaccaaacttatcaaatcggttgagtaacatttttctaaaaccaagtatattagggcttgtaaatcttaatattgaatattcctaagccttacgaaacggagaaacaatatgaggaagcagacgcaatgacttgaacattttcattttatttaaccaaaggaaaagaaacgaaatttgtgtacaaactgattaatttagatccgaaaaggtttagtgcgagcagtt

SEQ ID NO: 3071 - DNA, 609 bp, DROSOPHILA
gctaccgttcataccagtttcttttcggaatatttcatctaaattccagtgcgttttcctaaaatttttccaaaatgaaaaccttgaatcttttggcacctgtttcacaattgttgaagccccttcgaaggcaaagttcttcgcgcgtaaacgcccttttgataaatgttcctagagttcagctttctaaaggcaagaacaagtaccttttgatgatgattcacatgcacggtttaactaggttcggcaggaccattgtaagaggatccgcctccaaggaccacgaggaaatctttgaggaaatccaaaaggagatggacaaaattggaatttgcgccaaatgcctgggtggagggttcatcagcaacaaggaggacaagaaagtaatgaaaatttacgggtgctgcaagacttttggggaggcgccgcacggcaggacgaaggacatactgctgtcttggaccaaattccagcattacaacatcatcttgcccaaaaagaatctgaacgcgtatcagtgaaggcgtttgaaagcttgttttatttttcctaactgccctgttggcaatttataatacaacaaaaaattagtaaatacatggctacata

SEQ ID NO: 3072 - protein, 148 aa, DROSOPHILA
MKTLNLLAPVSQLLKPLRRQSSSRVNALLINVPRVQLSKGKNKYLLMMIHMHGLTRFGRTIVRGSASKDHEEIFEEIQKEMDKIGICAKCLGGGFISNKEDKKVMKIYGCCKTFGEAPHGRTKDILLSWTKFQHYNIILPKKNLNAYQ

SEQ ID NO: 3073 - DNA, 8928 bp, DROSOPHILA
gttggtcagatcaatgttgatggagatcttcttactcatttatactgagtatttcaataactagctgaaaagtttaaaggatttgagctttaagtagaataaaactttttattagacttacacatatacccaacacatgcaaatgttcatatagttgttttatttgttaatttttatattttacattattacaaatacaaaatattaagtgccgaagatctgtcgcacgcttctttgtgtgaatactcgactagaacatatatgggaaacaatacctaacccaataaatgtcttaagatataagtttcttctaaactgatcgaaaatataactagtattctatcagtagttttgtgtcattatacattataccctctttccactaaattacctgcatatatacacatgtttgggatatagttcacatgatatttttgaagcgattttaggcttaatgttattttattaaatttatatttatatatattatttatatttataattatattattatttattcggtaatttcatagctgttctgggcattactttctttccacaataaacataacattagatgctgttaaaatttgtagtaagtaatcgtagtaataatagtaatagtagtagtaaaactaaaacatttttacgggtaacaacacaagactctcgtttcactctgcattcaagcgctctattattaaacaagctctaattatatttccatcgttcaatatctattttaaagaatagaaggattagaaaactttttcgtcttattttcaaaatttgtgtcttattcgaacactaacagcgaacataccgaaagcaaaccttttatctgcccttataaccactttcaaaccacataaaaaattgcagtttgtttatgttggtcaatcaattgaatttgattgaaccccatgattaccacttttggcataccccaaatatcgatatatttcccatcaaaggcaaaatcgataagttatcgttaactaaacatccacagattgtagttcgtctaataaaggtgtagacaccaagtcaattaattttaataacaagaggaagttcgtgggacggttaaacctattcacagcatttccaaggttttctaaagaaggtgtacctcatgaaagaacatgatggcagacagatacgcttcagatttggcccttgttgtcgttgcgcagataacgcaaactattggttacagctgcactctaagtgcacccttggagttgttgcaagacatattgcagaagtttgtacaggagttcgctcgagacatgcatagacatatggaacacggtaagtggtatagaccctcaaatcaacggaaccgatcatgaaatacaacaaagcctgagtagttatagtcgttacttgtagaataagagattcaataaaaagtatgtgacatatatgtacatgtacataaatgtataacttatcatccctgcagttccatcagactatcattaataaatcattatttatcattaaaacaattttgtttggagttagggcattttgctttcagttgcgttagaataccggtcaacctgtccgtttaaccttaaagtaaaatatattagtataatgtgtacagaaatgtattacgaaaaatgtacatcgcttctgcgagtagtacgtgttgttgcgtgtaaaatgaatccattgccattggaatttcctgattaagctcgcgcctgctactcgcataaatctagtcccagttatccgcgaaaaaggaagcgtgcctcttagaaaagtaatcttttaatttatttctttcttttattgttatttcccttttcctcgcccagtccctttcacctacatcagtatataatttctctagttccgatgcgcattaaaaatttaaagtttcttacgaaacttatgtgctcggcgacttagagcgtcagcttagcattcggctggaaataaaagatccataatttattgctgattccctgcttgtggctgtgcagccaaagcagttggtactgtgggcgaaaccgatgatcttgggatgtttttaaggagcgatgaattgtgggactgccggggtctcgattggggattatgaaacctcaataggcatgtagattgtattttttgcaaattattatttcattaattgtcttgtaaacaccaaaaaaaaaaaaacaataaatctttgatttatatatatcttagattaagatatatcttagattaagatatattttagattaagatatatcttagattaagatatatcttccttgtaaccaccggaacagaaataaaaataaatagttgaggaactcgactaaagcgttctcttatattttctttttaattttgcttggtatgttacttaataacgttatttatatgagttcaaaaaaatcttattaaaaccaaacaaaaaatcaaaaatgctttgtttatttggataaaatttataaaaatattaattgacaagtatatatattactaatttagcaaatcggatagagccgaaccttaaggatgcacgcttaagtataaaaaatctcagcatcaatgttcaagaactattggactacataggtaatgtcgagcctgttggattcatccgggatgtaccacagtttcccattggaaaatctgtaaacatgaacttccttaagcctggaagcgctgaaactctaacgcgacctgtctacatatttgaatacttgccaccaatgcaggaccccgaacttcgtgaaattccagccgatgttcaaaaggaattttcggaaaagcaagagttttgttcaaaagcagagtatagttcaacaaacgcagctgataagttaggcgccaagcacattgattctatctctcctaatactgtgataaatttccggtcgaatgcctttgaattggacgttgggagctcagtccgcgaaatgagcagcgtggtaatgacaacagggggattcataagtccagctattgaaggcaagctccccgaagatatcataccggatatagttggtacgacctatccttataccacagcttaataaattttcatgtatcggtgtttatagaaaaatttttaggtttggatgcacccttttcaccgacgataattgtaaattcgttacaaaaatctccacaactggcgctttctgacagagacaaaacagtaaatccacgaaaaatcattccctcagaaactaaaatcttcaaacaaaatgctgcattattgacaagtggacattcagagtcttcaataatatatgcgtctaacaaccatacgatgctaactgttacaacacctaagaagaatagaaaacagaaacatgatttaatatgcgaacccggtcaaagcgaacttctaactaatccgtttgaaaaagctcaggaaaagtcacagagaaaagctttaaaaatgtataaacaaacctcaaagaaccaaagagacagctcaattaatcaaatacaaaacatgaaaaagttaaaaaaaaaatttaaccgcggatccttcgatccaaataaaaaacatttagaaaaaatatttaagaagcagtccaaacttaagcaaaatgatcttcaactggacatcgacgaaaaacactttttgcagaattctcaaactacgagcggccttgccataaaagctaactcaaatgaaaatgctttacaagctgatatccctagtcagccgccaacagtaacaagccagattgaaaataattttcgaaattcaatttatccagtgcagccatctgtaattcaacaaacgcaagtgctattggcagaaaaaaaaagtggatcagaaccagaacgaagtaaattggacatttttaagaaaatttctaagccacgtactccacgtccagatattggggcgactttagtacctcctggaaccggggtatctgtatttggaagcacaatgaccccttcagcattaattagtcttccatcggggactactataactcctacaccttcacttggtctaaattctgaaaacaaaaacgttccgagtatgaaaatcaacccttgcaatatattcgatggaactatacctttaactaaagcaggcgttgaaatgtcaattattgattcgccaaagccaaaaaagcgaggtcgcaaacctggaggaaaaaatgtaataaaacaaacaaatgttgtatcgcaacctttaattaataaggtcgaacggaaaaagtcaagccaagctattacactgcctctatcatcatctccaatgataataacccaaagttctttaaacgtctccccgccaacagaacctctcaacttgtgtaataccgaacagccctcgaataattttttgtcaaacctgtatgcaaaagaaaaaaaggacagaaaaaagtacaaatcattaccagaaaatgtaatgcaattagacaagagctgttctcctgaaaaggcatcaacactacataattctattcgacccacaaaacaaaataatgatgtacaatgttcagataaatttgtgactatatccaatgctttgtcaaatgcatcaatttaccctggaattcaaacaggaatggttccgttgcttcctttattgcaatttccaccacgacctggtcttattcctactggacctgggctttttcctgcagtcactggtttagttggcttcgggaatcacggtaacagaatacctatttcgccgttcatagattatcctggaccagaagaatcagttgcggatactgttcgatgtccaccaattaaggattctcctggtacgtcaaatgagttatttttatacgcattgctcgtagtatatatacgtagtatatattttcgtgaccaggatcaatagccgagtggatctgatcctgtcctgtccgtccgtatgaacgtcgagatctcatgaactataaaaagctagtaggttgagattaagcataaagattctagagacataaacccagctgaagtttgttgacccaaactttactttaccataccagttcgagtatcacagctcgaagaatatattgcttacataaaagtctcggcaatatcttaattcattacagcaaaaatactaatctgaaactaatcattgaaccgttgaatgtagaaaataggtataggtacacactcaagaagtggtattgggaagcttctagatgggttagtatgaaatatttgcgtttgtcataaactagatatttggaggagctcaaattttttttttatattgacaatacgtacctacctacaatatgtgaattatttgtcgaccaaaatatttaaatatttataatgattagaaaaaataatttttagttactgattctgatcaatttctgagccgatcttccacgcaaactgacttgcaaatggatcgaaactactgcaatgttgctccattagtacctgactcaatgaaattcgccgagtgtaagtttaacggtaaatatatttgtaatttaaaaataacttattacttatatctgtaggtaaaagcgtatcttgtgccagcacaatattggaaaacccatctgcacaggctacaagcaaaataaacacgaaaccgcttttggaggcttctggaaatcctgatgatccaatagaggtttcagatgattcagatgaatcaatgcacaacaggcagatggttcaaagaaaaaccccaatatcatcaccaacttatgttaaaaccagcttcgcagaactaaatccctcctcgtttacgtcagctgcatctaatggtgaagaaaaatccaaaatggatctaaggaatattgtgtctctaagctctaacgaaccacttaaaaaatttaaaaaacttgttaaacagagttttcccgatgtaaaaagcgtaccccacacgccagcttcacattcatcatttccacaatttaacttgcctaattttatgggaggtgacaaattcagtttagctgggggagcagatcttattcctctgtcgagagtgagtgattcggaatattcctccaaaatagtaccattcagtagcttaggtggaaccataccgaatcaaatcaaaatttcagaagagcacaatattttttctaccttttctaactacgaagatattacaataacaccaactggattaacgtcgttggaaccgaaaatgcggaaacatcacaaaaagctaaaaaaggttaaagaagggaaaaataaaaaaaagaaagagaaaaaggacaaatcaaagaaagcggatcagattggcttaccatctttcaaatccgaccggaaaataaaggccaatgataaaaggcaaaaaaaagaaaagaaaaaggataaagataagcaggtttgtgtcaattctttatttataaaaaaataggtgttcgtgttgtggtatttggatcagatatgtagatacgccggagctgataagcaacctttgcgataagtacgtacacaaactcatttgaaaacagcaagttatgtgggaaacatttttaaaatcatgaattctgtgaacatattccgtataataacattaaattatgcattatgcattatacattatacattatgttccaaatttgtattaatacttatatagactgttgtgactaattataacatcgaagcctacagcttggtataggtacaaaaacatcttaatcctacataaacatgtaaagcagccaaatcttttaaagttatatttttagttcttacaaattttattttagtctatacacatatctcagcaaaatcttttaaagttaaatttatagtttaatcaattcttattttagattttagtccatataccagatgacacagaagaatttgacaaggtgcctttagctaacaacgatgaacctgtattgaaatcaagttccatgacaataaatccatcgttaggtgccgccacaagtggaatatctccaaatcaaataccaaaactaacactaaaacttagtggaaaatctacattattttcgtcttcagaaaaggagatgacagatgcagggaaactaaagcaaaccacgattttgtcttcagaaaataagaagcgtgaacgggataattctccggagcttgctcgtttttctccattggttaccggcccgcctaagaacaaacaatgtaggcgaagttattattcgataatttatatacattttaaaataactgttattccagctgaaacactgcatttaggaaacagttctacggccgtgttgcctgtaccttccccagtagctgtgcgcgccgtgcaacttcctgttagtcaaacctcatctaattctgcagggtggttatcaaaccctaataacagtaatactgcctcttccacgctttcggctagttcagttttgttaccacaacaattgatgttggcgcctcatacgataatgaacaactttgtaccagcaatgtgcaacagtacaggaacagtgtcaaaaagtggattatgtagttctccaccaaatacatccgaggaaaatgcaaatgcaatgcaaattgctgaatcaagtcgtccatcgtcatatgttgacgctgagggtaaccgcatttggatttgccccgcttgtggaaaggtcgacgatggatcagctatgattggttgtgacggctgcgacgcttggtatcattggtataattgtgctgaaccaactgtatactacaatttacttaaaaaaaaacttttactttaggatttgtgttggtataacctttgcaccgaaggacaacgacgattggttctgtcgcgtttgcgtaacaaaaaaaagaattcacggctctgaaaaaaaaaagagacgaaacaagaaaaagtgaattctaattatttcgagtcaactttgattatcacagcttaattattctttcagtttatgttcatatgttacttgacaacccataaatttcttggtcgagtatcaagttattaccttaataaaatgtgcaacaccaaatatttatatacgtttttattattattattctcagcattgatgaacatttttctacaagtaagttttcataaaatgtattattttccggaatttccagccacagacagaaaaacaataaggttaacttcctagcacaaagattttattgtggacggacgggagggctccatgtgagtgatacatcaaagcgaacggtcttctttatacccgttactcatggagtaaaatggtatactaaatagtttcttgatcaggatcaatacccgagtcgatctgacgctgtccgtccgtatgaacgtcgaagtgtacagattctagaggcatagacgcagcgctgacccagttgccacgcccactctaacgcccagaactgggaaactcactcttttcagaatgttaggatatttaaattagtcttgtaaatagctatcgatttgccaaaaaacgaacgcccaaaacagccactcccgaacttttgaacaaatttggtgatattttttcatatttttatatgcattgataatttatttcgatttgttaaaaaactatttgccacgaccactatttttatatattttttcaccaaatctatcgatatcaaagaaaaatgaaattttgcgatcgcggtttcactagctgagtaacgggtatatgatagttgggaaagtcggctataacattctttcttgtttttgtatgcacataaaatgcgccgttcacccgctctaccacacaaaatctaaaggtctaagcttgcagactgctctcttacggtacattttacagctcccttgcaagttttgattttgtgtttttgtacattagtcagaatcgaaaaaataatgacttgtttggacatgtgataaaatgatgcaaacttagtgcgttggttttaatggccgaggagctagctaagggcccaaatctagaatactgttgtgatccttgtgatagttttcgtcgacccgatgatctcctttccgcgctagactcacag

SEQ ID NO: 3074 - DNA, 4500 bp, DROSOPHILA
aaacatccacagattgtagttcgtctaataaaggtgtagacaccaagtcaattaattttaataacaagaggaagttcgtgggacggttaaacctattcacagcatttccaaggttttctaaagaaggtgtacctcatgaaagaacatgatggcagacagatacgcttcagatttggcccttgttgtcgttgcgcagataacgcaaactattggttacagctgcactctaagtgcacccttggagttgttgcaagacatattgcagaagtttgtacaggagttcgctcgagacatgcatagacatatggaacacgcaaatcggatagagccgaaccttaaggatgcacgcttaagtataaaaaatctcagcatcaatgttcaagaactattggactacataggtaatgtcgagcctgttggattcatccgggatgtaccacagtttcccattggaaaatctgtaaacatgaacttccttaagcctggaagcgctgaaactctaacgcgacctgtctacatatttgaatacttgccaccaatgcaggaccccgaacttcgtgaaattccagccgatgttcaaaaggaattttcggaaaagcaagagttttgttcaaaagcagagtatagttcaacaaacgcagctgataagttaggcgccaagcacattgattctatctctcctaatactgtgataaatttccggtcgaatgcctttgaattggacgttgggagctcagtccgcgaaatgagcagcgtggtaatgacaacagggggattcataagtccagctattgaaggcaagctccccgaagatatcataccggatatagttgaaaaatttttaggtttggatgcacccttttcaccgacgataattgtaaattcgttacaaaaatctccacaactggcgctttctgacagagacaaaacagtaaatccacgaaaaatcattccctcagaaactaaaatcttcaaacaaaatgctgcattattgacaagtggacattcagagtcttcaataatatatgcgtctaacaaccatacgatgctaactgttacaacacctaagaagaatagaaaacagaaacatgatttaatatgcgaacccggtcaaagcgaacttctaactaatccgtttgaaaaagctcaggaaaagtcacagagaaaagctttaaaaatgtataaacaaacctcaaagaaccaaagagacagctcaattaatcaaatacaaaacatgaaaaagttaaaaaaaaaatttaaccgcggatccttcgatccaaataaaaaacatttagaaaaaatatttaagaagcagtccaaacttaagcaaaatgatcttcaactggacatcgacgaaaaacactttttgcagaattctcaaactacgagcggccttgccataaaagctaactcaaatgaaaatgctttacaagctgatatccctagtcagccgccaacagtaacaagccagattgaaaataattttcgaaattcaatttatccagtgcagccatctgtaattcaacaaacgcaagtgctattggcagaaaaaaaaagtggatcagaaccagaacgaagtaaattggacatttttaagaaaatttctaagccacgtactccacgtccagatattggggcgactttagtacctcctggaaccggggtatctgtatttggaagcacaatgaccccttcagcattaattagtcttccatcggggactactataactcctacaccttcacttggtctaaattctgaaaacaaaaacgttccgagtatgaaaatcaacccttgcaatatattcgatggaactatacctttaactaaagcaggcgttgaaatgtcaattattgattcgccaaagccaaaaaagcgaggtcgcaaacctggaggaaaaaatgtaataaaacaaacaaatgttgtatcgcaacctttaattaataaggtcgaacggaaaaagtcaagccaagctattacactgcctctatcatcatctccaatgataataacccaaagttctttaaacgtctccccgccaacagaacctctcaacttgtgtaataccgaacagccctcgaataattttttgtcaaacctgtatgcaaaagaaaaaaaggacagaaaaaagtacaaatcattaccagaaaatgtaatgcaattagacaagagctgttctcctgaaaaggcatcaacactacataattctattcgacccacaaaacaaaataatgatgtacaatgttcagataaatttgtgactatatccaatgctttgtcaaatgcatcaatttaccctggaattcaaacaggaatggttccgttgcttcctttattgcaatttccaccacgacctggtcttattcctactggacctgggctttttcctgcagtcactggtttagttggcttcgggaatcacggtaacagaatacctatttcgccgttcatagattatcctggaccagaagaatcagttgcggatactgttcgatgtccaccaattaaggattctcctgttactgattctgatcaatttctgagccgatcttccacgcaaactgacttgcaaatggatcgaaactactgcaatgttgctccattagtacctgactcaatgaaattcgccgagtgtaaaagcgtatcttgtgccagcacaatattggaaaacccatctgcacaggctacaagcaaaataaacacgaaaccgcttttggaggcttctggaaatcctgatgatccaatagaggtttcagatgattcagatgaatcaatgcacaacaggcagatggttcaaagaaaaaccccaatatcatcaccaacttatgttaaaaccagcttcgcagaactaaatccctcctcgtttacgtcagctgcatctaatggtgaagaaaaatccaaaatggatctaaggaatattgtgtctctaagctctaacgaaccacttaaaaaatttaaaaaacttgttaaacagagttttcccgatgtaaaaagcgtaccccacacgccagcttcacattcatcatttccacaatttaacttgcctaattttatgggaggtgacaaattcagtttagctgggggagcagatcttattcctctgtcgagagtgagtgattcggaatattcctccaaaatagtaccattcagtagcttaggtggaaccataccgaatcaaatcaaaatttcagaagagcacaatattttttctaccttttctaactacgaagatattacaataacaccaactggattaacgtcgttggaaccgaaaatgcggaaacatcacaaaaagctaaaaaaggttaaagaagggaaaaataaaaaaaagaaagagaaaaaggacaaatcaaagaaagcggatcagattggcttaccatctttcaaatccgaccggaaaataaaggccaatgataaaaggcaaaaaaaagaaaagaaaaaggataaagataagcagattttagtccatataccagatgacacagaagaatttgacaaggtgcctttagctaacaacgatgaacctgtattgaaatcaagttccatgacaataaatccatcgttaggtgccgccacaagtggaatatctccaaatcaaataccaaaactaacactaaaacttagtggaaaatctacattattttcgtcttcagaaaaggagatgacagatgcagggaaactaaagcaaaccacgattttgtcttcagaaaataagaagcgtgaacgggataattctccggagcttgctcgtttttctccattggttaccggcccgcctaagaacaaacaatctgaaacactgcatttaggaaacagttctacggccgtgttgcctgtaccttccccagtagctgtgcgcgccgtgcaacttcctgttagtcaaacctcatctaattctgcagggtggttatcaaaccctaataacagtaatactgcctcttccacgctttcggctagttcagttttgttaccacaacaattgatgttggcgcctcatacgataatgaacaactttgtaccagcaatgtgcaacagtacaggaacagtgtcaaaaagtggattatgtagttctccaccaaatacatccgaggaaaatgcaaatgcaatgcaaattgctgaatcaagtcgtccatcgtcatatgttgacgctgagggtaaccgcatttggatttgccccgcttgtggaaaggtcgacgatggatcagctatgattggttgtgacggctgcgacgcttggtatcattggatttgtgttggtataacctttgcaccgaaggacaacgacgattggttctgtcgcgtttgcgtaacaaaaaaaagaattcacggctctgaaaaaaaaaagagacgaaacaagaaaaagtgaattctaattatttcgagtcaactttgattatcacagcttaattattctttcagtttatgttcatatgttacttgacaacccataaatttcttggtcgagtatcaagttattaccttaataaaatgtgcaacacc

SEQ ID NO: 3075 - protein, 1406 aa, DROSOPHILA
MMADRYASDLALVVVAQITQTIGYSCTLSAPLELLQDILQKFVQEFARDMHRHMEHANRIEPNLKDARLSIKNLSINVQELLDYIGNVEPVGFIRDVPQFPIGKSVNMNFLKPGSAETLTRPVYIFEYLPPMQDPELREIPADVQKEFSEKQEFCSKAEYSSTNAADKLGAKHIDSISPNTVINFRSNAFELDVGSSVREMSSVVMTTGGFISPAIEGKLPEDIIPDIVEKFLGLDAPFSPTIIVNSLQKSPQLALSDRDKTVNPRKIIPSETKIFKQNAALLTSGHSESSIIYASNNHTMLTVTTPKKNRKQKHDLICEPGQSELLTNPFEKAQEKSQRKALKMYKQTSKNQRDSSINQIQNMKKLKKKFNRGSFDPNKKHLEKIFKKQSKLKQNDLQLDIDEKHFLQNSQTTSGLAIKANSNENALQADIPSQPPTVTSQIENNFRNSIYPVQPSVIQQTQVLLAEKKSGSEPERSKLDIFKKISKPRTPRPDIGATLVPPGTGVSVFGSTMTPSALISLPSGTTITPTPSLGLNSENKNVPSMKINPCNIFDGTIPLTKAGVEMSIIDSPKPKKRGRKPGGKNVIKQTNVVSQPLINKVERKKSSQAITLPLSSSPMIITQSSLNVSPPTEPLNLCNTEQPSNNFLSNLYAKEKKDRKKYKSLPENVMQLDKSCSPEKASTLHNSIRPTKQNNDVQCSDKFVTISNALSNASIYPGIQTGMVPLLPLLQFPPRPGLIPTGPGLFPAVTGLVGFGNHGNRIPISPFIDYPGPEESVADTVRCPPIKDSPVTDSDQFLSRSSTQTDLQMDRNYCNVAPLVPDSMKFAECKSVSCASTILENPSAQATSKINTKPLLEASGNPDDPIEVSDDSDESMHNRQMVQRKTPISSPTYVKTSFAELNPSSFTSAASNGEEKSKMDLRNIVSLSSNEPLKKFKKLVKQSFPDVKSVPHTPASHSSFPQFNLPNFMGGDKFSLAGGADLIPLSRVSDSEYSSKIVPFSSLGGTIPNQIKISEEHNIFSTFSNYEDITITPTGLTSLEPKMRKHHKKLKKVKEGKNKKKKEKKDKSKKADQIGLPSFKSDRKIKANDKRQKKEKKKDKDKQILVHIPDDTEEFDKVPLANNDEPVLKSSSMTINPSLGAATSGISPNQIPKLTLKLSGKSTLFSSSEKEMTDAGKLKQTTILSSENKKRERDNSPELARFSPLVTGPPKNKQSETLHLGNSSTAVLPVPSPVAVRAVQLPVSQTSSNSAGWLSNPNNSNTASSTLSASSVLLPQQLMLAPHTIMNNFVPAMCNSTGTVSKSGLCSSPPNTSEENANAMQIAESSRPSSYVDAEGNRIWICPACGKVDDGSAMIGCDGCDAWYHWICVGITFAPKDNDDWFCRVCVTKKRIHGSEKKKRRNKKK

SEQ ID NO: 3076 - DNA, 4021 bp, DROSOPHILA
gatcccaatccaaatcgcgaactagagcgcagtgcccaccatggataattggaatgttttggcagcgcaaacctcctcgcaggccatcggactccacgactctggcgtggtgaagacccgactggtgagtaccctgtacatagaacatacacatgtgcagatagatatacatattagatgtagtaaacaaaacaaagccagacagacgaacgatggcgtatatatagaattcttggcaacaaacattgtgcactgagaaagtaaaaggggttcgaaatctattattactattaaatatatatatgcaaaagcaggctgtgcggaaatgtatcttaaagtaggcgctaaaggataaagctcagaaggttattcctcgggaaacagaagcattttcagatgcatcttaaagtatctaagaagtagaaatatcttaagatgaatccataggttatccgaacctacaaaaggtagatactatcagcaatatcagatacttttagatataagtaaaatatagtaaaatatctcgagatacttttatacagcttactaatgattttgaatctgacgaggaaaggaagagatttggcagggattttatcagcatgtttctccacgtgcaccgctgggtgagtggtgctggtggttctagtggttctatttgttcttaaagagtgcgtgagtggtgtggtgcgtcgcccgtgaacagcacagctgatgcatccgaaagtagagtgattgagtgatgcgatgtggcagtgctctcgttactggcgctggtctataaataagcctagggttctcttgagtctactactgcctggcggatctttggagattccgatggcacgtcgatgggaatgcggctcgcagtagcgcgaaagtagctcgatacgacggatattctcgcctcgcaggcagagcacgcgtagtttgccccgtgtgtagctatattttttttttatataagcaagtggttccgaatcatccacacccagccatggatatatccaccgatatctggggtcagctggccgtggaggcatcgcaggtctacctctccgacggcacagttcgcagtcccttcgccgatacggtacgatgggtttgggatattacttagggatcccactcatttgggagagccagtctgtggcgtaagagagagtatctatagattcactcacccgtagaatatatagcaccacattcgcactcaactattccgaactgtcgtttagatttacatttagagatcatatttgaatcacttatgtagtaccataggatataccactatatatcgtgactctcatccacagaccattgagaagctgccggacaaggtgctgctgcacatcttctcgtatctgtcgcaccgcgagatctgccgcctggccaggatttgccgacgatggcggcagattgcatacgacacgcggctgtggaagaacgtgagcctgcgaccggaggtctccggactgcacgtgggctcgctggagatgctgctgcagctgatctcggtgagattcggaccgactctgcgctacatcgagctgcccatcgagctgatcacgcacacggtgctccacgaactgtccgccaagtgccccaatttgacccacatgctgctggacttctccacaggtgggtgcgccacgtcgccgatcgtccgtcttaaactctagagtgtcctgtgtacttcttagccatgcagctgcacgacttcagcgagatgcaggcctttcccaccaagctgcgctacatgtgcgtctgcctctcggaggtgatcttcatggagggcttcatgcgcaaaatctacaacttcatcaacggcctggaggtgctgcatctaattggcacgtacgagaagtgcgaggaggaggaggaggagatctacgaggtgatcaacgtgcacaagctcaagtcggccacgcccaatttgcgtgtgatcaacctgtacggcatcaacttcatcgatgactcgcacatcgacgccttcagctcgaactgcatccagctggagtgcctggccgtcaacttctgcaacaaagtgaccggctccaccctgaagaccctgatccagcgttccaagcgcctcacctgcctgctcatgaacggcaccagcctgaagtcggagttcgtcatgcaggccgagtgggacaagtgcgccctgcaggagctggacatcacggccaccgatctttcgaccgaatgcctcgtggacatgctgagcaggatccccagcctcaagttcctctcagccggccagatcaatggcttcaacgacagcgttctcaagcagtggatggaatcgggcaccaccaggtgagcggagacagtacctacccgtctgtgtaagcactccgatagcagtatgatttaggtcgctcatttccctggacttggactcctcggacaacatctcggatgagggcctgcttaagtttatacagcgccagggtcatcagctgagcgcctgctgtctctcgggcatgccccacatcaccgaccagctgtggatgagcatcctgcccctgctgggcaactgcaagtaggcgacactattggtcatcgaatgaaaagacattttattatgagctgaactttcttaacctgcaggatcattgttatgggcaccgcagagaagctgggcgtcaacatccacgtggaccagctgatggacaccatcgcctcgaattgcggcaacttggagcggctggagctgcgctgggatccggacaacctgcgcttctccgacaagagccagaaggccatcgatattctgcgcgtcaagtgcctcaagctgcgctgcatggtgctcaggtgggtctacatcagactcctatttctatgcgggattaacatcaatatttcgcttccagcgatggtcgctactatgagacggtcaaggccaactttgagcgtgccgatcgcatcaccgtggtgcgcaccaccacctgctgccgtgtgtctccctatcacctgctccgcaactacaacgatttgattttcaactgagcctctgaggttcagagctgaaagccaagagaggattggtagcttgcacttacccggttgcagagctctggatgggatttacccacaacagggccggaggagaagcaatgtttctgtgtgttttcgcttacaataagagtgttttaatgttttctgtattttccgcttctttcgtttaattactttaaatctaaataaacgtacataggtaatttaaataaaaacaaaacaaggatttgcttatacaagttatttttacattacaaaattatacaacgcaacttttcgccttgctctcgtttttaaatcattttttttttttttttaatcatttcaatccgcgttgattcgtgttttgtttttaactagatttacttggtaacttgattaaatcattttcagacttcaccacataaaatgtttatcgtttttgcgttttagcgttttgctgatgatttttacactgctttcatccattgcaaacttaatgctaatttaattttttttttgtgtgtgtatgtttcaacatttttgaatcgactttttaccataaacttaacgtacatatgtagatcatctccgtttgaattatcgtctcattgccgatcagcgttcagctattatatgcatggtatataatttagttaagcatagctgcgtgagttatacatacgtaatgtctgtgcctatgacgatataggatcgaaggtgggtgctgtggtcgagtgctgggcattggtgtgctggtgtgttacgaatagattgctctttgggcagggggaatagagaagccttgggtcgctacaaagatttgcatttatacataagtacactaacgcacagaacgtttccaagtcgtaagatatatatatatataagaaacgcaaggtacgccgagcgctcccgttccgttcgattcggtcctagcctaccctatatgcgactactgctggtcctgcgacatccggaacatgtgcgtcgtattgctggccgccgccgt

SEQ ID NO: 3077 - DNA, 1527 bp, DROSOPHILA
atggatatatccaccgatatctggggtcagctggccgtggaggcatcgcaggtctacctctccgacggcacagttcgcagtcccttcgccgatacgaaggtgctgctgcacatcttctcgtatctgtcgcaccgcgagatctgccgcctggccaggatttgccgacgatggcggcagattgcatacgacacgcggctgtggaagaacgtgagcctgcgaccggaggtctccggactgcacgtgggctcgctggagatgctgctgcagctgatctcggtgagattcggaccgactctgcgctacatcgagctgcccatcgagctgatcacgcacacggtgctccacgaactgtccgccaagtgccccaatttgacccacatgctgctggacttctccacagccatgcagctgcacgacttcagcgagatgcaggcctttcccaccaagctgcgctacatgtgcgtctgcctctcggaggtgatcttcatggagggcttcatgcgcaaaatctacaacttcatcaacggcctggaggtgctgcatctaattggcacgtacgagaagtgcgaggaggaggaggaggagatctacgaggtgatcaacgtgcacaagctcaagtcggccacgcccaatttgcgtgtgatcaacctgtacggcatcaacttcatcgatgactcgcacatcgacgccttcagctcgaactgcatccagctggagtgcctggccgtcaacttctgcaacaaagtgaccggctccaccctgaagaccctgatccagcgttccaagcgcctcacctgcctgctcatgaacggcaccagcctgaagtcggagttcgtcatgcaggccgagtgggacaagtgcgccctgcaggagctggacatcacggccaccgatctttcgaccgaatgcctcgtggacatgctgagcaggatccccagcctcaagttcctctcagccggccagatcaatggcttcaacgacagcgttctcaagcagtggatggaatcgggcaccaccaggtcgctcatttccctggacttggactcctcggacaacatctcggatgagggcctgcttaagtttatacagcgccagggtcatcagctgagcgcctgctgtctctcgggcatgccccacatcaccgaccagctgtggatgagcatcctgcccctgctgggcaactgcaagatcattgttatgggcaccgcagagaagctgggcgtcaacatccacgtggaccagctgatggacaccatcgcctcgaattgcggcaacttggagcggctggagctgcgctgggatccggacaacctgcgcttctccgacaagagccagaaggccatcgatattctgcgcgtcaagtgcctcaagctgcgctgcatggtgctcagcgatggtcgctactatgagacggtcaaggccaactttgagcgtgccgatcgcatcaccgtggtgcgcaccaccacctgctgccgtgtgtctccctatcacctgctccgcaactacaacgatttgattttcaactga

SEQ ID NO: 3078 - protein, 508 aa, DROSOPHILA
MDISTDIWGQLAVEASQVYLSDGTVRSPFADTKVLLHIFSYLSHREICRLARICRRWRQIAYDTRLWKNVSLRPEVSGLHVGSLEMLLQLISVRFGPTLRYIELPIELITHTVLHELSAKCPNLTHMLLDFSTAMQLHDFSEMQAFPTKLRYMCVCLSEVIFMEGFMRKIYNFINGLEVLHLIGTYEKCEEEEEEIYEVINVHKLKSATPNLRVINLYGINFIDDSHIDAFSSNCIQLECLAVNFCNKVTGSTLKTLIQRSKRLTCLLMNGTSLKSEFVMQAEWDKCALQELDITATDLSTECLVDMLSRIPSLKFLSAGQINGFNDSVLKQWMESGTTRSLISLDLDSSDNISDEGLLKFIQRQGHQLSACCLSGMPHITDQLWMSILPLLGNCKIIVMGTAEKLGVNIHVDQLMDTIASNCGNLERLELRWDPDNLRFSDKSQKAIDILRVKCLKLRCMVLSDGRYYETVKANFERADRITVVRTTTCCRVSPYHLLRNYNDLIFN

SEQ ID NO: 3079 - DNA, 4118 bp, DROSOPHILA
ttgactggcaaccacgcctactcaatccgagtcggggtctccgtccggattgaggcgtgttatttgcctcaccaggcattaaaaattagaaaaaacgtactaaccaaaaggattttgaaatatcgcagaacagatgtgtaatcagctgttctcttcgatatcgataacacgcgaaaggagtagtactaagagagtgacagtagagggcgccacaaaggaatgtaggttaccatgaagagaatgtaaattattatgtaaaaaataacaaattagatttttttgatatataacgtaaaaaataattcttaagtgagaaatgtaaacatattaaaaaccactattttgttttatttatatttattgagagtagtgataaaaaaatacacattgcataaaattatgcacaattatttccgattcaaaattaacaataaccggtacaaataaagcaattacaactaaaactaatttaaaattttaagcttttcgacaatttcaacttaacagaaacacattttgtttaaacgagtttaaaaaacgcaatgaatgccaaactgtggaatatatcgctactactctccattgattacacattggacttaggttttattgtactttattctaggtagaattggtatgaatatataaactcgcgctgaacgatcctgtctttcggggactgtatataaagtgtctacaaaaactaggcgcgcactctctattgctaatcggtaatccgtaatctgctctatgactaaacgtgacctgatactgatacatactgccgaatcgggagggactcgcgcgtgtacacatttggcttaactgcgattttgcgattctgcgaccagaccgactctgatatgactataaactaacgtagacgaggcctaggggctaaagcgattgactggcttacaaactgaaccggatggggagaaccaaactcattgcggcaatcgacggaaggcggtcgattgggagatgtacggggaagctcttaaggatccagcttgtggtagcgctcgacgtcggcgcagcggaagaatactttgcacacgcactgctgatcctgcgagaggagcaccaggcactcccggcagaccagatgtcggcaggtgcggatttcgtagccgaactgcgcactccggcagttgatgcagctggcgggcggagcacttgaggatcccgagcctgcgctggagttcgatggcaattggctaaagcgcgtcaccttctgcagcgcctgttgaatggcctgatcgatggaggttgtggccgaggtcaccgtggcacaggcgctaccgtgttggctgtgccttgctcttttggccgccggcggcgagtgcggagatccgccgaaggatgccgccgatgaggatgtggccgtggcagtggccctgctcttccgctgctgctgcttgtaggcgttgctcagtgccgaataggttccggcagccggactaatctgtcccggctgacaggtgctgctggcgaactgcgaggcgtgacgacgacgctggcgagaggtgcccagcgaacggggcaccgccttgaagtgctccgaattctccatgaggaacttctcgatgcgcgcttttagggccaggtggagaatcgccttgcgttgcgcattgaactccaggcctgtaaacggatccgagggctggcgaccccacttggcctcctcctcggcgtgcttgtcgatggtggactggtccaccacttttccagatggcagcacggtggggaagatctgaagaggcaatgggagaattgataaggagagctacaaagtaaacagttcacagagcatcctattatctttatatttaagtgttgttgcgtttcggacattataatgcaattctcattatgaagaaaatgaattctttacatgacttccgatatttaccttgtttggttttgataaagacatgataattgattcataaagattataaagaattatgaataataaaaccgtgcaaaacgattgatttcatgaattgacatgggtatgtattcagttgtactactacttaaacataaaaagctaggattttctgatatttaccattagctcccaggtgatggagtcgaggaactcttcaggaatagagagggtcgactggtccctgagctctggaacattccgcggtggtgatctctgcccggtgggcgtttgggccgcgtccctctggccgtagggatcgcttatctcgctccagatggtcttgaccagctcgcgatcggctttgtccagcgaacgagcgggcagtccccacatctgaactttcctcagcactggaggacacctttccgtggcccggatcaccaccttgacgctgtttgtgctggcaaggatcttgtgggcggacttgaagaagaacaccttctcgctctgctccgagttggagctgctccgtgagttgtagtcgctctggtagcagaaggtcaccgagtccacgccacgccccagatcgcgtacgaaggcaaccctttcccagataccatcgtgtcgtccatgcagctcgaaggcagtggatcgtagggctccgcaggagggccacagcttgatgaccttcatgtccaccgccttggggaagtcgaatacgatctctatgggcggcttgcagacggcgaagcacatgaatccacgctccagctgctcgacgtcgtcggccaccagattggccgcagtgtagccatcctcgcagacggcatcggtctctacggagggcttaagctttgggttgaggaagttgatcagactgctcatcctggctgcccactgtgctatactctcggctgctgttatgtggctcttcacggcgtatatctactctgtgccccacctgctctttattcgcaatgaaaatggcgtcacttctcgggaatcttttgttgttgcgtctgcctgcggaggctgctaatcctgcctggtaatcccctgctaatcccgcactgggtgcgctcctgctctcagccgatcctgaacactcacagcctggcctggacttcggctggcatctcacaacgctgcttcaattgcaattatcgccctgcctcttcgaatatttataaatcactcgcttgtgcagtgtgaccatgcccgggcggtagtggtggtgcgaccagtcagatggacttcgctcagtactcgcgtacggtaacacctattcgcttgggcggcaaaaattgaatgagttaaaatatttgtttcaacgtataatgcaagccttttcgaaatctgtttcgtttcgaatgaaacaatgaaaaacacgattgctatggttgagttatattcatttacattttgaaaaagtgtatacttaatttgatttcttgttcaataagcaaaaacgatctcaagaactttgtttatcatttatacttaaattagcaaagcagatatgataaggttcatcagtttacactataggctctggcttctttgaatcataaagtatctagttaaaaagggaaagttatatcgaaatatgtaatatgacttattaattgcctatttgtggtgaatggtcaaaaatggtaatttttgcgatatgattatttagaaatctgccccaccggaggcagattgtggccacttctcatgccaaaaatataatcatataaaagttctactattcgagattaggctaatctctgccatgaatgcgttttccggcctggttaatggggtggccattggctgagagataaccgaaagctataaatggccccacacgtggaaactatgctccagttgctctgcgaaccatgaaagcaatcggaatcctgctggcgatcgccttgacctccgggttcctggtggtctccgccgtaaacttgccgggagtgcccgtggacttcgacctggacgaccacatcctgtccgccattgcagacgacatagccgagcgtctggccagggagtacatcaccttcctgaagaccggagtggagacggcggagttcttgaagctcaccaatcagctggccaagtcgcacagtgagaaggatatattcaccaggaacatgcccgatctagagcccagggatagcttctttgcgtgcgtggcctgtcgctcggtgacgcgggttttgattcgcac

SEQ ID NO: 3080 - DNA, 1797 bp, DROSOPHILA
cgggcatggtcacactgcacaagcgagtgatttataaatattcgaagaggcagggcgataattgcaattgaagcagcgttgtgagatgccagccgaagtccaggccaggctgtgagtgttcaggatcggctgagagcaggagcgcacccagtgcgggattagcaggggattaccaggcaggattagcagcctccgcaggcagacgcaacaacaaaagattcccgagaagtgacgccattttcattgcgaataaagagcaggtggggcacagagtagatatacgccgtgaagagccacataacagcagccgagagtatagcacagtgggcagccaggatgagcagtctgatcaacttcctcaacccaaagcttaagccctccgtagagaccgatgccgtctgcgaggatggctacactgcggccaatctggtggccgacgacgtcgagcagctggagcgtggattcatgtgcttcgccgtctgcaagccgcccatagagatcgtattcgacttccccaaggcggtggacatgaaggtcatcaagctgtggccctcctgcggagccctacgatccactgccttcgagctgcatggacgacacgatggtatctgggaaagggttgccttcgtacgcgatctggggcgtggcgtggactcggtgaccttctgctaccagagcgactacaactcacggagcagctccaactcggagcagagcgagaaggtgttcttcttcaagtccgcccacaagatccttgccagcacaaacagcgtcaaggtggtgatccgggccacggaaaggtgtcctccagtgctgaggaaagttcagatgtggggactgcccgctcgttcgctggacaaagccgatcgcgagctggtcaagaccatctggagcgagataagcgatccctacggccagagggacgcggcccaaacgcccaccgggcagagatcaccaccgcggaatgttccagagctcagggaccagtcgaccctctctattcctgaagagttcctcgactccatcacctgggagctaatgatcttccccaccgtgctgccatctggaaaagtggtggaccagtccaccatcgacaagcacgccgaggaggaggccaagtggggtcgccagccctcggatccgtttacaggcctggagttcaatgcgcaacgcaaggcgattctccacctggccctaaaagcgcgcatcgagaagttcctcatggagaattcggagcacttcaaggcggtgccccgttcgctgggcacctctcgccagcgtcgtcgtcacgcctcgcagttcgccagcagcacctgtcagccgggacagattagtccggctgccggaacctattcggcactgagcaacgcctacaagcagcagcagcggaagagcagggccactgccacggccacatcctcatcggcggcatccttcggcggatctccgcactcgccgccggcggccaaaagagcaaggcacagccaacacggtagcgcctgtgccacggtgacctcggccacaacctccatcgatcaggccattcaacaggcgctgcagaaggtgacgcgctttagccaattgccatcgaactccagcgcaggctcgggatcctcaagtgctccgcccgccagctgcatcaactgccggagtgcgcagttcggctacgaaatccgcacctgccgacatctggtctgccgggagtgcctggtgctcctctcgcaggatcagcagtgcgtgtgcaaagtattcttccgctgcgccgacgtcgagcgctaccacaagctggatccttaa

SEQ ID NO: 3081 - protein, 486 aa, DROSOPHILA
MSSLINFLNPKLKPSVETDAVCEDGYTAANLVADDVEQLERGFMCFAVCKPPIEIVFDFPKAVDMKVIKLWPSCGALRSTAFELHGRHDGIWERVAFVRDLGRGVDSVTFCYQSDYNSRSSSNSEQSEKVFFFKSAHKILASTNSVKVVIRATERCPPVLRKVQMWGLPARSLDKADRELVKTIWSEISDPYGQRDAAQTPTGQRSPPRNVPELRDQSTLSIPEEFLDSITWELMIFPTVLPSGKVVDQSTIDKHAEEEAKWGRQPSDPFTGLEFNAQRKAILHLALKARIEKFLMENSEHFKAVPRSLGTSRQRRRHASQFASSTCQPGQISPAAGTYSALSNAYKQQQRKSRATATATSSSAASFGGSPHSPPAAKRARHSQHGSACATVTSATTSIDQAIQQALQKVTRFSQLPSNSSAGSGSSSAPPASCINCRSAQFGYEIRTCRHLVCRECLVLLSQDQQCVCKVFFRCADVERYHKLDP

SEQ ID NO: 3082 - DNA, 2819 bp, DROSOPHILA
attttgtcagaagccttccggtcgtatgctaaattcaagactgacacgaaaatcggagcacatgtgatcattcaaaaagtactaagcccttgtatcttgtgaaagaaatttttgtatgaactaaactataaatgcaaaattactcttctttctactctctccagaaatggaaatatcaaccatattccgccaattacaatcgcctgttcgattaccccttaataatattgaaagagcgctacttttatattctattttctttttattagtactgaatttccattttcgaaatttatgcaactttattgtttaacggttatcttaaagtccttataagtggtccacgcttgaagtatattccttgtccttgtgtgatcagcaccgccgaaagtctagggagacccatcaagaaccattagccggtgcttcaaggaccaaggatcctctacttaccctggaggtgccatagatcttaatttttttattttctgcctcgttgagaatccttccaccaccgaggattttggcacatatgccctcgggttccagctcctccaaaatcgagtcgaagaccgccactgaaagaaggatttgtaagactgctcaaggttaagcgtccagcagtggaaactcacagtgattgtcaacatcggcgccacggacaataactcttccatacttcgtgaagccatgcgtatgaatattcaccaacaaataacgattctgacccttggttatcttgacccggggaacgcctaccaaacttatcaaatcggttgagtaacatttttctaaaaccaagtatattagggcttgtaaatcttaatattgaatattcctaagccttacgaaacggagaaacaatatgaggaagcagacgcaatgacttgaacattttcattttatttaaccaaaggaaaagaaacgaaatttgtgtacaaactgattaatttagatccgaaaaggtttagtgcgagcagttgcaaagctacagactaactgcctttcagagcatttctcaattttaaatgccatttccaataaaatcatggcacacaggatcaaagccaatggtataaattcatgtcagtgtgcttatgtggagtcttctctcgttgattgcagctaatatccctcatcggagatttcgatcgtgtagtccgggtatttggtggccaggatgcgtttggtctgcgcgtgatcagcttttccaaagcccttaaatagaaagacttgattagaactccagaaaatttttcaagtagttagatacatcagtccatccactgcccagcgacccctttactcaagggaatagacccacctgcgagtatccgtagaccttcaagtacttcttctcgggattgtgttcaatgcgaccgccgccaggacactcggcccgcagccccagttttttaaagacctcctcctcgcgctcgaagatgtcggctgtgggacagtaaccaagctaagtgggcacttgatgggtgatgaggatccgacttaccatgccatgtgcagtccgcaaatccgcggatcaccgcctttgaagcatctcctccatcgaagacattgatcatgacatacttgaagatgccctctggactgatgtgcaccagtggcacgccggcaagtgcttcctcggacattttgtgaatcagtcgtagtcctttggaaagcagttggaggcgattcattgtggaaaagtgtttgaaaacagaatttaatgtcttaccaaccggcaaattttccaaaaacgctgctttagtccagcaatgtgaccagatacttttattctcgttcaccttatgtatcgatactattaaaattataatattcagttatttctttagtacatttgggaaaacgttttttgtactactcagtatattttagtaataattaataaactcaaaaagaaaacgttgttatcagtgacagcaaatttatcgattacgccgacagcacgcagtcgatactatcggcactatcggcacagctctggcgttcacaacaaaatatacacaaattaaattgtttaagccgaattttcgattggattccacggcgactagatgagctccacgcgtccgttttgcttcgtttgcggcaaggagaagtccgtgggggtgttccagctgatagaaggtaacgttcgcttacgccgcactcgaaagtcctgatagccgactttttcacaggctgcattgtgccaggaacctttaagcccatcaaggatatactgaaatacttcgagaagatcataaaccagcggctggagctcctgcccaactcggccgcctgccgggactgcctggagtacctcttcaactacgacaggctggtgaggaatctcagccaagtgcagcgccagattgcggacgcactgctcggctgcaggcaggtggagggcaaggcggagaccaagcaacaggcggcaaagagggcccgcgtccaggtgccggccttcaagatcgtccaggccaccgccctcaaggagcccgaaaggcagccgggcgaggaggatgagtgcgaggaattcatgaaggaggagatgctggacgaggagttccagttcagcgagccggacgacagcatgccgtcgtcggaggaggagttcttcaccgagaccaccgagataccctgccatatctgcggcgagatgttttccagccaggaggtgctcgagcggcacatcaaggcggacacctgccagaagagcgagcaggccacctgcaacgtgtgtggcttgaaagtgaaggacgacgaggtactcgatctgcatatgaacttgcacgagggcaaaacagaacttgaat

SEQ ID NO: 3083 - DNA, 655 bp, DROSOPHILA
tatcgatacataaggtgaacgagaataaaagtatctggtcacattgctggactaaagcagcgtttttggaaaatttgccggttggtaagacattaaattctgttttcaaacacttttccacaatgaatcgcctccaactgctttccaaaggactacgactgattcacaaaatgtccgaggaagcacttgccggcgtgccactggtgcacatcagtccagagggcatcttcaagtatgtcatgatcaatgtcttcgatggaggagatgcttcaaaggcggtgatccgcggatttgcggactgcacatggcatgccgacatcttcgagcgcgaggaggaggtctttaaaaaactggggctgcgggccgagtgtcctggcggcggtcgcattgaacacaatcccgagaagaagtacttgaaggtctacggatactcgcagggctttggaaaagctgatcacgcgcagaccaaacgcatcctggccaccaaatacccggactacacgatcgaaatctccgatgagggatattagctgcaatcaacgagagaagactccacataagcacactgacatgaatttataccattggctttgatcctgtgtgccatgattttattggaaatggcatttaaaattgagaaatgctctgaaaggca

SEQ ID NO: 3084 - protein, 135 aa, DROSOPHILA
MNRLQLLSKGLRLIHKMSEEALAGVPLVHISPEGIFKYVMINVFDGGDASKAVIRGFADCTWHADIFEREEEVFKKLGLRAECPGGGRIEHNPEKKYLKVYGYSQGFGKADHAQTKRILATKYPDYTIEISDEGY

SEQ ID NO: 3085 - DNA, 12229 bp, DROSOPHILA
cagttttcccaagttcacttgcaaggtgtgtgtggttaagcccttggccaaactcactgccaattgatcgaaccaggttaagtgcttcaaatccttcctctcatcgtcaggccttgtagcgttatcagtactattcggagcagccaccaggcgcactccatcgtaaatggaaatctctggggaagacatgatgccctcgaagatgtgcaagcttcttgagcggaagcaggaccacagactttggtgtattccagactgatagcagtctcgaagatcactgcgtagctttttcatctgggatatccacgatttgtctgctagatcttctccagccgcgtaacgatcaactaggatcactcccagtaggaatgtaaccagaaccgacggaacacgcattgttcgcccttcgaaagccaaaatgaaactgcatccaataagttgccatcgatgcactttttataacccatcgctgaccagtgatcggcgaccgatctcgtccagtgcacccggtcattggggcagatgtggaaaccctcttctgggatccctaacggtttcttttagcggtcatggtcggcggacagcattgttgatgacttcgaaaccgagtctgggcaacccagaaaagcaaatgggcagtgctaaaataaacttgtcaacagcgatttgcaaatgcccaccatcgcacaattctaatcagatgcgtttcgaccctgtttagtggcaattggccatgaattagacgctcgattgagttggcaagcagtttccatggggcgtgttcttttatctgtgggctagtttcaatgggagtaggaaagtgggcttgacgttgttttctaaattgatttcaaaagatttacgaaggcataagctcgttgaaatggtaagggaataaaataataaaatatagtgcatacaaaaacagttgttttgcttagcaattaaaagcccaacccaaaaacctttaggagtgacaactctctttccgaaaatgcgattgtttttaatattgacttttatttaattattcattattagctaagaggtcattcattgcatttcctttgcttgataattgttttgaacaaattcgtactaagattaaaaggttttatcgctttaatagttacattgagtgcaaaagttgacgttcagtgattggttgatgctctagactttaaactagttaacaaagtttacaaaaacagttctacacttgcctaaatatatacgcaccatggccaaaatcgatattctatactctcaaatgggcttttctttacttttctctaggtttttcctgtgtgtggtaaaaacagttgctcagagctgggtgcccaggaacccggctgttcagatacaatagtactatagatacggcgctgctcctccctgatcctcgttaaaaatatactcagtgcttctgtgtgtttgtgtattttgtgtaaacgcgtcctagcaaaaaatatatcccatatctaattccaccggagcccaatcccgccaatcccttctgcattccgtagactacgtggcgcttggcaggcggtggcgccaatataatcaggatcccgtggccgtcgagggcgaggcagcggttactccgcgtccaaatcgcggcagatacaacccgaacttggactccactcccgccagaagaggaactgccgcccggtagccaccaatgtggtccacgttttcggtggtcaccgacgcagccgcctgttccaggggagtggtgatcttgtgcgcctcggatcccttgggctgagtgcctccgaagtccacgtagaagaggcgctgtagcagttcgtaggtcaccagggtcacaccgaactgtggtgaggaacggaacactcgagctgtggaatgggttataagacattaatagagatcccctaaggaagattgtcccgacttaccggctgtgcccttccagaaggctctgggtccctcctcggccatgatcttcttggtggcatcccatacgccggtgtaggtggtctgtccagatcgggcaaccacctgaaggcgggtcttgatgacgtcggcgggcgtgacaagggaggcggccggaacaccggcgatggcaccggcggccagcagggtgagtggatgattgtagccgtccttgtcggccatcatggccttggtgtgggcgtaggtcgggaagtagatggccgagaatggcacatcgcggaggagacatgctctggctcccttgtagaggccaaagagtcccagttcccggaccaccgaccacgcgcggatcttgctcccactagcgatttctcccgccacctggagacggatcttcacaatctccaggggattggtgaacaccacctgcgacgcaccggcacatccaccagccagaacttccgcccatgtgggaatgttgcccttcttgtcggtgagtttgtccctcaccaaatcattcaccgtcagtttgatggctttctcgggggccacgcccattagctggggcaggagacctctgtagagacccatgaatccctcgtggcgaaccacctgtggattaaatcatcaggattgtatcacttcagggaatttatgatcaggcttacctttttgaagcagtcccatgagtttcgataggcaacttcaccaatataggaacccgctcgctggttctgcattcgagtcttgactagatcgatggggtagaccacagtggcgcccacagctaatggtacataatatatagataggtgaactacctaagaggacaaagtgcatcctaacttaccgccggcaaaggaaccgagagtgaaacggtaagagctctccaggacctgaataaaggcagatcggtccgcaggactctccaccgccttgatctccgccagacgatgtgtcatatgcttggtgtaatgctcgggtgcgatgttgctcaggtcactatagtcgatgcggctggaggaatgggaacataagatccggattagtttcgatcagcacatagtatgtatgggtaagggaaactaagagacaccaactgagttaggtttgaggggacgggattctaggagtggattcataaacgaacaaaaagcagaaatcaggccaaggaaggacgagatcacttgcctactcggaggtatctttctcctgcgcttccaccagctttgagagtgagaattgcgagtgcagcgcagagaagaggggaaataaagagaaacacacggagagaaaaatgatacaaacaagaaaaaattagcacaagacacttgacactcgtttttggggatttccctaggttgatcgcccacgtaaaagatttagacgctaatacaatcggactaagccattgccaagtaaagccataaatacaagtctcctcttttcatagttttagctgtatacttataatgacacctaaacatatatcatttagtcaactgattttctattatgtcaaaatttcacttaaaacaggcaaacctgtgagagctttcatattagaagtcttcgaaaagtaaaggttgctaagttttgcaatacattacacgaacgataagctaaactgaataacatataactcctacaatgaacagtaagaaaaacctaaattagcaaatgattacatcactttaacttataacacaaatgaaatgctagtttttgctaatccgaatccaaagttggcaacactgaacccaaggttatgaccaaagactcaccctgcttgatggacggcgcccgccaggtggaaaagtatgtcgatctccagcggcgtgatttggctcatcgtttgggcggcgaggaggatctgatccttggtgatcatatccgtgcgactgccctcggtggcgtgcaggtagacttgtttgatcagttccatgttgttcagcagcgaggtaaatgcgatgaaatacgggaagctcactttgtgaccctcagttacctagtcaggttgaaaatattatccttagaaggatgatccacaatgatgacaactgcaatagctaccgaaactagattgtccctgacgccgggggtcagtaaatgccgcttaacattaactatgatgtcctggaagtccaatggcgagatgaacccagtgccagctggatccttgctgcggaaggcctccatcgcgtgctcctcgtgaaagtcgtgcagcagctgcgtgaactcagcatagttgataaggcgttgcttcttctacagttcggaaaaatcggtatacattataatcattgaataatcgtatgattgcagtgcacttacatcaccaaagtagcgcttgataaaggggccatctaagctaaaaggtatctttgagtgcagttcagttttttgtacgacatcagcgaagtcagctgttaattggatagaatttgtactagtttattagcatagaaattagtattttctcaccataggaaacagtgccgttgcccttgcggtcgaacagctggaaagcggtcctgtagagggcatctggagtgcagagcagaccctcgaacgcctggaactccgagaaggagatgagtccatccttgctcgtgtccgcaatgttggccagcaggcgcaccgattcctattcgaaatataatgttggttgattaaatgtactgttttaaataacttcagacatgtgatggggaactagaaagtcactaaaagcaattcatttatggtatttcttcgagtgacaggttaatctctttcgagtggacattagacattagacattaggtagttactctctagtggggtgataaacggggagccgtaaaagaaactgcccccgcagacttcggcacctgattgaatcagttccaatttgcggggcacctacgatccgcgatcaggttcagttcggttctcagaccataaagctgataagcggacccattaaaatagaatctgtgacgttggcggttagacacgaggcagccaagtgattgccgggttatttggtttatgggtttactacatgtttgcgggtgggtcaaggtcaacccgtgaatcacagtggctagtggttagttttacggctctgatttatgtttatagtcaactatgtatgtgccgccgccaacgggggcgctatctggcgataagatatgtccggtcttatcgggcggctatgcaatataaccttgcaatgacccgactgcagacaaagtactcacgtcattaaatgcagattcggaaaagagtcccaggaactttcgcacgaagtcctcgctggtcatatagtgctcgccattcttctggatggatgcgtacttcaggaacacctctcgcaacttttcggtgccggcgcgcttcaaaagcgacggagactgcaagaagaattgcaaagtaaataattagttgtggtaaagggttgcttcattggggtttcttctcctctacttgattattttgaatatctttttgctgtatatatgaacgtatttacttatacttttatctttatgggtagttcacaaacaacccttcgctacccgccactgtctcagtcgcactctcatttctgcgctctcccgcctgacagtcaattgcaaaagcaacacgtgtcagtcgcttggcaatcgcagctgaaacttacatttggcaaactcttggtcaacggcattcctgttttttagctttgactgcttctggttcagtgttgtttccgcgagcaattcccgcgtctaattagctcatcaatgcaagccgatctaatccaatccgcccgagtcgaaaccacctcgtcctcgttccgcgattaactaactgcgagtggagcgtactggcgagcgaagaaccgccggaatcagagcccccaacatgagcagaaccgctgggagagagtctgggagagctgagagtgaaattttctgtctaccaaactcttatttgctcagctcgtttcaatgtcaataagctctcttataacgactctcttatgatcgttatgctgggagagggtggggttatatgttctttacttctataatattactcccttgtaaacaaaatatatcataacattctattatgtttgaaaaaaaaaatattttggttcaaaaaatgttttattaatttcctcagaatgtttgcttatctttcaatccgttgcatatatatttttatttatttctattaagtttactaaataggtaactattttaaatagtattacactgcttgtctgagttgtatgtagatcagctgtggtgcacagcgaagcaatctcaaccatgagcaaacactttccctacaagtattgagtaccgggtagccgatagtcgaatatataataccctgtttcgtatctctgccacttgtttactcgctctcgctacaattccgcctgagtaatcacccagaggtcagcagctccgtcaacaacaggttcaacttcgatgacaatacgtccgattcgaattcgattccctagcatttatcaattgcctcattgacgtaatacgattagcacgcgatgaaattgtaatttccccgacaacaattctccctcccactttcttttctttctttttttactgggggtccctcacattctcggatgcgcttgtttgtgccagagaattgcgaaaaacaaaagcagatttcataataaaatcagcgaaaacacgacagcatttatggagaaaagttaagccaaattcagaagtatgattgaagttaaataccctggggaataaagcaattgattgaaattgataacatcagatagcttctgattaaaattataataatgggatagagttccctaatgacctgctctggaaacatttgaatacttgaaaaaatgggtacctaacacctcacatctattcatacatagatctttcactttagtgcccttatattgattgcttcactgtttttgagatttcgtatggtggaaattggatttattgaatggggttttatccccccacccactttgattgtagtagtctgtcggatccgtaaaagtgtcgtattgtcctttgcgaatcgattggcagaggcaataaatgaattcgttcgccagcaatttgctgcacaatttgcgatgccatcaagaattcatgggaagcagcgaaacacgaaaattgaattgttcacttgatgaggatatataattcatattaaagcagggatgtgtatattaactttcatttgaactcaaaagtaattaaatggccatgtttgcgatgcgactgtttattaatgcgtgtcgtttgttcatttactttgatatgaatgaaaatgctggtcagtaaacagggatatattgaattttgaatattacttttccagaatccccctttaaaaataaatatgcatattaagacattgacttttgacagattcactgggtgtgaaataaaccaaatcaaaggaagttccgcttaaaccccggttcaatttgttgccactgcagactgaacttgtgaatccctagctgtacttgtatgctgttttatatattcatgcccagcaaaagctgttttttatccccctttttattcgggcagcgcaaacaagcggaaaatgttacacatacgccccgtgtgacggcagacagaacgatttgtttgtttgtttgctcgggttttgtggcccctcccccgtgctcgcctacccctttccatgacttctgctttgttgcatttgcataatgagttcttcttggccacggtcgtccgaccaagccaaaggttgcaggcacaggtcgcttttccgccggttttcccagattttccccgccttttttaccttcagctgcctgcagcgagtggcacgtgcatgtcactgttactatatctttgtatctgtatcgatgggcacggagaagatacaaagggaaaatatataacttaactacattttgtaggcgaaaatattattatttaatttcacttttccatttagttcttttaaaaaacaaaactatttaaactatgaaaaatgtccaattaattgctcgttaatttttttctctgtcattgccatggaaatttgttgcgcgagcggcaaagttttgtttttgtttgcaatttccgtcaaggtcaaaccggctgttcattatcgctgtggttgtggttgtttcggtgcccgaatggggttattccagccacccccccaaccaaactgaagtcatatacagtgaaatgagcaactcgaagctcgagaaattccaccgaaaatatccagacttttgtaatagtgaattccgttgactttcgcactggtttacgcctcttctaactacccaagttcaacaattttcggttggagggtgctataatggggactcagcgacagctgcaccactggcccattacgtatacgcagggtgagccatgggaccgcagtcagctggctaattgacgacagcaggcaaacaaaagagagattccaaaggcgagagacgtgtgcatatatgtagaaagagaccatatagaacaagtggctggagcgatcggtgactgtcaactgagaatcggggaatctcggcctgagatggcggtgacttttccaaagtcgtgagcagagaaaacctggccacaaatccgtgggactgaaggtgattcgctggatgctcgcaaagctctcaaatgatattgttttatttctttatataattgtttggcctgcgagctttccgagatatccagtatttatctttcgactatttcgtaatgccctctatcactccttattgatattaattagtccggtctggaggcacttccgcaatcggtcagttatcagatcaatagctaattagtttcctgacgaaacgttacctcatccttatcgtgcatattcacttatacgtatgaacacaattgaagtctgtgaatctttgcgaaattcaggcacgttcgcactatctgtttgagtgttcgtttatcggagacttcggcttaacttgatctaactattggttaaatatgcttttaatgatcactcgcgagtcgttgtggctttttcaatactttaaaggcttgctggttagtataaataatatactttcactgcccgaaccggatatatttattgccaacttgtgatttttatatctgagggacgcgcgcgattttctcggctgtcatccgctggcgtcgcgctacttttccattctgaactgtcggaatgatagaagcgagagcttttcccgctttcagtaacttttgcgaccgagagagcgccgcaaaaaataataaataaaagagaagccctcggcgattgcatttcagattcatattaattttgattctcaagtcagtttgttattgtttttttttttttttttttgcccgggctgtgctctgcctctttccactgcccaataaacaatgccatctgtgcaactactattcataagaaggggtctaatcagggtgttggtgtgatgtgggctgaagtgggctttccctaaggccaaacataaaacacatttgataattgagaactgcagtgcgaatcaggggtgcaatgtgttcacggaagtaatttcgttctaagtggccttaaggtgcgaccattggcttcgtgtctcttcatctcatctcttacaatcaaggctaagttgtcagggatttaagattaatacaagaacatgctttgaaatatctagataaaggattcacttaacattaggagctccaatagatcgatctaactgtaagtcatacaatgtatttacgaagaataggtacaaatcctttaattaaacaaattcatgtttctaatctacattttcgagttccaattagatagttctattcgtgtgacccccgctgttcattcattcacatgcatgtctggcaaggtcgcaattttcgagcgtgccaagtggttgacgatttcacgttgtgcaaatgttcttaaatttggttgcattcattcacagctgctcgagtttctctgtttacaatgtaaacacgtgctgtgcgaaataacacaccgaaaagagcgaaagagaggtcaattcggtgagagcaaaggagagaagatagcgcagagacattgcgtatacgcatcgttggccatctgcggagggcacgtgaatgaagcgtgttttgggcgggtataaaaatagccaggcaggcgagaaaattctgttattatattaacgtcattctgcggaacatcagtgccactcaagaatttcagcaaggccgaaccatcccacaatttattttggggggtggagtttgttgaataaaatgaacaattacgagcgccagttatgagcagccagctgcacgaagcggtagacagttttgctatgaaggttagccaaatgtcatgtcaactggggtgtcctttttgtgccacgacaggcaccagcgaggagctcactgacacaagcccagtcaaaggacctccacttccgcattgtcactcgcaaagagtcctgaaccttaacaacgcattgagtggtactaatttatagttttcggtttaagagtgatggatgataggtacagagagcgctttgttcatttgtaactgtctgttatcttcgtccaagaaccctttattttacgagtatccttttcatttccctattgctgtgcccgagtagggtaatctgtttttgttaggaggaaagcacttacaaaccaattaagatacaacatgtattacgaataaagacttaacttaactggcatgcagaaaatgcaatgttatcatgccgaagactttatacactgcctttcaaattatcctttgatttaatatacaattgattatgttatttgaacgtgtgttttgtggtagggcaggttataatcctgctgttcagcttgtttttatttccgttcgtcggcacttttgctcttttcattcctcttcctgccgcacttatttttagatccgagcacctaatccgccaccagtgggcgaccaagtggggttgggcggtggctctggtaattaaaccgcaaactggcgcccacttgaagggggggagggggcctctgcgaaagacaaaggctgagcccgtcgagtgcacttacttcttggcatcgggcgactggcagagtgggtatccaattaaacggaaacgggatgtgcattggcattatcagcggctccgcgggtgggtgaaagtgctccgacttttggcttcggcgaacccagcagggactagaaggaggagattccaccaggtgatcccaggtgggcggagcacaaggaactgttctattatcgatttttacgcacttaatgccgcttactttgcggccaattcgattcactgccactcagttaagcacttggatgtagcgcaatattggttcctgttcctcaaatgcacccaggtggttggaggcgacagcagctgcactgggaacacctcggaaaacaggaccgtgccagacgagaaaacgcgctaaactggatgacaacatggaaaacattggttaacaggggtccaaaaggtggttgcggtgggaaattttaacggtcgagggaaatgtacatttcccaccccttatgttctctaaaaataatagaatttggtattggaaactgtttaattaatcgctataaaatatattcaatcataataatataattcattataataattcagtaatattattttattaatattcaccaagcgaagtgccgcatttcaacagaaaatgcaaaactttactaagggaaattcaccagcgaagggaaaataaaagcgccatcttacggctagattttcaatatttaaaaatggcgttcaggataatatataccatttaaaattaaaataacaaaaacatatcattgattaccgactttccccaatttaccgccccacaaatcttggtagcaataactattaagactgaaaaatgtgggcaaccataaaccagtagtcataaatatttattcagtttagtacaataggtaagcatgcacagtttaataatagctttttatgatgattcgtctttgaacaacagtttattgcaagtagtaagccgtagaaggacacgactcttttttggagcgctccgaatagtttgcactgtaagctgcggggtgtgtgtgtgtgtgtgtgtgtgccagtgtgtgagaatgccggggatttcccgacaacagcctaacatattaattatagtaagatagtaacgaacgcaagggtaagccacaattgaaaatcacattagaggttcttaagtgaaagaatgcaacgaaccaagaggccggaacgcaataaacaacaacaaat

SEQ ID NO: 3086 - DNA, 2805 bp, DROSOPHILA
cggcattaagtgcgtaaaaatcgataatagaacagttccttgtgctccgcccacctgggatcacctggtggaatctcctccttctagtccctgctgggttcgccgaagccaaaagtcggagcactttcacccacccgcggagccgctgataatgccaatgcacatcccgtttccgtttaattggatacccactctgccagtcgcccgatgccaagaatctccgtcgcttttgaagcgcgccggcaccgaaaagttgcgagaggtgttcctgaagtacgcatccatccagaagaatggcgagcactatatgaccagcgaggacttcgtgcgaaagttcctgggactcttttccgaatctgcatttaatgacgaatcggtgcgcctgctggccaacattgcggacacgagcaaggatggactcatctccttctcggagttccaggcgttcgagggtctgctctgcactccagatgccctctacaggaccgctttccagctgttcgaccgcaagggcaacggcactgtttcctatgctgacttcgctgatgtcgtacaaaaaactgaactgcactcaaagataccttttagcttagatggcccctttatcaagcgctactttggtgataagaagcaacgccttatcaactatgctgagttcacgcagctgctgcacgactttcacgaggagcacgcgatggaggccttccgcagcaaggatccagctggcactgggttcatctcgccattggacttccaggacatcatagttaatgttaagcggcatttactgacccccggcgtcagggacaatctagtttcggtaactgagggtcacaaagtgagcttcccgtatttcatcgcatttacctcgctgctgaacaacatggaactgatcaaacaagtctacctgcacgccaccgagggcagtcgcacggatatgatcaccaaggatcagatcctcctcgccgcccaaacgatgagccaaatcacgccgctggagatcgacatacttttccacctggcgggcgccgtccatcaagcaggccgcatcgactatagtgacctgagcaacatcgcacccgagcattacaccaagcatatgacacatcgtctggcggagatcaaggcggtggagagtcctgcggaccgatctgcctttattcaggtcctggagagctcttaccgtttcactctcggttcctttgccggcgctgtgggcgccactgtggtctaccccatcgatctagtcaagactcgaatgcagaaccagcgagcgggttcctatattggtgaagttgcctatcgaaactcatgggactgcttcaaaaaggtggttcgccacgagggattcatgggtctctacagaggtctcctgccccagctaatgggcgtggcccccgagaaagccatcaaactgacggtgaatgatttggtgagggacaaactcaccgacaagaagggcaacattcccacatgggcggaagttctggctggtggatgtgccggtgcgtcgcaggtggtgttcaccaatcccctggagattgtgaagatccgtctccaggtggcgggagaaatcgctagtgggagcaagatccgcgcgtggtcggtggtccgggaactgggactctttggcctctacaagggagccagagcatgtctcctccgcgatgtgccattctcggccatctacttcccgacctacgcccacaccaaggccatgatggccgacaaggacggctacaatcatccactcaccctgctggccgccggtgccatcgccggtgttccggccgcctcccttgtcacgcccgccgacgtcatcaagacccgccttcaggtggttgcccgatctggacagaccacctacaccggcgtatgggatgccaccaagaagatcatggccgaggagggacccagagccttctggaagggcacagccgctcgagtgttccgttcctcaccacagttcggtgtgaccctggtgacctacgaactgctacagcgcctcttctacgtggacttcggaggcactcagcccaagggatccgaggcgcacaagatcaccactcccctggaacaggcggctgcgtcggtgaccaccgaaaacgtggaccacattggtggctaccgggcggcagttcctcttctggcgggagtggagtccaagttcgggttgtatctgccgcgatttggacgcggagtaaccgctgcctcgccctcgacggccacgggatcctgattatattggcgccaccgcctgccaagcgccacgtagtctacggaatgcagaagggattggcgggattgggctccggtggaattagatatgggatatattttttgctaggacgcgtttacacaaaatacacaaacacacagaagcactgagtatatttttaacgaggatcagggaggagcagcgccgtatctatagtactattgtatctgaacagccgggttcctgggcacccagctctgagcaactgtttttaccacacacaggaaaaacctagagaaaagtaaagaaaagcccatttgagagtatagaatatcgattttggccatggtgcgtatatatttaggcaagtgtagaactgtttttgtaaactttgttaactagtttaaagtctagagcatcaaccaatcactgaacgtcaacttttgcactcaatgtaactattaaagcgataaaaccttttaatcttagtacgaatttgttcaaaacaattatcaagcaaaggaaatgcaatgaatgacctcttagctaataatgaataattaaataaaagtcaatattaaaaacaa

SEQ ID NO: 3087 - protein, 695 aa, DROSOPHILA
MPMHIPFPFNWIPTLPVARCQESPSLLKRAGTEKLREVFLKYASIQKNGEHYMTSEDFVRKFLGLFSESAFNDESVRLLANIADTSKDGLISFSEFQAFEGLLCTPDALYRTAFQLFDRKGNGTVSYADFADVVQKTELHSKIPFSLDGPFIKRYFGDKKQRLINYAEFTQLLHDFHEEHAMEAFRSKDPAGTGFISPLDFQDIIVNVKRHLLTPGVRDNLVSVTEGHKVSFPYFIAFTSLLNNMELIKQVYLHATEGSRTDMITKDQILLAAQTMSQITPLEIDILFHLAGAVHQAGRIDYSDLSNIAPEHYTKHMTHRLAEIKAVESPADRSAFIQVLESSYRFTLGSFAGAVGATVVYPIDLVKTRMQNQRAGSYIGEVAYRNSWDCFKKVVRHEGFMGLYRGLLPQLMGVAPEKAIKLTVNDLVRDKLTDKKGNIPTWAEVLAGGCAGASQVVFTNPLEIVKIRLQVAGEIASGSKIRAWSVVRELGLFGLYKGARACLLRDVPFSAIYFPTYAHTKAMMADKDGYNHPLTLLAAGAIAGVPAASLVTPADVIKTRLQVVARSGQTTYTGVWDATKKIMAEEGPRAFWKGTAARVFRSSPQFGVTLVTYELLQRLFYVDFGGTQPKGSEAHKITTPLEQAAASVTTENVDHIGGYRAAVPLLAGVESKFGLYLPRFGRGVTAASPSTATGS

SEQ ID NO: 3088 - DNA, 4331 bp, DROSOPHILA
ttaacaggggtccaaaaggtggttgcggtgggaaattttaacggtcgagggaaatgtacatttcccaccccttatgttctctaaaaataatagaatttggtattggaaactgtttaattaatcgctataaaatatattcaatcataataatataattcattataataattcagtaatattattttattaatattcaccaagcgaagtgccgcatttcaacagaaaatgcaaaactttactaagggaaattcaccagcgaagggaaaataaaagcgccatcttacggctagattttcaatatttaaaaatggcgttcaggataatatataccatttaaaattaaaataacaaaaacatatcattgattaccgactttccccaatttaccgccccacaaatcttggtagcaataactattaagactgaaaaatgtgggcaaccataaaccagtagtcataaatatttattcagtttagtacaataggtaagcatgcacagtttaataatagctttttatgatgattcgtctttgaacaacagtttattgcaagtagtaagccgtagaaggacacgactcttttttggagcgctccgaatagtttgcactgtaagctgcggggtgtgtgtgtgtgtgtgtgtgtgccagtgtgtgagaatgccggggatttcccgacaacagcctaacatattaattatagtaagatagtaacgaacgcaagggtaagccacaattgaaaatcacattagaggttcttaagtgaaagaatgcaacgaaccaagaggccggaacgcaataaacaacaacaaatgccgccgagtgctataagtggtgtatggacgatccgcgggatcaacagcttgcaaaaatacatttctctctgtttgccgaaaatagttattctctatctgcctaaatctctgtaatttccatggtacatcactgtttgacaaccgaaactggagctattgctagatctgatggatcggtgcttttgagtgactatctccgcagatcgatgaccttgattttggcctggttatccattcggatgtgctgcgcctccatgaagagcggcgggtcattaggatgcggatgaaagcccgactggcgacattgggctatgtagtccagaccgtaatgtggcgtgagtataaagaaaccagtactggaagcgaaagatatggataccagatagtcaggtgttgtctacattgactcaatcgatgactcacgtattgtacttaggcgcgcacacaatagccaaagcttcgggcatcataatctgataggagcaatgcgtatgcaggtcaacggaggacaaaaacgcagtctgagttggatgagtctggggaagaaggctatttctcaattcaagattataaaactaaagattcgaaacccacatgaatccatcccagcgtaatcagctgcatctggtcctgcacatcgaatatctgctcctcgtgcatcgtgttgcagctgtccggagttccttgctgttgcggcgtaatgatgtgagtgatgtacagctggttctgggacagatgaccagccagtacgccgcatgtctcgatgtttttcgaggtgttggcaagggccagcttcagaaacacctccatggtgtccccgggcacgtaaacgaggcgcaaagagccagccagcagagaatctgtgcggttgtaagatggcttctgattgcgatcgaagcttggcttggagctaaaaatatggatatgtttaaaagagaaatcatgttttgcttaatgatatattagcgaaccgtagtcctaaactaaagtttttgatttgcatagctgttcaatcaacgtcaaaaaccaatcctataatctcataaagtagataacacagataaactgcttgaagaaacaatcaagttaagggaactatcagttttcttatcatgtataatcaaactggggatcggtttatagctaacgattgcttgataagcaagtctatgccaaatgattgtttgggtttccaatttcaaacctcgaatgaggcaaacgcattttataaggctaacatgaattggagtcctgctggggttacgtgtttacagaaatccttggggtttcataatttaaactaagaatttacataaagctgtgcatttgtcatttaggaacgaactatagactgcaacactgatgtaatgtttaaagtctaaagtctgtgggggaatctcacttggttgtcttgtcggcggctgcttcgctggcagcgggcagcaggagtcccgatcccggcaggctgcgattggcgcccgtgggaaagtcattggggtagaccacctggtcaagcaggcccaggtccggagccgatggctggttgccttcgtcgatgagcacgtgcaaattggccgggatgagggatgggatagcacttgaacctgccttctccctttccttttgtcgctgacgttccctttcccgctcccgttcgcgttccagttccttgactcgttccgcctccttgctagccaggaactgctcgtactccctttggtagtgcgttagtagcttggctctcagtttctccgtcgtgggcataatctcgtccttaatcttcctgttaatatcccgcacctcggccttgacgctgccataatccgggtgctggcggatcttctcgatgaagagggtcatgtagcgcaagtacaggatgaatgcgttctcgtggttgccctcccgcaggtaaacattggccatgcgcagcatctcggtgccagagcggtagtacctgcaaggacattggctgagtgtgaggaactgagagcccacaagtccttggccaaccaaggtcacagccttgcgggaaacggccatggacgcgaaggactcaccgcgtgactggcatgttcttgtccacctcgatcaggttgccgcagtgcgacaggtgcttcatcctctcctgcggctccacgtcgcccatgctcatgttattcacagccttcgacatggtttcaattgctcctcccgaagttccagctcttcctcgcgctttccactgccgtgtttcctggattcccttgcgtattgtcttggcttagtgctcgcgcggaatggacgtactctaggttgtcaatcaagcgctattccacaatcttctcgagtgcaaaattactcataattacgcagggcgtcctctgaaaaagctggaaacagctgttctcccacgcagtcagctgtgtgcgattgaccgcaaagagtcatcgacgtcctatcgatactaatcgatggtaatagtaacaagacgattatcgggttttgaaacgaacgttaactttttgttttgtcgctacagtgtattaatgtgaataataagccatttttgagttaaatttctaaagaatcttctttacttaaaccttatttcaaaggaaacaatattactaaatgcatagaggttaaacatatagtggccagtacacgaatccaccagcttgttcgtcttgaaggtgacataatcataaaggagttaatataatattatagccatctaagagtacgttgcaaatttgggttctagaaagcgagccgtatattcccctttcaattgcacgttcttaatccgtatcgctgaaaataaaacacggctaatctaggctaatatactcaaagttaagcgatagttaaaccttatcaattggttattttaaagacccctcagttcgatcgatcgtaaaaatcaattgggagcccattcagtagaagcgcgtaggtcgatcccgaaagaagtcggcagtcttcttttcgtggggtgagtttttcagagtcagccatataactaacatatagcaaattccatgcaattatacattcaaatgtcgaggacttggagtgcgaaattctcttgtttgcaggggtcaaagtgcgcacttgtttacctacgggtataagcacccaagtggcccaatctcgtactcccgatctgcggaaactaacgatatgataagctatcagcggattatttaaagcatgcagaacgggcaaaaccaagaatacacctagcaaaaaggggagaccttttattaagatgaaaactaagtgaacggtcggtagtctactgtgataatatatctaatataattgggcagtcagttatagatagatgtaccttcttagctcagaagaagtttatacccattagttcgaaattcccatcgaacatggatttgtatgagcgaaatggttgaccgcttgagcgactgactgatggattgatggtagctgcgcccccacaagcgcccaaaaaaaaccgagaggccaaagagccgaaaacccattcacagatcaaaacgccgaga

SEQ ID NO: 3089 - DNA, 1611 bp, DROSOPHILA
acactgtagcgacaaaacaaaaagttaacgttcgtttcaaaacccgataatcgtcttgttactattaccatcgattagtatcgataggacgtcgatgactctttgcggtcaatcgcacacagctgactgcgtgggagaacagctgtttccagctttttcagaggacgccctgcgtaattatgagtaattttgcactcgagaagattgtggaatagcgcttgattgacaacctagagtacgtccattccgcgcgagcactaagccaagacaatacgcaagggaatccaggaaacacggcagtggaaagcgcgaggaagagctggaacttcgggaggagcaattgaaaccatgtcgaaggctgtgaataacatgagcatgggcgacgtggagccgcaggagaggatgaagcacctgtcgcactgcggcaacctgatcgaggtggacaagaacatgccagtcacgcggtactaccgctctggcaccgagatgctgcgcatggccaatgtttacctgcgggagggcaaccacgagaacgcattcatcctgtacttgcgctacatgaccctcttcatcgagaagatccgccagcacccggattatggcagcgtcaaggccgaggtgcgggatattaacaggaagattaaggacgagattatgcccacgacggagaaactgagagccaagctactaacgcactaccaaagggagtacgagcagttcctggctagcaaggaggcggaacgagtcaaggaactggaacgcgaacgggagcgggaaagggaacgtcagcgacaaaaggaaagggagaaggcaggttcaagtgctatcccatccctcatcccggccaatttgcacgtgctcatcgacgaaggcaaccagccatcggctccggacctgggcctgcttgaccaggtggtctaccccaatgactttcccacgggcgccaatcgcagcctgccgggatcgggactcctgctgcccgctgccagcgaagcagccgccgacaagacaaccaactccaagccaagcttcgatcgcaatcagaagccatcttacaaccgcacagattctctgctggctggctctttgcgcctcgtttacgtgcccggggacaccatggaggtgtttctgaagctggcccttgccaacacctcgaaaaacatcgagacatgcggcgtactggctggtcatctgtcccagaaccagctgtacatcactcacatcattacgccgcaacagcaaggaactccggacagctgcaacacgatgcacgaggagcagatattcgatgtgcaggaccagatgcagctgattacgctgggatggattcatactcatccaactcagactgcgtttttgtcctccgttgacctgcatacgcattgctcctatcagattatgatgcccgaagctttggctattgtgtgcgcgcctaagtacaatactactggtttctttatactcacgccacattacggtctggactacatagcccaatgtcgccagtcgggctttcatccgcatcctaatgacccgccgctcttcatggaggcgcagcacatccgaatggataaccaggccaaaatcaaggtcatcgatctgcggagatag

SEQ ID NO: 3090 - protein, 420 aa, DROSOPHILA
MSKAVNNMSMGDVEPQERMKHLSHCGNLIEVDKNMPVTRYYRSGTEMLRMANVYLREGNHENAFILYLRYMTLFIEKIRQHPDYGSVKAEVRDINRKIKDEIMPTTEKLRAKLLTHYQREYEQFLASKEAERVKELERERERERERQRQKEREKAGSSAIPSLIPANLHVLIDEGNQPSAPDLGLLDQVVYPNDFPTGANRSLPGSGLLLPAASEAAADKTTNSKPSFDRNQKPSYNRTDSLLAGSLRLVYVPGDTMEVFLKLALANTSKNIETCGVLAGHLSQNQLYITHIITPQQQGTPDSCNTMHEEQIFDVQDQMQLITLGWIHTHPTQTAFLSSVDLHTHCSYQIMMPEALAIVCAPKYNTTGFFILTPHYGLDYIAQCRQSGFHPHPNDPPLFMEAQHIRMDNQAKIKVIDLRR

SEQ ID NO: 3091 - DNA, 4306 bp, DROSOPHILA
ctaaatctaagcttgtgatacactcgatttgttataattagtccctaaatattcaataataaattttagaaatttacgcaaatagatttgaaattgaatgcgtcaaaggaaattatgtcttgattatcgttgttgggagagtttcccgactaccagatacccgtttcttagtatcaacgggagcagctaagctgcttggccacaagccgcccataactattacgattttgaaaaacgtttggattatttctttattatatgtatgtatgtaagtcttgcagatttgtatcggtatgccgcgcccacaataaaatttttggccgatttggtcaagagtcgctttccggcttctaaatcttcatctcctcgcaatccaagttggattaacgggtatctgatagtcaagctttatcttgcttttcttagatatcataactttggtacaaaactggtgttttgattttcatttcatttttagtagtttcagtttataaatattattggaactaccataaaattatgtttgcttatactaatatttaatatgataaaacgtaactagcttttttagcaaggacgaaagaaagggagacattcaatagaattcttatttttcttgagtcacctgttttagaggaatacctcttgtttttgccatgtcgctcaattgtaaaatttttctgcaatcggacccaggttgtctaaagttcaaattaattttggtttacaaatacttcgatcagttttctgcagtgttaaacttacacttcgaaaactcctattcgtaaaaaacatcaataggaaacgtattttgaatggtctggcaacctctggcaactcatatttacgctcaatgctggctgggtggcagctctgtgcaacgaaattgatttgagctccagctctacgtgatagtatcggggaaacatcggttttcgttccagctctataccactgctgcccgagtttgccctcaattaaaaataaattacaaaatttcatcgttaccgttcgctaaacgcaacgcattgcccaggcgtccgagttccaaatccaacacaacacgagtggtagtatcgctgtgaaaaatgtcaacacccgcacgcagacgtcttatgagagattttaaaaggtgagaagaaactaaggaatcgaatgcgaatagaaaagaatacaaacaaaacgaaagcaaaggaaaacaggaaggcaaggagcgaatggcaaagtacacacaaccgttggattttacgttttacgtgtttctcgttccgaaaaaatgctggggaaaagaaacctgggggctgcccaatacatataagcaaacacacggacacacgtatatatgactgtgctccacgtctgtatgtagtggaaaagtttgcgcagccaaaatatgtacgtgtgcatgtgcccatgctcgtgtgcgtgtgcgtgtgtgagtggttgattattttcgctgctttgctcgtgcgaaaaacaacaattcgcttgtctttgacacttgactttgatctgaatgtgtgtgtgttcgcgcgcggtgcggggtaaaagcaagaaaacaaaggggaaaattgggaaaaccaaacaacattcttcttccgccgttgccgaaattgcgtcgcagcaaaacattaacgtttctatccgcctgactcggcagctgcatcctgcccgctaccccctctcgctcgcactcagccttgttgactcacgcgaaagagacgaagcgctcctattggaatttcattcggcttcgaaactttcatcatcccgaaagttggcgctgcagtgcagattgcagttgaggaatacgaaaccaaatgtcaaggctgtttgcgtgggcgcgggctcctgccccccggcaaagttccaatgtaccaccccaagaggcagagcaactgcacagaagcatatctgacagcatacatcagataccccttactcagctagaacgagttcgaagtggaaatttcgaaactaaaataaaaaataacatcgtcaattttatactttgtggggtccgaatctagtatagttattgagtactcgggactgattagtttgagaaacacaaattctgttttgcgaaaatgtttcatcaggaatgcaatattcaaatcgtaatgcgaatcgaaactgactccattttagaagtctagtttttgataagagttcattagaaaatacctgttacacatcattggatacctataaataaattatgaacattttcaacaagttattttaatagctcgtattaccgcccaaaattgacctttcaagttcataaatttcaaaatatgcttcagacttggatattgcatatcttatttcccagtgcactgtcgcgtttcttagcttgtttaatcgatgatttcacttggcccgtgtatcgatttaagccgattgaagggcgcggttaaccgggttgcgccgcccgctagctgacctaaatcgcagccaatcccggccaggtaacttttagattgtttttcatcactctatgtctgaccgttgcttttggtttcttctgtgttgcggaatatgtatacaaataggcagaatttggtgtccacgggaccgtcaactcttgcgacgattaaagacttacgtttcaagcacattgttcgtaagatcattaactaaagacaattacaacaagaagataaaaaataattattagctttacattgcaacctagtcggcaaatgttaaggtagagttttttattttcgcctcaattggaatttatacaataaatagtatatttgtgtaaacaaatatgcattaacttatttatttacaacactttaatttgatacttacctgcagacttcaagaggatccacctacgggtgtctcgggtgctccaacagataataatattatgatatggaatgctgtgatttttggtccacacgacacacccttcgaagacggaacatttaagttaaccatagaatttacggaagagtacccaaacaaaccgccaacggttcgatttgtatcgaaagtatttcatcccaatgtatacgcagatggtggaatatgcttggacatattgcagaaccgctggagtcccacgtacgatgtgtcagccatattaacatccatacaggtgagttactctgcttctggatccagtagctatagcttaatgtgtatgcttctgatttccagtcactgctgagcgatcccaatcccaactcaccggctaactccaccgccgcccagctgtataaagaaaatcggcgcgagtacgagaagcgtgtgaaagcctgcgttgagcagagtttcatcgattagccatgcgcccactttaggaacagcagcagcatcaggagccggagccacaaaacgagcggcagcagtttagtaggcgaccgcagcttaaagcatcagcaaactacagtaacagaaatatgcaataccataaagaagtttaaattaaataataacagaaatatttatgataattgtaatgctatgaaattgtaacaccgccaacggcacggcacagcagcatatatacaccctgcgcacacaattcgcaacccataaatactgggcagttttgagttatatttgtttggccaatagttacaccttgtccccagcccgatcacccgatcccgaaggcagacgcaattcacttaaaaaattaggaagtcctctatggatgcagccgctagttgcgccggcagccagaaataagactcttataagctaaaaactcaaatgttctaatttaaaaaagcagcggcaataatgtttaataataaaacaaaaattataaaaaccatttcaagcgattgcaatgtcaaatagtttcattttagatgcgcgcaaacccagtcctgtaaaactaaactcaaccaatgcctaaacgaaaattaatatttgtagtagttcgtggctcagcaaacacgtacacaagaaacatacattttgaatccgcttgaaaacctagtaaacaattgtccagtgtcgtcatttatgtgaactatatgtatctaccaaaccccaacataaacatacacatgctacctagatcgaattataagtttattggctacaaattgtgaaattactagaaattgataattaaatgttagtttttagcaatgtaaaccaatccacacggtatgtgacatggtacaagtctccaagttgggaacaagcaagcaaatatatatgcatgtattcctcggtagcttccattgaccaatgctctatgtattttgcccgataattttggtggctgaccgacgctttacttttaccctatctctaagatcttatcctt

SEQ ID NO: 3092 - DNA, 544 bp, DROSOPHILA
atcgttaccgttcgctaaacgcaacgcattgcccaggcgtccgagttccaaatccaacacaacacgagtggtagtatcgctgtgaaaaatgtcaacacccgcacgcagacgtcttatgagagattttaaaagacttcaagaggatccacctacgggtgtctcgggtgctccaacagataataatattatgatatggaatgctgtgatttttggtccacacgacacacccttcgaagacggaacatttaagttaaccatagaatttacggaagagtacccaaacaaaccgccaacggttcgatttgtatcgaaagtatttcatcccaatgtatacgcagatggtggaatatgcttggacatattgcagaaccgctggagtcccacgtacgatgtgtcagccatattaacatccatacagtcactgctgagcgatcccaatcccaactcaccggctaactccaccgccgcccagctgtataaagaaaatcggcgcgagtacgagaagcgtgtgaaagcctgcgttgagcagagtttcatcgattag

SEQ ID NO: 3093 - protein, 151 aa, DROSOPHILA
MSTPARRRLMRDFKRLQEDPPTGVSGAPTDNNIMIWNAVIFGPHDTPFEDGTFKLTIEFTEEYPNKPPTVRFVSKVFHPNVYADGGICLDILQNRWSPTYDVSAILTSIQSLLSDPNPNSPANSTAAQLYKENRREYEKRVKACVEQSFID

SEQ ID NO: 3094 - DNA, 2639 bp, DROSOPHILA
tggatgatttagtagtcgctgccgtttggttgtcgtgtctgaggcaccataggcgtaattagacaagcattgtgcaaaagcgttaattaaaaaccacagagacacacagccagttgccatttttccaccgactattgactgccagctgcgccagcgccacgacttcaatctcacactaggagatacatttgcagcagccacaaaactgtagaagttcactgctcatttgctctaaaaactataagatacatttcggaaaaaatgtaactatattgaacagtttatgaaaagttactacaagatacagtttaaaactggtcagcttcattttacagactttgctttagaatctaccctttaaagtgcacagtttttttttaatatgatttacttacaatttctttcatttaatgtagaatgtattcctttgccaaaagatcttttttttgcaagtgcagctccgcggtgtcgattccgtaatgagccagcgcatcgattgcgtaagttctccgcggatgcatctgctcccagtttccagggcccattcccattcccatctctcgagttgcatgtccccaggtcctcgagtcccattagtgcacccgtgcagcggggatgtggatggtgatggcgctgcagcaatcagctaataatttcctcctaagcgatctgtactcaagcatccatggcgcatgaatgggagctccatgctcatgcgtatttatgagcttcatggattcctgttcgctgtccgcccagcgttgagtgcctgggatttcggattgattttgacgccaatcggtggcgtcaggggaatccaaatgggatttacaagagcttatatacattgtagaagccaaagtgttaaaaatgttacatagctcagcctcagaaaaagttgtcaaaccttcaatatagctagcaatatctaaaagttcaaagtaagttttcacattttccatgcattgctacatcgcaaaataaattaagtatcttcaggatgataagtttcctgaaattggccaggaatcctggccagctgctgctgcctggcagtggagtgctgcaatcccagtggcttcgtggccagaagaccatgccggtgtacgattaccgttgccaaaatccgccaaagtggggctactcggccttcggacgcaaccagaagacctggggcgagtggacctgtgccaggttggatgacctgctaaactggggacgcaagggatccctctggccgctgacctttggtctcgcctgctgcgccgtcgaaatgatgcacattgcggctcctcgctacgacatggatcgctacggtgtggtgttccgagcatctcctcgccaggcggacgtgctcatcgtggccggaaccctgaccaacaagatggcaccggcctttcggaagatctacgaccagatgcccgagccgagatgggtcatttccatgggcagttgcgccaatggtggcggctactaccactactcctactcggtggttcgcggctgcgatcgcattgttccggtggacatctacgtgcccggatgtccgcccaccgccgaggccttaatgtacggaatcctgcagctgcagaagaaggtaaagcgcatgaggaccctgcagatgtggtacaggaagtagagaatattcttgtaaggagttcagtaaataaatgataccttgttaagtaaagtgtttttggggtggtgcaaccgataagtagagttgggcttaaatcgatcctaacctaatccgatctctgccttacccaaaacgaagtcaaagagttaagcgcatcagttccagcaactacacaagattcctggctcagaaagtcgcttagtcagcggaatagggctcgtgctcacctgcaaggatcggtttcatgtcccgcaaaggacctcttgaagcgagtcctgcagacaatgcgcggagacaataaacacttctgacggcactgtctctcaagtggcgatgaaatatgaagggttcttgaggcatatgaaaggatttcgttgtttcacattttttcgagccagcccgaaaatcctttttgcgaatctggcgacaccgagcacttgaacttggtgggaacatcattaaatccccgttcgagtgcggtgagtgcattaaattgtgggacaactatcgcattagtgtaatccatgtgcgacacacccacaaaactggcagatcctcggcttgaatggaaactctcgagagtgaaggacttgaatgaatgagtatctcctctcattcaacgagcggcgagaaaaggacctgcacactctgaaaatctggacaaaggcgcagcaggcagcccgctgatcttcggggatcctgggaatcctctcgtgactcgcacaattcctgcgaataagaatgactgcgtggggaaattaacttgtctcaatcgcacagcaataaaaattaataacaaagccactggcaacttgttcgcctccattgtgcaggcattaaataaatttaacagctcaatgacttgtcgaaaggtgctgggagaatccaggggctccaggggctcctgggttgctgcagaatcgaaatcagtggaccgttcgcagccaggcgagcatatcttaattagcagaccccggcccacattaaccttaattttgct

SEQ ID NO: 3095 - DNA, 639 bp, DROSOPHILA
atgataagtttcctgaaattggccaggaatcctggccagctgctgctgcctggcagtggagtgctgcaatcccagtggcttcgtggccagaagaccatgccggtgtacgattaccgttgccaaaatccgccaaagtggggctactcggccttcggacgcaaccagaagacctggggcgagtggacctgtgccaggttggatgacctgctaaactggggacgcaagggatccctctggccgctgacctttggtctcgcctgctgcgccgtcgaaatgatgcacattgcggctcctcgctacgacatggatcgctacggtgtggtgttccgagcatctcctcgccaggcggacgtgctcatcgtggccggaaccctgaccaacaagatggcaccggcctttcggaagatctacgaccagatgcccgagccgagatgggtcatttccatgggcagttgcgccaatggtggcggctactaccactactcctactcggtggttcgcggctgcgatcgcattgttccggtggacatctacgtgcccggatgtccgcccaccgccgaggccttaatgtacggaatcctgcagctgcagaagaaggtaaagcgcatgaggaccctgcagatgtggtacaggaagtag

SEQ ID NO: 3096 - protein, 212 aa, DROSOPHILA
MISFLKLARNPGQLLLPGSGVLQSQWLRGQKTMPVYDYRCQNPPKWGYSAFGRNQKTWGEWTCARLDDLLNWGRKGSLWPLTFGLACCAVEMMHIAAPRYDMDRYGVVFRASPRQADVLIVAGTLTNKMAPAFRKIYDQMPEPRWVISMGSCANGGGYYHYSYSVVRGCDRIVPVDIYVPGCPPTAEALMYGILQLQKKVKRMRTLQMWYRK

SEQ ID NO: 3097 - DNA, 5756 bp, DROSOPHILA
aaatgtattccaggccgctgcgacgcaggctgcagccggaggcaggatctctcattctccctcggtttgggtcaccatgtcaaccaggtcgccaggtggaaaggggtcaacagtggctatgactgtggccgcaagcatttttccacttatccgggattagcaaaaatgccacattaaactaagtaaacaattatcgacagtggggcgatatttgttagctgcatcaaaaggtaacaataactacgtacccaatcaacctgatagcttgcagaaatggaataaacttgggaagacgacagtatttaattgtatttaattattcacaaaaagctcgcccagggtgcacaacaattagcattgtgtactttcgcttgcatgagtagttttcaatgtctatttcaattttattgctcactgttctggaaaagaaattaataacaaaacattaagaaaacggcattgactctaatttgatattcttgtaaacaatataaactattaaaagaaataaatcttacaaatcttacaaagacatttttaagtttctccacttcgctatttatgttttaaagtctccacaattaagctaagccaataaaaaggacacaaggatattcctctttcttatctaagttccccacctcctccgatcacagtttaattctccaatttgccatagtttaattctccaatttgccatagtttgactcttcactttgccatattaaagacttctaccaagactaaagtctccactgaaacaatcaaaggattagtgggtaaaattatccacgggaataatctactaccactaatcctttgattatggagactttagccgtatgcaggatcactcttatcatagttttccaccactcgatcgcttgccaacactgatgcacattatatcgatctatcgagcgcgcgatcggatctattggcggcaaagcgcaaccgcaactgccatcgctagtgtgttttcaccgccttttttattaagcgaataacaagtgaagatttgctgggggaaaacaggagccgcaggaaacaggaaacaggcagacagagagtacagcagaatgcacgctggcgttgttaagacgccgctcagcggcaggaaaaaagatgcggctgtgccggccaaatcagcggaaaagacggccagcggtggcaagaagttcgtgcagacgcgtttgccctttaagttattaacgccaggcggtggggcggtgcccacatcctcctcctcctcatcgtcccccgccactatcggctctggccccgtcactgtaatcctggatgaggacgatcccgctccgcgcaagcgaaaactttcgtacgacgatgagtcgccatcggagggcactggctgctctacggggcaactgcgacgttcgaccagcaaggagaatctggatctggccagttccatagccactaaaaaggtcaagaccacggattcggtagtggaagatgtcatagaactggatgaggacgaggccgacaaggagatagaggaccaggatcagttggtagaggccaagtcctccaaggaggtcaagttgaagcccaagaagtcggagggcaagaaaggctcgccggcacccatacaaatcaagctgccattggtcaacaaacgatcaaagcgcagaaaatccctgaagaaatctgaggaaccgctggagacttcgaccgcggatgttgccaagggggacagcgagtccagcgatgacatagagattatcgccgaagaactgaacccccagaagaggcaaaaagtacaaacgccgcgtgagaaatccccagaaaacagctctacaagcggcaagcacacggaggaggtcatgcagaagaatggaaaggactcaaagaagcaggaggagtccatgaaggcggtcaaggagtcgaagaaggaagagccaaagaccgcagaacaaaataaaaagaacgatcaggccacaatagatctctttatgggaaagaaaatggaaactaataagaaggataaaccggaggtcaagaccacagctaaagacaacaagaaagatccactgattgcagaggattccaaaccaaaagaagtccctaagaaggaaacaagcaaaaccggaggaaaaggcaagaaggagggagcaaaaccagctgaaaagagtaagaaagaagagaaggaagacagcacaacaaagtcaaagaaagagaaagcagactcacctgcaaataatcaaaaagaacaacaaattggagtcaagaaaaagacttctgaaccagaagatgcatcgaactcacacaaatcggtgacggccaaaaaggattccaagaaagacgaggcatctactcaagttaagtcggacaacgaatctccggaagcagcagaaatctcgatgatcctctcgaccagcgaggccaacagttccagcagcgagcacgagatggatgcggatacggacaccgcggccaccgacagaccctccgcccaaaaggagactcgcctgaacaggaagagtctgccggaagtaaccggcgccccgaagggtcttacgcccaaacagcaacgactcatggagcaaaggaaaaaggctcgcgaggagaaggaacaaaagctggcggaggagcgtcgcctcaagcaacaggataaggagcaccgcgagcagcaaaagaaacaggagcgcgacgaaaaggaacagcagcggaagctggagagggatcagaaggagcagcagaggaagatggaaaaggaggagaaggagcgcaagcgacaggcggaggtggactccaagaacgaggagaagcgcaagcgcaacgaggccaaggaggaggtgcaacgcaaaaaggacgaggagcgtcgcaagaaggagcaggagcgtgaggaggccgagcaaaagaagaagcgcgccgccgagtccttctccaagttcttcgtgcccaagcagcccaagtgcggcagcggatccaacaacacatcctacctggagcacgagcaaagcagctgcgacagctccaaggccagcagccaaacgctggcctttcgaccatttcagatcaaggacgacatgctgctagcaccgatcgtgcgcaactcgctcggccaggagcagcgctcccagctagatggactttttcgacaccgggacgaggaagctgacgacgaggaggaagaggaggagcaggacatcgtcagacgaaagccgccgaatcgggctaatctctatcttagtgagttgagcagcggacggcgcaagccgctcaagatgcagcgcgatgtgaagctccaaagacgcaccaaggacgaggaggatgatgacgatgttcaagtgataggtaggatatggctgcaagatattaaagaagcatttgttcttcaccaatcatctgcatctacagattacctttcaccggcgggtctgcccatcgaggtggagcagcccaagcagctgacccgaatgaaggccaagtatctgcatttcgccgacaaccggaggccaccgtactacggcacctggcgtaaaaagagcagcagcatctccgcccgacgcccgctggcacaggataaggtatggatcacttcttctggcttaaatatcataacacaaatatcaataatcatataacgcaggtgctcttcgactacgaagtggactccgattgcgagtgggaggaggaggagccgggggaatcgttgagcgctagcgaggacgagaaagagaaggagtccgaggaggaatcggaagaggagtacaacgagtggtacgtgccgcacggacatctcagcgacgaggaactgcaaaacgacggcgacggaatggaagacggccacacgcgggaggcgcagaaggccaaactccaggtgctgcagcaggagttcgctcaggaaatgaagaagcagacgaaaaagatcaaggcgcgcctgttgggtcccgtttggctggacgagaacggcaacaagtccgagctattcccagctatctttgcccacaccatcgacatgtacgcctgttggcaggtggagccactcagcctagagcctccgccagaaccggagcgtcaggatcagacgccagagcagccggtgccgctgcagctggacgatcgtctcatgcagcagctggtgcgccttacccacggcaatcggaactcgaagacgttcctgatcaacgaatatttagagtacctgaaaacccaagcgaccgccgaggccaatcaaacaacgctgccctcaaaggctgtgctgcgcgagaaattcgacgagcttgccagctggaagaccgtggagctgagcacacccgaagccgctgccgccagtgccaacagcgccaaaaagggcaggaaaccgaagaagcgcctctgctgggtggtcgccagcgatatgctggaaaagttccagctgccggatctccagttgcagaatcaatggaactacacgttgacgcccaaggttagcgacggaccagatgcagcgcagcaagagcaaagtccaccagcggatgcggtaccagccgcctcgcccgcttccaaccagaccacaaactcggcacccacaacgcccatcagtggacagacgcaggcgggtcagggcgtcaagaagcgggccaccctgatcatgtccgtgcccagggatcagccgattccctcggccaccaagaacaagctgattagccagtttctgcaacgccagagcgatgccagcaaacccaaggagaagatgcaggagaagccaccgcccattgtcttcgatgatgtggtgatgctctcggattaagactaggattaagctagatcccctaaggatcttccgcttcctgctaagcgagtattttaagaatacacattttttttgtcgctagtttcactcgtaagttgatttaattttaaatgttccgatgtacgttcgacttgtatgtccttctcagccaacccatccccaccagggtcacccctgccccaaccagcatcccacccactcgatcgcaaagtttttaagaagttgagcaacagaagctcgcaggattgcaattttcattgagccaactaaacatatatagtatatatgcaataatacactacctacctgatgatgatctttcatttgatggcgattttgggttcgcattggaaatatatagacacaatacataaatctatagctacatttttcatttcagtcccaaattattgggggtttcttggtggaaatcagtggaaacagcgcttgaagttatttttaaaacttgtttgtttattctttttgccatttttgttacgatttacgtttcaattaaatgaattatttaatatacatttagttaagattcccgacaaaaaaaattagaagtgtgtgtttggggatgtgttgtctttaaaaacgtggacgtgaacgtgtgtcgtaccattagatctgcaagagttagagtcccatctacatttaaatacgattatccgattatccattaattattgctattgtaatcgttgtttaattgttatctgccgtcgatattagttaaccgccgccccccgtttatcctccttcccacgttcccaaaagtttgctatgctaactaaaagagccgagcattgtgaggaaatctcaagttaaaaaaaaagtgcgtttacacaggcgattatttttgaaataaccggatggtggagaggatggagccgcgcaggagaagaggctgggggttccgctaacaatgctgatttacaggatcgcacatatagctttgtatgtacacgaatatgtatcgttatattatata

SEQ ID NO: 3098 - DNA, 3631 bp, DROSOPHILA
cgaataacaagtgaagatttgctgggggaaaacaggagccgcaggaaacaggaaacaggcagacagagagtacagcagaatgcacgctggcgttgttaagacgccgctcagcggcaggaaaaaagatgcggctgtgccggccaaatcagcggaaaagacggccagcggtggcaagaagttcgtgcagacgcgtttgccctttaagttattaacgccaggcggtggggcggtgcccacatcctcctcctcctcatcgtcccccgccactatcggctctggccccgtcactgtaatcctggatgaggacgatcccgctccgcgcaagcgaaaactttcgtacgacgatgagtcgccatcggagggcactggctgctctacggggcaactgcgacgttcgaccagcaaggagaatctggatctggccagttccatagccactaaaaaggtcaagaccacggattcggtagtggaagatgtcatagaactggatgaggacgaggccgacaaggagatagaggaccaggatcagttggtagaggccaagtcctccaaggaggtcaagttgaagcccaagaagtcggagggcaagaaaggctcgccggcacccatacaaatcaagctgccattggtcaacaaacgatcaaagcgcagaaaatccctgaagaaatctgaggaaccgctggagacttcgaccgcggatgttgccaagggggacagcgagtccagcgatgacatagagattatcgccgaagaactgaacccccagaagaggcaaaaagtacaaacgccgcgtgagaaatccccagaaaacagctctacaagcggcaagcacacggaggaggtcatgcagaagaatggaaaggactcaaagaagcaggaggagtccatgaaggcggtcaaggagtcgaagaaggaagagccaaagaccgcagaacaaaataaaaagaacgatcaggccacaatagatctctttatgggaaagaaaatggaaactaataagaaggataaaccggaggtcaagaccacagctaaagacaacaagaaagatccactgattgcagaggattccaaaccaaaagaagtccctaagaaggaaacaagcaaaaccggaggaaaaggcaagaaggagggagcaaaaccagctgaaaagagtaagaaagaagagaaggaagacagcacaacaaagtcaaagaaagagaaagcagactcacctgcaaataatcaaaaagaacaacaaattggagtcaagaaaaagacttctgaaccagaagatgcatcgaactcacacaaatcggtgacggccaaaaaggattccaagaaagacgaggcatctactcaagttaagtcggacaacgaatctccggaagcagcagaaatctcgatgatcctctcgaccagcgaggccaacagttccagcagcgagcacgagatggatgcggatacggacaccgcggccaccgacagaccctccgcccaaaaggagactcgcctgaacaggaagagtctgccggaagtaaccggcgccccgaagggtcttacgcccaaacagcaacgactcatggagcaaaggaaaaaggctcgcgaggagaaggaacaaaagctggcggaggagcgtcgcctcaagcaacaggataaggagcaccgcgagcagcaaaagaaacaggagcgcgacgaaaaggaacagcagcggaagctggagagggatcagaaggagcagcagaggaagatggaaaaggaggagaaggagcgcaagcgacaggcggaggtggactccaagaacgaggagaagcgcaagcgcaacgaggccaaggaggaggtgcaacgcaaaaaggacgaggagcgtcgcaagaaggagcaggagcgtgaggaggccgagcaaaagaagaagcgcgccgccgagtccttctccaagttcttcgtgcccaagcagcccaagtgcggcagcggatccaacaacacatcctacctggagcacgagcaaagcagctgcgacagctccaaggccagcagccaaacgctggcctttcgaccatttcagatcaaggacgacatgctgctagcaccgatcgtgcgcaactcgctcggccaggagcagcgctcccagctagatggactttttcgacaccgggacgaggaagctgacgacgaggaggaagaggaggagcaggacatcgtcagacgaaagccgccgaatcgggctaatctctatcttagtgagttgagcagcggacggcgcaagccgctcaagatgcagcgcgatgtgaagctccaaagacgcaccaaggacgaggaggatgatgacgatgttcaagtgatagattacctttcaccggcgggtctgcccatcgaggtggagcagcccaagcagctgacccgaatgaaggccaagtatctgcatttcgccgacaaccggaggccaccgtactacggcacctggcgtaaaaagagcagcagcatctccgcccgacgcccgctggcacaggataaggtgctcttcgactacgaagtggactccgattgcgagtgggaggaggaggagccgggggaatcgttgagcgctagcgaggacgagaaagagaaggagtccgaggaggaatcggaagaggagtacaacgagtggtacgtgccgcacggacatctcagcgacgaggaactgcaaaacgacggcgacggaatggaagacggccacacgcgggaggcgcagaaggccaaactccaggtgctgcagcaggagttcgctcaggaaatgaagaagcagacgaaaaagatcaaggcgcgcctgttgggtcccgtttggctggacgagaacggcaacaagtccgagctattcccagctatctttgcccacaccatcgacatgtacgcctgttggcaggtggagccactcagcctagagcctccgccagaaccggagcgtcaggatcagacgccagagcagccggtgccgctgcagctggacgatcgtctcatgcagcagctggtgcgccttacccacggcaatcggaactcgaagacgttcctgatcaacgaatatttagagtacctgaaaacccaagcgaccgccgaggccaatcaaacaacgctgccctcaaaggctgtgctgcgcgagaaattcgacgagcttgccagctggaagaccgtggagctgagcacacccgaagccgctgccgccagtgccaacagcgccaaaaagggcaggaaaccgaagaagcgcctctgctgggtggtcgccagcgatatgctggaaaagttccagctgccggatctccagttgcagaatcaatggaactacacgttgacgcccaaggttagcgacggaccagatgcagcgcagcaagagcaaagtccaccagcggatgcggtaccagccgcctcgcccgcttccaaccagaccacaaactcggcacccacaacgcccatcagtggacagacgcaggcgggtcagggcgtcaagaagcgggccaccctgatcatgtccgtgcccagggatcagccgattccctcggccaccaagaacaagctgattagccagtttctgcaacgccagagcgatgccagcaaacccaaggagaagatgcaggagaagccaccgcccattgtcttcgatgatgtggtgatgctctcggattaa

SEQ ID NO: 3099 - protein, 1183 aa, DROSOPHILA
MHAGVVKTPLSGRKKDAAVPAKSAEKTASGGKKFVQTRLPFKLLTPGGGAVPTSSSSSSSPATIGSGPVTVILDEDDPAPRKRKLSYDDESPSEGTGCSTGQLRRSTSKENLDLASSIATKKVKTTDSVVEDVIELDEDEADKEIEDQDQLVEAKSSKEVKLKPKKSEGKKGSPAPIQIKLPLVNKRSKRRKSLKKSEEPLETSTADVAKGDSESSDDIEIIAEELNPQKRQKVQTPREKSPENSSTSGKHTEEVMQKNGKDSKKQEESMKAVKESKKEEPKTAEQNKKNDQATIDLFMGKKMETNKKDKPEVKTTAKDNKKDPLIAEDSKPKEVPKKETSKTGGKGKKEGAKPAEKSKKEEKEDSTTKSKKEKADSPANNQKEQQIGVKKKTSEPEDASNSHKSVTAKKDSKKDEASTQVKSDNESPEAAEISMILSTSEANSSSSEHEMDADTDTAATDRPSAQKETRLNRKSLPEVTGAPKGLTPKQQRLMEQRKKAREEKEQKLAEERRLKQQDKEHREQQKKQERDEKEQQRKLERDQKEQQRKMEKEEKERKRQAEVDSKNEEKRKRNEAKEEVQRKKDEERRKKEQEREEAEQKKKRAAESFSKFFVPKQPKCGSGSNNTSYLEHEQSSCDSSKASSQTLAFRPFQIKDDMLLAPIVRNSLGQEQRSQLDGLFRHRDEEADDEEEEEEQDIVRRKPPNRANLYLSELSSGRRKPLKMQRDVKLQRRTKDEEDDDDVQVIDYLSPAGLPIEVEQPKQLTRMKAKYLHFADNRRPPYYGTWRKKSSSISARRPLAQDKVLFDYEVDSDCEWEEEEPGESLSASEDEKEKESEEESEEEYNEWYVPHGHLSDEELQNDGDGMEDGHTREAQKAKLQVLQQEFAQEMKKQTKKIKARLLGPVWLDENGNKSELFPAIFAHTIDMYACWQVEPLSLEPPPEPERQDQTPEQPVPLQLDDRLMQQLVRLTHGNRNSKTFLINEYLEYLKTQATAEANQTTLPSKAVLREKFDELASWKTVELSTPEAAAASANSAKKGRKPKKRLCWVVASDMLEKFQLPDLQLQNQWNYTLTPKVSDGPDAAQQEQSPPADAVPAASPASNQTTNSAPTTPISGQTQAGQGVKKRATLIMSVPRDQPIPSATKNKLISQFLQRQSDASKPKEKMQEKPPPIVFDDVVMLSD

SEQ ID NO: 3100 - DNA, 2656 bp, DROSOPHILA
cagcgaaaaaacaaatcgatatgtagccatgtatttactaattttttgttgtattataaattgccaacagggcagttaggaaaaataaaacaagctttcaaacgccttcactgatacgcgttcagattctttttgggcaagatgatgttgtaatgctggaatttggtccaagacagcagtatgtccttcgtcctgccgtgcggcgcctccccaaaagtctgcaggcagtctctttagtaatcaggttgatcgtagccaacttcatccacttaccttgcagcacccgtaaattttcattactttcttgtcctccttgttgctgatgaaccctccacccaggcatttggcgcaaattccaattttgtccatctccttttggatttcctcaaagatttcctctggcgacagaacgattagaacacgtattagctatactgattattagaactaaccgtggtccttggaggcggatcctcttacaatggtcctgccgaacctagttaaaccgtgcatgtgaatcatcatcaaaaggtacttgttcttgcctttagaaagctgaactctaggaacatttatcaaaagggcgtttacgcgcgaagaactttgccttcgaaggggcttcaacaattgtgaaacaggtgccaaaagattcaaggttttcattttggaaaaattttaggaaaacgcactggaatttagatgaaatattccgaaaagaaactggtatgaacggtagcaaggctccagctagactgattttgtcagaagccttccggtcgtatgctaaattcaagactgacacgaaaatcggagcacatgtgatcattcaaaaagtactaagcccttgtatcttgtgaaagaaatttttgtatgaactaaactataaatgcaaaattactcttctttctactctctccagaaatggaaatatcaaccatattccgccaattacaatcgcctgttcgattaccccttaataatattgaaagagcgctacttttatattctattttctttttattagtactgaatttccattttcgaaatttatgcaactttattgtttaacggttatcttaaagtccttataagtggtccacgcttgaagtatattccttgtccttgtgtgatcagcaccgccgaaagtctagggagacccatcaagaaccattagccggtgcttcaaggaccaaggatcctctacttaccctggaggtgccatagatcttaatttttttattttctgcctcgttgagaatccttccaccaccgaggattttggcacatatgccctcgggttccagctcctccaaaatcgagtcgaagaccgccactgaaagaaggatttgtaagactgctcaaggttaagcgtccagcagtggaaactcacagtgattgtcaacatcggcgccacggacaataactcttccatacttcgtgaagccatgcgtatgaatattcaccaacaaataacgattctgacccttggttatcttgacccggggaacgcctaccaaacttatcaaatcggttgagtaacatttttctaaaaccaagtatattagggcttgtaaatcttaatattgaatattcctaagccttacgaaacggagaaacaatatgaggaagcagacgcaatgacttgaacattttcattttatttaaccaaaggaaaagaaacgaaatttgtgtacaaactgattaatttagatccgaaaaggtttagtgcgagcagttgcaaagctacagactaactgcctttcagagcatttctcaattttaaatgccatttccaataaaatcatggcacacaggatcaaagccaatggtataaattcatgtcagtgtgcttatgtggagtcttctctcgttgattgcagctaatatccctcatcggagatttcgatcgtgtagtccgggtatttggtggccaggatgcgtttggtctgcgcgtgatcagcttttccaaagcccttaaatagaaagacttgattagaactccagaaaatttttcaagtagttagatacatcagtccatccactgcccagcgacccctttactcaagggaatagacccacctgcgagtatccgtagaccttcaagtacttcttctcgggattgtgttcaatgcgaccgccgccaggacactcggcccgcagccccagttttttaaagacctcctcctcgcgctcgaagatgtcggctgtgggacagtaaccaagctaagtgggcacttgatgggtgatgaggatccgacttaccatgccatgtgcagtccgcaaatccgcggatcaccgcctttgaagcatctcctccatcgaagacattgatcatgacatacttgaagatgccctctggactgatgtgcaccagtggcacgccggcaagtgcttcctcggacattttgtgaatcagtcgtagtcctttggaaagcagttggaggcgattcattgtggaaaagtgtttgaaaacagaatttaatgtcttaccaaccggcaaattttccaaaaacgctgctttagtccagcaatgtgaccagatacttttattctcgttcaccttatgtatcgatactattaaaattataatattcagttatttctttagtacatttgggaaaacgttttttgtactactcagtatattttagtaata

SEQ ID NO: 3101 - DNA, 480 bp, DROSOPHILA
atgaaaatgttcaagtcattgcgtctgcttcctcatattgtttctccgtttcaaaaatgttactcaaccgatttgataagtttggtaggcgttccccgggtcaagataaccaagggtcagaatcgttatttgttggtgaatattcatacgcatggcttcacgaagtatggaagagttattgtccgtggcgccgatgttgacaatcacttggcggtcttcgactcgattttggaggagctggaacccgagggcatatgtgccaaaatcctcggtggtggaaggattctcaacgaggcagaaaataaaaaaattaagatctatggcacctccaggactttcggcggtgctgatcacacaaggacaaggaatatacttcaagcgtggaccacttataaggactttaagataaccgttaaacaataaagttgcataaatttcgaaaatggaaattcagtactaataaaaagaaaatagaatata

SEQ ID NO: 3102 - protein, 140 aa, DROSOPHILA
MKMFKSLRLLPHIVSPFQKCYSTDLISLVGVPRVKITKGQNRYLLVNIHTHGFTKYGRVIVRGADVDNHLAVFDSILEELEPEGICAKILGGGRILNEAENKKIKIYGTSRTFGGADHTRTRNILQAWTTYKDFKITVKQ

SEQ ID NO: 3103 - DNA, 4249 bp, DROSOPHILA
tttttttattttggtcgattttttaagaacggtcatcgcatgtaaaatgttaaaccgtgtgcccttgaaattttttaacttttattgtactaaaaattaacgttttaatgttattataaaataaaaacagttattttttctcaataccaatataatgacccattcttaccaataaattaggtatgaccgtttgctaactctaatttagtgtaatggtaccaatgataaatgccatacagctaaaagaatatatgtaacattagttttgtatatatgtatattctacacaaaaatgttttgatgtttcaaccaaattttaagattcatatatatatgcgcattttgttgtagatgattagcgaaaaacatgtttcgaaaaattttaatataccgatattcataaagggcaggcaataatcgaatgactttttggtgatgtaaaatggcaaaatcactgcgcggttctctgaaaatcgctgaatacctacatatgatatctatttgtatacccgttagttgtaagcaaaatatacaaagtatatgaattctttatcaggatcactagccgagtcgatctagtctttttaattgtcttgccttttttcatctatatatgtaaatcttgaaaaatcgtcccagcaattgtgaccaataaaattatttattgctttgattccggatgaaataaatattgacatatagaagaaaataaagtttaaatgtcgtttctaaatttgtcattcatattttaattaactgcaacccaaatctaagaaccttatattttgtattaactgtttccatgcgcttgttctatatatatagaaatttcataaaagttagtccttaaaacttcaagtataattacatatagcgacactatgtgcctttatttaatttttaatatacatttttgattattatattttcatccagactgggaatcgtttatattatttacaattacattttaatttctccaaaatattttttgaggacttcaatgtagttgcacttgcagatcgaagggatagtctcttgaattaagactctgcctgaacagttgtgtgtgttgccatgctacatcgcccttgccacccgtaagtttggccactattttgaatccagtggcattttcaaccgaagcgcttccgtcggtggcatcgacagtcacgctgatttttccgtcgccaaaagtttttgtctcgaaaactaagttgtaagacttaacctttaaattggtcttgctgaaatcaaacgtccaggcaatttctccgcaatcggtatcctccagtctagccaaatatgccattttccaatcgcgttccactttccgaaatatgttctttgaggaaaattgcgctttttgccatgtcttatagctatccaaaatagtgatgtgttctccttctatggatataaaagttaaaagcattcatagtgctgtaaataaattcatgactcgcctttggcatatcgttcgtatgtatcggtggcacagctgtaacgcacattaagttgccttttttgtagttcggttgcacttagattgaaaacgaatatctgtaaatacatgaaaggtgacaaacggccggcagcgcgtctcaggccagatcacttacattggtaaaagtatgctctccacgtgactgccgccaagaaagacttcccgaactccgacccttcagctcgttttctgtcggcttactaaacaggaaacgggattaaatttaatttcgaacagtttcctgtaaatgcttaccgctctagcgtcaagccgatgacctcgtacatattgcgctggctgaggaataactttcgatcggcggtgcaattttgccgccgctttgctcgaatcgcgtccagcgtttgcaccatttctttttccccgcacagctttcgtaggtgtagaatcttctggtggtcattagtatagcgccaagtcacatcttggatgtcgtccctagagtatgcaagaatgtagtcgatgtgacgtttccagccatgctgatacatcagcggagaatctataacgttctcggaggggtcaacatggagccaacgcatctgggcctcggagtacacctcggtccagacgtgatcaaaatgcgagtggacaatacgggcgtcgtagtcgagggcgcgacagaggaatgtgaagcaattggcatattctccgcaacggcccttacgggaaactaggagctgggaaatgtcgttatagcggtagaacttgctctcctggccgcagcaaacggtgacttccacccttatatcaccttcccgttcagtgcggcgcagcctgctctcttcactcccacacacgcggcaaggtatattgtttacccactggaagaactgcgtgttgaaccagtttaccagctccacaagcagcaagtcgcgaacacatggctccttctcctggcgctcacccgacgcaatttgatcttggatgtctatcagtttctcgcttgccatttcggtgagctcttccacaggaatcagagtgcggccagtagccagcagcaggttatcctcgtactgcatgactgcatcggaataaagctctagcgactgcagaaagttattattggtgcgctgaaaacaagcttccacatcagaatacagcagaggtctatcttgttcgatggctggcttaccaatacacgggggaaggcgattctatggcgatattccacagaaggcttgatgaacaagggcgtggtgctggtggtgctttgttgaggaggacctattaaaatccgagacatgatgattaggatgtcagtcttgcccccaaagcttactttttgacactgtgccgttaagccaggcagtgcgtctctcgctcagcgcatctctgtacttcttcacctgctgcagtgacacctctgtgggcaaggtgtaggcgttggaactgggggcgcgtacgaagcctatggcttccagtaacctctcacagccgggcaaggacagcagcttttctttaatagctttgttttcctgccgtatggtgcggaacatggagttctccggctgcgccaagatgttctccagcagcactaacagaatgcggaccgcttccaggtaggcttcctttaaccctcgctcctgctgctgctgaccagcagaacgggtcttcggttcgatctggtgcacgcactccaagtttatgtccaccatgttgatgaccagctgccactatcagattggtttcgtcgttagtaggggtggccggcggatgacaatcatgcagacacaaagggttatggtgttggaaaacgcgattagtttagcgaacttcaagcgataacaaaagaggtgttttttaggtttttttttgttgaatgaagccagccggattccactagcgtacatgttcttttcctgtggggatgcacaacaaatttatgcacgaaaaatagagcttggatctcctttttatagacattttaaaaaaggtaagaaatctctaaatttcaacaattgctttaaataggaaataagttacttagaaatattaagttatcacgtgttgaaattataaaaattactcaataatcttttgcttaaaaaaacggattaaaaatacacaaagcattcaattaccatttttagttagtagcgatcgaagaatgttttgatttggaactcccaatatttattaggtcttggaagtatataaattatatattaaatacataatgtaatagaaaaataaaaaaaaatttttaggaatccacttaggactaagggtgttctaaaatggacggttcatgtttcaaattaagtttacattgttgttgctcaaagagaaagcttatgagagcaaggatcctggaaaattgataaagtaattatgcacagctctccgaaaattcgccttacagtaggaacagctcaaagggacttgaaaatactgccagctccagcactcgcaccaagcaaattagtgacatgaaccgatgtacaacaacataccaatgttaacttgctaaatgtgttacaccatttacagatcgtttttcatgtggcaagatatttcaatattttttaacgctatttgttatctttatgaataacgcttgctacttcttagtctgaataatattcggcttataaagatttcagggattctgtaatggatacgttcgaacttatttcattaaattagagataaacaattatgttattgtaaaaaatatcaattgaaatcatgcgaaaaaaaaacttattctcagaggagaat

SEQ ID NO: 3104 - DNA, 1842 bp, DROSOPHILA
attgtcatccgccggccacccctactaacgacgaaaccaatctgatagtggcagctggtcatcaacatggtggacataaacttggagtgcgtgcaccagatcgaaccgaagacccgttctgctggtcagcagcagcaggagcgagggttaaaggaagcctacctggaagcggtccgcattctgttagtgctgctggagaacatcttggcgcagccggagaactccatgttccgcaccatacggcaggaaaacaaagctattaaagaaaagctgctgtccttgcccggctgtgagaggttactggaagccataggcttcgtacgcgcccccagttccaacgcctacaccttgcccacagaggtgtcactgcagcaggtgaagaagtacagagatgcgctgagcgagagacgcactgcctggcttaacggcacagtgtcaaaaagtcctcctcaacaaagcaccaccagcaccacgcccttgttcatcaagccttctgtggaatatcgccatagaatcgccttcccccgtgtattgcgcaccaataataactttctgcagtcgctagagctttattccgatgcagtcatgcagtacgaggataacctgctgctggctactggccgcactctgattcctgtggaagagctcaccgaaatggcaagcgagaaactgatagacatccaagatcaaattgcgtcgggtgagcgccaggagaaggagccatgtgttcgcgacttgctgcttgtggagctggtaaactggttcaacacgcagttcttccagtgggtaaacaatataccttgccgcgtgtgtgggagtgaagagagcaggctgcgccgcactgaacgggaaggtgatataagggtggaagtcaccgtttgctgcggccaggagagcaagttctaccgctataacgacatttcccagctcctagtttcccgtaagggccgttgcggagaatatgccaattgcttcacattcctctgtcgcgccctcgactacgacgcccgtattgtccactcgcattttgatcacgtctggaccgaggtgtactccgaggcccagatgcgttggctccatgttgacccctccgagaacgttatagattctccgctgatgtatcagcatggctggaaacgtcacatcgactacattcttgcatactctagggacgacatccaagatgtgacttggcgctatactaatgaccaccagaagattctacacctacgaaagctgtgcggggaaaaagaaatggtgcaaacgctggacgcgattcgagcaaagcggcggcaaaattgcaccgccgatcgaaagttattcctcagccagcgcaatatgtacgaggtcatcggcttgacgctagagcgtaagccgacagaaaacgagctgaagggtcggagttcgggaagtctttcttggcggcagtcacaaggagaacacatcactattttggatagctataagacatggcaaaaagcgcaattttcctcaaagaacatatttcggaaagtggaacgcgattggaaaatggcatatttggctagactggaggataccgattgcggagaaattgcctggacgtttgatttcagcaagaccaatttaaaggttaagtcttacaacttagttttcgagacaaaaacttttggcgacggaaaaatcagcgtgactgtcgatgccaccgacggaagcgcttcggttgaaaatgccactggattcaaaatagtggccaaacttacgggtggcaagggcgatgtagcatggcaacacacacaactgttcaggcagagtcttaattcaagagactatcccttcgatctgcaagtgcaactacattga

SEQ ID NO: 3105 - protein, 591 aa, DROSOPHILA
MVDINLECVHQIEPKTRSAGQQQQERGLKEAYLEAVRILLVLLENILAQPENSMFRTIRQENKAIKEKLLSLPGCERLLEAIGFVRAPSSNAYTLPTEVSLQQVKKYRDALSERRTAWLNGTVSKSPPQQSTTSTTPLFIKPSVEYRHRIAFPRVLRTNNNFLQSLELYSDAVMQYEDNLLLATGRTLIPVEELTEMASEKLIDIQDQIASGERQEKEPCVRDLLLVELVNWFNTQFFQWVNNIPCRVCGSEESRLRRTEREGDIRVEVTVCCGQESKFYRYNDISQLLVSRKGRCGEYANCFTFLCRALDYDARIVHSHFDHVWTEVYSEAQMRWLHVDPSENVIDSPLMYQHGWKRHIDYILAYSRDDIQDVTWRYTNDHQKILHLRKLCGEKEMVQTLDAIRAKRRQNCTADRKLFLSQRNMYEVIGLTLERKPTENELKGRSSGSLSWRQSQGEHITILDSYKTWQKAQFSSKNIFRKVERDWKMAYLARLEDTDCGEIAWTFDFSKTNLKVKSYNLVFETKTFGDGKISVTVDATDGSASVENATGFKIVAKLTGGKGDVAWQHTQLFRQSLNSRDYPFDLQVQLH

SEQ ID NO: 3106 - DNA, 6348 bp, DROSOPHILA
gcaaagcacaaccatcccggcacatccttgcacatttgggaaacgtattcgaagctccgacagcgtttgcatattaataatgcgaggctaatatttgagtttgatttcggaccaggtcctaacgagctgctctcacttcccgctcactcgcttttgatttggcacgtgccacctgcagagctggcctggcaggtgaggcctgaaagttcatttaatcactggtcgctcattaattgcaccgcaaacatggcgcataactggcgcccaacgggttatcggcactcgctcatttgaatggctctcacgtacctgatgttttgcgggatgatgttttgggtactgttgacgtttttggggaaagggttgccagctaatgccgcaaacatcgtgccgatgacagaactattgtaggtgatgagctctggggttttcaactgggcctgatgatggtacacaacagtttaaagtgatttggggtatcggaaattatgctcgagctgactaaaaatagcgattgtgtcgtttttgccataatttcacttaatttttatgagtaaatttaaaagcttaacagggtccttctacatagggcttttaagtgcgtgggctatacttactagcgcacccaggcacccacccacacattcaaagcccacgcacgctcgcttatggttgcctcatttccgaatcaccttctgcggtcctttggtttgcgtggcagcaacgctgcgtatgcgtgatttgtgtgtcttatcaatcacgtctaatggaatttcctttgcctccaccagcagctctcgtcgcgactgtgactcttgagcgaggacaaagttccttaataatttataataagttggcccagcacgcgaccttaaaattgaaaagttttgcaatgtcgttcgccccaatgacttatgcgcccatatagcaagacattatcgatgtactttatgtatacgcattgttcttcttcaaacttatgattatgattatgtaaactctagacagactccaaaatcagggctgcgtaaggctccagcgtcaagttgctcagtgtgacgctatcactgcgatgaggagagggcaaaagaaaagttagctgaggacttgactatgggatggaagaggagacttacccaactgtggccttggcttgcggattgagcagcttgattttgtagctaccagtcgcatatatggcactggctacgtctattccagagacactggtgtccagcacattggcaaccagcacgtaggagggctccccgctcagatacctcctaatggccaccacattgtcgcccacattcgcatatcgagtggcgccaaactgcagagtctttgattttcgcagatccaccagctgcttgtacaagctcaagtggctgggactcgtggaattctccgcctttgcatttacggtaacatagtttggatttattggcaaccaggtggtggcgttggtggagaaacctgcgttggcctcatcgctccactggaatggagtcctggcgggatcgcgagtgaactgctcgtaaatatccgagttggaattgcaggccgcaggatcccggctgtcctcccagctgatgtccaggtcagtcattcccagttcctctccctgataagtgatgctcacgccgggcaggaacatctgcagcatattcatcaagtcgatgcggttctcgccgtagcgactacccactctccgctgatcgtgatttcccatctgttgatgaaaagaattatgtttagttttaaataatataaaaaaaagaagccctggagaatgtcctgaataactcaccacccagtttgctgtctggccagccggcatttggctcaaccagctactgattatcttcacgaatcccgtcgcattgagctgagtgttgttcttgtctccattgccgccaataatgaactgaaaattaaagggcatctgagcacccttggtggtacgattgccatagaactgcatcacatagtccaggccggaataggtctccaccatgataactcgcgtatcaccgccgtgaatgcgttggtaatcgtccagcagagtgcgccactggaaaaccatctccaccgtttcgcgcagatcctgagtgtagatgtgcttcagataggaggagtcatccggatcatcggtgtagccactcaacggctcgtcgggataccgaccatcagcgtctggcaagacctcaaagcaccacggcaccgcatccatgcggaacccagctactccacgatccaaccagtaggtgagcacccgcttcatctgggcaaccaccgctggattccggtaattgagatccggctgcttaacggcgaactggtggaggtagtattgctggcgttcatcgttccactcccaggcgcttccgcggaaggcttgtagccagttggacggtggttcccttttcccggtagtggcattcacgtagccatcgtgccacatataatagtcctcatagcctttttccctcttaaccgacttctggaaccagacgttttcatcactcgagtggttcggcacaaagtccaggatgatcttgatgttccgctttttagcctccgcgatcagttcatcgaagtcggccagggtgccgtactccggctgaatatcgaagaagtcagaaatatcgtatccgaagtccgccatgggcgaactgtagatgggcgaaagccaggtggcagtcactccaatctcctttaggtagtccaacttggaaatgatgccctgcaggtcgccaatgccatcgccatcggagtccttgtaggagcgcggatagatctgataaaattgtgccacttgccaccaatctcgagtggtgtccgcggccgtggtcgctctctcaaggtcgagatccactgctgctgcactcccaagggcgcagtggatccccaaaacgagtatcgctgcgattaagactttaaaacacgccatgtctgactgaccaagtaagctggtgggatcccgcttttatagacggccccccagagatttctcaactgataacagttcgagtgctttgaatgactttattgtgagtattttattattaactagcatatggtgggaactcatcggctgcttagatagagccccacttgagccagccatagataaacccccagcacgggaagaaaacgagtttctccgtttgtggcatagctataatacgaggaggtggtctgcaggacaagcgaatccttgggctggagctgcagcgatgttgagttcacgagatcgctaaaagcaagggagatataaaaagtagcttaaataaaaaacctaagcaattgctcaattgacctaccccactttgacttgagatcgctctgtgaccaccacaactttgagttgaggtggcaagtcggggaaactctgcagcaaatttatggtttctactccgtcgtaaatgttcaaaagggtcaagtacgttgaatcacgctcgagatacctgcgaaatcaattgttattgtcgaagccagtggaaatatttttatctgtcaccgtttaacggccaaaacggcgtcgctgagggccttcacttcagtttcgccgcgtttaagggtctgggactgcttccttaactgccagagctgtttgaagacgttcaggtgactaaggggcttctgccgctcctgctccacattcacctccttgtaatccacggcgatgggcagccaggtcttgctggcattgctgaacccagcgtcctgggcatcagtccactggaagggcgttcgctccggatcgcgggagtactgctcatagatgctgggattggtgttgcaggccgatggatccaccgtgtccttccacgagatccacacattggtcatgcccagctcctcgccctggtaggtgacactggcgccgggcagcgtggcagtgagcatgtttagcatgtccacacgatccctgcccagccgggagcccactcggggctgatcgtggttacccaactggcagaaaagtcaattagttaagatggaatgaatgtttgttgtcgcatggaccacctaccacccagttggcagtgcgacctttgggcatgtgctgcagccacttgagcactgttccctcgtaggcgtgggcattcgacgagttggacagctcgcttatcagcagaaagttgaacggcagctgagcgccctccgccgtcgcattgccgtaatactgcatcacgatatctatgggtgagtaggtctcggccattaagatgcggtcctccccgccgtgctccctctggtgcgcatccagaacagctcgccacgagtacaccaggtcaatggtctccggctgatccttggtgtagatgtgctgcagatagccatagtcctcggggtcgttgtcccagtcgtttcgcggctcatcacggtactgattctgattatccggcgctatttcgaacacatggggcactgcatcaatacgaaagccggctactcccttgccaagccaaaatctcaagacgttctgcgattaaaaaatattaacattatataaacaacttcacttgcgactattactcacactcatggtctcccggacctttgggtttcgatagtttagatccggttgcttcttcacgaactggtgcaggtagaactcctgacgaccttcgtgccactgccaggcacttccccggaaaacgctaatccaattggagggcggatgccgattgccgttttccatacgcccaggatgccatacgtagaagtccttgaattccggatcacgagccgccgagcgacggaaccactcacattcatcactcgaatggtttggcacaaagtccaggatgatcttgatgtctagctttttggcaacctccatcaggtgttcaaagtccgccattgttccgaaaataggagcaatctcagtgaagttggctatatcgtagccaaagtctgccatgggtgaggtgaagatgggcgatagccaagtggccgtgattcccagctccttaaggtatggaagttgctccgcgatgcctgccaagcaagttaattatatttactgatacatacttatttaatcgctctcctcaccattcagatcacccacgccatcgccgttgctgtctttaaatgaccttgggtagatctgatagaaggccgcggtctgccaccacttgaggtcagcgccatggtccccgatgccaacaaaatccgcatggtaattgggatacggttggcccagagttgggcagtgtaactggaggagcactgccaagaacgctatcagtcggtattttatcattgcaacagactgtatttaataaagcggtctgattaaagcagatctgccttgggcagaagacaaatgcgactgacgatcgaatgcaaacagaattatgcgaggccttccatatttaaatttcagagagtgcgggagaaaagtgcatgggcttagttgttgagtaggtacatatatcaagtaaaaatattgcataagtgcatcgaatgaaattattcgataaattaacatagatagttacgcaacgaggaatatattgttcaacaaatatattttacataagctttggaaatttgttagccgaccccttttgatcattttctacgcccatgcagaatatgcatgattttatttataaactgcgcacccgctcgagagaaaaaagagagcacagcgaagatcttgtgagaaacatgagcaccacgctcagtagacagttatatgcgatcgctgatttctggggaggggtacctagtacttatcagcgaagaggatcataggtgcatattgactaagaaaacatttagagtattgtaaaaacacatatctagtccgacccgttggaggtttgtgacaaatctctccccaataaccatcacatataatgttttagcatttagtacatttttgaataaactaaatttcctagtaaccaaggaataagtgattctacaagaaagcttggagctttcttactggtataaaattatctacatacccacacgtataaatttttgtgtaattgtgtagtatgtgcctatgtaacattaaagaacagttaagtataatagcataccaacatatagaagcactttgttgctatgtttatgcaagcaataaggcccaaagcggatgtaacatgatcgtacacttgaaggctacaaagtataagggcatggtcagcatttccacgccgaccaaatgcacattacataagtacatagctcgctctctcgaaaagcctagatatataagatataagataagatataagatatataaccaaaattaacaagcttgtagaccgctttattatgcgaatagtgattgcgaacccccgaatctcggtcaga

SEQ ID NO: 3107 - DNA, 3266 bp, DROSOPHILA
gtcgcatttgtcttctgcccaaggcagatctgctttaatcagaccgctttattaaatacagtctgttgcaatgataaaataccgactgatagcgttcttggcagtgctcctccagttacactgcccaactctgggccaaccgtatcccaattaccatgcggattttgttggcatcggggaccatggcgctgacctcaagtggtggcagaccgcggccttctatcagatctacccaaggtcatttaaagacagcaacggcgatggcgtgggtgatctgaatggcatcgcggagcaacttccataccttaaggagctgggaatcacggccacttggctatcgcccatcttcacctcacccatggcagactttggctacgatatagccaacttcactgagattgctcctattttcggaacaatggcggactttgaacacctgatggaggttgccaaaaagctagacatcaagatcatcctggactttgtgccaaaccattcgagtgatgaatgtgagtggttccgtcgctcggcggctcgtgatccggaattcaaggacttctacgtatggcatcctgggcgtatggaaaacggcaatcggcatccgccctccaattggattagcgttttccggggaagtgcctggcagtggcacgaaggtcgtcaggagttctacctgcaccagttcgtgaagaagcaaccggatctaaactatcgaaacccaaaggtccgggagaccatgagtaacgtcttgagattttggcttggcaagggagtagccggctttcgtattgatgcagtgccccatgtgttcgaaatagcgccggataatcagaatcagtaccgtgatgagccgcgaaacgactgggacaacgaccccgaggactatggctatctgcagcacatctacaccaaggatcagccggagaccattgacctggtgtactcgtggcgagctgttctggatgcgcaccagagggagcacggcggggaggaccgcatcttaatggccgagacctactcacccatagatatcgtgatgcagtattacggcaatgcgacggcggagggcgctcagctgccgttcaactttctgctgataagcgagctgtccaactcgtcgaatgcccacgcctacgagggaacagtgctcaagtggctgcagcacatgcccaaaggtcgcactgccaactgggtgttgggtaaccacgatcagccccgagtgggctcccggctgggcagggatcgtgtggacatgctaaacatgctcactgccacgctgcccggcgccagtgtcacctaccagggcgaggagctgggcatgaccaatgtgtggatctcgtggaaggacacggtggatccatcggcctgcaacaccaatcccagcatctatgagcagtactcccgcgatccggagcgaacgcccttccagtggactgatgcccaggacgctgggttcagcaatgccagcaagacctggctgcccatcgccgtggattacaaggaggtgaatgtggagcaggagcggcagaagccccttagtcacctgaacgtcttcaaacagctctggcagttaaggaagcagtcccagacccttaaacgcggcgaaactgaagtgaaggccctcagcgacgccgttttggccgttaaacggtggtggcaagtggcacaattttatcagatctatccgcgctcctacaaggactccgatggcgatggcattggcgacctgcagggcatcatttccaagttggactacctaaaggagattggagtgactgccacctggctttcgcccatctacagttcgcccatggcggacttcggatacgatatttctgacttcttcgatattcagccggagtacggcaccctggccgacttcgatgaactgatcgcggaggctaaaaagcggaacatcaagatcatcctggactttgtgccgaaccactcgagtgatgaaaacgtctggttccagaagtcggttaagagggaaaaaggctatgaggactattatatgtggcacgatggctacgtgaatgccactaccgggaaaagggaaccaccgtccaactggctacaagccttccgcggaagcgcctgggagtggaacgatgaacgccagcaatactacctccaccagttcgccgttaagcagccggatctcaattaccggaatccagcggtggttgcccagatgaagcgggtgctcacctactggttggatcgtggagtagctgggttccgcatggatgcggtgccgtggtgctttgaggtcttgccagacgctgatggtcggtatcccgacgagccgttgagtggctacaccgatgatccggatgactcctcctatctgaagcacatctacactcaggatctgcgcgaaacggtggagatggttttccagtggcgcactctgctggacgattaccaacgcattcacggcggtgatacgcgagttatcatggtggagacctattccggcctggactatgtgatgcagttctatggcaatcgtaccaccaagggtgctcagatgccctttaattttcagttcattattggcggcaatggagacaagaacaacactcagctcaatgcgacgggattcgtgaagataatcagtagctggttgagccaaatgccggctggccagacagcaaactgggtggtgagttattcaggacattctccagggcttcttttttttatattatttaaaactaaacataattcttttcatcaacagatgggaaatcacgatcagcggagagtgggtagtcgctacggcgagaaccgcatcgacttgatgaatatgctgcagatgttcctgcccggcgtgagcatcacttatcagggagaggaactgggaatgactgacctggacatcagctgggaggacagccgggatcctgcggcctgcaattccaactcggatatttacgagcagttcactcgcgatcccgccaggactccattccagtggagcgatgaggccaacgcaggtttctccaccaacgccaccacctggttgccaataaatccaaactatgttaccgtaaatgcaaaggcggagaattccacgagtcccagccacttgagcttgtacaagcagctggtggatctgcgaaaatcaaagactctgcagtttggcgccactcgatatgcgaatgtgggcgacaatgtggtggccattaggaggtgatagcgtcacactgagcaacttgacgctggagccttacgcagccctgattttggagtctgtctag

SEQ ID NO: 3108 - protein, 1043 aa, DROSOPHILA
MIKYRLIAFLAVLLQLHCPTLGQPYPNYHADFVGIGDHGADLKWWQTAAFYQIYPRSFKDSNGDGVGDLNGIAEQLPYLKELGITATWLSPIFTSPMADFGYDIANFTEIAPIFGTMADFEHLMEVAKKLDIKIILDFVPNHSSDECEWFRRSAARDPEFKDFYVWHPGRMENGNRHPPSNWISVFRGSAWQWHEGRQEFYLHQFVKKQPDLNYRNPKVRETMSNVLRFWLGKGVAGFRIDAVPHVFEIAPDNQNQYRDEPRNDWDNDPEDYGYLQHIYTKDQPETIDLVYSWRAVLDAHQREHGGEDRILMAETYSPIDIVMQYYGNATAEGAQLPFNFLLISELSNSSNAHAYEGTVLKWLQHMPKGRTANWVLGNHDQPRVGSRLGRDRVDMLNMLTATLPGASVTYQGEELGMTNVWISWKDTVDPSACNTNPSIYEQYSRDPERTPFQWTDAQDAGFSNASKTWLPIAVDYKEVNVEQERQKPLSHLNVFKQLWQLRKQSQTLKRGETEVKALSDAVLAVKRWWQVAQFYQIYPRSYKDSDGDGIGDLQGIISKLDYLKEIGVTATWLSPIYSSPMADFGYDISDFFDIQPEYGTLADFDELIAEAKKRNIKIILDFVPNHSSDENVWFQKSVKREKGYEDYYMWHDGYVNATTGKREPPSNWLQAFRGSAWEWNDERQQYYLHQFAVKQPDLNYRNPAVVAQMKRVLTYWLDRGVAGFRMDAVPWCFEVLPDADGRYPDEPLSGYTDDPDDSSYLKHIYTQDLRETVEMVFQWRTLLDDYQRIHGGDTRVIMVETYSGLDYVMQFYGNRTTKGAQMPFNFQFIIGGNGDKNNTQLNATGFVKIISSWLSQMPAGQTANWVVSYSGHSPGLLFFILFKTKHNSFHQQMGNHDQRRVGSRYGENRIDLMNMLQMFLPGVSITYQGEELGMTDLDISWEDSRDPAACNSNSDIYEQFTRDPARTPFQWSDEANAGFSTNATTWLPINPNYVTVNAKAENSTSPSHLSLYKQLVDLRKSKTLQFGATRYANVGDNVVAIRR

SEQ ID NO: 3109 - DNA, 6338 bp, DROSOPHILA
atttgttctcgtaatttggagcactcccgcacgaatcacgaggcccttccacctccagtttacaatttaaatgcaaaacagacaatggtcaataaccggaatcgttcccaacagtacacaaagatccccgaaaggttttgaaagacaattgcatttcgtttgggggcaagtcaccataccatcaatacctcaacgcgctgagcaaatacacgtttctgaattattagggttaacacactctgtgactggctcagtgcatgctttgttatgtatggatggatggatggatggatggatgaatggatgatgagtgcccaaagcagatttgccacccgcctcttggaaagctcgtggttctaatcgcaccgcttgaccttttggccacaagtggaagtgcggcccacgaagggctgaaaggcagcataacaaagaaattcatcgcaatactgggctaataccggcttgtagaaccgctaatgatggcaagtcgctcggatgattcatgacagcctcattaccaggctgcaatcgcggctgtgggaggttaggctccgagtcagagaccctttacacttaaccttcgggcctgcggccccggcaaaattactacccgcaaatgtacaccgagaaaaatcgtgaggtaatgtagtattaggtattgggctatattatcaaaacgggaatgcaatctgcgggtagtaagagcagggatatcccatttcatcccataggcataaatacttacttaaatccaacatttttggaaatatctttcagacctaaacccaaactctaaatgcgtgtttatatgttatatggaactcaaagcttaaggtcccagccgacggactgtctgccccaccgatttctggggtgtggcaagaaggcctgttgttcggtttcccttcgccatctctttcgctgcattttcgccagcgctttcgagcttctggctggttaaaatggcttggaccaacgcaggccgagctcattcctcagccgagtcgcgtgaaagttggacgcaaagtaagcgcagagacgaagaaagcagaagacagcagacagtcggattctttattcaagaacaaacagtgaactggttggggattggctgtgtgacccacttccagaccgagaccgaagacagaatttcggccccaaagtgaaacccaatcgcagctcgtacttgggcgctttaaattctatcccgactttttcactttcgctcgtaaagagcgcgggctgcgtcatctgggcgaaattagcatatccatatccaaaagctgctaatcaattacgaaactagaaaagtgaaacacagagtccatcttagccaacttccgtttacttgtactttcatgcagacgaacccgaaaaatgagcggaaagatggtcttcattgtgctcgtcgccgtgttgggctccacttttgcccaggagcagcgtaagtagtgatcaaatactcgaagtgtgataagtgatacctatttggctgagctttctaagttacatcacttgcgacgacgactttaactttccagccggtccttggacacgtccaccgaccaacttggcccaagtggcctatgcatttggcaacagctaattgcccaccctcaaaagacgtgctccggcaacaaagaaagtcgacttgcgacggatctggtcgggtaggttccagaatggcaattgatggccacgataacctcggttaatagttctggctttgcagtcacttacccggttccataaagatcccacttaatgggattgaccttgattcagtactttgccggctagcctctaaaaaactctacgttcaagtgctccgattgtgccataatttctaagaaatgctctgtaccaatcacaagaggtttctaactcacattgagggcacactgtttgggaaaccttcccccgaaacccgtcattattattagttttcacacatccctccccaccacaacttcgataattaacccggccataaacctgtcgccggttttgtcccaccccatcgcatcccagcgattcatagttcagtccgaacatgttcgcaacgatcgttgtgagatcggcaagataattgtgaacttgaacccacgtcaactgacgcattcacctgggacatgggaatcgcaattacgggaggaaagcgaatcttcattttcattgtgagccctgttgattaattcactggcctccgccagacaatgacatccacgaacatgcaaaacatcacacatacatacacagaccattgcattcgaaatggactcattgtctcaccaccctcgaattggcctttccagcctactacctgcaacagtgcccacgggacgaggcccagataaacgaatgccttcgcgaaagtggcaacaagctggtgcactacctgcagaagggagtgccggagttggacatctatgaggtgagctgaagatatgttaagactccagacaacacgttactgcactttgaaaatattaaattaattaagagcaaaaagagatagttttattcttaccctaatggctacatattcagatcgccctgtaacttatttctgccaacagatcgaacccgtgatgattgatgaaatcggcattgtgttgggcagtggtccggatggctaccgcgcacttttccggaacattcaggcctacggtgtgagcaatatcacagtgaccaacatccggtgagtcgtgcacatccttacagctaagatgctatgaaaggtttaatacattgcgaaataaatcaaaggtcgggttcgaaatactaaatagttttaaataatgagtgtgcaatgctacaagttggctatatacatatgtatattatttatatttatattcatagtctactaaaatatgtaagtcaatcgtaactaagctaatcgatttaggaattcggttggatgcacatttagtgtcttgtatacctgggcccgtttcgccagttcacgatacagaacttcgattccctgtaattataatttaatttgctgctcatttgcctaactgcccagtccatcggtcagtgagtcaatcagtcagttggccactcaatccgcctccccagcacgcgatctccacttagcattttgtcaacattgtgggggctcatttgaatgagcgcagtttgcaatgatttgacggggtttgccaaagcctcgtgaatacctcgtagctcatggtcttgatttatggacaaaacgtttggcacacgatgcgatgggaaatcgattgagcaataaccgatttgcatttcagtggttccttaacttgcttgagcgttttatgtttgcccagaccaatttgcatttgcccggggcttttattgaagtatattttagacgcgtaattatctgcgacaaggtgtttgcccaccttagctggtttcacttattctcaaatgggcttaaatgagaaatcagggaaatagggcccgtggattatctggaaaagtggttcgctggaaattcatttttattggtaatagcctgcctacttatgcaattcattgggagttttgtggagtcgggaaattaatccgtgggcagctttgggatgatacattatcttagctaataacgattggttaatctgaatcaattcgacggcgaattaaaggttttgtgtcaaaaaatttgattcgtgcagagcaattaaagtgcatttgtgatattcttagcatagtcgtattacttatgcacctttagtttctcggtgttataagaaccacaattaaataaatgccaacagcaaaagaattaaaaattaaaatgtttatgaatgatatctgaaaaactggttatctctccattttcgcctttcaaatgttttcccacatataagagaggctactctctaacaagttgacccactctcctcggtggcctctgatgtcttaagtgccccgcattatgcaacaccaaagccaagaacacttttagccatgctttccggtatttgggacgccagctccgccgacaatagcaaaggcagaggcagttaaggcggcgaccatcaatctggcaacagacacttggctctcaattggcgaaaataaaagaatccgagtggcagaaacataaacacagcacgggcaaagacgactggctcacagatcgttgaccaagaaacgagccagaaaagtgtgccaacgctagattctctaagtggagagcattgtttgggccggttccagtatcggtttcgatttctgtggccactgacaggctaccctgacatagggtccaatatattcctgcagtctgcttgagactgcattactagtcttagaatactttgcaaatatgtggttcgcacgtaaatacatagcaattgtgtgttttttgaatatctaagtgaggttgagctgagttggaagggtattggaagggtcggaattctcgtattggttctcgtattgatttcgactatcgagaagtaccccctagctccaatcgtctagccgctttggtttggatctctttggcatcgaatgtaagacttaagagagcttcaaggctaaaaaatacgacaaaatagtcggctcatcttcgcatgaaacgaatgaaaaggcagtttttcgctaagctcattacttcgcatattgtcactgtcattgccattagaggcgcccattaatatccacaatatccatatctcatatctcaacttgtctttttgcagctccgacttggactcgctgcagttccagctgacgtgcgagataccccgcattcgcgtcaaggcgcagtaccggtccacaggtgttctgatcttggtgaaggcctccggagccggcgactactggggggagtacggtgggtaccgggtttctgggctgggatgacgcactgctaatgactctcgatcacgcagagggagttaaggccaagatctacttcaaggcggtggccaatgagggtcccgacggtcgcacctacctgacgacggactccgtcaagatggacttcaacgtgaaggagatccaaatgggtgtggacaacatcgccaatggcaacacagtgatacgtacgtagtagtagtcgaaatactatgttttgtattgttatcgtcacatagtactgtcctccacagaggctgctctcaatctgttcatcaactccaactcccaggagctgctcaaggaaatgaagccggcgctcaggaccaaactcactctggtcatccgcaacttcatggatcgcatattcgccaagattccgctggacgagtggatcaacctgaattagaatgtagtttctctagtctaagaccttatttattgcacacagttccgcgaaatataccaagtaaatcgacgatggctcttactttgaatggctcattcggcccatcaatactgcaatgacagggggatacgagttattataatgtgcaccttaactgccttcgcatgcttaggctttcaacgctagttcaaggtctttgaatgattgaatgaggaatcttggtaaaagattcgaatgaaacaggatgtggtcttgatggttttaaatgcctgttacttgaggagtaactatgttgtattagcatacatgggatatggtttagcttactagtatttgtctgcacgtcaaatgttatcattctttaaaaagtggaaaaaaaacatgcctccatcccttgatggtcgaggtactcaggtgctcacaactgaacagtggtggacataattacattataacttccttttcaatattttatgttcccgtctttaagcaatctccttgcctctggctaaccacgaatgtattctcaatattcctccttttggatataagtgttatgcaaacggcttaacacacactccccctcgattatccatcaaaacgcctacacgtgcgcgatgaatacccaaatgcccggcagaacaaatctctatgcccaacgcgaagcttaccacatccgattgaataataaactatgaatgagtaacaaacatctcagcactcctcacttatctaacgcagctacgagtatcactgggatgaggctggaagatgatctttggctggctaccgagttgcgtgctcttcgccaattttgcaccgcaatcagcatcctcatcgaaccgtgtcataggcaaccagccacagctttctgaatcttcgctgatctgaagacagggaaagcttttcgcccggcgatcgccattatgcaatccgtcagcacaattttcagagttaacaggttgtcaacacacgactccccatctaagatgttcgcgtggcgtaattacgccgggcacggtagcgactagaacgatcttcctggccccgtgcctgcccctggttttgg

SEQ ID NO: 3110 - DNA, 1196 bp, DROSOPHILA
cgagtcgcgtgaaagttggacgcaaagtaagcgcagagacgaagaaagcagaagacagcagacagtcggattctttattcaagaacaaacagtgaactggttggggattggctgtgtgacccacttccagaccgagaccgaagacagaatttcggccccaaagtgaaacccaatcgcagctcgtacttgggcgctttaaattctatcccgactttttcactttcgctcgtaaagagcgcgggctgcgtcatctgggcgaaattagcatatccatatccaaaagctgctaatcaattacgaaactagaaaagtgaaacacagagtccatcttagccaacttccgtttacttgtactttcatgcagacgaacccgaaaaatgagcggaaagatggtcttcattgtgctcgtcgccgtgttgggctccacttttgcccaggagcagccctactacctgcaacagtgcccacgggacgaggcccagataaacgaatgccttcgcgaaagtggcaacaagctggtgcactacctgcagaagggagtgccggagttggacatctatgagatcgaacccgtgatgattgatgaaatcggcattgtgttgggcagtggtccggatggctaccgcgcacttttccggaacattcaggcctacggtgtgagcaatatcacagtgaccaacatccgctccgacttggactcgctgcagttccagctgacgtgcgagataccccgcattcgcgtcaaggcgcagtaccggtccacaggtgttctgatcttggtgaaggcctccggagccggcgactactggggggagtacgagggagttaaggccaagatctacttcaaggcggtggccaatgagggtcccgacggtcgcacctacctgacgacggactccgtcaagatggacttcaacgtgaaggagatccaaatgggtgtggacaacatcgccaatggcaacacagtgatacaggctgctctcaatctgttcatcaactccaactcccaggagctgctcaaggaaatgaagccggcgctcaggaccaaactcactctggtcatccgcaacttcatggatcgcatattcgccaagattccgctggacgagtggatcaacctgaattagaatgtagtttctctagtctaagaccttatttattgcacacagttccgcgaaatataccaagtaaatcga

SEQ ID NO: 3111 - protein, 249 aa, DROSOPHILA
MSGKMVFIVLVAVLGSTFAQEQPYYLQQCPRDEAQINECLRESGNKLVHYLQKGVPELDIYEIEPVMIDEIGIVLGSGPDGYRALFRNIQAYGVSNITVTNIRSDLDSLQFQLTCEIPRIRVKAQYRSTGVLILVKASGAGDYWGEYEGVKAKIYFKAVANEGPDGRTYLTTDSVKMDFNVKEIQMGVDNIANGNTVIQAALNLFINSNSQELLKEMKPALRTKLTLVIRNFMDRIFAKIPLDEWINLN

SEQ ID NO: 3112 - DNA, 2288 bp, DROSOPHILA
tcgacttcagggcaagctaaatggacagctcttagccactggagttgtgtgcgctgccctcggtggaacagacagtgacggattttttaacgtggaggatatactcttctacgaaagtggacctcagaagccactggcccccattaaaagaagccgcctcctggtgctggcgtctgggttggaccaactgcaggcccacaaatttgtggaggcattgaatctctttcagtactggctggccggcagtcttggaaacaacaaggaagcgggctccatggtgcgtcttatcgtggctggaaactcggtgagagccagtgccatggcacatgtgcccaccctacaggtggcacgcacccaggcgaacgcaaatgacacagtccaggccgtttcccagctagaccagtggtttgcctcatgggcacgcagtctgcccgtcgacataatgccgggaccctacgacccggccaactttatgctgccccagcagccgttccacaagtgcatgtttccccaggctgctcaactggcaactttccaggcggtgactaatccgtacagctgccggctggatgaggccctggtggtaggcacatctggccagaatgtatcggatctgttgcgcagcacttcgctggactcggcgctggaggcccttcgctgcaccctcacctggggacatgttgctcccactgcaccggacactctagcgtgctacccgtacatcgaaagtgatcccttcatcctgcgcgagtgtccgcacgtttactacgccggcaactgcgagtcgtttgcgaccgagctgcacgagggttccgaaggcaagcgcacccgcctagtctgcgtgcccagttttagcaaaacacagagtgtggccgtcgttgacctggatacgctggattgccgcatggtcaactttagcgtagatgcagaataagaaacttcattaatacaaataatacaccctgttaagtcttgagaatcactggttttattcgctatcctagtgcaccacgggacccagcggctcgcccctaatgttggccaaatccaggcgggagtcgatggtctcgtctatcagtccgatcaccgcgatgttgtccccccggatgatgtgcagtcccagcacgatttgctcgatgccggaggtggtagagaagacgcgctcatggcactcgtctatgatgatattgatggtctggtcgaatcccttgagtgtcccgatgaagttccgtccgtctgccgtaatgatggagactgtgtgattgatatacgactccagaccggacattttagcagtctttccttgataacttctccaaacagaacaaaataaatactaattgtggcaagaggctagcgacgcgctctccgataacgataactgtgccgcaaatcagctgttccggctctggtgctcatgtaatcggtggtcaacattctattttccgaaaaaattaaattaaactgattaaaatgctgcgtcgcattgtccaagtgggtgcccgggagttgagccgagcccaatcgtcaaccgccagcgcggaaaagtgggacctgtacgccggagtgctcgtagagcgtctccctgtggtgtccaagtcccttaatccgctggaaaaacagttccaagacttgctatggcgcgtggagtacgaaaacagcctgaagtctgaccatgaactcaagcatgaacgtgagatcgtccaggcggagctcataaagcagggcaagatccaggtggacttggaggacgcaggatccaagcagacagctcaggacctcaaggacgcctacgtcgaggagctaaaaaagttccagttgggctcccgcaccacgcccgatgaccaggccaacagaaccacctccacggaccgctgtctggatgacacgctctaccttttggtacagcagaagctgggccagcaggagcacctcattctaccgcagggaaagcgtgaggagggagagtccatgcgtcagactgcagaaagagtgctccgcgagagttgcggccaggagctgcaggttcttttctacggcaacgccccagtgggcttccacaaatacaagtatcccagaaaccagcggacggagactgtcggagccaaggtcttcttctacagagcatccctgcggtccggccaggtgcccgaaaatctgaccaagttcgagtggcttcccaaggaggcgctcaatgaaaagctgaccaatacagcctatgcccaaagcgttaaaaagttcttgttgtaatcgtaattgttaaaattgttttgatatctaacaaataa

SEQ ID NO: 3113 - DNA, 288 bp, DROSOPHILA
atgtccggtctggagtcgtatatcaatcacacagtctccatcattacggcagacggacggaacttcatcgggacactcaagggattcgaccagaccatcaatatcatcatagacgagtgccatgagcgcgtcttctctaccacctccggcatcgagcaaatcgtgctgggactgcacatcatccggggggacaacatcgcggtgatcggactgatagacgagaccatcgactcccgcctggatttggccaacattaggggcgagccgctgggtcccgtggtgcactag

SEQ ID NO: 3114 - protein, 95 aa, DROSOPHILA
MSGLESYINHTVSIITADGRNFIGTLKGFDQTINIIIDECHERVFSTTSGIEQIVLGLHIIRGDNIAVIGLIDETIDSRLDLANIRGEPLGPVVH

SEQ ID NO: 3115 - DNA, 4088 bp, DROSOPHILA
tatttaagtaaagagtactctataacaaatggaaaagatttaattatactttgtttatagtacgtttttccgtcgttcaaagtagttatcatcaggagagaggaaaacaattaaagttttcaaacattttttgaattcaaattcactgacacggcgtactcaatatctggaggcatatctggaccacaccgctacaccattttctgatagcctcgagtgaaattattttttcgggtgcaggaccatccgctacagaagcaacaaccccgacgtgccgcactggatgtggaatctttaatcgcttccctcgaagcgactttttgtgcggcaaactcattaagcgaaaccgaaaaccagaaacaacttcaaatcacacatcgtttctttcttctttcgctgcgccccttcggtgtattttgttatttttttattacatttcgggactgccggtcgtgtatctttcgcccgggcctaattgctttttatgacagtcgagtgaatatgataaatctttggccgtggcccgacattatttcgacatttgtttggctaggaacattcttggcaattaaatgtatgtttgtatttcgtttgtagttgctcgataataatacttgacatgtgttactggatggcgggcaccaccccctctccatttccaaagaccaacccacctcttagccatccatcagttcagagaagagtccagaagtgccagctgtgcttggccgacacttatttgcaattgtcttgagctggaattctgtggctaagttaggcactgtcgagggagaataatgcggttgaatttggaatggccacccaagacaatcagtactcgataactttctaggtcgtatgagttaaaaccgaactttttgcaaaagtgaaatccgccaagacaaatatggcacctaataaaactaacccaagcgaactcagccatgtaaagcccaccgtattgatctaaaacaatttatctttcagcgtgtgtttatagcacttttgtggaagtgaaactatcactgacattcgacgagatcatcacaagagaccgttgaaaatgtttcgtagcttggtgaatattacaagcaaatacaaagtcctacgcggcatgatatcgtatggcaccctctggccctgcggctccctcatcgagcagaccatgatcgagaagaagacattccggacgtacgactggatgaagtgccttaggtgatgagcaatctgcacgggtcttggcccgattcgattgctaattggacccgatatggtttggctaattccattgcaggttcagcttattcggcttcttctttatggggcccaccatatatgtgtggatcagattggccagcgttatgtggccgcgcaccgacattaagtcatcgctctgcaaggcgatcaccgagcagaccgcttatgatccgatggccatcagctcgttcctcttcttcatgaccttgatggagggcaactcgtacgcggaggccaagcgggaggtgaagtatattcccatcccaaagtcactaaggcctaagcacaacaaacttatttcaaatttcatttcaaagaaccacattttgtcgggggccaacgatatctaacaagcagaagagtctctattttatgtacggtattcgtggatagattcgctgaaaacatttttcattactcgggaaaggaatatgtcatattattcatgcccattcacaccgttggcacggctaccccaaatcctgaatcaacttttaacgattttaaaatgttgacagttatctggtaaggtctttcatttcgcagatgtgctcattactaagtgtgtgcccagtatgcattgttatttatttggaaatcggttttcggtctgtagtttttgatttcggaatccattttctcacgacacattcagaggcagtatccccatctttgtatctgtatctatgaatctgcatctgtggcggagacagaggctgcaatgtaagcatgcataaatatcacctgtctgtcgctcacctccctccattcccaatttctgcgtctggtcctccgtttcgagctgtcaacattgatttgttggctctgcggccatactgcgagatactttcaggcactgtgctccatggccaaactcggttcgatggctgacttccatatcattagaaaccatttatcttgataaatgtaaatgttttgctatatatttgtgtcaaacgtgcgtcgtctcatttgccttgcatgcgttctccaaagatatatcgctcgactattctgagcgatttggttgagataggctcaggtttgggccgtaaaagagttgtgtgcgtggccgatagagacgtaagttcctcgaccctcacctaaaagtagtttcaaattggaagcgggtagaaggcagtacaagtttcaagatcgctttcggaatagctatgcgttcgccatcgaagttctatattttatgtgaggattgtaaaacgattcaacttctatagatccacaaaagaaagttttatggcacaaggatagtctttgtagttaaatgaagttctcatgccaattgaaaatgtgccaaagtgctctatgttacatttgttacacagtctgtgcctggatgataatttttctagccaggcgttgccttttaattaacaacattaactgaatgccacgccccagtcaagcgccccttaaaagaggagaagagatcaggccataaataaaatattaaacgtctcctaccgctgctggacggcggcacttaattacaatttttccgcgctggcattttccatttccattttccgactgctactgggggcattatgtcactgcactcacccaccccgttgccccctctcgttcccaggtcagcgataaattcctggacgcctacaaggtgggcgttatttattggccctgcgtgcagacggtgaacttcgcctttgttccggcgcgaaaccaggtcgtgtttacctccttcttcagcatgtgctggaccaccttcctggcctacgtcaagttcctgcagctgcaccctcccgtcgatgtggaccaccacgccctggacatccacttcctggagatgtgattctgggtcgacccgcgactagttacccccaaatgcgatggcaccaaaaagcacgcccttggccggagttaatgacatgtcatttcttttgtatatattttgtgggccgataactgcgcatagagacccatttattttttgctgatatataagttttgataagttcgtagctggtgtttttttttccaaatgattgcaagttgggcgtaattgtcggtttttaagtcccagggggacttgaaacaaaatcgggtgtatatgactcttgagagttaaagatatgttgctaagtatgccaagcaattttttgagatctaatatttaaaaaattgtaattgtaataccattttcggaaaattgaaaattgaatactacatatactgagcaaaagtcattgccccgtgacacaaagggtcgtttgaaatcagctgacctgcatcagcatttattaaaattaatatttattatcggagcactcttttggccgagggaattgtggtccattaaaatgcatacgtatgtatcttctatgcatactaattatatacacgacggtatgtacatacatacataaatgaatatgtatgtattgtgtatctgtgggttcgttgaagtggaaccgctaagtggttgtgatgaatgcaagaactgaatgcataaataatgccgatttagattattctgaaacagaaacatcatcgtcgaattgtggtctgcattcagatattcgcattcgcatttggatttggatttggatttggatttggatttgggcaaaaccgtcagggaacagaacgcagacgatgacgattccccataatcaggggaattaatatggaaatatatgcagcgctgaacaaaaccgcaaaagtaaacggagagcaccaaactcaacccacgaaaaccaaacgcatgtttgtaagttctgttataagtaagggaaaacgtggcaagcttaagtgggcaaaaggggtgtttgtgctgcacagtgggaaaatat

SEQ ID NO: 3116 - DNA, 645 bp, DROSOPHILA
cacttttgtggaagtgaaactatcactgacattcgacgagatcatcacaagagaccgttgaaaatgtttcgtagcttggtgaatattacaagcaaatacaaagtcctacgcggcatgatatcgtatggcaccctctggccctgcggctccctcatcgagcagaccatgatcgagaagaagacattccggacgtacgactggatgaagtgccttaggttcagcttattcggcttcttctttatggggcccaccatatatgtgtggatcagattggccagcgttatgtggccgcgcaccgacattaagtcatcgctctgcaaggcgatcaccgagcagaccgcttatgatccgatggccatcagctcgttcctcttcttcatgaccttgatggagggcaactcgtacgcggaggccaagcgggaggtgaacgataaattcctggacgcctacaaggtgggcgttatttattggccctgcgtgcagacggtgaacttcgcctttgttccggcgcgaaaccaggtcgtgtttacctccttcttcagcatgtgctggaccaccttcctggcctacgtcaagttcctgcagctgcaccctcccgtcgatgtggaccaccacgccctggacatccacttcctggagatgtga

SEQ ID NO: 3117 - protein, 193 aa, DROSOPHILA
MFRSLVNITSKYKVLRGMISYGTLWPCGSLIEQTMIEKKTFRTYDWMKCLRFSLFGFFFMGPTIYVWIRLASVMWPRTDIKSSLCKAITEQTAYDPMAISSFLFFMTLMEGNSYAEAKREVNDKFLDAYKVGVIYWPCVQTVNFAFVPARNQVVFTSFFSMCWTTFLAYVKFLQLHPPVDVDHHALDIHFLEM

SEQ ID NO: 3118 - DNA, 3807 bp, DROSOPHILA
ccagtgccgtacaggataaaaatacccggtactcagccaaccctgcgtcagtttaaggactatctgcccagaagaggtcactttaggtaaaatctacttatacactcgacgaactcaatgcttactaactaatttgtggcatccataggttcttcttcaagacgcactgcgaggacccggacagtccagtgattcaggaagagattgttaacgactccgacatactgccgctattcggagacaaagcgatgggtcttgtcaagccatccgattaatattaagcatttagcgtagattttgtattaaggcaaatcgtgagtgtggcttggtgcactgatgcactcggcaagatacgaatacgataacgaacgcaccaagtgtacgcatcttagagctagcaactggagaagctatttccgacaaatcaaaagctatatatgtacgggcgaccggcttttgtaagcatcacaaactactctctgcgggggcaatgtatttttctgtacaacaaaaactgatctattcaccagccacccaaacaaaggtggtggttggttctacgtttgtaaatccataacgagaatattcggagctattggtaggagagaacgatcctctttatgttcacaccttggcggccgtacgttcagagtccgaaaagcgtttcagtcccgcagccagggactgagatctttaggaactactgcacaaaatcacattattaggaagatttatgggtttacctcgattgggatttgtttgttaccttttactaactacggactgcctgcaataaattttgttaatatttttgtaatgtgcattttatgatgatgatatgatgatattaacaaagttctattcaactcgacaaaaaatcaaaagataatctgttttatttttgtatatctatagcacagcatacacacttaactttatgtatttatacaatgtattgtaattgcgtcaattgcatctaccgatctaccattaggcacatttcatttggggctcgatcagtccagcagcgaccaatactggaatacaatgggtgggtggtttattggcccttggccggaacggacgaggtcgatcgattgatttattcaaataagttaatgcatacacacacacttactatacatatttttttaagaaaactgaaataaccgcagaaatatgcaagtaacggataaatttattatatcaaacatattttatttgtgagcaaaatgcatatagatttaataaaaaagtacatggatagaacgtaatgatccaaatgatttcgcttgcattcggttgggtggtgatcacgatgatggtcgatgatgggttgggccttacacaatatataattatctattatatatattcaatatagtgggctaaactggcgtgcagtcgtctctctgaacgtgggcatcatagttctgctcgttgatgaaagtatgcgtgcacttggagcagtggaagcggcgatggcggttggttccgggactctcgtgctcccgcagatgggccttcatgttgtacatctgggagaagcgcttgttgcacaccgggcaggcgaagggcttgtcccccgtgtgggatcgcatgtgccgctccaagtgagccttggtccgggtcttgaagccgcacacctggcactccagccgtttggtctcgctgtcgtggatcatcttgtgcttgtacagggccaccttgtgaacgaatcgcttggagcagacatcgcactggtatggcgtttcgccggagtgccaggccatgtggtgcttcagccggaacttgcggctaaagcgttccgggcacactgggcaggcgaactgcttcacgggctcgtggttctgcaggtgccctatgaacccggagtacgattgcagcgtcttgccgcactgatcacagacgtagccgggaaagtgctcgcgtttcgtgtggacattgtaagcgcgccggctgctgaacttctccgggcagctggggcattgtatgttgaccgtgtattcgccggagctttcgttgtcctgctcctggtcctcgccatcggatattatgtactctattgcgccgtccagatgttcgtcaaagtcactcatggtatcttccttaaaaaagtcttcctcctgggcctcttgcttgtcatgtggcaacagatcctcctcctctatctcgtgggccacctcctctatctcgtgggccacctcctctacctcgtgggcttcctcttcgttaatgataatctcgttgtcgatatctagctctaagtctacggagtggaactcatcctcctcctctgattgtttgataatgaaggtgtgctcctcttcggccacttcctccacgatgccggcgggaccgaccagggtgacggtggtgcccacgctctccagttcctgctcctcctcgtcctgttgctgtgcctcctcaatattcccatcgaatttgcttatggtggtctctcggtcgagatcgtcctctttgtaggaggtctgcttgtggtccttggacatgtagggactgtggatcagttccaggatctcccctcgcagcttgcgcgctatttgtatggacttgtggtatctggcgagcttctcgcagcacttcttgcagatcgtcgacgattcctccgtgaggacgtaattcgtgccccgggtgcactgcagtaccagttcgctgatcagcaccggcggatgtccgacggtatcggtgtgaatgtccttcggtacgcgtaccgagaattgacaaatgcagcaattcatatttgattgaaatttatttacactttcggggcagtgtgaccgtgccctgaagaaggctccgattgcacagctatcggttatcgacgatgtgatctggttcaatttccaaatttgaactttggctgctaaccaacaaagcagatctgaaactcaaaatcaaaagctgaaaatttgtaacacccagcgaaaaaacaaatcgatatgtagccatgtatttactaattttttgttgtattataaattgccaacagggcagttaggaaaaataaaacaagctttcaaacgccttcactgatacgcgttcagattctttttgggcaagatgatgttgtaatgctggaatttggtccaagacagcagtatgtccttcgtcctgccgtgcggcgcctccccaaaagtctgcaggcagtctctttagtaatcaggttgatcgtagccaacttcatccacttaccttgcagcacccgtaaattttcattactttcttgtcctccttgttgctgatgaaccctccacccaggcatttggcgcaaattccaattttgtccatctccttttggatttcctcaaagatttcctctggcgacagaacgattagaacacgtattagctatactgattattagaactaaccgtggtccttggaggcggatcctcttacaatggtcctgccgaacctagttaaaccgtgcatgtgaatcatcatcaaaaggtacttgttcttgcctttagaaagctgaactctaggaacatttatcaaaagggcgtttacgcgcgaagaactttgccttcgaaggggcttcaacaattgtgaaacaggtgccaaaagattcaaggttttcattttggaaaaattttaggaaaacgcactggaatttagatgaaatattccgaaaagaaactggtatgaacggtagcaaggctccagctagactgattttgtcagaagccttccggtcgtatgctaaattcaagactgacacgaaaatcggagcacatgtgatcattcaaaaagtactaagcccttgtatcttgtgaaagaaat

SEQ ID NO: 3119 - DNA, 1807 bp, DROSOPHILA
gcacggtcacactgccccgaaagtgtaaataaatttcaatcaaatatgaattgctgcatttgtcaattctcggtacgcgtaccgaaggacattcacaccgataccgtcggacatccgccggtgctgatcagcgaactggtactgcagtgcacccggggcacgaattacgtcctcacggaggaatcgtcgacgatctgcaagaagtgctgcgagaagctcgccagataccacaagtccatacaaatagcgcgcaagctgcgaggggagatcctggaactgatccacagtccctacatgtccaaggaccacaagcagacctcctacaaagaggacgatctcgaccgagagaccaccataagcaaattcgatgggaatattgaggaggcacagcaacaggacgaggaggagcaggaactggagagcgtgggcaccaccgtcaccctggtcggtcccgccggcatcgtggaggaagtggccgaagaggagcacaccttcattatcaaacaatcagaggaggaggatgagttccactccgtagacttagagctagatatcgacaacgagattatcattaacgaagaggaagcccacgaggtagaggaggtggcccacgagatagaggaggtggcccacgagatagaggaggaggatctgttgccacatgacaagcaagaggcccaggaggaagacttttttaaggaagataccatgagtgactttgacgaacatctggacggcgcaatagagtacataatatccgatggcgaggaccaggagcaggacaacgaaagctccggcgaatacacggtcaacatacaatgccccagctgcccggagaagttcagcagccggcgcgcttacaatgtccacacgaaacgcgagcactttcccggctacgtctgtgatcagtgcggcaagacgctgcaatcgtactccgggttcatagggcacctgcagaaccacgagcccgtgaagcagttcgcctgcccagtgtgcccggaacgctttagccgcaagttccggctgaagcaccacatggcctggcactccggcgaaacgccataccagtgcgatgtctgctccaagcgattcgttcacaaggtggccctgtacaagcacaagatgatccacgacagcgagaccaaacggctggagtgccaggtgtgcggcttcaagacccggaccaaggctcacttggagcggcacatgcgatcccacacgggggacaagcccttcgcctgcccggtgtgcaacaagcgcttctcccagatgtacaacatgaaggcccatctgcgggagcacgagagtcccggaaccaaccgccatcgccgcttccactgctccaagtgcacgcatactttcatcaacgagcagaactatgatgcccacgttcagagagacgactgcacgccagtttagcccactatattgaatatatataatagataattatatattgtgtaaggcccaacccatcatcgaccatcatcgtgatcaccacccaaccgaatgcaagcgaaatcatttggatcattacgttctatccatgtacttttttattaaatctatatgcattttgctcacaaataaaatatgtttgatataataaatttatccgttacttgcatatttctgcggttatttcagttttcttaaaaaaatatgtatagtaagtgtgtgtgtatgcattaacttatttgaataaatcaatcgatcgacctcgtccgttccggccaagggccaataaaccacccacccattgtattccagtattggtcgctgctggactgatcgagccccaaatgaa

SEQ ID NO: 3120 - protein, 457 aa, DROSOPHILA
MNCCICQFSVRVPKDIHTDTVGHPPVLISELVLQCTRGTNYVLTEESSTICKKCCEKLARYHKSIQIARKLRGEILELIHSPYMSKDHKQTSYKEDDLDRETTISKFDGNIEEAQQQDEEEQELESVGTTVTLVGPAGIVEEVAEEEHTFIIKQSEEEDEFHSVDLELDIDNEIIINEEEAHEVEEVAHEIEEVAHEIEEEDLLPHDKQEAQEEDFFKEDTMSDFDEHLDGAIEYIISDGEDQEQDNESSGEYTVNIQCPSCPEKFSSRRAYNVHTKREHFPGYVCDQCGKTLQSYSGFIGHLQNHEPVKQFACPVCPERFSRKFRLKHHMAWHSGETPYQCDVCSKRFVHKVALYKHKMIHDSETKRLECQVCGFKTRTKAHLERHMRSHTGDKPFACPVCNKRFSQMYNMKAHLREHESPGTNRHRRFHCSKCTHTFINEQNYDAHVQRDDCTPV

SEQ ID NO: 3121 - DNA, 7789 bp, DROSOPHILA
ccgctctagcgccagcttggccatttccaatgtatcatccggaacaggatcgggcagtggccacggtgataggttcttaaactttggcatccagtacatcatgcgccaatacttgcgcagtggatgtccctgcctgccaaacacattaagcagcatcgcctccatctcgtgatcgggcatcaccccgcaatcttccatctgctcaagcagatcaatgatacactgctgctgtttggggtagtgcatgaactctgcctggaacatgttggtgggtatgaacttgcccttgggcatcacgttgatcagggccttgtagacctccaagtctctttccaccccgaaatccgccatattcttgagtgccgcgtagatgaactccacatggttccgacggtggacgtcgcgctcctggaatatctccaccatggtcaggtagctgtttttcgtcctgtcctgggcggcggcaaaggggttccttaaagccggcaggtttttggtgccgggtttttgtgccctgggatttggattcgggttctgtttcggatttccctcgtccgtagcgtagtttcgaaagcggctgaccagcgaatggcctccattgccgtgcagccggagcaggcattgtgcgcggcgcagcattttttatttataattaattaattgaataaatttgcaaatacgattacaaaacattgcacaagctgcggaactagttcgcgttttgcagcactgctgctgcaacatatgttttaatagtgccgatagtctagcgtatttagccaaatttggtaaattctagggcgaaaaattgtatttagtttcggctgtacccaaagattttcaagcttaaatagtgtcatgaccgtaatacacgcttaaagtcatacgctagtaacaaaagttgaagtgaatattgcataagctcattgtgactaccttcacgaatctcttccttcggagaacagctgtttgtctggcttagggccatcatcactggtgactgagttgctcaacactgtattaactcagtgtatcctttgtgctgctttttgttgttatttcaccgttttctgcgttatccttattcgcatagttttcggttgtttttctgttgtttaagttagttccgaaccctgagttatttgcacgggcgcgcgcctacataaaaatgcaatccaacaagccgatctctgcggcggaggcctgaccagcaggcagtatctataacagaagcaaaacaatagactttggcttggtcccaaggagcacccaccagcccaacgttattcgagacttccagccgccaaggatgcactgaagggaagcggaaacccaaggagcatttgatgttcccgcaatgcgaagagggtaaagaggattcgggcatcacattctactgacatgttgtgcttcgactcggagaggatgaactggtactaccacgtcctggccaggcgtccctacctggtggtcgtctccattgctgtctactgtgtcgcttgcatcatcgtggccctcgtcctgaacaagctgccggacttcagtgatcccaccttggtttgtcctattagatttgtccaaaacatgttcactgcttgatatttggagaatatatcttatcttattttacaattattttttaaaatattgagcacatggaaataatccgaaaatgtctaaatgatattattttatttaaatttcgttatatatctattttttttaaatattaagaagttaaaatattttaaatattcacagaattgctataagaaactacaggattacttgtatacaaactattcctgtattatattttcattgttattatgttattgttgtaaaaattgtggaaaataataagattaatttctcactaatatgacttatttgatcactttataatgtgattatttgtcatgattaatatttatgattcaacatttatttcactttagggcttcgaaacccgcggcaccaaaattggagaacgactgacggcctggtacaacctgctgcaagagactgaccaccatggtgctcttttctcaaatccatcggatctgtgggagaggagacgggtagagcagggctatgtggagacgaagctgcatccgaatcacaggcgacgcaaaaacaagcacaagaacagaaacaagaacaagcgacgcaaggaacaaaatcaaagcagccacgagcatcacgatgtggcgcagaagatgatgcagttcaaaaaacggctgaaggctactagttctccctctccaaatctcggctttgacacctggatcggggacagtggagtatttcgcgactacgagattacaaacgacagcgcttcctcctctttggaacccacgcgacgcactgagcaaatcgaatatggccacaacaccacctcagtggacgaggaagagcatcagcagcgggtgcagaccaagaagagcacttggcggctcctaaagcaagccgccaccttgcccaccgacggttgggcagacatgcatcgtcgccaacccatcgagggattcttttgcgattcatcgccccggaaggagtactctcattttgtggtccagcggatcggtcccaacgccaccgattctctatttgatttgaacggactgctggccatgtgtcagttgcaggatcagattaccgaagtccccagctaccgggcattttgcgagccggagatgcttaccaccgagtgctgccggccatggtcactgcccaactacgccgccatgctggccaacaaaagttcctgtttcgaccttaccacggaggatgttacttcgctgcacacgctgctcttgggctgctatgagtacttccatgacctaaagatggacaaccactgcaacgaaataccgcattgtcgtgctcctgaagagtgcaagcggctaaatatcgtctttaacgtcctgaattttctcaccgactttagtttcatcaagtctaatgtaagttattgagtttaaaataagcttagaccccaaaactcttttattaaaacagatttgtatttgtccgttgctttactcgtattgcattaaattcgaccatataatattggcactttttttttttgtaggactcgaatgtatacctgaaatacgccatgatttttatacccgtggcgcaatccaaccgcttgctgccactgttccacgaatgggaagacgtgtaagtatggagcacagctaatatttgcgaaattgataccggtcgatgggtgtggagggcattacattatttttagctttcatcaaggccggaacgcatatggtatcaaaataggtggtcaagttgtactttgtgaaaatttttcgtaaatcgctggcgattttgtccagagtagtgtcctttagcctacgttctggatagaaggagctcctaaacggctccgtttcctgcaggaaattgtaatagcacccatatgtggtccgatagtcctcgtccttgagagagtaaccttttttgttcctatagcgccgtcgacttacaaaagaaacgaagtcattccgagagtaatcgttcatgtacaccgatctacgaaggtccttcacaaagtccttcagaattcggaaatccacaggcggatacataaaaaatagcttgtagatcctttcgttacaccacttgttgcgcttgatgaactgtgcgtagtcctcccgccagtccattgattggggccatgtctttgttttatattcaatgccaccaacctttagatttgcgcagtagtgaccacttattagagagggatcctcttgggttttcttaatcgggggattgtaaacggctctttcagtatgatccacataatccgctctgctggtggttacaagcaccctcgtccttggcaattccattttaattaattccttttcccgttgaactggatccattttgcaattttttttgtatttttcttttatttaaaaatatttttgatgttttctgtttgataataatattctgaatgatttttcagggagctgatcaacgagcttgtggaagtggttgcgatggacttgggcctcgaaaacgaactctttaacgagctgctgctgacggacgtgtggctagtttcgctgggagggacattcgtcatggctagcgtgtggttgtacacgggatcggcattcatcaccttgatgtcctgcgtagccatatgcttttcgctaggactagcgtactttttttacgccatcgtgctggagtttgagttcttcccctatatgaaccttctggccgtggtagtaataattggcattggagcagacgacgtatttctgtttcttaagatctggcactgtgtgctgaccgagaggttcagcaatcgatgtaccttgaccactcagtcccagagtgctcttcccaccctggagaacagtgatcacacggagtcactggaaaacataatggcgctgactatgcgacatgccgctgcctccatgttcgttacctcacttaccaccgccggcgccttttatgcctcctacagcagctctataacagctataaagtgctttgggtaagttaataaaagcaagattagatgaatcttaatatttagtaatgctcatttaataaattatatttttaggatttttgcgggaactgtcgtggtgaccaactacttactaatgataacttggttgcctgcatcggtctccatcatggaacgactatttgccacaaggatgtcctgccatcatccgatgtcaataaagctgatccacgcctgcaagaagtcaattaaccgattttgtcagatgtttgaggagtgcatcacgaaaagcatcatgaactatgcctatctctggctgctgatctttggggctctaggcgcgtccagtgccgtcattgtgttctggtatccaggacttcagttgccggaaaaatcacacttccagctctttgtgtcaaagcatccatttgaggtttactccagtctcaagcagcagttctggttcgagaaaccattgcaggcgtacgagaacttcaagatgcacatgcatttcgtctggggcgttcaagcggtggacgacggcgactatacgaaccccaactcatacggccacctgcactatgacaataattttaacgtatccagcaggccggcacaactctggatccttgatttttgccagagtgtgcgccagcaacccttttacaaagagactctcggcatgctgttgcccaattgtttcattgaaaatcttatcgactatatgaagcgcaggtgagcatatacaattatatacatacttacaatggcttagaaagctcattaaaactgggttcagaaaaatcgattttgtttacatttgaaagctggaactggtttagatggattaagacaggagatatagagacaccaatacaatttgcaatcattaatagaagcttttgttcatgttgttcagatgcatcgatgatatggacagtaccaggaaagaccgttcaccctgctgtgacgcacagtttccctttgagccgcacatatttgagtactgcttgccacaaagcatatccaacatgtatgacactacatttttccggcccggcgtggcaggacccaagtttgcagaggctccccgactggagactgaggattacctaggaatgagtggaaatgagagtgcagagtacagcaccaacggatcatttacaccgctactagtcaaagccctggtcatcgagttcgagtccaacgtggcctacagcaccatctacgcaaatattaggcagttctacgagtctgtagagcactggtttcagatgcagttaaaaacggcaccgccggaacttcaaggaggatggttcacgagcgacctgaaattttacaatgtgcaggacaccctttcgcacgacacctttgttgccatttgtctggccatggctgcatcacttgcagtgctcctatgcttcaccgtaaacatattgatttccatctacgccgtactaaccgtgtcgctaagtatttttaacaccgtggctgtgctcatcctgctcggctggcagcttaacatcttggagagcattgcggtgagcacggctatcggtctggctgtggactttagcctacattacggtattcactaccggatgtccccggttaaggagagattggcagccacacagtttgtactatcccgcatcattggacccacagtgatggcggccaccacaactggtctagctggcggaatcatgatggcatccaacatattgccctacatacagattggcgtcttcctggtcgttgtcatgatcgttagctggttctatgccactttctttctaatgagtctgcttcgggttgccggtcctcagcatggttttctggaactcaagtggccgttgtggagcaagcgaagcagtggcagcagcaagttctacgagcggtaaggcttttatcgtattgaccctttcaattttctatatctctctgttttgcgttaatgtcatttttatcaagcctgactgacgggtgactacccgttatcggttattaaaactcgaatttctttgtgcaggaaacccagccaagtgatcgccagcgagcagctgctgacccccacaagctcggccatcgttgagttggcgaactcggagacgcacgaactggagtccctaaactccaacagcctgatcaaaaccatttcgggcatcgaaagcgcccacgcattgtcctcgctgccgagggacttcgagcactcattccagacgatgcacgagtgcaaatatcaaacgtatccgtctacatccaattgagttagttactattgccggacaacgcgttgttgttgccaagaagaatcaggcaactgcatttttatacagggtacggcggctctcaagcctgcccgagatacatttatatatacatatacacgccgtgtgtcggcatatttagttttaaaatatgctggcggtggcatatgtacgtgttgtgcgagttctacattgatatactctagatatatgtgtaattgtacttggtaggattaggcaaagctattttcaaaagactccaggctattgcaatatgcttttatgctttttttttatcttgtgacatttcacattcgatgctccagccaagtgaaaacgatttgtaaactgaagcaattagcgggaggtactgggtactctgggtactgggtctttgtcggtaggactgtacgatgacggtattattagttcttagccaaacgtttcaacgctgtttatgttcttatctgtaatcaaaactatttgtactctggttttatattaggtgttaagttgggccgcattgttggcgccagcaagatgtagttactttacacgatagttatatgcgcagagatatgtgttgtctatcctagttgtatgcgttcaaaacataagaacatacacacgctcacgtttgtaataaccatgtaactgtgatacagaaggtgagaatcttaatgaaattggtgtttatacagacatagtgttatatccctaaacaatgacgtattgtaattacctgcaacaaaatggccctgtacttccttcattgaacttatgtgttgaagtgatttaataaatgttacttgtaaaaccactacaaatgcagtctcagaattgatggatcagtttattgaatgggtgttatgcaaatccgtcatagtgcggatataattatttacttttacttgttaaccctatgccaaatttgcttcatttacatcaatacgggtttgtgtggaatgcttagtgataaacaaattgcttgcacccggct

SEQ ID NO: 3122 - DNA, 4058 bp, DROSOPHILA
ctgagttgctcaacactgtattaactcagtgtatcctttgtgctgctttttgttgttatttcaccgttttctgcgttatccttattcgcatagttttcggttgtttttctgttgtttaagttagttccgaaccctgagttatttgcacgggcgcgcgcctacataaaaatgcaatccaacaagccgatctctgcggcggaggcctgaccagcaggcagtatctataacagaagcaaaacaatagactttggcttggtcccaaggagcacccaccagcccaacgttattcgagacttccagccgccaaggatgcactgaagggaagcggaaacccaaggagcatttgatgttcccgcaatgcgaagagggtaaagaggattcgggcatcacattctactgacatgttgtgcttcgactcggagaggatgaactggtactaccacgtcctggccaggcgtccctacctggtggtcgtctccattgctgtctactgtgtcgcttgcatcatcgtggccctcgtcctgaacaagctgccggacttcagtgatcccaccttgggcttcgaaacccgcggcaccaaaattggagaacgactgacggcctggtacaacctgctgcaagagactgaccaccatggtgctcttttctcaaatccatcggatctgtgggagaggagacgggtagagcagggctatgtggagacgaagctgcatccgaatcacaggcgacgcaaaaacaagcacaagaacagaaacaagaacaagcgacgcaaggaacaaaatcaaagcagccacgagcatcacgatgtggcgcagaagatgatgcagttcaaaaaacggctgaaggctactagttctccctctccaaatctcggctttgacacctggatcggggacagtggagtatttcgcgactacgagattacaaacgacagcgcttcctcctctttggaacccacgcgacgcactgagcaaatcgaatatggccacaacaccacctcagtggacgaggaagagcatcagcagcgggtgcagaccaagaagagcacttggcggctcctaaagcaagccgccaccttgcccaccgacggttgggcagacatgcatcgtcgccaacccatcgagggattcttttgcgattcatcgccccggaaggagtactctcattttgtggtccagcggatcggtcccaacgccaccgattctctatttgatttgaacggactgctggccatgtgtcagttgcaggatcagattaccgaagtccccagctaccgggcattttgcgagccggagatgcttaccaccgagtgctgccggccatggtcactgcccaactacgccgccatgctggccaacaaaagttcctgtttcgaccttaccacggaggatgttacttcgctgcacacgctgctcttgggctgctatgagtacttccatgacctaaagatggacaaccactgcaacgaaataccgcattgtcgtgctcctgaagagtgcaagcggctaaatatcgtctttaacgtcctgaattttctcaccgactttagtttcatcaagtctaatgactcgaatgtatacctgaaatacgccatgatttttatacccgtggcgcaatccaaccgcttgctgccactgttccacgaatgggaagacgtggagctgatcaacgagcttgtggaagtggttgcgatggacttgggcctcgaaaacgaactctttaacgagctgctgctgacggacgtgtggctagtttcgctgggagggacattcgtcatggctagcgtgtggttgtacacgggatcggcattcatcaccttgatgtcctgcgtagccatatgcttttcgctaggactagcgtactttttttacgccatcgtgctggagtttgagttcttcccctatatgaaccttctggccgtggtagtaataattggcattggagcagacgacgtatttctgtttcttaagatctggcactgtgtgctgaccgagaggttcagcaatcgatgtaccttgaccactcagtcccagagtgctcttcccaccctggagaacagtgatcacacggagtcactggaaaacataatggcgctgactatgcgacatgccgctgcctccatgttcgttacctcacttaccaccgccggcgccttttatgcctcctacagcagctctataacagctataaagtgctttgggatttttgcgggaactgtcgtggtgaccaactacttactaatgataacttggttgcctgcatcggtctccatcatggaacgactatttgccacaaggatgtcctgccatcatccgatgtcaataaagctgatccacgcctgcaagaagtcaattaaccgattttgtcagatgtttgaggagtgcatcacgaaaagcatcatgaactatgcctatctctggctgctgatctttggggctctaggcgcgtccagtgccgtcattgtgttctggtatccaggacttcagttgccggaaaaatcacacttccagctctttgtgtcaaagcatccatttgaggtttactccagtctcaagcagcagttctggttcgagaaaccattgcaggcgtacgagaacttcaagatgcacatgcatttcgtctggggcgttcaagcggtggacgacggcgactatacgaaccccaactcatacggccacctgcactatgacaataattttaacgtatccagcaggccggcacaactctggatccttgatttttgccagagtgtgcgccagcaacccttttacaaagagactctcggcatgctgttgcccaattgtttcattgaaaatcttatcgactatatgaagcgcagatgcatcgatgatatggacagtaccaggaaagaccgttcaccctgctgtgacgcacagtttccctttgagccgcacatatttgagtactgcttgccacaaagcatatccaacatgtatgacactacatttttccggcccggcgtggcaggacccaagtttgcagaggctccccgactggagactgaggattacctaggaatgagtggaaatgagagtgcagagtacagcaccaacggatcatttacaccgctactagtcaaagccctggtcatcgagttcgagtccaacgtggcctacagcaccatctacgcaaatattaggcagttctacgagtctgtagagcactggtttcagatgcagttaaaaacggcaccgccggaacttcaaggaggatggttcacgagcgacctgaaattttacaatgtgcaggacaccctttcgcacgacacctttgttgccatttgtctggccatggctgcatcacttgcagtgctcctatgcttcaccgtaaacatattgatttccatctacgccgtactaaccgtgtcgctaagtatttttaacaccgtggctgtgctcatcctgctcggctggcagcttaacatcttggagagcattgcggtgagcacggctatcggtctggctgtggactttagcctacattacggtattcactaccggatgtccccggttaaggagagattggcagccacacagtttgtactatcccgcatcattggacccacagtgatggcggccaccacaactggtctagctggcggaatcatgatggcatccaacatattgccctacatacagattggcgtcttcctggtcgttgtcatgatcgttagctggttctatgccactttctttctaatgagtctgcttcgggttgccggtcctcagcatggttttctggaactcaagtggccgttgtggagcaagcgaagcagtggcagcagcaagttctacgagcggaaacccagccaagtgatcgccagcgagcagctgctgacccccacaagctcggccatcgttgagttggcgaactcggagacgcacgaactggagtccctaaactccaacagcctgatcaaaaccatttcgggcatcgaaagcgcccacgcattgtcctcgctgccgagggacttcgagcactcattccagacgatgcacgagtgcaaatatcaaacgtatccgtctacatccaattga

SEQ ID NO: 3123 - protein, 1218 aa, DROSOPHILA
MLCFDSERMNWYYHVLARRPYLVVVSIAVYCVACIIVALVLNKLPDFSDPTLGFETRGTKIGERLTAWYNLLQETDHHGALFSNPSDLWERRRVEQGYVETKLHPNHRRRKNKHKNRNKNKRRKEQNQSSHEHHDVAQKMMQFKKRLKATSSPSPNLGFDTWIGDSGVFRDYEITNDSASSSLEPTRRTEQIEYGHNTTSVDEEEHQQRVQTKKSTWRLLKQAATLPTDGWADMHRRQPIEGFFCDSSPRKEYSHFVVQRIGPNATDSLFDLNGLLAMCQLQDQITEVPSYRAFCEPEMLTTECCRPWSLPNYAAMLANKSSCFDLTTEDVTSLHTLLLGCYEYFHDLKMDNHCNEIPHCRAPEECKRLNIVFNVLNFLTDFSFIKSNDSNVYLKYAMIFIPVAQSNRLLPLFHEWEDVELINELVEVVAMDLGLENELFNELLLTDVWLVSLGGTFVMASVWLYTGSAFITLMSCVAICFSLGLAYFFYAIVLEFEFFPYMNLLAVVVIIGIGADDVFLFLKIWHCVLTERFSNRCTLTTQSQSALPTLENSDHTESLENIMALTMRHAAASMFVTSLTTAGAFYASYSSSITAIKCFGIFAGTVVVTNYLLMITWLPASVSIMERLFATRMSCHHPMSIKLIHACKKSINRFCQMFEECITKSIMNYAYLWLLIFGALGASSAVIVFWYPGLQLPEKSHFQLFVSKHPFEVYSSLKQQFWFEKPLQAYENFKMHMHFVWGVQAVDDGDYTNPNSYGHLHYDNNFNVSSRPAQLWILDFCQSVRQQPFYKETLGMLLPNCFIENLIDYMKRRCIDDMDSTRKDRSPCCDAQFPFEPHIFEYCLPQSISNMYDTTFFRPGVAGPKFAEAPRLETEDYLGMSGNESAEYSTNGSFTPLLVKALVIEFESNVAYSTIYANIRQFYESVEHWFQMQLKTAPPELQGGWFTSDLKFYNVQDTLSHDTFVAICLAMAASLAVLLCFTVNILISIYAVLTVSLSIFNTVAVLILLGWQLNILESIAVSTAIGLAVDFSLHYGIHYRMSPVKERLAATQFVLSRIIGPTVMAATTTGLAGGIMMASNILPYIQIGVFLVVVMIVSWFYATFFLMSLLRVAGPQHGFLELKWPLWSKRSSGSSKFYERKPSQVIASEQLLTPTSSAIVELANSETHELESLNSNSLIKTISGIESAHALSSLPRDFEHSFQTMHECKYQTYPSTSN

SEQ ID NO: 3124 - DNA, 7889 bp, DROSOPHILA
aaaaactaccagctgcctgtgttgagcaacgcacgggcagttcgataataccggctatcgatatttatcgattgttggtgcatttggcgccacttttgaacgctgataagtgcaattcttaggcgaatgaaacacattgttttggtttttaaagtctatactggtagagcatttacttggcgtttattcactaggattattcgttcgattaatcaaaattcctaatacataaaagcgctttggactaacgattaaaaaataacaaattacattagttccgcgttaatatcataaaaagaccttatgtgatgtatacaacgcaattcctctatgtacaggcttaaaacgtaggctcgtagatatatcaaaagtttgatctatgatgtattatagcgcatgtgctgtaatacattgctatgactagtttatgcgatttgctgcctctagatctagactcaaattaattggccgcttgcgaaacggcttcggcacaatctggggatacgagttagtacatatgtatgtatgtgtatggtctatcgctagtattcgtaggtttagtttctggtttcagtttgaaggattgccgccccgtcgcttggaactctgtcgatctttggatctggacggagcctaaacacttccagtgatgatcgacaaactgaagggcgaacggcacaagattggaggttgcaacaacacggcgattccaattgaatgtgtgactagagggttacttatagtatgagttgtgcagcgccggaggcgagggtctttgggcttctggcttccggtttccggtttccggctcatgccttctggcttccggcttctgccttctggcctttgattattttcggttagttagctaatgcagagtacttgctgaatgttcgtttacagtgactaagactactgcttaataatcctacttagataacgctattagctaggcttccttgctgctgactgattggtttccattccgtgggctccccggccttacctcgtggccagcgtcatgttgaggcacagctcgtgatcccgcatgtcgccccagccgccgttgcctttgcgcagcttcgacttcttcatcagactgggcaccgtgagggtgagggagcgcgggaagagctggtgcgagttgcgggctatgcgcagcacgtgctgcaccttcgagatcacctggttggactcgcagttcttgttcttgtgatgaacgccgctggaagggaggaggacacgaattactatggcgctccgttggacgacaggggtccacatgctcaccattctccgatgtggaagactcgcggccccttgacaatcatggcgtgcagctttcgccgcagacactgctgcgaaacgtgctgcaaggaccagtcccagttgtagtcatcgtaggtgcagaagtggcgggcgcatttccggatgttcgaccaggtggtgcgattgaaggcgaagcccatgttgtgcttgctgctgacccagggcatgacctccacctgccgaagagaagaaccaggtcaaccaagcacaatgcacaaaataatggggcaagcaacaatatagaaaacggattagcaaaaggtaaggttgggggtggagtggaggcatgcaaatttcaaatttccgcgtcgttcggattccgctctccacgggcacttgctccgtcttcgtcctggactaaccactaggcggattcaaagtgcttaagccggatttgcgggggtggtacagtgagtacagtgcgcgccataccaaataccttgcgatagtcattcacgatgctctgcctgtcgatcttcgcggtgcgtacgcgggcgtgcagctggtagatggaatcgcgatcaggagcggattggggcagagatgtggcatgccaacacagacacatagacaagtacaattaaacacaacgattacaacatggaggcagcgatgggcagctattacttagatagcttcagaggagttggattggccgttccaatagttcactcatttcccatcgctgccaactggatgatagcgtatacaggatagaacagatcatgcagaacatattgccaaagcgtaaatggatggagcgtatgcaacaaagaatggtaaacggggaccgactagctacgcaaacagggatgtggatcggggtggatcgggtgggatgatacggaggagctgggagcagctgggagcggctggtgcggtggttagccgggagcccttggacaggagtccggtggtgtcgctaccttctgatagacggaatacaatgacggcaggacatgatagttccatgtttgtgcaccatttttgctgctgctatggctactttgctcgttattgctggtgtcggatgtggcggcggtggctgtggctgtgtcggtgacagtgttgatgaggttgccccgcctgctactggagtcactggctctctggttgtcagatgtgtcgcccacatagactttggatggcggtggtgattgcgcagatgatgaggaggagtaagaggacgacacagctaattgcacagagtttctattgttattcctattgtatcctaatagactgtttgtcgagatcagcgaggaagcataggatttcttgttagtctgcgtgccagaattcggaatagaacagatacaaatggtaaattacaatagtcagatggtgagcttaaacacaagtgtgtgtgtgcgtgtgggtctatgatcgagtggccagtagccattagggcaactccttgccccttctggctggccatccgactcccgacaatggatggcttggatgcgctttgaatgaatgtgttctgtagcaacggaagcttgaaggatatacataagatgggctagcacttatgggcactggaacaccctgctccgccgctcaccttgctgtggtacgtgtagtagttgaaggtcttgagataggtgcccagggacagcacgttgcactgggggcacaagtctttggtgcgttgctgcatcatagccagcaggtacaggaagtcctcggccacgtagtggtcctcctcgaggaacagcaccagtcctgtggacattgaatggttaagtatggcatagtacttattcagagtgctctctgctctcacctgtgtgatagcgggtcacctccagttcgttgaacacccggttggccttccagatccaatggtgcttcgtctgcgtgaacttcgcctcccgatagtggccatagagatcgggatacatcgcattgttgcagttggtgatcagagctctggaacgagggatacttatagaaatagccatacatatagcgatggccaatacgcactgctcctttttgatgtttcgcggacagtcgttgggatccacgccgggatactcgttaggatgcgtctgaatggagtacgggtagaagatctgcatcaccttgcagaagtcgatctgctgcaccaggtcgttgatgtcgtcgtcgtagtagtcgtgcgagaacaccagcagcaccttcgaaatgtcccgggcctgcgccaggctgacgatcaggtggcgcaggtaggtgatcctcgtgtgcacctggaccacgattatcacagagtcgttctgcagcggtccaaagacgtcctcgttgagcaccatctgcatgtcgttgtacctgacgatctggcgcttgatctcggtgatattcggaggatggtacacgtcgaagctgatggtgctggcagtagctgcgcccggactactggcattcaggagcagggctagagggtgattcgaatccagttaaactatctcattatcttggctaactcgctgaaggcttacccgcgccgttgagggctcctgctcccgaggcgctgtgattgcgcgagtggggcgtcagatacttgtgcagggtggcgggcaccatggccaggatggcgtcgtccgagtcgttggtcaccgcgtcgcccagcacattgtcccgcgagtccactgcaacagaagtaaagatttacctggtgatgcgagctgctggcgcctattacttacgataattgaagttgttgtactggagcagaccgaaaatgcccagggccagcaggaacagactccgcatgtagaagttgttgcgcttgcgacccatcgctccggtattgggcagtgggatcagaatgcgacctattcaatggcaaacatttaatggatttagcaaggctggcttttctaagccggaaactcgattcaattacaattacccctcattttcgacatctcgtcgctcctcgcttcctcggattcgagtaactgctggctcttcactgggtgagcgccttcatctcgtcatctggaattagttgagctattgatagtacgtacattcctacgattcgaatgctttcatagatgataaccttctatacagaagcatactaccacaataaaactttcgctttgtttgtgaaggaatccaacataatttagaagtaagtttaagatggaatatcttttatataggctggctgttgggctgttgggccctgtctccgatgagatcagtttctccagagcggacaatggagctcggcatgggaatgctaatcagaagggtaacgagtgggatccgtgcttgggcactgggcacttggaactgggcacttgagtttaattagcgtcggaggctcacagctcgccagatgaatggcgatgtgtggacatggcgggtcggagtggaggagcacatggacgtcgcgtggaggcgagagagcctgccgagtgggcggaacgcgtctgaaatctcaattctgaaatcacaaatccgcggcctcgcgtcaattggcgtaaaaatagattcgtcggcgggcggctcagcgaaatttcacaagtggaacgcctttgcctcgaggaagcgcaattgtgtggcagaatcgggaaagaactagataatacccactatagcaactagccactagtcactagaatcatgcaacatcacagcaagtttgctgtgatgtttttgggggcgtttttggatgcaatcgcagtgacccatttggagctgtgctgtaatcatcttatagagttaagagatgattccaccaaccatgagtaacgtgcgagacttctatacaacataaacgtgcctgtgtatgtactttttcatatttacacatatgaagcgcactttattctgaggagaataatgaaattagctcatatcagcgatgttgttcaaggtcgaaactaagtaataagctacatacaagtatgtatctgtataaacattaaaaattcccccgagccttaactactcacatgaggaaccaaaaacgatatttgaaaatgaggcactgcaaataatatgtatgtagtttttacagcttttccgcgaaacctaactagtttgctttggagtcacgttgccgccagttgaaagcagtttcgattcacaagtggacattccagaaccaagtcacatgcgaagttccctggaatgtgctattacgaatgagatgtgatactatactgactgcgaatccaagccagtggaagagtggagttcccgatctcaggactctcactccggcggaatagctaatcacgcccctttgtgccaggggccactaattaccatgtttcctggtaacgtcaatctgacgcacttaagtgcggaaaatcaatgaacattaatgacccggtccctttattaataaattgtaagtgggccaattgactgacgactgaacgcgactttgaaattcaggcaatgaaaggtctaggaatagcagtacactgtgcggagtttcgaataccacttagaaagtgattttgaagttggaaaaccgaatgaaatattcaccatttaagctagtttctatgaataaatgagcgcttgcagcaacagataaaagttcattgactttgatttatttatgaatgaaatattcataatgcataggctttttaattagaataataacattaaatcgcaggcagtaatttcttccggtgtaggaaccacctctattcgcaaatgcaagcactttttttttgggtgtgtcggggggcggtgggaggtgggcggtggcagggggcgtggaacgaacaggtattttcggtttagttgttacgaaataagtggcgaaaattgacgtgccgaaagcgaaggcaaaaaaccaaaacaaacaaacacgaaaactcaggcaaatgcgccgtacgctttgcattgttttttcgcccactttttatggatcgaatttaacgacaatctttggccttttgttgctttaattgccctagctgtccgcactcacctttgctggacttttcgcgcagtgcagctgcctcgaaggagcccaatgcctgcattatttcgcggtcgccactttccttgcggtcaatcgatttttcagagcgccccgaaaagtccaagtgcagcagtgtaacgaattcgcagctttcgttcgcttttccgtgcatttcggaatttgcactaattggtaggattccccggggaatcgaatccgtcacttttaatcctgtttgctgttcttttcgcactcgcttttgtttttgcaatgcaggctcctgcacttgcggtacacacacataccagcagctgctacggccgccgctgcacacacacacacgcacagcgggcaaacgggcatctctctagctctacccgtctcgcttcaacccactgccgcgcgcattttcacatttcccgcatttgttgctacttcgcttgatttattcggcgttcatctgggcgttccgttttcactttcgcctggctggggcaacaacaagctcgcgatcgagtatctcagctcggccgtccgctgcgaacgagtatctgagtagctgagtaactgagtatctgagcgtgagtatctgtatccgagtgtctcgcggaatcggaatcaacacaaacagctgttagggctgcgatggcaagaatcgatagcttagcgataggaaatcgatagtttgggatttaaaaattgaacaaacaaaatcgtttattaacttgatttgggaaatcaaacaggtgtaattcatacatcagcgcagtctcctggcctcgcgttcagtttccagcagcgacaggatgtcgcccacgcgaacaggtcctttgacattccgaataatctggcggctttggtcgccgaggaactccacccgcacctgggtgcactgcccttgggatccagtgcgtccaaggatctcgaccacgcgagcgtactgaggcttgtccatgctgaatacgaaattcgagaattgttcgacaataaaagatttgaatttgaagctgtgagtgctgctgcctttccagtcgatgaaaatagaaaacctatctacccttctatcatccctggcgccacctgtaggccttgtagcgcaacataagtgcggacgcgaaccacaaggtgaccccaagtcgagctgccacctttcgcagtgttggcaatccagttggcatccccgaggcgagctatcgaaccagttcgatttcgaaccacgcaactctagcatgtaatcgttcgtctcgccgtctaacatttgtgtcgaactacattttgttttgccattcaataaatctattatttaccactgaataagcggcgccacggagccctaaaagagtgtgcgcgttccggagactcggcgcacagcggcccgcagcgatacgtccatgaaaatcgaacggcaacagcagcagcacccacaaccagcggaggcaacagcaacaaaatacacaaaataaagaagcagcagacggaaaagtgcacaaatggtgcagaactgagtggaaaggccaccgagcacagatttctcacagtgcaggagcccggagacgccgaaatgctctagagggcggcgcttcagcacgattttctccccgcggagagcccaaag

SEQ ID NO: 3125 - DNA, 2631 bp, DROSOPHILA
cgattccgcgagacactcggatacagatactcacgctcagatactcagttactcagctactcagatactcgttcgcagcggacggccgagctgagatactcgatcgcgagcttgttgttgccccagccaggcgaaagtgaaaacggaacgcccagatgaacgccgaataaatcaagcgaagtagcaacaaatgcgggaaatgtgaaaatgcgcgcggcagtgggttgaagcgagacgggtagagctagagagatgcccgtttgcccgctgtgcgtgtgtgtgtgtgcagcggcggccgtagcagctgctggtatgtgtgtgtaccgcaagtgcaggagcctgcattgcaaaaacaaaagcgagtgcgaaaagaacagcaaacaggattaaaagtgacggattcgattccccggggaatcctaccaattagtgcaaattccgaaatgcacggaaaagcgaacgaaagctgcgaattcgttacactgctgcacttggacttttcggggcgctctgaaaaatcgattgaccgcaaggaaagtggcgaccgcgaaataatgcaggcattgggctccttcgaggcagctgcactgcgcgaaaagtccagcaaagatgacgagatgaaggcgctcacccagtgaagagccagcagttactcgaatccgaggaagcgaggagcgacgagatgtcgaaaatgaggggtcgcattctgatcccactgcccaataccggagcgatgggtcgcaagcgcaacaacttctacatgcggagtctgttcctgctggccctgggcattttcggtctgctccagtacaacaacttcaattatctggactcgcgggacaatgtgctgggcgacgcggtgaccaacgactcggacgacgccatcctggccatggtgcccgccaccctgcacaagtatctgacgccccactcgcgcaatcacagcgcctcgggagcaggagccctcaacggcgcggccctgctcctgaatgccagtagtccgggcgcagctactgccagcaccatcagcttcgacgtgtaccatcctccgaatatcaccgagatcaagcgccagatcgtcaggtacaacgacatgcagatggtgctcaacgaggacgtctttggaccgctgcagaacgactctgtgataatcgtggtccaggtgcacacgaggatcacctacctgcgccacctgatcgtcagcctggcgcaggcccgggacatttcgaaggtgctgctggtgttctcgcacgactactacgacgacgacatcaacgacctggtgcagcagatcgacttctgcaaggtgatgcagatcttctacccgtactccattcagacgcatcctaacgagtatcccggcgtggatcccaacgactgtccgcgaaacatcaaaaaggagcagtgcgtattggccatcgctatatgtatggctatttctataagtatccctcgttccagagctctgatcaccaactgcaacaatgcgatgtatcccgatctctatggccactatcgggaggcgaagttcacgcagacgaagcaccattggatctggaaggccaaccgggtgttcaacgaactggaggtgacccgctatcacacaggactggtgctgttcctcgaggaggaccactacgtggccgaggacttcctgtacctgctggctatgatgcagcaacgcaccaaagacttgtgcccccagtgcaacgtgctgtccctgggcacctatctcaagaccttcaactactacacgtaccacagcaagactaacaagaaatcctatgcttcctcgctgatctcgacaaacagtctattaggatacaataggaataacaatagaaactctgtgcaattagctgtgtcgtcctcttactcctcctcatcatctgcgcaatcaccaccgccatccaaagtctatgtgggcgacacatctgacaaccagagagccagtgactccagtagcaggcggggcaacctcatcaacactgtcaccgacacagccacagccaccgccgccacatccgacaccagcaataacgagcaaagtagccatagcagcagcaaaaatggtgcacaaacatggaactatcatgtcctgccgtcattgtattccgtctatcagaagctgcacgcccgcgtacgcaccgcgaagatcgacaggcagagcatcgtgaatgactatcgcaaggtggaggtcatgccctgggtcagcagcaagcacaacatgggcttcgccttcaatcgcaccacctggtcgaacatccggaaatgcgcccgccacttctgcacctacgatgactacaactgggactggtccttgcagcacgtttcgcagcagtgtctgcggcgaaagctgcacgccatgattgtcaaggggccgcgagtcttccacatcggagaatgcggcgttcatcacaagaacaagaactgcgagtccaaccaggtgatctcgaaggtgcagcacgtgctgcgcatagcccgcaactcgcaccagctcttcccgcgctccctcaccctcacggtgcccagtctgatgaagaagtcgaagctgcgcaaaggcaacggcggctggggcgacatgcgggatcacgagctgtgcctcaacatgacgctggccacgaggtaagg

SEQ ID NO: 3126 - protein, 631 aa, DROSOPHILA
MGRKRNNFYMRSLFLLALGIFGLLQYNNFNYLDSRDNVLGDAVTNDSDDAILAMVPATLHKYLTPHSRNHSASGAGALNGAALLLNASSPGAATASTISFDVYHPPNITEIKRQIVRYNDMQMVLNEDVFGPLQNDSVIIVVQVHTRITYLRHLIVSLAQARDISKVLLVFSHDYYDDDINDLVQQIDFCKVMQIFYPYSIQTHPNEYPGVDPNDCPRNIKKEQCVLAIAICMAISISIPRSRALITNCNNAMYPDLYGHYREAKFTQTKHHWIWKANRVFNELEVTRYHTGLVLFLEEDHYVAEDFLYLLAMMQQRTKDLCPQCNVLSLGTYLKTFNYYTYHSKTNKKSYASSLISTNSLLGYNRNNNRNSVQLAVSSSYSSSSSAQSPPPSKVYVGDTSDNQRASDSSSRRGNLINTVTDTATATAATSDTSNNEQSSHSSSKNGAQTWNYHVLPSLYSVYQKLHARVRTAKIDRQSIVNDYRKVEVMPWVSSKHNMGFAFNRTTWSNIRKCARHFCTYDDYNWDWSLQHVSQQCLRRKLHAMIVKGPRVFHIGECGVHHKNKNCESNQVISKVQHVLRIARNSHQLFPRSLTLTVPSLMKKSKLRKGNGGWGDMRDHELCLNMTLATR

SEQ ID NO: 3127 - DNA, 8433 bp, DROSOPHILA
ataaattaaaatctcgcttaggtgtttgcgactatggaaaacatgcttaatatcctaggaccaaaaaatttacaaatttttttttttttaatgcgtatcttgatttagagattcaagaccaaaatagctgtcatatatatattaaataacattcaaatcatagaagcaatactgttttgggatttgtctaagcaacaaacatttttgtttaaatgaaaacataattgcatttcattttttattcatgaattaatgcaaaacaagagaaaactctttagtagatatccccgatatgagatacccgcaactcagcaagttttttgttaagataaaatgggaaaaaagctaaaatagctttgacaaatgtggacgtgtcagttttgggtggcttatgggtgttttgcagacaaatataaaggcagaaacacacggaaagacggacatagccagatcaactcatctataactatcctgataaagtacatatatcttttactccacgtgcaatgggctatattatttgtgagaacaacacaacgacgccggctgttcagatatttataagagttttgcgatatccctgttattgagcaaatatagataataaaaaagcaataaacggaactaaaactaagtttttttttccaaccaatgtgaagaaaattattacctcaaattacaacggggacgacaaccacccaagaaaaaatatgtttttccatatatatatgcaaatgcttcgatttgtaattcaaaataataaaatatgagattgctgactgagctgcattggtcttgcttaatagggtcttaaatgagtagtggatgttttatggaataccctggttatttatgacttaaagctaccagatctggaattctagtatgaaagtaataattataccaaatttggtttgttcgaattatcgcggtctggtcacatataagggtagtaattacattttttatatattagattgcttctcttattatgcgagctgtttattccaaagtatgttcgcaattttcgactcctgctaacataacgcacggttaaagcaggaacatttgggcctataagcccaaaatttcattagcttaatacgatgctccgaagtgttattgcatttgcacatatacataaaattgtgacatagaataggagaattccacatacaaatacaaaaatacaaaatcctccagtaaaatttaaaacgatatcgtgttttgcttcgcgtatctcacgtgagatgtaatcgcatgcatatgagtggtgagtgcctgcgtgcagttcctggtctaaatatgcttaattgcgttcgccgacttcaaaagcaataaaacgatggattttaattgctacttgagcaattagccacacaagggatcttgggaaggtcgatttgaaggaattcgatttctaggatgctctcgacaacaatgccccgcagtccaacccaacaacagccgcaaccaaactccgatgcctcctcaacaagtgcatctggatcaaatcctggagcagcgatcggaaatggggactcggcggcgagcagaagttctccgaagacccttaatagcgaacccttttctactttgtcgccgggtaagacttgtattgatttctctttgtccggaattataacaactttctgtgtttccagatcaaataaaattgacgccagaagaaggcactgagaaaagcggactatcaactagtgataaagctgccactggaggagccccaggcagtggaaataatctgcccgagggacaaactatgctaaggcagaactctacgagcacaatcaactcgtgcctagtcgcttctccacaaaactccagtgaacactcgaatagcagcaatgtgtctgctacagtgggccttactcagatggtagattgtgacgagcaatcgaagaaaaacaaatgtagtgtgaaggacgaggaagctggtaagactgccctacaaatggtttaaaattttaaaatgtattggcgttcacctttgttaatcatttaattgttttttttttgctatacttacaattttagttttaaacttgtaaacttgactaaaactcgcgaagctcggatcaaaacagacattttcttggaaccgtaattaagctcataaaaatattaattcatcttgatggaatgcatatcatagatgtactcaaacatctcaagaaagacctcaaattggatcaactaattagtttgagaaaaaattgctgtacttttaagaatatattaatttaaaaatttgctgagtgaaatgatataatagtcacaataatttttagttaaactgctaaagcattttgaatagccgtgctacgcagatgctactagacgcggtgtaaaagctaatttttatttaaaagctgtcctaatattccataaccattaatgtcccatttcagaaataagttctaataaagcaaaaggtcaagcagctggtggcggctgcgaaacaggttctacatccagtttgactgtcaaggaagaacccaccgatgtcttaggcagtttagtaaatatgaaaaaagaagaaagagaaaatcattcgccaacgatgtcccctgttggttttggttcaattggtaatgcacaggacaactccgctacaccgggtaagttttaagagatccatataaagcaaataacaagaattaatgtcagttaccaattttatttgatagtcaaagaactactatagcgatatctcctgccttttaattttattttaattaggaaatacgaatatttctaatttgtaaaataaaattgattaattaactagaatttaaaaaccttttgaattaggacatacccttccaaaaatcagtaatcattgggaacgagagtgtggtcccgaaggagactactataaaaccttttgagctatctgatactgcacgctactaaaaatgattagtttaggaaaatgggtgtaattttgtaggaagttttcattttagaagaaatgtgattattttattaaaccccttcaagcggaactacatttgttctacgatattttggaaaaacaaatggttaagttggaaagtgcctataaaacagaattccacggtttcaaatactaaccaggtttttgatttaattttgattaaatgagaaattatcacacttcagttaaaatgtttaattcgattaaggtcggacaatcacagcagatttccatttttgcgtgtatatatagaagtcgccttcacactcttctggcgcgcttcaccactacgtggagttccgcccgcagtgatttatatagatgatttacgagttatttaattttttatggtgtattttaataaatatcttatttattcattttacatagttaaaattgaaagaatttcaaacgacagtaccacggaaaaaaaaggatcgtccttgacaatgaataatgacgaaatgagcatggaaggctgcaatcagttgaatcccgattttatcaatgaatctttaaataatcctgcaatttcgagcatattagtaagcggagtaggaccaatacccggaatcggagttggagcggggacgggaaatttattgactgccaacgccaatggaatctcctcgggtagcagtaattgtttggattacatgcaacagcaaaatcacatattcgtgttttcaactcagctggccaacaaaggggccgaatcagttttaagcggtcaatttcaaactattattgcgtatcactgcactcagcctgctacaaaaagcttcctggaagacttttttatgaaaaaccctttaaagattaacaagttacagcggcacaattccgtcggtatgccatggataggcatggggcaggttggactaactcctcctaatcctgtagccaaaataacacaacagcagccacatacaaagaccgtaggcctattgaaaccccaattcaatcaacatgaaaacagcaaacgtagtactgtaagcgcgcctagcaactcttttgtcgaccagtctgatcctatgggcaacgaaactgaattgatgtgctgggaaggcggatcctcaaacaccagtaggtctggacaaaactcacgaaatcatgtagacagtatcagtacatccagcgagtcacaggcaataaagatactggaagcagctggcgttgatttgggacaggtcacaaaaggaagcgatcctggcctgacaactgaaaacaacattgtatcactgcaaggagttaaggttccagacgaaaaccttacaccacaacagcggcaacatcgggaagaacagttggcaaaaataaaaaaaatgaatcaatttctttttcctgaaaatgagaattcagtaggagctaatgtaagctcacagataacaaaaattccaggagatttaatgatggggatgtcgggtggcggaggcggatctattataaatccgacgatgcgacaactgcatatgccaggtaacgccaaatcggagctcttatcggcgacaagttcaggactttcggaagatgtaatgcatccaggggatgttatatcagatatgggtgccgtaataggatgtaataataatcaaaaaaccagtgtgcaatgtggatctggagtaggtgttgtcactggaacaactgcagctggagtaaatgtcaatatgcattgctcaagctccggcgccccgaatggcaatatgatgggaagctctacggatatgctagcctcgtttggcaacacaagctgcaacgtcatcggaacggccccagatatgtctaaggaagttttaaatcaagatagccgaacccattcacatcaagggggagttgctcaaatggagtggtcgaagattcaacatcaatttttcgaagaacgcctcaaggggggcaagcccagacaagtcactggaactgtagtaccacaacagcaaaccccttctggatctggtggaaactcgttaaacaaccaggtgcgacccctgcaaggtccacctcctccttaccactccatccagagatctgcgtcagtaccaatagccactcaatcgcccaatccctcgagtccaaacaatctatctctcccgtcaccgcggacaaccgcagcagtcatgggattgccgaccaactctcctagcatggatggaacaggatcattatctggatctgttccgcaagctaatacttcgacggttcaggcaggcacaacaacagtgctctcagcaaacaagaactgttttcaggcagacaccccatcgccgtcaaatcaaaatcgtagtagaaataccggatcgtcaagcgttcttacgcataacttaagcagcaacccaagtacccccttatctcatctatccccaaaggaatttgagtctttcggtcagtcctctgctggtatgttatatttgtttaatttttttaaagacaaatcaaatatgaattgcgttaataataagttatatattacataactcggaaatttgatagaaaaaatcaggaatagaaaaaataaattattttccggaccgcccatccatttcttgaatccaatttctggagtgattgttagagataatctactattaaaattaaacacgaaaattcatatccggttaattgaaaatcactattgtttaataagaaattaaaaatatgtttattataatatttctacaggtgataacatgaaaagtaggcgaccaagcccacagggtcagcggtcaccagtaaatagtctaatagaggcaaataaagatgtacgatttgctgcatccagtcctggttttaacccgcatccacatatgcaaagcaattcaaattcagcattaaacgcctataaaatgggctctaccaatatacagatggaggtaaatatttaaatattttatttaacgtttttgtgttaatttatcttctttttcagcgtcaagcatcagcgcaaggtggatccgtacaatttagtcggcgctccgataatattccgctaaatcccaatagtggcaatcggccgccaccaaacaagatgacccaaaacttcgatccaatctcttctttggcacaaatgtcccaacaactaacaagttgcgtgtccagcatgggtagtccagccggaactggtggtatgacgatgatggggggtccgggaccgtccgacatcaatattgagcatggaataatttcgggactagatggatcaggaatagataccataaatcaaaataactgtcattcaatgaatgtcgtaatgaactcaatgggtccccgaatgctgaatcctaaaatgtgcgtagcaggcggtccaaatggaccgcctggctttaatcctaattcccccaatggtggattaagagagaattccatagggtctggctgtggctcagcaaactcttcaaactttcaaggggttgttccacctggtgccagaatgatgggtcgaatgccagtcaattttggttcgaatttcaatccgaatattcaggtaaaggcgagtaccccaaacaccatacaatacatgccagtaagggcacagaacgccaacaacaataacaacaatggagctaataatgtgcgaatgccacctagtctggaatttttgcagaggtacgctaaccctcaaatgggtgctgtaggcaatgggtcgccaatatgcccaccatcagccagcgacggtactcctggaatgccaggattgatggcgggaccaggagccggaggtatgctaatgaattcttccggagagcaacaccagaacaagatcacaaacaatcctggggcaagcaatggtattaacttctttcagaattgcaatcaaatgtctattgttgacgaagagggtggattacccggccatgacggatcaatgaatattggtcaaccatctatgataaggggcatgcgtccacatgccatgcggccaaatgtaatgggtgcgcggatgccacccgttaacaggcaaattcagtttgcacagtcatcggatggtattgactgtgtcggggatccgtcatcatttttcactaacgcttcctgcaacagcgctggaccacacatgtttggatcagcacaacaggccaatcagcctaagacacaacacataaagaacatacctagtggaatgtgtcaaaaccaatcgggacttgcagtggcacaagggcagatccaactgcatgggcaaggacatgcgcagggtcagtctttaattggacctactaataataatttaatgtcaactgccggaagtgtcagtgctactaacggtgtctctggcatcaatttcgtaggtccctcttctacggacctgaagtatgcccagcaatatcatagttttcagcagcagttatatgctaccaacaccagaagtcaacaacaacagcatatgcaccagcagcaccagagcaacatgataacaatgccgccgaatttatcaccaaatccaacgttctttgtcaacaaataaacttctaaatttttgccgccctcgccatgtattgtttactagtctccaaattaagacatgcatctctaaataagattttttgaagcttatttacttaggtgtttttacaacggagaaaataaacttttggatatgcaaatgataacgttggaaacaacataattcatttgcaacttttagaagtcacgtcgaagttaaatgtagaatctgtattttaacataataggtcatctgtaaaaataattaaacatcgaaattttagttatcagcagctattttctgttattatttaatatgtgcgctgctctctctgtgttaaatgaaattaaaatatatatataaatgtaaaacgctattgatatatattgctctcaactgtattgtaatcaatattaagagaactgtaaattcttccatataaaggtaatgaaaaaagcactgtgtttatttttttttgcttatttctaaataatggaaacaaggatttgttccatcggctggatatcttcgattctaagttattatacaatattataaatttcagacagaagtatttacaggtaatggcggagccccgtttgaaaaaagttttttgcgctgaagataatagggcttcacggatccatttggaaatttgatcatactgactagaaaataattgtttttttttagaaatgtcagtcagtgtattacagttttaactcggggaattaagggtgtactagattcgttcaaatatgtgtaacaggtagaatgaatcctttccaaccatataaagtatatatattcttgatcaggatcaatagccctttttgccgtccacactttcttagttttattgttcgttttgcctttttctaccggtatacaaaacgcccaaaacggtcgcgtggctttgaacatttaaaaaattgtttctcattttattctccatacctatcggtatcccaaaaatgaaatttcgcgatcgcattgccaccagtggccactagccactatc

SEQ ID NO: 3128 - DNA, 4715 bp, DROSOPHILA
gtttattccaaagtatgttcgcaattttcgactcctgctaacataacgcacggttaaagcaggaacatttgggcctataagcccaaaatttcattagcttaatacgatgctccgaagtgttattgcatttgcacatatacataaaattgtgacatagaataggagaattccacatacaaatacaaaaatacaaaatcctccagtaaaatttaaaacgatatcgtgttttgcttcgcgtatctcacgtgagatgtaatcgcatgcatatgagtggtgagtgcctgcgtgcagttcctggtctaaatatgcttaattgcgttcgccgacttcaaaagcaataaaacgatggattttaattgctacttgagcaattagccacacaagggatcttgggaaggtcgatttgaaggaattcgatttctaggatgctctcgacaacaatgccccgcagtccaacccaacaacagccgcaaccaaactccgatgcctcctcaacaagtgcatctggatcaaatcctggagcagcgatcggaaatggggactcggcggcgagcagaagttctccgaagacccttaatagcgaacccttttctactttgtcgccggatcaaataaaattgacgccagaagaaggcactgagaaaagcggactatcaactagtgataaagctgccactggaggagccccaggcagtggaaataatctgcccgagggacaaactatgctaaggcagaactctacgagcacaatcaactcgtgcctagtcgcttctccacaaaactccagtgaacactcgaatagcagcaatgtgtctgctacagtgggccttactcagatggtagattgtgacgagcaatcgaagaaaaacaaatgtagtgtgaaggacgaggaagctgaaataagttctaataaagcaaaaggtcaagcagctggtggcggctgcgaaacaggttctacatccagtttgactgtcaaggaagaacccaccgatgtcttaggcagtttagtaaatatgaaaaaagaagaaagagaaaatcattcgccaacgatgtcccctgttggttttggttcaattggtaatgcacaggacaactccgctacaccggttaaaattgaaagaatttcaaacgacagtaccacggaaaaaaaaggatcgtccttgacaatgaataatgacgaaatgagcatggaaggctgcaatcagttgaatcccgattttatcaatgaatctttaaataatcctgcaatttcgagcatattagtaagcggagtaggaccaatacccggaatcggagttggagcggggacgggaaatttattgactgccaacgccaatggaatctcctcgggtagcagtaattgtttggattacatgcaacagcaaaatcacatattcgtgttttcaactcagctggccaacaaaggggccgaatcagttttaagcggtcaatttcaaactattattgcgtatcactgcactcagcctgctacaaaaagcttcctggaagacttttttatgaaaaaccctttaaagattaacaagttacagcggcacaattccgtcggtatgccatggataggcatggggcaggttggactaactcctcctaatcctgtagccaaaataacacaacagcagccacatacaaagaccgtaggcctattgaaaccccaattcaatcaacatgaaaacagcaaacgtagtactgtaagcgcgcctagcaactcttttgtcgaccagtctgatcctatgggcaacgaaactgaattgatgtgctgggaaggcggatcctcaaacaccagtaggtctggacaaaactcacgaaatcatgtagacagtatcagtacatccagcgagtcacaggcaataaagatactggaagcagctggcgttgatttgggacaggtcacaaaaggaagcgatcctggcctgacaactgaaaacaacattgtatcactgcaaggagttaaggttccagacgaaaaccttacaccacaacagcggcaacatcgggaagaacagttggcaaaaataaaaaaaatgaatcaatttctttttcctgaaaatgagaattcagtaggagctaatgtaagctcacagataacaaaaattccaggagatttaatgatggggatgtcgggtggcggaggcggatctattataaatccgacgatgcgacaactgcatatgccaggtaacgccaaatcggagctcttatcggcgacaagttcaggactttcggaagatgtaatgcatccaggggatgttatatcagatatgggtgccgtaataggatgtaataataatcaaaaaaccagtgtgcaatgtggatctggagtaggtgttgtcactggaacaactgcagctggagtaaatgtcaatatgcattgctcaagctccggcgccccgaatggcaatatgatgggaagctctacggatatgctagcctcgtttggcaacacaagctgcaacgtcatcggaacggccccagatatgtctaaggaagttttaaatcaagatagccgaacccattcacatcaagggggagttgctcaaatggagtggtcgaagattcaacatcaatttttcgaagaacgcctcaaggggggcaagcccagacaagtcactggaactgtagtaccacaacagcaaaccccttctggatctggtggaaactcgttaaacaaccaggtgcgacccctgcaaggtccacctcctccttaccactccatccagagatctgcgtcagtaccaatagccactcaatcgcccaatccctcgagtccaaacaatctatctctcccgtcaccgcggacaaccgcagcagtcatgggattgccgaccaactctcctagcatggatggaacaggatcattatctggatctgttccgcaagctaatacttcgacggttcaggcaggcacaacaacagtgctctcagcaaacaagaactgttttcaggcagacaccccatcgccgtcaaatcaaaatcgtagtagaaataccggatcgtcaagcgttcttacgcataacttaagcagcaacccaagtacccccttatctcatctatccccaaaggaatttgagtctttcggtcagtcctctgctggtgataacatgaaaagtaggcgaccaagcccacagggtcagcggtcaccagtaaatagtctaatagaggcaaataaagatgtacgatttgctgcatccagtcctggttttaacccgcatccacatatgcaaagcaattcaaattcagcattaaacgcctataaaatgggctctaccaatatacagatggagcgtcaagcatcagcgcaaggtggatccgtacaatttagtcggcgctccgataatattccgctaaatcccaatagtggcaatcggccgccaccaaacaagatgacccaaaacttcgatccaatctcttctttggcacaaatgtcccaacaactaacaagttgcgtgtccagcatgggtagtccagccggaactggtggtatgacgatgatggggggtccgggaccgtccgacatcaatattgagcatggaataatttcgggactagatggatcaggaatagataccataaatcaaaataactgtcattcaatgaatgtcgtaatgaactcaatgggtccccgaatgctgaatcctaaaatgtgcgtagcaggcggtccaaatggaccgcctggctttaatcctaattcccccaatggtggattaagagagaattccatagggtctggctgtggctcagcaaactcttcaaactttcaaggggttgttccacctggtgccagaatgatgggtcgaatgccagtcaattttggttcgaatttcaatccgaatattcagaggtacgctaaccctcaaatgggtgctgtaggcaatgggtcgccaatatgcccaccatcagccagcgacggtactcctggaatgccaggattgatggcgggaccaggagccggaggtatgctaatgaattcttccggagagcaacaccagaacaagatcacaaacaatcctggggcaagcaatggtattaacttctttcagaattgcaatcaaatgtctattgttgacgaagagggtggattacccggccatgacggatcaatgaatattggtcaaccatctatgataaggggcatgcgtccacatgccatgcggccaaatgtaatgggtgcgcggatgccacccgttaacaggcaaattcagtttgcacagtcatcggatggtattgactgtgtcggggatccgtcatcatttttcactaacgcttcctgcaacagcgctggaccacacatgtttggatcagcacaacaggccaatcagcctaagacacaacacataaagaacatacctagtggaatgtgtcaaaaccaatcgggacttgcagtggcacaagggcagatccaactgcatgggcaaggacatgcgcagggtcagtctttaattggacctactaataataatttaatgtcaactgccggaagtgtcagtgctactaacggtgtctctggcatcaatttcgtaggtccctcttctacggacctgaagtatgcccagcaatatcatagttttcagcagcagttatatgctaccaacaccagaagtcaacaacaacagcatatgcaccagcagcaccagagcaacatgataacaatgccgccgaatttatcaccaaatccaacgttctttgtcaacaaataa

SEQ ID NO: 3129 - protein, 1429 aa, DROSOPHILA
MLSTTMPRSPTQQQPQPNSDASSTSASGSNPGAAIGNGDSAASRSSPKTLNSEPFSTLSPDQIKLTPEEGTEKSGLSTSDKAATGGAPGSGNNLPEGQTMLRQNSTSTINSCLVASPQNSSEHSNSSNVSATVGLTQMVDCDEQSKKNKCSVKDEEAEISSNKAKGQAAGGGCETGSTSSLTVKEEPTDVLGSLVNMKKEERENHSPTMSPVGFGSIGNAQDNSATPVKIERISNDSTTEKKGSSLTMNNDEMSMEGCNQLNPDFINESLNNPAISSILVSGVGPIPGIGVGAGTGNLLTANANGISSGSSNCLDYMQQQNHIFVFSTQLANKGAESVLSGQFQTIIAYHCTQPATKSFLEDFFMKNPLKINKLQRHNSVGMPWIGMGQVGLTPPNPVAKITQQQPHTKTVGLLKPQFNQHENSKRSTVSAPSNSFVDQSDPMGNETELMCWEGGSSNTSRSGQNSRNHVDSISTSSESQAIKILEAAGVDLGQVTKGSDPGLTTENNIVSLQGVKVPDENLTPQQRQHREEQLAKIKKMNQFLFPENENSVGANVSSQITKIPGDLMMGMSGGGGGSIINPTMRQLHMPGNAKSELLSATSSGLSEDVMHPGDVISDMGAVIGCNNNQKTSVQCGSGVGVVTGTTAAGVNVNMHCSSSGAPNGNMMGSSTDMLASFGNTSCNVIGTAPDMSKEVLNQDSRTHSHQGGVAQMEWSKIQHQFFEERLKGGKPRQVTGTVVPQQQTPSGSGGNSLNNQVRPLQGPPPPYHSIQRSASVPIATQSPNPSSPNNLSLPSPRTTAAVMGLPTNSPSMDGTGSLSGSVPQANTSTVQAGTTTVLSANKNCFQADTPSPSNQNRSRNTGSSSVLTHNLSSNPSTPLSHLSPKEFESFGQSSAGDNMKSRRPSPQGQRSPVNSLIEANKDVRFAASSPGFNPHPHMQSNSNSALNAYKMGSTNIQMERQASAQGGSVQFSRRSDNIPLNPNSGNRPPPNKMTQNFDPISSLAQMSQQLTSCVSSMGSPAGTGGMTMMGGPGPSDINIEHGIISGLDGSGIDTINQNNCHSMNVVMNSMGPRMLNPKMCVAGGPNGPPGFNPNSPNGGLRENSIGSGCGSANSSNFQGVVPPGARMMGRMPVNFGSNFNPNIQRYANPQMGAVGNGSPICPPSASDGTPGMPGLMAGPGAGGMLMNSSGEQHQNKITNNPGASNGINFFQNCNQMSIVDEEGGLPGHDGSMNIGQPSMIRGMRPHAMRPNVMGARMPPVNRQIQFAQSSDGIDCVGDPSSFFTNASCNSAGPHMFGSAQQANQPKTQHIKNIPSGMCQNQSGLAVAQGQIQLHGQGHAQGQSLIGPTNNNLMSTAGSVSATNGVSGINFVGPSSTDLKYAQQYHSFQQQLYATNTRSQQQQHMHQQHQSNMITMPPNLSPNPTFFVNK

SEQ ID NO: 3130 - DNA, 3031 bp, DROSOPHILA
cagtgtgccacggtgaagtatcgtttctcgttcatacctatctgagcgtatcgttccacgatatcaggtggcagtgtttggttgaacctatcgggccctatcgatataagcaaaagcatttttgctggatctaccattttattttagttaataaaatacatatatttcctctctttttgttccgtttgtgcgcgtacaaaactagctgcgaactcgtgcaatatttcataaactgaatgggaaaacaacgataacgacgaaagaaaacgaaaacggatctgcgacgaaattttccccgttccgtttttttttctccaccagcagcagaagcagcagagcaaaagcagcgaatatatttgtaaaagagagccccaaccttgagaaaaaacaaccagcagggcaataattagttgaatttatcgtctgctggtaagaaatgaacccaaatgtgaacttagaccgtttgatttccgcgaggatccatcattttttcacccatttcgtccagtttcaaatgcgtgctaaatatgctaacgtgtgtgtgtgtgtgatgggtcttcgatggtgtgcgtgtctcgctgtgcgcttcaatgtgttggtctgcttctcacactctgcgttcgtgtgtgtgtgtatatgtgtgccttcgaaattttcttttgtgtaaaacatttgtaaggtgcaactgcagctgtgtgcgtgtgtgtgtatcgctttgactgccgttgttgtttttgttgttgtgcgtcatagcaatgagtgtgtgtgtgtgtgtaatatgcattccaacggggtaagaaagaagaggaagcagtacctgtcgccaataaatatcgtatatcgatgtctgtctgtgtttatttagaatttcccttcagcccgcccccgtgcaaaaggaaatattgctcctccttcacctccatcacctcaagtagggatcaagtgtaatcgataatgcagacatatcgattggtccgttgagaaacatcagaaaaacacgtaaagtgcaagctggaaaagaaaagcaaaacaaattccggagagcagaaagagaggtggaaaagaaagtgttgagaaagggatgacagcaaaaagaggctctggtgatattagttaaatgtcagctggtctgtaaatcgtcgcgacattttgtgttggggcaactattcaaaactttcccaaaaacactgtgaaacaactctagagaagataccactcatttttcttaaggttaaaatataaaacagtacacgattacattttctgggatccgcaaaactgttcgttttgtaataggtccctttgtagtattagagtaatatagttgtttagatgaagggtgttcaagtgtcagaatgataattagtaactcctagcgtttagttcttaacttaatatatacaaaacatataatgttcccaacccatgcagtttttcaagtgaacgcgtccaactgtttttgaagcgaagcgcttaggcggaggagcagctagccaggatggacaagatgcggatattgaaggaaagtcgccccgagataatcgtcggtggcaaatatcgggtgatcaggaagattggtaattcagccgtgcgattttatccccacaatattctctaatctctgaaaattattcacaggaagcggatcgtttggcgacatttacctgggcatgagcatccagagcggcgaagaagtggccatcaagatggagagcgcccacgcccgccatccgcagctgttgtacgaggccaagctgtaccgcattctgagcggcggcgttggattccctcgtatacgtcaccatggcaaggaaaagaacttcaacaccctggtcatggacctgctgggaccctcgctggaggatctgttcaatttctgtacgcgccatttcacaatcaaaacggttctgatgctcgtcgaccagatgatcggacgcttggagtacatccatctcaagtgcttcatccatcgcgacatcaagccggataacttcctaatgggcattggtcggcactgcaataagctgttcctgatcgatttcggtctggccaagaagttccgcgatccgcacacgcgccatcacatcgtttaccgcgaggacaagaacctcaccggcactgcccgctatgcctcgatcaatgcccatctgggcatcgagcagtcgcggcgtgacgacatggaatcgcttggatacgtgatgatgtacttcaatcgcggcgtactgccatggcaaggcatgaaggccaacaccaagcagcagaaatacgagaagatctccgaaaagaagatgtccacgcccatcgaggtcctctgcaagggctcgccggccgagttctccatgtatctgaactattgtcgtagcctgcgcttcgaggagcagccagattacatgtacctacgtcaattgttccggtgagtacgattaaatcatatattgcatacgaatcttaagattacacccgattgtttttgtgataatgtttgtggtgataatcattgtggaggctgtattcgatatgtgtttaggtcatagttttcttgttttttttttttaattcgaaatgatgtaaccccaactttctctttaatacagcatactgttcagaacgctgaaccatcagtatgactacatctacgactggacaatgctgaagcagaagacccatcagggtcaacccaatccagctatactcttggagcaattggacaaggacaaggagaagcagaacggcaagcccctgatcgcggactaagagctgcagcgcattcagacgaatggggggagtgcatcagagaaggagaacgtggatgcgtggatgtaaatgacgttgatgtgggcgaaaggcccggcaaggagcggagcaaatatgaaacagacgcaaccgtaaaattgagtaacaccagcggtcgtccgaatgtttcttaatattaatttaaattcaatactaaacaaataaggaaccacaaacaagcaagcaacggcatcatcagcagggcatataaaatgataccccagcaaatgtgattcac

SEQ ID NO: 3131 - DNA, 1363 bp, DROSOPHILA
taaagtgcaagctggaaaagaaaagcaaaacaaattccggagagcagaaagagagtttttcaagtgaacgcgtccaactgtttttgaagcgaagcgcttaggcggaggagcagctagccaggatggacaagatgcggatattgaaggaaagtcgccccgagataatcgtcggtggcaaatatcgggtgatcaggaagattggaagcggatcgtttggcgacatttacctgggcatgagcatccagagcggcgaagaagtggccatcaagatggagagcgcccacgcccgccatccgcagctgttgtacgaggccaagctgtaccgcattctgagcggcggcgttggattccctcgtatacgtcaccatggcaaggaaaagaacttcaacaccctggtcatggacctgctgggaccctcgctggaggatctgttcaatttctgtacgcgccatttcacaatcaaaacggttctgatgctcgtcgaccagatgatcggacgcttggagtacatccatctcaagtgcttcatccatcgcgacatcaagccggataacttcctaatgggcattggtcggcactgcaataagctgttcctgatcgatttcggtctggccaagaagttccgcgatccgcacacgcgccatcacatcgtttaccgcgaggacaagaacctcaccggcactgcccgctatgcctcgatcaatgcccatctgggcatcgagcagtcgcggcgtgacgacatggaatcgcttggatacgtgatgatgtacttcaatcgcggcgtactgccatggcaaggcatgaaggccaacaccaagcagcagaaatacgagaagatctccgaaaagaagatgtccacgcccatcgaggtcctctgcaagggctcgccggccgagttctccatgtatctgaactattgtcgtagcctgcgcttcgaggagcagccagattacatgtacctacgtcaattgttccgcatactgttcagaacgctgaaccatcagtatgactacatctacgactggacaatgctgaagcagaagacccatcagggtcaacccaatccagctatactcttggagcaattggacaaggacaaggagaagcagaacggcaagcccctgatcgcggactaagagctgcagcgcattcagacgaatggggggagtgcatcagagaaggagaacgtggatgcgtggatgtaaatgacgttgatgtgggcgaaaggcccggcaaggagcggagcaaatatgaaacagacgcaaccgtaaaattgagtaacaccagcggtcgtccgaatgtttcttaatattaatttaaattcaatactaaacaaataaggaaccacaaacaagcaagcaac

SEQ ID NO: 3132 - protein, 337 aa, DROSOPHILA
MDKMRILKESRPEIIVGGKYRVIRKIGSGSFGDIYLGMSIQSGEEVAIKMESAHARHPQLLYEAKLYRILSGGVGFPRIRHHGKEKNFNTLVMDLLGPSLEDLFNFCTRHFTIKTVLMLVDQMIGRLEYIHLKCFIHRDIKPDNFLMGIGRHCNKLFLIDFGLAKKFRDPHTRHHIVYREDKNLTGTARYASINAHLGIEQSRRDDMESLGYVMMYFNRGVLPWQGMKANTKQQKYEKISEKKMSTPIEVLCKGSPAEFSMYLNYCRSLRFEEQPDYMYLRQLFRILFRTLNHQYDYIYDWTMLKQKTHQGQPNPAILLEQLDKDKEKQNGKPLIAD

SEQ ID NO: 3133 - DNA, 3764 bp, DROSOPHILA
attaataagtgtttagtacttaagcttatctagaattctaagcgttgtttcaaagcgttccgaaagaaacaaaaaaatgaaaatgtgatataatttcaaaaatgtgttttctacaaccgaagcaacttacaagctatctgaatagtacacgaaacttataggctaagtgaggcaaacgttgtacagtgagcactggataaagaggacttttcgagggcgcaattatgttccaaaagggctgggacacagcccctttgcaatgtagcagctagttagaacaattacaattgcatttattgtgttgtttgagcccatcaacatggtagatttaattgttgtccaactgagatgtgtgtacatatgtatgtatggtatttaggggtgcatttcttagtcgtagcgacacctcgatgtgaattcgtattaaagttaattgtgagcagctttcaactcgaaatgtgctatctccgaaaacacatagttaaatatttgttaaagagcgcaagtaatgcaatacatgtctagccaaaacatgggtacaaaaaatagcgaaatttgttcgttttccgtgtctgtgtgttcagtgtaaatagtcgttaatgagaattccatggaacatccaagaattgaatgtctttcaaattagttacttgatgtatagttaatattactattatataaaaaaaaaaaaaaacgctaaatgttttttggccgcatatggatttacgaataaagcaagacgaatatcaaagaatcaaaaacactttccatttaaaaaacgagttttattcggtggttaagactaaggcttccgagggatccaggctcaaggctttcggatcgtaccgagtgctgttcaagagacaataaaaatatcaaataaaaattataaaatagcttaataagctaatgcgctctgctctacttacccctccttctttgtggaatcaatgcttcttatgagcagctgcaggctttcggtacggctcttgtcaaactgactcaagtcaacggttttagctaccgatccgaagttaatgacaagtacaatggtggccgatttggtcagagatctacaaagggcgcaaccaggtaaggtaactactaatcaggaaaattatcccacaacctaccgttggactacgaagatgtcctcagaaagtgcctggtactttgtggacccattttgcagagttttagaagatttccgtagtgccaccagtgccttgtatatcttcaagtgtgagtgatcatcgcttaattccttctcaacatttatcgttgcatagtcagcagccagtggcaaccaggtggaggatccattcgtaaaaccggcattagtgcctccagtccactggaatggtgtcctctctggatcgcgggtgtactgttcgtagatgttcggattcgagttgcaaccccacggatcaacagtgtcctcccagctgatctccccatcagtcatgccgatctcctcgccctggtaggtgacactgactcccggcagaatcatcaccagcatgttcatgccatcgatgttttcttttccataccgactggctgctcttcgtttgtcgtgatttcctagctggagtcgttattattagcaccagatagagataataggttaatggccctaacttaccacccaattgggtgtgcgacctgcgggcatgttctttagccacaaatcgattgcctcctgcacgttgctcgcagaaagaccgctttgctccataactgtgatcaagttgaagttgaagggtaagtgggctccctctgtgcttctattcccgtagaactgcatggtaaaccaggcgggggagtacgtctctatcagcaagacactcgagttgcccccgaaaatgcgtttgtggtcatcaagtacagtacgccactgataaaccatatctatagtctctggctgattttcgatgtacgtggtggtcagatagtcgcgatcctctttgtcctcggtggccccactcacaacctcatccggaaattgaccgtcgctatcgggcacgacctcaaaaagcggaggcagtgcatcgcaccggaatccagagacgccctcgttcagccagtagcgcagcacccgcttcatctgctccacaaccagaggattgcgatagttcagatctggctgttgcactgcgaactggtgtaggtagtactgctgacgcacctcgttccactcccaggcacttccacggaagtattgtagccagttggtcggaggctccctcttcccagtggtggaatttaccttcccgtcgtgccacacgtagtagtcctcgtagcccttctctcttttaaccgacttcaggaaccactcactctcgttgcttgaatggttgggtacgaagtccaggacgatctttagatccagctccttggctcgcttgatcaatgtacgaaaatcctcgagtgttccgtactccggttgaatgtcaaaaaaatcggatatgtcatagccaaagtcgaccatgggcgacttgaagataggcgatagccaagcagccgttacgcccaagtccttgagatactccagtttgctggttatgccgttcaaatcaccaatgccatcgccatcggagtctttgaaggagcgcgggtagatctgatagaactgggcggtttgccaccagtccttggtcgtttcactggacgagctctgcacttgacatgcctcattcgaggcaatggctaatagcagaagtgttagcagcgacaaaagctccattgcctgggtcaaatcaaaataccttgtgcgagcagccggcaagtgctcgcccttttatagactgtccacacaaccggttagataagacttaagtctttcaaagtggaaatgttttgattactctagggtaagtcaccctaatcgattgtggagcattcactttgtcatcttcgaaattgttattggaaaatttccagctcaagtgttctttcgagtgttttggtaaatgcataccctactcgatgtggggctatcatttaagctctggtaatcccgtttccgtatttctgtataaaaggaacagcgctgagtcctcgctatcaagtaataaacatgcagggaacgcggttagatcattttggattactggtttgtgggctggttatactggcacatcctagctggtcatgtgaaaccacgacttcgacgacagtcacaaaggactggtgggaaaatgcccagttttatcagatatacccgcgatccttcatggactccgacggcgatggaatcggagatttgaatggtatcaccagtaaattggagtacctgaaggatctgggagttacggcagcctggctatcgcccattttcacttcgcccatggtggactttggctacgatatatccgacttttttgacattcagccggaatacggaacactcgatgatttcagggctctcatcaagagggcaaacgaattggacctaaagatcattctggatttcgtacccaatcactcaagtgatgagaactcttggtttgtaaaatctgtaaatcgagagaagggctacgaggactactacgtttggcatgacgggagggtgaatgccactactggcgggagggaacccccttccaattggctgcaagctttccgaggaagtgcgtgggagtggaacgagaaacgtcaacagtactacctacatcagttcgcagtgcagcaggctgatcttaactaccgaaatcccctggtcgtggagcagatgaagcgagtgcttcgctactggttggacc

SEQ ID NO: 3134 - DNA, 1707 bp, DROSOPHILA
tttgatttgacccaggcaatggagcttttgtcgctgctaacacttctgctattagccattgcctcgaatgaggcatgtcaagtgcagagctcgtccagtgaaacgaccaaggactggtggcaaaccgcccagttctatcagatctacccgcgctccttcaaagactccgatggcgatggcattggtgatttgaacggcataaccagcaaactggagtatctcaaggacttgggcgtaacggctgcttggctatcgcctatcttcaagtcgcccatggtcgactttggctatgacatatccgatttttttgacattcaaccggagtacggaacactcgaggattttcgtacattgatcaagcgagccaaggagctggatctaaagatcgtcctggacttcgtacccaaccattcaagcaacgagagtgagtggttcctgaagtcggttaaaagagagaagggctacgaggactactacgtgtggcacgacgggaaggtaaattccaccactgggaagagggagcctccgaccaactggctacaatacttccgtggaagtgcctgggagtggaacgaggtgcgtcagcagtactacctacaccagttcgcagtgcaacagccagatctgaactatcgcaatcctctggttgtggagcagatgaagcgggtgctgcgctactggctgaacgagggcgtctctggattccggtgcgatgcactgcctccgctttttgaggtcgtgcccgatagcgacggtcaatttccggatgaggttgtgagtggggccaccgaggacaaagaggatcgcgactatctgaccaccacgtacatcgaaaatcagccagagactatagatatggtttatcagtggcgtactgtacttgatgaccacaaacgcattttcgggggcaactcgagtgtcttgctgatagagacgtactcccccgcctggtttaccatgcagttctacgggaatagaagcacagagggagcccacttacccttcaacttcaacttgatcacagttatggagcaaagcggtctttctgcgagcaacgtgcaggaggcaatcgatttgtggctaaagaacatgcccgcaggtcgcacacccaattgggtgctaggaaatcacgacaaacgaagagcagccagtcggtatggaaaagaaaacatcgatggcatgaacatgctggtgatgattctgccgggagtcagtgtcacctaccagggcgaggagatcggcatgactgatggggagatcagctgggaggacactgttgatccgtggggttgcaactcgaatccgaacatctacgaacagtacacccgcgatccagagaggacaccattccagtggactggaggcactaatgccggttttacgaatggatcctccacctggttgccactggctgctgactatgcaacgataaatgttgagaaggaattaagcgatgatcactcacacttgaagatatacaaggcactggtggcactacggaaatcttctaaaactctgcaaaatgggtccacaaagtaccaggcactttctgaggacatcttcgtagtccaacggtaggttgtgggataattttcctgattagtagttaccttacctggttgcgccctttgtagatctctgaccaaatcggccaccattgtacttgtcattaacttcggatcggtagctaaaaccgttgacttgagt

SEQ ID NO: 3135 - protein, 519 aa, DROSOPHILA
MELLSLLTLLLLAIASNEACQVQSSSSETTKDWWQTAQFYQIYPRSFKDSDGDGIGDLNGITSKLEYLKDLGVTAAWLSPIFKSPMVDFGYDISDFFDIQPEYGTLEDFRTLIKRAKELDLKIVLDFVPNHSSNESEWFLKSVKREKGYEDYYVWHDGKVNSTTGKREPPTNWLQYFRGSAWEWNEVRQQYYLHQFAVQQPDLNYRNPLVVEQMKRVLRYWLNEGVSGFRCDALPPLFEVVPDSDGQFPDEVVSGATEDKEDRDYLTTTYIENQPETIDMVYQWRTVLDDHKRIFGGNSSVLLIETYSPAWFTMQFYGNRSTEGAHLPFNFNLITVMEQSGLSASNVQEAIDLWLKNMPAGRTPNWVLGNHDKRRAASRYGKENIDGMNMLVMILPGVSVTYQGEEIGMTDGEISWEDTVDPWGCNSNPNIYEQYTRDPERTPFQWTGGTNAGFTNGSSTWLPLAADYATINVEKELSDDHSHLKIYKALVALRKSSKTLQNGSTKYQALSEDIFVVQR

SEQ ID NO: 3136 - DNA, 3254 bp, DROSOPHILA
gctcttatctttagcagcaattagtgactttaaagcgatgacgatgggtttttcgcgattacttctgattttcgtggctactgccacgcactttactctacttgttgaacaaactgcttaaaatgcaggaagctgggccttccatatggaggaaaagccgtggaaattctgcacaggctgcgtgggcgtgaaagccctaaagccccgcccactctgccgcacttggccatttcatttggcatttccacgagcttttcgttggaagctcagaactgtaaacgccgaagcacacatgcaaacaaactttcgggctcacaccactgtagaaaaaccacttgttggatattatattaatggaaagccacaaccaaattataactgtttgtaaactacatttaaagacgtagttgaaatagaaacaggtaaacttacagatttgaaatgaatcagtaatccaataatgtgttttgtttggaatatttccaaaatgtcttcaacggaagaggcaagaacacaaacagaaacggcacaaacacaaagagataatttggcagcataagagagcggaatgctgtgcgaatttactacgtcagcattattattaacaagttaaacttaaagcggcacattcattgatacttaatttagtacagcaagtcaaggacacggtcaaactttcactatcaaagggttttaaactgtaactcgatctgttaaccgcttcgattttctgtttactcatttggaaaaaagcgggacaaccagggatgcgagaatcatactgtagctgcgtgtgctgaaaaaatagtgtgcatttaatatacgttcacatgatgatagaaagtactgactgtgtgagttttaattttaaaaatttacaaactttatattcatatttaactagagcttggaaaacatttacttcgagaccctggattcccttatgccgccagtgtggcccattgagcacgactgaaacacgctaacgcctttagctcggcagcactggcagctccaacaaaaagcttcaatttaaaataatatttaggtagtcccacaataaatgctaacaaaatgctctccaacctggtggtgaccaagcagaaagtggtcctcgtaataggtgagtacacactgactaccccatcgtctgccaaataatgcgaccaccaatctcccgcctcatccacagatgagctaaatcgggagcgcattgcccccaagttcatcggcagtctgctgcacgagcagggacagggggcggataccatcaaggccctgcccaccggcgtcagccttaagcacgtggccaccttcgaggcactgatcgacaagtacgccaacaacaacactgggagtactacggattccaactccactggctttaacgtcatcctgccaacattggcagacctgctgtgctaccagacgcctgctttcatatttggcttcctcaaccgcctacgccgctcggacaatgtgcgtcgggttttcctttgggcctccccgcagcacctgcaggatccgcatgccgactacatcctggctggctgcgagtacctggccgagctggtcctccgactggaatcggacaaactactctcgctgatatcacgcaagccgggcggaggggtgtccaacaggcgctactcctgcgaagtcagcaaaacccagttcaaggtgacgccgctggacggaggactgcctgcaggtgcctcccccaagcagccctcgcccgaggcggagcagaccacagagccggccagcagcaccttcaaaatcgagcttgacgaggatgaagtgttggcccgcaatgcactcaccctgccatacgaacggtgagtggtaaccattctctatgcgttacatctccttattgatatgttcgtatatatgatagcacatccgagccgtctgagggaaacataatatacacgcccgatgccgacgacgatttcgacgaggaggatccggacgaggatctgtgcatctaggctgcccgccagcagcgaacggcagtacaaatagccttggctttaagtctccttaagtctaacctactaaaaccataaaatacctggaattccggccccaaagttccgcctaggggtgtgttcaacctcgccagaggagcagaatgaatctttgaacgaccacttagtacacgtagaattgctcatttattttggataacttgatatgtgaatcaaaaaatcgaagaaacttgtgaatacatacaactgattcaattgctatctggtggtgccctagcttatgacttagttaaggaatttcatctagctaaccttatgtacagttaactctcgattacctccacgatatttggctgcaatgcgatcttttggtgtccagtgcgtggcgtatttacaaggcgttcaacctaactaacttaactagttccaaagtgctactatgctctattgatatgaaaatcaaatacaattggagcggcggagttccgcttccggtcaaaatggcgcttaaaagttcacattatcacaacaatctatacgaaaacatcgagaagaaaaaggagctatcaaaaaatcgttaattgcggttcgacatctaaatcttggcgagtatttacactagagaattaataacaaattaatgcatggcaatggctcatttgagcagggcatccacatcgctcttggggtcgggtgccagtgagctccagggcgcatcgctgcacagcggcagggaaacctcgctgtccgcctccaccacgcagctctcacgcagttgaaagaattggcccaccaatccgtcaatccagctgtgcagctcctgtcccagcattttccctttggccagggactcctcgcgcatggtgaactgctcgtcgtcggtttgaaggtgctgctgccactccacgggcatctcaaaatcttcaggcagagctacagtcaagccggcgtttagcgcctcagcatctgaggactttgctagcggatagcccttgtagtaggccagtggagctattaggaatttcaactgcgcatagatcgaattgcggcctattaacttggctgtccagatgcccggtgtgatcgggtgtttgagcagggttttcgagtggtttatcacatcgctggtggaatcctcaacatgcaattcattaaaatcttgcaatcggcccagcggatctatccacagcagggtgaggttgtacgaatgggaagcggcgcccgaatctgcgtttgcttggagtgtgtagctcaaaagca

SEQ ID NO: 3137 - DNA, 1123 bp, DROSOPHILA
cagcactggcagctccaacaaaaagcttcaatttaaaataatatttaggtagtcccacaataaatgctaacaaaatgctctccaacctggtggtgaccaagcagaaagtggtcctcgtaatagatgagctaaatcgggagcgcattgcccccaagttcatcggcagtctgctgcacgagcagggacagggggcggataccatcaaggccctgcccaccggcgtcagccttaagcacgtggccaccttcgaggcactgatcgacaagtacgccaacaacaacactgggagtactacggattccaactccactggctttaacgtcatcctgccaacattggcagacctgctgtgctaccagacgcctgctttcatatttggcttcctcaaccgcctacgccgctcggacaatgtgcgtcgggttttcctttgggcctccccgcagcacctgcaggatccgcatgccgactacatcctggctggctgcgagtacctggccgagctggtcctccgactggaatcggacaaactactctcgctgatatcacgcaagccgggcggaggggtgtccaacaggcgctactcctgcgaagtcagcaaaacccagttcaaggtgacgccgctggacggaggactgcctgcaggtgcctcccccaagcagccctcgcccgaggcggagcagaccacagagccggccagcagcaccttcaaaatcgagcttgacgaggatgaagtgttggcccgcaatgcactcaccctgccatacgaacgcacatccgagccgtctgagggaaacataatatacacgcccgatgccgacgacgatttcgacgaggaggatccggacgaggatctgtgcatctaggctgcccgccagcagcgaacggcagtacaaatagccttggctttaagtctccttaagtctaacctactaaaaccataaaatacctggaattccggccccaaagttccgcctaggggtgtgttcaacctcgccagaggagcagaatgaatctttgaacgaccacttagtacacgtagaattgctcatttattttggataacttgatatgtgaatcaaaaaatcgaagaaacttgtgaatacatacaactgattcaattgct

SEQ ID NO: 3138 - protein, 262 aa, DROSOPHILA
MLSNLVVTKQKVVLVIDELNRERIAPKFIGSLLHEQGQGADTIKALPTGVSLKHVATFEALIDKYANNNTGSTTDSNSTGFNVILPTLADLLCYQTPAFIFGFLNRLRRSDNVRRVFLWASPQHLQDPHADYILAGCEYLAELVLRLESDKLLSLISRKPGGGVSNRRYSCEVSKTQFKVTPLDGGLPAGASPKQPSPEAEQTTEPASSTFKIELDEDEVLARNALTLPYERTSEPSEGNIIYTPDADDDFDEEDPDEDLCI

SEQ ID NO: 3139 - DNA, 2800 bp, DROSOPHILA
gattcactgaaatatgaaacaattaacagaaaacttcgtaatgattatggagtgacatactgcgatccaactctgcttccatctggatcacatcctgggtaagtgatctgatctgcgaatgagcatcttcagtcgagacagacaagttagccatatttaaggggttattgctttgcggtgactgcagttggtttgaagcttctccgactgaagattcgctggtattggtggctgaagatgagtctgattccacagataaatcacgctccactggggatgggcgttccaaggacgaatgggaatcagcggatgaatcagattccgcggatgactgagattccacggatgtattgtgtcccgaattggattctatggatgaatgggagtccacagaagagtcggatacactggaattggagctcgaactggatacgttgctgtccgctgactgatcaagaatggatgagttctactaaataaatcaatcataaatcggaattaactagtttaaagtccagggtatacttacaaaacggaaaatagtcgaatctgacattgttcgagcaacaaatgaccaggaaacttgtgaaatgatttcgtagtaaagacaaaagcaggtgaacccagatatacatgtgctttagtgcagattgaaatgtgcaaaatagtttcctcctttcacgcgaccattcggttattttaaagatgacactttacggacattcgggaacaaggatttaagatcgactatcgatttttgcggtattatacaatgctgtttagaatgacacttgtaattcaataaaaatcaataatttattaaaaataaaatttccgtttcggcgaaattctttgataacaaaataattataagaaatgtatataaatatgtcgacattacaaaaccataccatcactatgtaaacgatattttttaggcgattaaatgccatcgatatataccgtgccgtggtagtgttagaaaattgcgggaattaacgttaaatgcacgtcaccaaagcagaataatagaatattttcgaaacaaaacaaagttggagacatggacaaggatgcgtttacattacaggccatacggcaggaccttatcgataacaatctgcaggctaaggcaataatacacgtaagtctccgctatctgaagagaaaccctcattaccgagcttctgtttttaggacatcctgaacagccgcacctccatcgccgaactcgaggagctgaacgaagcgggccgctccaaactgtctgctatccgcaaaagcatcgagcggctggacgactgggcgcgggacacggcagactctgcgctggccaatgaagtggacgaccaccgtgatcagttctccaaaacgctgcaggcgttccgaaaagcaaacgtgtccacgatgctggagatcgagaaggccaatcgggaggagttaatggccattaccggcgagagtgagctacgccaacgaaccacaacacgggcgcggcacaaccagggcagtctggtttcgcaggagaacgacgtgaccgagaagatgctggctatatcgcggcacctctcggagaccacccagaagagcgccatcaccctggaaacgctcgtggcctcgtcgcaaaatgtggaggccaccagcgacgaactgcaccacacggccggcagcattagcatgtccggcaagctgctcaaaaagtacggacgacgcgagtgcactgacaaaatgctgctcttcttcgccttctccttgttcctcgcctgtgtcttttacatcgtccaaaagcgactcttctaagactccacaaatggacaaaacccgttcccaaaatagcttaaggttgtcgcttctgttgtctaggtatagctagattaagcttagcacatgaccataccttgtaagcacagctcctatatttatattatttagtgatttgcctaagttgtaaacgtggtacagccaaagaccctagaataacaagatgcgtaacgccatacgattttttggcacacgattttttggccgtggctctagaggtggctccaggctctctcgaatttttgttagagagcgagagagcgaagagcgctacagcgaacagctcttttcaacgcacaaagtgatagcagacatctgtatgtgtgcacacgtattcacatgcattgtaaatttgacaaaatatgcccttcaccttagaagttctttggctttaaatctatattattttttatcaattggcaccatgcgaaaaattcttgttttgcattgccttaacgttattattatttgaaaatagattagaaatagtcaaatctatgtacatattatcacaaaaataaatttcaaaaatgaatttatataagaatatttgtcattagagtattcatcttgcggcgtgtgaaaaattaataaggcaatgattgttgagtgcttgtgtccgcacttcgtgcctcaagatatgaacaaagcaaagacactagaataattctattgtctttgatattacttttgcaatttaatttaattgcgatatttaattatttagtatatttattaaatcatttgacttaatatgatgtaacattaacattaaaagtgtttcaaaaaaaatatttcgcttttaaaaaattgtcagatgagagacaaattagaattaaacataaatataaatgtgtaaacggtagctaattcgagcggcgattttaacaaacaaatttaaaaagctttaaaattataatagccagggcgcgaatttttaaaaatttttttattttatcatattgctaggaaattggca

SEQ ID NO: 3140 - DNA, 747 bp, DROSOPHILA
gttaaatgcacgtcaccaaagcagaataatagaatattttcgaaacaaaacaaagttggagacatggacaaggatgcgtttacattacaggccatacggcaggaccttatcgataacaatctgcaggctaaggcaataatacacgacatcctgaacagccgcacctccatcgccgaactcgaggagctgaacgaagcgggccgctccaaactgtctgctatccgcaaaagcatcgagcggctggacgactgggcgcgggacacggcagactctgcgctggccaatgaagtggacgaccaccgtgatcagttctccaaaacgctgcaggcgttccgaaaagcaaacgtgtccacgatgctggagatcgagaaggccaatcgggaggagttaatggccattaccggcgagagtgagctacgccaacgaaccacaacacgggcgcggcacaaccagggcagtctggtttcgcaggagaacgacgtgaccgagaagatgctggctatatcgcggcacctctcggagaccacccagaagagcgccatcaccctggaaacgctcgtggcctcgtcgcaaaatgtggaggccaccagcgacgaactgcaccacacggccggcagcattagcatgtccggcaagctgctcaaaaagtacggacgacgcgagtgcactgacaaaatgctgctcttcttcgccttctccttgttcctcgcctgtgtcttttacatcgtccaaaagcgactcttctaa

SEQ ID NO: 3141 - protein, 227 aa, DROSOPHILA
MDKDAFTLQAIRQDLIDNNLQAKAIIHDILNSRTSIAELEELNEAGRSKLSAIRKSIERLDDWARDTADSALANEVDDHRDQFSKTLQAFRKANVSTMLEIEKANREELMAITGESELRQRTTTRARHNQGSLVSQENDVTEKMLAISRHLSETTQKSAITLETLVASSQNVEATSDELHHTAGSISMSGKLLKKYGRRECTDKMLLFFAFSLFLACVFYIVQKRLF

SEQ ID NO: 3142 - DNA, 3718 bp, DROSOPHILA
aaggcccaaaagcaggaacaagctagtccaagtggtcattgctaactgtaagtggtatgattggaatcggtctcttatatacggcgctaatctacaggtcttatcgtttctaagtcttcagtgcgaaagccagtatggccacctggggaaaatatatgatgcgacctttgactccaaaatagaaatggaagatattttgtataagttaaattgagtgatttactaattgaatctgatagtgataatatctgaccataatatcgggacaataattcggttatctaggtctgtttttttgtgtgttttactttaaaaacatgactatctcgtaggactattatttgagcaattttcatttatttgatattgacgggtattccccaaggatttaattactgaacctaacatataatttatttgttcaagtaatgcaatttaaagtgtatgataagattttaatatgcttctaagactggtggcattctaactggcgacagtggtctaaagtcgacgaattttaatcaaaatgtctacccacattagctttattatgacctacactcatatagttccagttattgaatcattccatacaaatcagttatcacaaccttgaacccccattctctctcattatttttattttctgaaagagccaagtaggacaataaatttctcccccctgcgaaatccgaaaacccagtccaccgataagatatggctatgcagttggattcatttaccagccaatctgtctcatgatctctaggcgtgagctggctaaaacaaccatgaaattgactccaataaattccacagcctgcgtatcatgagaacccattcgtagtgtcgtgggatcgtaaatctgccagctccacggaggtaatcagaaatagttttctatatggtgggtttatcaccaccttatcaatgggagcggtatgcttaaataggggcaccttttaatccctctggccattggcaatcgatcgatttagtgggagccatgttcaagttgctggtgctctcgtgccttttggctttggctctaccttcgctggcggaggttggctggtggaagacgggtcagttctaccagatctatcccagatcttttaaggatagcgatggcgacggcgtgggagatctcataggtgagtaggcgggtcgaaagcgtactacttaggctattatcttacttcactcttgcacttaggtattacgcaacagctgccttacctaaaggaaattggcatcacagccacctggctttccccgatcttcacctcacccatggctgatttcggctacgatgtggctgatcttaagggtattgatcccatattcggcacaatggaggatttcgaggccctgcttgcgcgcgccaaagagctggacatcaaaatcattctggactttgtgcccaaccacaccagtgacgagtgcgactggttcatacgatcggcagctggcgaggaggagtacaaggatttctatgtttggcacaccggcaaggtggtcaacggaatccgccagccacccaccaactgggtctccgtgttccgcggatccatgtggacctggaacgagcaacggcaggcgtactacctccaccaattccacgccaaacagcccgatctaaactaccgcaaccccaaggttgttgaagccatgaaggatgtactgcgcttctggctgcgaaagggggcttacggcttccgcatcgacgccgttcctcatgtctacgaaattccagctgatgccgacggcaactggcccgatgaaccgcggaacgaggcggtgagcgatcccgaggactacacttacctgcagcacatctacaccaccgatcaacccgagaccctggagctggtttacgctttccgcgatgtgatcgaggaaatagacgccgagctgggtggcgacgaccgcgtcctgctcaccgaggcctactctcctctggaagttttgatgcagtactatggaaatggcactcacctgggctcccagatccccttcaatttcgagctgctggccaagatcagctacagctccgatgcctaccattactcggagctgatccacaactggctggacaacatgccagaaggtcaggtggctaactgggtgttcggcaaccacgaccagagtcgcattggctcccgattgggcgccgatcgcatcgacgcctgcaacatgatcatactgggcctgcccggcgtgagtgtgacctaccagggcgaggagatgggtatgaccgacgtttggatcagctgggaggacaccgtggaccctcaagcctgccaatcgaacgaacaggagtttgagcgcctcactcgcgacccagtgcgcactccattccagtggagcgacgaggtcaacgccgggttctccaacgcctcggtaacctggctgcctgtggccagcaactacaagttggtcaatgtgaagaaggagcgtggaatagcccttagccacctgaacgtctacaagcagctgcgggctctgcgtgatgagcctactttgaagcagggtgatgtctccgtaacagccattggtccaaatgtgctggccttcaagcggtaagctggaacaatcatagaacttacacaaagactggatattgaccggttttccttgtcaacagatctttggcgggctacaagtcgtacatcaccctcatcaacatcaacgatgatgtggaatcgatcaacttggactctgtcttcacctccataaccacgcaactgcaatatgtggtggtgaatgataagagtgtgcgtcgcaagaagtaagcactagacaccataaaatatctttaaacatacaacactaactattttatccttttagcgacctcacctttgccaactccgtgctgctgttgcccaaggaagcagttgtgctgagcacagtttaaactaatatattagatccttaataaagaataacacaaaaatattttgatcgcataacttctttaatagggttggattacttaactaactgtgcttatctatacgatggccccatgccaacttgtataagcactgattagaaacagacccactggaagttttgaataatagccatttaatttattggccatttaggcaataactaaattcgtacgattactatcgatcacgtttattcgcagattaatccatagcgataaccaagcgacagctcaggccaaatgcctatatcttaagtgggtgtctataaaatctagatgtggtaattggcattcaaagttcggtttaatatatttctgggaaaacatatgtcgaaacagggcctatctttattagggaccccagtggcattcgtactgattaacacgaactaaagaagtaattcttgatacaacaaaataagtacaagaagttaagccaaccagcgtagaacgactgcttcgtagggcatgagaatgattctctgtgacagatctgctttttgcctgtaaatcgttttaagttagttaaaagtatagaaatcaagaaagtagagaaaacctaccccgaatagtgtgtggagtaggcagtggccagcacatactcgtaggttttgggggcgagcccatcgaggatttccataccgttgcccatgttgaccaggattcgatactcctcgctgatcttgtttgtgctgtaggatatcaggatattaggatcagcaagaggattagaagaggatttgcttcacgtaccgaatg

SEQ ID NO: 3143 - DNA, 1656 bp, DROSOPHILA
ggagccatgttcaagttgctggtgctctcgtgccttttggctttggctctaccttcgctggcggaggttggctggtggaagacgggtcagttctaccagatctatcccagatcttttaaggatagcgatggcgacggcgtgggagatctcataggtattacgcaacagctgccttacctaaaggaaattggcatcacagccacctggctttccccgatcttcacctcacccatggctgatttcggctacgatgtggctgatcttaagggtattgatcccatattcggcacaatggaggatttcgaggccctgcttgcgcgcgccaaagagctggacatcaaaatcattctggactttgtgcccaaccacaccagtgacgagtgcgactggttcatacgatcggcagctggcgaggaggagtacaaggatttctatgtttggcacaccggcaaggtggtcaacggaatccgccagccacccaccaactgggtctccgtgttccgcggatccatgtggacctggaacgagcaacggcaggcgtactacctccaccaattccacgccaaacagcccgatctaaactaccgcaaccccaaggttgttgaagccatgaaggatgtactgcgcttctggctgcgaaagggggcttacggcttccgcatcgacgccgttcctcatgtctacgaaattccagctgatgccgacggcaactggcccgatgaaccgcggaacgaggcggtgagcgatcccgaggactacacttacctgcagcacatctacaccaccgatcaacccgagaccctggagctggtttacgctttccgcgatgtgatcgaggaaatagacgccgagctgggtggcgacgaccgcgtcctgctcaccgaggcctactctcctctggaagttttgatgcagtactatggaaatggcactcacctgggctcccagatccccttcaatttcgagctgctggccaagatcagctacagctccgatgcctaccattactcggagctgatccacaactggctggacaacatgccagaaggtcaggtggctaactgggtgttcggcaaccacgaccagagtcgcattggctcccgattgggcgccgatcgcatcgacgcctgcaacatgatcatactgggcctgcccggcgtgagtgtgacctaccagggcgaggagatgggtatgaccgacgtttggatcagctgggaggacaccgtggaccctcaagcctgccaatcgaacgaacaggagtttgagcgcctcactcgcgacccagtgcgcactccattccagtggagcgacgaggtcaacgccgggttctccaacgcctcggtaacctggctgcctgtggccagcaactacaagttggtcaatgtgaagaaggagcgtggaatagcccttagccacctgaacgtctacaagcagctgcgggctctgcgtgatgagcctactttgaagcagggtgatgtctccgtaacagccattggtccaaatgtgctggccttcaagcggtaagctggaacaatcatagaacttacacaaagactggatattgaccggttttccttgtcaacagatctttggcgggctacaagtcgtacatcaccctcatcaacatcaacgatgatgtggaatcgatcaacttgg

SEQ ID NO: 3144 - protein, 505 aa, DROSOPHILA
MFKLLVLSCLLALALPSLAEVGWWKTGQFYQIYPRSFKDSDGDGVGDLIGITQQLPYLKEIGITATWLSPIFTSPMADFGYDVADLKGIDPIFGTMEDFEALLARAKELDIKIILDFVPNHTSDECDWFIRSAAGEEEYKDFYVWHTGKVVNGIRQPPTNWVSVFRGSMWTWNEQRQAYYLHQFHAKQPDLNYRNPKVVEAMKDVLRFWLRKGAYGFRIDAVPHVYEIPADADGNWPDEPRNEAVSDPEDYTYLQHIYTTDQPETLELVYAFRDVIEEIDAELGGDDRVLLTEAYSPLEVLMQYYGNGTHLGSQIPFNFELLAKISYSSDAYHYSELIHNWLDNMPEGQVANWVFGNHDQSRIGSRLGADRIDACNMIILGLPGVSVTYQGEEMGMTDVWISWEDTVDPQACQSNEQEFERLTRDPVRTPFQWSDEVNAGFSNASVTWLPVASNYKLVNVKKERGIALSHLNVYKQLRALRDEPTLKQGDVSVTAIGPNVLAFKR

SEQ ID NO: 3145 - DNA, 5030 bp, DROSOPHILA
tggtaaatgcaatttatttttatttagaatatatgagtgttgtatatgtagataaaaatgttaagcaagttagtaagggcacctaggcactcctccggggtttgtgaatccgttggtgttgaccaacctgcagatgtccttgtatgaccgcgccgattttgcaggcctttctggctgtggctgggaataacctctgttgtaatagtcaggatagaactggaaccaagaaggcctgtggtagttgtagtcgggaaaaaattctttaagcacagagctgctgcagaatctgcttagccccagaatccacagcagaatgtatataatcgacttgcgcatggccacttcgcctgagcttaagatttggaataaagccgtacccgattctcattgtatacgcctggcgcacttatgaagcttgtgcgacctcgcacacagtgggaaagtaattggaatctgaaatctatgcgtgattgtcggaatagctgatagcgggagtgttcgcgtgccccagctcaatgctatcgttatctacaaaccattcggcctttaaattgatgtatgatgaaagtttattcaatgtgtggtttttgacgtttaataagaaaaattcgattttgagaaatgcatttaaaatgcaatttttatttatcgcagtgaagaataaaataatatattttttcattatatttgttaccaatttaacaaaaatattatgtagttgcttttttaaaagtctttcgggtcaataagaaaaaaaaagcttacaaacagagtattatgttctaaggaataggacctaaaaaccctcattacctaattggtgtttcaaaaacaggtttatgtggtgcaaaaggacaaattttgctaacaaaaaaaaaaaaacacttttttaaaaaaactaacttacaggcgcctaaaaaaaattataatcgatttgtcatcgattttttggtctttaaagtactatagcggcgcattatatactaaccaaaacgagttggcagcactcgtgatgttttgattgaaaaaacaaattagtttattgtttttatctgttgtcgccaaaaatattatttaaatcaatatgagcaccgccgtagaagtggctaacacggctccggagaagttggccaactactttgcgctacagtcggcgtttgaggtaaaacgttgatgaatggccccgaaaccggcaatgttccgatctgatagaaaataataattttcagaaagcccttgaattggccatcaccgacggcaaagtggagctgttggtcaaggagtacaatagattcccggccaacaccgagcacgacaagcgcttacccatggaccacgcgttccgcgtgctcctgatgaagcggctggacgaagatgtgagtcgcattggagagcttgtacgcctctccgtggaagccacgcgggccgagattgtgtccaacaccatacccgtggttctgctgatcgacaccttcgacgtggtcactctggacaagtgccagaagatatttcagtttgtcgaggatatggtggaggtgtggaaggaggagatcttcttttcctcatgcaagaacaacattctacgcatgtgcaacgacctgctgcgtcgactttcgcgcacccagaacaccgtcttctgtggccgcatccagcttttcctctcaaagttctttcccttttcggagcggtctggcctcaacatcgtctccgaattcaacctggacaactttacggagtacggtctggacagcaaagaccacgacgaaagcgacaacaaggagctggaggataccgctgaggacatccccctaaagatcgactacgacctgtactgcaagttttggtcgctgcaggactttttccgaaatcccaaccagtgttacaataagccgcagtggaagatgttccagatggtaagcagtggcttggcacaattacaattgtagaatatatatatatcttggaaagagatcaaagatgtttgccagctagcttgctcataaatattggttattaataatcctgccccatgttggttcatattcatatattgttactttccccttccagcacgctgacaacatactacagtccttctcgagcttcaagctggaagacgtgcgccaaagtagcaacgaaaatgcgagcggtactgaccaagcaatggatgtggacgaggaggcagtagacaccacggcggtgtcttccgtcatcaaggcgaatcacttcttcgccaagtttctaaccaatcccaagcttttggctctgcagctctccgacgctaattttcgacgtgctgttctggtgcagtttctaattctatttcagtacctgcaagtcagtgtaaagtttaaaaggttcgaatatgaagaaagtccagggaaaacgaacaaactttaatgattgtactttcagtgatactcaaaccttgactgcagaccaggcggactttatcaaggaaacagagtcgcgtgtttataagttgctagaggagacaccaccgtacggtaagcggttttcacggacagtgtatcacatgctggcccgcgaagagatgtggaacaactggaagaacgaaggctgcaaggaattcaagaagcccgaggaaccaactctcagcgaagaggactcgaagccaactcccaataaaagaccgcgccgtccattgggcgatgcactgcgcgatgcttcccgcagcggcaagttttatttgggaaagtaagtatcgaacgtaagtcaaactaagccagttctaaaatatttcacttccagtgacaacctaacacgtttgtggaactactctccagataacttgcaggcctgcaaaagtgaacagcgaaacttcctaccgctgctggagacatatttagaaacgccgcacgaaaaggttgatcccgcttttgagtggcgagctctgcgcttgcttgcccgccaaacaccgcacttctttacgtcgctctctcagccatcgagcaagatctccgattatcttgagcaagtgcgcaaacgtctcatccgggacaaagagcccaaacctgctgcccttttatcgaacaactcttctgagaacaattttggcctgtcggtcaacaacgttcatacggagggcgagcaggatgctacggtcgcccttcaggacggtgaaccagagcaggatcttgaagtagaggacaacgaacctgtggtggaagaggtggatgaggtaccggcgcacgagaaaccccttatggttaccaaagagcatatcgaagaggtggcgccccttataggcgagccatggatgaaggtgggaaagaagattggcttcaccaacgatgaacttctcttctttcaaatggagcatcctacggcgaacgtggcctgcgttaagatgctgacaaactggatatccgatgacgacgacgccaccctggaaaactgggcgtacatgctagagggattggagatgaataaggccgccgaagcggtgaaggcgattattgagcgcgaaaaatctggatccactgccgccttctgcctccggtaacgacgatgaggtgctctctgattagcatcatccccatgccgatcccaccctagttattataatttcgtttcaatcataaaacttctttatcacaagtaaaagaatgggcgaatatctattcccaatcaccactcaacgcctcttggccggcggaccgttacggggcttgttgtgcaccatgttaacgcacttggggatatgacgctccgcagcctgttcgttgaatcggcgaccacagtggggacactggacatagtctggattctccgaaggtggcggtggtggcaggtcgctcaacttgccgccgcgcgccaagtgcgccttcacctgcttggccgctctaatcgactgaatgaagtcctcgtgcttcttacgccagttgttcttcttcactccagtggtcagacccttctgctgggcagcactactgtaagttgaacggttgcgattgcccttcgacttcatattgaacgccgcggcctcggtgccctcgatccgctgcttggaggcatcgaatatcttgcgtttggtggtcagcatgcgctggcacacctcctcgtgcttcgccagacgatccgtgttgaagtggcgtccgcagtagcggcataaagcggtgccctctgggattgcagtcgttgtgtcctggtagcgaagggtaatcttattatacgcccactgccgacaattattctgctatactcaccatgttgacctttttaactggtgatttgggttccgccttgttggaaacagacatttaaaataaatcccaaatatgtttagcttgagactgacacctccgtgccacgtcgatgctacttacccgtcgaacaaatggtggcgaaagacgaccggctgtcggggcagcaccggttcctccacttactcgttgggtcgcctgaatcttgggactgcgttgtggcgcgggagaacgttggtggagcgtggtctcctgggccggcggtgtcttgcgggtgaccacgggcttaaggttgcgattcaaagtcccgcggggcgtggcgaacttattgttattgctgtcactagtgatcctcctgcctggtgcatttggtgcatcccgcatggtcaagtcggccacgcccttgacgagacgctgcattgggggctgcgggcgagattttgtttgggcgggtggcgagggcagagtgccgatcggcttgaggggattgctgcgatcaatgcccgccccgcggcggcgctcgtcgaacatctggcgcactttcccattcccgatcaacctggtggtggcggcactgggtgctccagtggccaggttctcggcacttgacttcgtgctcatcagctcccgcctacgcacctcctgctcctgttgcgtgcgctgctggaaacgcatctgaaaattgaagcacatttgttgtaaataattcgcttataattttcaaatcaaaacctagtgacctttttaaaataaaagactttccattcaattagcctttcgtgaaaaccgaaaacatttaaaata

SEQ ID NO: 3146 - DNA, 2651 bp, DROSOPHILA
gcagcactcgtgatgttttgattgaaaaaacaaattagtttattgtttttatctgttgtcgccaaaaatattatttaaatcaatatgagcaccgccgtagaagtggctaacacggctccggagaagttggccaactactttgcgctacagtcggcgtttgagaaagcccttgaattggccatcaccgacggcaaagtggagctgttggtcaaggagtacaatagattcccggccaacaccgagcacgacaagcgcttacccatggaccacgcgttccgcgtgctcctgatgaagcggctggacgaagatgtgagtcgcattggagagcttgtacgcctctccgtggaagccacgcgggccgagattgtgtccaacaccatacccgtggttctgctgatcgacaccttcgacgtggtcactctggacaagtgccagaagatatttcagtttgtcgaggatatggtggaggtgtggaaggaggagatcttcttttcctcatgcaagaacaacattctacgcatgtgcaacgacctgctgcgtcgactttcgcgcacccagaacaccgtcttctgtggccgcatccagcttttcctctcaaagttctttcccttttcggagcggtctggcctcaacatcgtctccgaattcaacctggacaactttacggagtacggtctggacagcaaagaccacgacgaaagcgacaacaaggagctggaggataccgctgaggacatccccctaaagatcgactacgacctgtactgcaagttttggtcgctgcaggactttttccgaaatcccaaccagtgttacaataagccgcagtggaagatgttccagatgcacgctgacaacatactacagtccttctcgagcttcaagctggaagacgtgcgccaaagtagcaacgaaaatgcgagcggtactgaccaagcaatggatgtggacgaggaggcagtagacaccacggcggtgtcttccgtcatcaaggcgaatcacttcttcgccaagtttctaaccaatcccaagcttttggctctgcagctctccgacgctaattttcgacgtgctgttctggtgcagtttctaattctatttcagtacctgcaagtcagtgtaaagtttaaaagtgatactcaaaccttgactgcagaccaggcggactttatcaaggaaacagagtcgcgtgtttataagttgctagaggagacaccaccgtacggtaagcggttttcacggacagtgtatcacatgctggcccgcgaagagatgtggaacaactggaagaacgaaggctgcaaggaattcaagaagcccgaggaaccaactctcagcgaagaggactcgaagccaactcccaataaaagaccgcgccgtccattgggcgatgcactgcgcgatgcttcccgcagcggcaagttttatttgggaaatgacaacctaacacgtttgtggaactactctccagataacttgcaggcctgcaaaagtgaacagcgaaacttcctaccgctgctggagacatatttagaaacgccgcacgaaaaggttgatcccgcttttgagtggcgagctctgcgcttgcttgcccgccaaacaccgcacttctttacgtcgctctctcagccatcgagcaagatctccgattatcttgagcaagtgcgcaaacgtctcatccgggacaaagagcccaaacctgctgcccttttatcgaacaactcttctgagaacaattttggcctgtcggtcaacaacgttcatacggagggcgagcaggatgctacggtcgcccttcaggacggtgaaccagagcaggatcttgaagtagaggacaacgaacctgtggtggaagaggtggatgaggtaccggcgcacgagaaaccccttatggttaccaaagagcatatcgaagaggtggcgccccttataggcgagccatggatgaaggtgggaaagaagattggcttcaccaacgatgaacttctcttctttcaaatggagcatcctacggcgaacgtggcctgcgttaagatgctgacaaactggatatccgatgacgacgacgccaccctggaaaactgggcgtacatgctagagggattggagatgaataaggccgccgaagcggtgaaggcgattattgagcgcgaaaaatctggatccactgccgccttctgcctccggtaacgacgatgagttattataatttcgtttcaatcataaaacttctttatcacaagtaaaagaatgggcgaatatctattcccaatcaccactcaacgcctcttggccggcggaccgttacggggcttgttgtgcaccatgttaacgcacttggggatatgacgctccgcagcctgttcgttgaatcggcgaccacagtggggacactggacatagtctggattctccgaaggtggcggtggtggcaggtcgctcaacttgccgccgcgcgccaagtgcgccttcacctgcttggccgctctaatcgactgaatgaagtcctcgtgcttcttacgccagttgttcttcttcactccagtggtcagacccttctgctgggcagcactactgtaagttgaacggttgcgattgcccttcgacttcatattgaacgccgcggcctcggtgccctcgatccgctgctt

SEQ ID NO: 3147 - protein, 701 aa, DROSOPHILA
MSTAVEVANTAPEKLANYFALQSAFEKALELAITDGKVELLVKEYNRFPANTEHDKRLPMDHAFRVLLMKRLDEDVSRIGELVRLSVEATRAEIVSNTIPVVLLIDTFDVVTLDKCQKIFQFVEDMVEVWKEEIFFSSCKNNILRMCNDLLRRLSRTQNTVFCGRIQLFLSKFFPFSERSGLNIVSEFNLDNFTEYGLDSKDHDESDNKELEDTAEDIPLKIDYDLYCKFWSLQDFFRNPNQCYNKPQWKMFQMHADNILQSFSSFKLEDVRQSSNENASGTDQAMDVDEEAVDTTAVSSVIKANHFFAKFLTNPKLLALQLSDANFRRAVLVQFLILFQYLQVSVKFKSDTQTLTADQADFIKETESRVYKLLEETPPYGKRFSRTVYHMLAREEMWNNWKNEGCKEFKKPEEPTLSEEDSKPTPNKRPRRPLGDALRDASRSGKFYLGNDNLTRLWNYSPDNLQACKSEQRNFLPLLETYLETPHEKVDPAFEWRALRLLARQTPHFFTSLSQPSSKISDYLEQVRKRLIRDKEPKPAALLSNNSSENNFGLSVNNVHTEGEQDATVALQDGEPEQDLEVEDNEPVVEEVDEVPAHEKPLMVTKEHIEEVAPLIGEPWMKVGKKIGFTNDELLFFQMEHPTANVACVKMLTNWISDDDDATLENWAYMLEGLEMNKAAEAVKAIIEREKSGSTAAFCLR

SEQ ID NO: 3148 - DNA, 14245 bp, DROSOPHILA
gggcattaaactatgttgcagttcttcatttgcacttcatatcactttaataaacttgtgtaaatcggtctaaaatactgtttaacatcatacaaaataataacaaaaatcttaaaactacttgaggacatagacaaacattgtaaaataaattaactattggtaaggaatagctacatgtacttgaaagtatctagagttatctacggctattatacactatttacaaaatgtttgacttgacattggcatcgttaaagatagtgcttttggtgggtggtaaatggtaagtggtttttaagctttctaaaatcttagacacttttgacagactatgtccatacagaggtagggattaggccctccttactagttccaggcggcgtgagaacctccttgttcagaaattccaatggcaggtcgaccaagtaaccctaaaataaaaaattcattttttttaataatagtttttatggagataacaaacactatatagcattactcggctagggtggataaatatcataacagctcgatacatatttttatttccgttactcgcaaaatgtatgtaacaaacagaaggaagcgtttccgaccatattaagtatatattcttctcacgcccatactttgaacaatttttaaattgtatctcattttattcctcaatatcaatggatatgccagaaaaatgtggaaatttcgctttcgcatgtacactagttgagtaacgggtaactgatagtcgggggactcgactatatcattctcttatgttttgaattcgaaatgcaattaataatatcataataaattattcaacataatatttggctgtgctatttgtttactataaactagatagggtcctaattatctgtaatgaaacgtttgctatatacggaaaataatcagattcaaaacacataagaactgagagtggtaacttagtaagtgactgtattaatttaacacataaatataaactaaagatcaattaaatattaattgggaagagtacctgaatgtcgttggctctgttggcagctagatcaggggcggttttggcaagaggcggctcctcctggtatttgcgaaggctggcaaaggtttttacaaagtcagtggggatgcacttaaacacctcgtcgtaaatctctgtgttctgcattgaaatcctacgccaggtgccgtgccaaaacttctcacaaacaggatcgttaatgtccaggtcagaccgactggaaccttcgctttccaggaggcctggttgaataacatataacagatatagattaaggttcctacaaaatcaaacgacataactaacctaagtgttctttaaaaaggtattttcgaaggcgaccggcaaacactccgctcggatacttcttgccattcatgcgtccgtcctcgaactcctcgtccattagaatagccgctatctcggagtcccgctttccgatcatagagcgatcgttaatgtttgccgaaccgcagattacaacgcgatcgtcggctatcaagagctttgagtggacatatatcaactctgttatgggtgtgttattcaaaaaagaatggttgcgcaggctgtggaatgagatatagttttccggattggcaatacccgcctcctgcaggcgggtcaaaattgatgtgcgtcccctgcaagtataaaagcagagtaaatatgtgacttgaaataaaaacgtagtaaagttctttgactatcagctaacggggtagaaagctttccgactcttattaaaacttctaaagatatgatgttatggtttttaggtataagtaagtgaaggtttatgaacaggagagttcccggaatcgtgacattcaacaaaatttggtgttgtgcaatcaactcggcaatggtttcgcaatgcatttgatgtgccctacctggaaatggacgcatagttccagtgtgtaattgctctgactgctatcccagtactgccaccgacatcaccctcaaagcccggtaggagcggcataatcacataaactcggaaaggcttccgttccctagaagagctgaacattagatctgctagaatcaggataagtattttggtttcatacttgtgcgctctaacgatccgtttaaagagtgtttccccgatttgattccgcacattgttataagcacctggcacacccatgcctaactgcatagtgataaaaaattggttttcgatgtacacgtagtgctgcgccttggtgatcgtctggatgtaggcatcgtggatgctttgctccacaagatccgcctctataaagccgcagctccaggcagagacgcttcgaagtagctggcacgtgacccgttgctgacggttttgctgaatgttcggattgagcctcacttggtgatagctttttggcatcaaataggggaatctcgtgttatcgcgtagtttctccagcttcatggcattccagcgctgaatgaagtggcgggccacatccctagcggaagtacccaccacacacagacccacgtcgtgccatggcatccgcggtgttgttgttcgatctatgatatccacgaacggcgagtttaggttcatccagtctttaagtataaagttggagtaatccttgccgaaccagtacttggcctggccgcagaactcactgagtatttgtgtactgctagtggtaatcgccacttcctgcccacctgaagccatgttaaggttgacttcgtggtccgtagcttcctcggactcgatagtgtacacctccgcagatttttcctccgtctcagtagctgttagacggtgcataaagtccttgcccatacgggcgcccttcatcgcgttgttcttcaggcgatcgagtacgttcttacgctccatttcaggggtgttgagtttcatcccttctaaagcgattcccgattctgcgggagtttcacccggactcgaaacgagcgtagacggtataagcagtcgatcaccaggcttaagagttttcaactctatgctagtattgggctcatccgggggtggggacggtggcctttccttggcggaggtatcgtagtgagcgtttcgcgaggacttacgtgatccgaaagctgagtccgtgtcgtctttggtgaagtacaaacttggcgttcgacgcgtgctgccagaaaaagatgacgtagatatgctacccagatccgttagccgatggtggtgatcatcccaacgtccatagcacaaatcaatacctcccataaacgcataggtttggtcgattacgacgatcttttcgtgatgtgcccaaagcagaatacctcctctagcatggtccggatgacgcatgaccttcaaagaacatttaataagttagttcgggacttcatcagcttcatagatgctcatacactatttatatgttcttcaaactaaccttgatgttttcatgcttggccagcgtggacttgctgtagtagctgtttatgccaagtgccatttcaacctccttgtagagcagcacaaagacgcgcactccctgttcggccttgcgcaacaggatcttgtccaatcgccagtagtctccgtcgagtgcgggtcgcttcatgtatatctcgggactgagccaccagtcggcaatatagatctcctcgagggctgcctctaagccgtcggccacggctgacatatactgggcgccgtccacataccacgtggcatgagtgttggcgcgcatcggagcgaaggacatgtgcggattgggcagggtgaagtcgcgcgcatacgagttggccgtgttcttgaggtattgcatccactctttacacttacgccgtgtccagcacttgagcacaatgtgacggttgttcgtcagtacctgcaagcccttgcgcatgcccgtctgatagatacccgtggaaacgtcgaagccctgatcaaagaggatcactgcccggatgcttccgtctgttggacggatgtagccgaagcaggtctcttttacgaaaaaccatcggttccgccacgtgccgcaaactacgtcggagcaaaagtagttgcagcgcacacagcagttcttttgaaagcacccaaaaaaattgcatcctgcttgccctggtctcgttgatccagttcgctttaaaatcacgccttccttgcccttaattcccattcccggaacaaaggacacattagacacttcaacgaagtttagctgtagtaaatgaattgagttatatatcggattttgctaaataacctacaggtattaggtattaggctaacggttctattgccgtcttcttttaatagttaaatatataaattttcgcaaattctttgcttctatatgcttacaacctcccagagaacattgaattgcatagcttaatattaaatgaacatgtttcataacattttaataatattgtacttaccgtttcatggtgagatcggtacaagctgatgttcagcaggttgtacaagtagtcctccagctgttttattctgacgctcagattctctacggtgaccagactctcaggacggtttgggaatcgcggcagcttccgtttcttcttttttttgcgcttcttttgaatgcgtcgtggtgttagacccgccagaatggagctgtgattgggactgatcatagccatggcattgttggcgttactgcccgcgattttactgcttctgccttcagccctcagcggagtgctagtttgtttgaccttggtgtgagaaggaaggtcctttagagtggactcgtcagccatctctctggctgtggctttcaaagtggtacgcttctccttgtgactgcgactgggaaaaggaatgttgagcgaggtgcggaaaaagctgagctgctggtgcaacgagttaaagtgcttgtatcgccgcttgatcgtccacttgaagggaccgtgggtcagctcgattgtgtacctgcgtaaaagaaaaaaagtaatgtcattcttatttggtcaaaatgttttcggcgtaccaataaaaattggcaagacaaatgataacagcatgggggatttgtggctgttagaaagggcgtggccacgttttaaaacaaacttgcacagcgtaggcaagtcttttttcaccacttctacggacagacggacggacacggtcagatcgcttcagctggtgatcccaatcaagaacatatgtaaaaaacgctcccgttttaacgtatttagtataacctcttactcatctttcctatatgaatatgattggatttcactcacagattggggtttagcagatgtgtagtgacgctacgctccgtatcgacgatccgaacatgaatctcacggcccgggatgaaaaccttgcgctggaacgagttgaacttgacgctcggcccgtatatgctagtaaatggtatttcgtgtctcaggactacactgttgttttcctcgtcgtcgaactcctcctcatcatcgtccgtctccttgcgctccaccagcaccggcttgtcgcccacgttggatagaatggtcacagaatcaggaaaagcgagggtctcatcgtactcagaatcgactagagagaactgaaattctggcaggcagcggttatgatgctcgacaaccgcttcgtctgtgcagtcccggaacactccctctccctcttcattgttggagttctcctccgacgcgtcctcttccccgctgccatgttcttcgtccgagttggtaagtgcgtagggcggcaaggcgcctccaacggtgccggcatctgccatcgcctcgtactgggcaaagtagtaggaactgtctaaatcatcgtagcctctgttaacgtagccgccatagtgcgccggccggtaaacatcgtcagtggggtgttcaactgcaagatgacagataaaaggaatgggcgtaaggaagacaataaattttaacagatttaaccttaaactagaagtattggtgagtcccatgacgatcacaattatatttcaaacccatgatacttgcggcatgtgttatttgtgtaaaatcaaaaagagttgcaaatgtaaagttccctctgtgattttacctaacataaaatagattaaatggctaggtgacctttagttgtcagtttcccagccatgctaagtacatgtgtaagttctatttcatgttgggtaagattggcacaacatttaaaaatactggtaaacataaattaaaaacattttttatataacttgaagtatatatttttctagtctaataataaaatttaaattgtttgatgttcgaaaagccatgaatgtaaatataacatttttgagatatgtcccccggctgaacggcctgtgttgtaaccattaaatggtaataattagcaagtgctatctacattcgaaacagaagctcgctcaaggtcagagctcacgacatgtggtgtagttaagtttaatgcattatggtcggctgaacttgacataggaaccctgctcgaaccttgaaaacatttaaagctaaatacacacgacgcacctccttcgcccgtaagtatagcattttccttagctcagtgctactggctgagaacgcaaatcagaggagaatattaggtatcgtacgcatcttttggagatacagttttgccatatacctgtcctaatctctactgttctgttttcccaaaatacttgagcaatcagcttctagctgattgacatttagatagcaagcccaaataaaacggcacaacaaatagattaggccatactgcacagtaggtaggccaaccaatgacggttaagtgagtttatggatgcggcacggctttgcaaaagtgcacaggttcagttatcgacgatagtaataaacagaataaatcagtacttagtcaagtgctttgattagcagacaataacaggtgtcctgtcctattcgcctattcacagagtaactttatttctgtccgctgagtaccgcgtatagaaatatttaaaattcaaaaatcgaaaatggttttttaaaaaaaaaaggtagcgacacctgaaaatttttgttaagatactgtttcagaagttgttggtttaatttatcaaacaattgaacgagtcataacttacgattgctccttatcacttgtgataattaaaataaactggaacgccgagtgcaaagaatttgataatggccgtcaatgatcaatgacattggggcacttccatgataccctatcataataagtgccatcaaagttttattaccacacttttacatacacaggctagcttatgggcaagttcaactggcaggcataaattcttggtattgaattcgttattatatgggtagtgaaaataacgagtgttggcatatgccttatcacgaagctctttttgctatcagcttcaagtcaccaaacaaaaacttctggaggcaaaaacaaaaacttctttaatgctcgagttccatgatttgtgataaaagtgaaaaaataaaaaaatttaagtccatcaaaaatgtatttgattagacgaatcgttaaagagaattgtggatataattaaaccttggacctattattcaatcatcggccgccgttttcagaaatttaaggcggtataataagtgtaacaccgtactcaataaaagaaccataatttcttaacaccttttcactttcaaagcgatttgccgaactcattagttttggctcattggttttggcaagcaaattaacttaaaaaaaacttgacacttttatcactaacagataagacgaatagaagtaaccccattttgtttcaagaatatacaatttttcgttgaaaaaactaaactccaaccacaataatacgtttttatggtggcgaataaagctgtggtatcccattcctattgatagggcattggtgtgaaaaaaaactagttctaaattgccgaattaaatgttacttaaacatttttgatttaactgaaaaattctgttatatgcattgtatttttttttgcaggaatgttaatgctttccatttaatgcccgttatcaaaatgtcctcagaccgagggcgttcattttgaatcgcctttgtttagcgggttttgtcagtggccggtctactgaaaaggttattaaacccaccgatcgcttgcttcacctgacctacacacaattgcaaagaaatcgaaacttcctgttgcaatgatcgagcatgagtacaaatgtaaatcaggctcgatatatttttaacaatatcggcatgtatcgttacttgcagcgcgtcatgcattttaaaattgattatgattcatttactaattgcaccgttaggccgagcccaacacgcaatttgatggaagcaataagtgggtaaaggcttatataatccaaaggaaacgggtattgttcggctaatttattatttaggcaatgaaatcgttatcagttcttggttccctacactactacacttatttaagttcgactgcacactcattgttataaatcgccccaaattgaaacaatgaaaacttggtgcagaatgatttttcactttcgcataccataacacctaccgccaaccagttctaaatgttgaaatatcttagcaaacatgatcactcttatctcatctcacgatgacgcacatatttcattgccgctctacgagaaccaagtaatctatgcaaatgaaaatatctttatcttcagatctaaaaattacccatgctggccatcagctgtgagatgctgcggcgatgacgtcggacctgcaaatgtggcaagttggcgttcgatgacgcctgccggggcagttgcagttgctgggcctcatggttcttgctggttttggtatccaagcacgtggccatcattgttgtgtgcgctttacgcgggctatttaatgggctctattttatttttggcaatcggtttttggctttatagataggaagcttttgttgtcggctccagttttttgcatttctcagtcgcatcgacagttcgcctacgtgaaaaatgtccgttctgcggcctgcggaggctgtttaaaccacaaattataaataccgcgtttgtgtataatggacttattgccgtggaggtaagtagaggaaggaaggatactttgcgccacgaaaataatcatttaaattaattttgccttccaagtttcattcagtcacagcgtgtatacttttctttttttatatcccttgcattgaaaaataattaattaaatttttatcatggcatatcgttatctttgcgtgaacacaaaaccaagttttgcaaatataactgaatgtttcgcgtgctctttatattcgttggtatttggcttttggcgcttccagctcattaaaggtttgcacaatggccaactaacacacgcacaaattttttgtttttctgctttcgcatattttacttttttcactcggctacatggcttcgcgagatggtgctttataacttgtatctttgcatctcacagatgcttatcaagttatcaagttggagtgcgtctgaaagattgtcacgtttgcatgcgatatgcagcactttgtttacttttcgagccaccgactaacggaagttgcagaaccgaaaaaagcgcgacgtcgcattgaattcgtcaaagagagtaatgccacgctatgtgaaaaaaaccaaactgaagacacctcacactcacactttgagcccccggcaaaaagctcgccttaccgccacgatctgcgatccacgagaaacgttgcgacaacttggccgtcactccggttaataatattaactaaacctcgcgacgcagccaaaagcttaggtcgccgagctcaaaacggttaacgggtaacggttacggcgagagcgtcaatgccgcaagttggtaatggagagggagttttccagagcacagctgcgaacttcaaaacagctggcaaagcttttcataatctccaagatattgaaatgcgatagcccgaaaacccttcgactgttctaaggtattatgcaaataaaaacataatgggcttctacggcaaggtcagccacaatccataagaacaagttctctgccgaggcattggcacaaactctacaagctttccaaagctttctgcgcggttcacacaccttttaaaaatcgctgatcgagtacaggcctattgtcggacccgcaacaatggtcgaggagtcgatgagtcacaacggcactttgggtgtgcatgtagctctgcttagtatctattgcggctatcttatcggcaacactagacttgggcacaatcgctgtaatcagaactcattatttgtacgaccccaatgaagtgcgcaggataaataaccgaattacaattagcattcgattagattgtcccacgcggggcaactgaatttcaataacttaaattattgacccctagttcggaactaagtaaaaataaaatcaaaagtatgttttagagactatgtccaagttagtgactcggtaaaaacatttgacgatcgcatcatgccaaataccataccaaactttagtgacgaaaaattattttcggacatttaataaaaatcccctttcatcccaaaaaaaacatgagcctatcgaacaataactttattctaaatattttcaaattatagttagctgttgagaaatgagactaagctttcgaagggatagtgctccggtagcggtttggataaggtagttgactcgttcgatattatttaaacaattcagaaattagtacattgttatcttccataaatctaatctaagaaatatactgtcctaatataagttttccttctgtcactcaaagaaatttttaagtaattaagttttggtgctgacttctatttggtcattgaatttcgtattgggtctgctaactttgaagtagtgatagcttttattactagtgtagtgaattctttgtaaacttgttatttagtatataatataatatattataatagttgcccaagacgaaaaaagaacctgtttgtcacttccaaaatataacagatagaaagttgccaagcccccctaatgcctatagccgcctaaaacttgcacatccttgcacttttaaaaaatgttttcaaatttttttttatatttttattacacttgtaaatttttatcgatttaccaaaaaactttttgccacgcccatactttcaaatttgtttaaatattttctcaatcaattcaccatttccactaactgagtaacgggtatctgactgtcagaacataagtcgaatatagcatttttgttgtacccgttactcgtagagtaaaagggtatactagattcgttaaaaagtatgtaacagacaaaacgttttcgaccatataaagtatattatttatttattattataaagtatatatattcttgatcagaaccaatagccgagttgatctggccatgtcagtctgtccgtatgaacaccaccatctcaggaaccattatagctagagagttgagattagataaaacgattctagaggcacgcccacaaccgcccaaaactgacacaccttttgaaaatgttttaatatttttttttttgatcgttgtgggaaaccacattctaattctttaggtctatgcgttgcctattagattttactaatatcactattagcttggtcacacttgtgaaatatacataaatagtgataagataagaaatgtgcttctataatccgctcctgtcattaaagacagagtattggtttagaggttcatattccaagaaattaaaatcagggccaaaaatggtttgcagtgtgtcgacgttacattgggtgtggctacgtttggaaataagcatacgtgtggaaagtctttaggatctgtatgctgaatcctttataggtacagagatcccgaagttcaaatggatatacgaacggacataatcgactcaattaataatcttgatcaagaatttatatactttccttggtcgaaaagactttgttttacatgttggatacttttaaaagaatctagtataccctttaactgatctagggatgtgggactaaacaagaataagtagcaacatatgttcatacgtatccataatatcacctgacaacatccttatctaaaagcatatttaatctaaaattgattagcaactggtacctaatgattattaaaatccgaagcttcgttggagaacattttccagcacatggttctgggtgacttctaaagtaaaaacttattttagtgtccttgtgtctgatgatttggggaaaaattttaacttgccttttgccatatattgaaattttaaactgcctgaacccacaatttgtttaaatgatattgtaataatatatgttaaaccatttttggacacaaaattcacaagtttttaccacgtttcacacattttatttgtgcaacttttatccatcttcttttttccaaagcaggccaactattttataaatattggtataaaataaatcaatcaatggtataaaatttatcaatttaaataaagttaaaaatacgcactttaatgtgtttttatgaatttaaagcactcacatgcttgcggctactgctgaaataggtttagctcttaatctgatgccagaagttgtggcttaacttctccgtcgtggactccaaactggcactgaaagctggagacctcagcagtgggttaagtgtatatatgtacatttatacatatgtattacttcatttaaatgctttcgtatggcagacttaacactttgataattggtgaaataagatcaaatcaattgaggcgccacatgaacacgtttcgtgagcacacaagaaacaatttaaaaatattaaaatgttggtcaatggcacacacacttctatcgcggcatttttattattggtgtcgagcaagaccccttctgggcaaatctttgctcaaatctttgcttgtcacggtttttgtttgccgagagagctccgaccagcgtcgctataagtcaaattcgaaactgatcaaaacgccaagcgaacgtggaaatgagaacgatcagcagagatttctcgctggaagcgcgatgtatagggagagagcggagagtgaaagttcattgagcttagcactcgttctttctttcctcagatcaggctaaactgcatttgatttatttttcaattaacaattacttcgaacctttcacttaaatttaaattttacttcaaaattcaaaagtttctgttcgcgttcatcttactccacgcctagcaaaacgcacttgactgaccaaactgactgacattttgagcaggagcttttgcctggaaagcttaaacgagacagtccaaacacatacacatacatgcagatacgtacgcttcgatcaaacagctgatccgagaactttaatgcgacgctgtcaactaagccgatgaaactcaaaaatttatcagtacaattgggtcatcgcaataacaagactttaaggaaatcggaaataaagctaacgagggtgcattttattacgacggccaatttatctaatatattggcaaggatctatgctgaaatagtaaatgtggtttttatacccttgttcgtagggtatactagactcgtgaaaaagtatttaacagggacacaccagtcgatctggccatgtctgtccttctgtaagtatcaaccgcacggtctcgccaactgcaatcagtcacaaaactagtcgttgcaacttgcaaggtactctacaaataagtagtttttgtttttaatgagtaacaaaattttaattcgatttttttctttagcgtaacgcacttatttaattttaagccaagagagaatgctatagtcgagtgcctcgactatcagatacccgttactcagctagtagtggtcgagtgggaccaaatttcataatttttctggcttatcgatatatattggggaataaaatcagaaaaaaaattataaaatatacaggtgtgggcctgggagttttgggcggctcgtgggtgttagagtgggcatagggataaaaatttacaattataataaaaaaaacgaaaaaaaatatcaatacatttttcaaaagtgtggacaacttttagctttcataccgacagacgggcatgggcagatcaactggactattgaacttgatcaagaatatatgtacatacatacattatatggtcggaaacgcttcctactacctgtctgttacacacttatcaacgaaactagtatgtatacccttttat

SEQ ID NO: 3149 - DNA, 1454 bp, DROSOPHILA
cgtggagtaagatgaacgcgaacagaaacttttgaattttgaagtaaaatttaaatttaagtgaaaggttcgaagtaattgttaattgaaaaataaatcaaatgcagtttagcctgatctgaggaaagaaagaacgagtgctaagctcaatgaactttcactctccgctctctccctatacatcgcgcttccagcgagaaatctctgctgatcgttctcatttccacgttcgcttggcgttttgatcagtttcgaatttgacttatagcgacgctggtcggagctctctcggcaaacaaaaaccgtgacaagcaaagatttgagcaaagatttgcccagaaggggtcttgctcgacaccaataataaaaatgccgcgatagaagtgtgtgtgccattgaccaacattttaatatttttaaattgtttcttgtgtgctcacgaaacgtgttcatgtggcgcctcaattgatttgatcttatttcaccaattatcaaagtgttaagtctgccatacgaaagcatttaaatgaagtaatacatatgtataaatgtacatatatacacttaacccactgctgaggtctccagctttcagtgccagtttggagtccacgacggagaagttaagccacaacttctggcatcagattaagagctaaacctatttcagcagtagccgcaagcatttgaacaccccactgacgatgtttaccggccggcgcactatggcggctacgttaacagaggctacgatgatttagacagttcctactactttgcccagtacgaggcgatggcagatgccggcaccgttggaggcgccttgccgccctacgcacttaccaactcggacgaagaacatggcagcggggaagaggacgcgtcggaggagaactccaacaatgaagagggagagggagtgttccgggactgcacagacgaagcggttgtcgagcatcataaccgctgcctgccagaatttcagttctctctagtcgattctgagtacgatgagaccctcgcttttcctgattctgtgaccattctatccaacgtgggcgacaagccggtgctggtggagcgcaaggagacggacgatgatgaggaggagttcgacgacgaggaaaacaacagtgtagtcctgagacacgaaataccatttactagcatatacgggccgagcgtcaagttcaactcgttccagcgcaaggttttcatcccgggccgtgagattcatgttcggatcgtcgatacggagcgtagcgtcactacacatctgctaaaccccaatctagatttacgacgaggtgtttaagtgcatccccactgactttgtaaaaacctttgccagccttcgcaaataccaggaggagccgcctcttgccaaaaccgcccctgatctagctgccaacagagccaacgacattcaggtactcttcccaattaatatttaa

SEQ ID NO: 3150 - protein, 173 aa, DROSOPHILA
MADAGTVGGALPPYALTNSDEEHGSGEEDASEENSNNEEGEGVFRDCTDEAVVEHHNRCLPEFQFSLVDSEYDETLAFPDSVTILSNVGDKPVLVERKETDDDEEEFDDEENNSVVLRHEIPFTSIYGPSVKFNSFQRKVFIPGREIHVRIVDTERSVTTHLLNPNLDLRRGV

SEQ ID NO: 3151 - DNA, 5078 bp, DROSOPHILA
agtcgcagtgcctggaggcgcatcgtcgctccacaaagaacatccacgagctgatgatctccggggtggggggatcctcgaccggcggcggcgactcccactacgaggttatcaacgaccggggcaatccctaccagctgcagcgatcgcagcaggccaagcacaaggccaagtccaagacgcggtcgcgggagcagttggacatctacggcagcggagctgagcgatccgactggtcctcggatgggggtcgcttgtgagaccccgatgaccaggaggtattcgtctagcagcggtttcacccccctcgtattctctaaggatattctctgtggatctgctcggggagcagcggtgggactctccacatccgacttcttctatatcatacgaacaagcatcattcgtacatccaggacagcgctggacacctcccatcactgcctgtagaaccacctttggtttagaatcgtcgcacttgtaatgtttgccatccaagaacggaactctattctattatatgtatgtcctatctccccaactatcgaaagtcctcggggctgcaaaccttgctttaactactttacgcgtatcctttgcatagtttacctagtacatatattacttatcacatatggtagcattgaattgaatgttgacaacttgtagcaatgataatctatggatattatatacaaattatgttatatttacctgcgtatttacatagttgcgtatacacacacccatatacacatacaaatatatgactagttagttaaatgttagagcgccagttaaatttattaaagagtacaccaagtataaccaaaatattttaacaaaaacttcgggttcctttctttttggctaaaccaaagggtaactaaaaattaggatggaagctacacatacatatgtatatatgtacctttaatgatatattcttactcaaagcgttatgatccccaagaatcgaaggaaaaccaggttttatcttaaaaatacaatttggattttaatgactacgtgaacaaggtgatgtgtttctaagactatggctaccggagcactccctcaatttctcactgggccaaccggtgcaggagcatgaagacagcggtgactccgaggcccagactgaccatagaagcgccggcattcttgcgatccgctatgctgccgtgcggaatctcgttctcggagtcatccggctgcggctccggcacagccagctcgtccacggccagcatggtggcctcgttgatggtccgcagaaggggatagttctggctcgatctcttgggcgcggcagtcaccttctggaagtcctcgtacgtgtcctcgtccagcttgcagttacccaggaagtcgtccgtgtccacggaccacaccatcacacccgcaagccgcttggacatggcgaacaacaccttgttggcgatggagcgggagctgtcgtaggtcaccacgttgatctcctgggtgaagacgtttcgctcggacttggccagcacctggctggtttgcggatcccactcccttgtccatccggaggtctggttgctcagtgtctggcagatctcgttgtagcccaggaagccgtcctcccgcgtgtagggtcccttgaagcctacgccttcgctgacgtcgttcaggaatccactggccaacgtcttgaaggtgcgtccgtagaagggcaggcccatcaccagcttctccggcggggcgcccagtttcagcaggtagtcaatggagaatttctgtaaaagtaaaggaaaagagttaatgatattcctctctctctgcttcctgattatcaattttacgtaatctagggtatagggtatcgggcatttattccaggaattggtacccaggtgcacttaccacactcagcggatcatccgcgggcgccgtgagcggagcattgtaaccaactcggcggtcccagctgccgtggtagtcgtagcacatgatgtgcaggtagtccaagtaacgcgagatctgccgcacgtcataggcctcgtcgatcaccttcttggaggctccgatggcggaggtcagcagcaggccgtgctcgtcgaactcctcgcgcagctccttggtcagcagaacgaagttctcgcgatccgcgggcttgcccttccgctgcgtgggatactcccagtcgagatccagcccgtcgaagttgtacttgcgtatgaaactggacacctgcttgacgaacctgccgcgcagcagattgttggccaccagggtggagtagttggccgatccctcgttccagccgccgatggccaggctgaccttcagatgcggatggctgcgcttcagacccgtcattttctcgtagccacccttgccgtactcctcctttaggtcctgccagggatctgcaatcagcaatgttttaaatttgcatatggccataaatcgaaccggaaactcacccaacgacttgatggctgcctgggtgatgtccaggccggcaaaggcgtacaccacatgggtgcacaaattggggtcgaagttctcgatggcataggcaccctgctccggccggtaaacagcccatgtggaaacgtagcaaaccaccaccttgtcgtgcaggggtcctgcgaatagaaaacgtaggacaatcagcggtgagccacccctttgtggttaagccgagcgtaagactcacctgtcctggcggccaccgaagcccacaagctgctcgcagtggaggccaggaggaggagcagccacagctgcggtgcttccccactaagtctgctcctcagcgtcatctgttgcggattggttttctggtgaagacgaaccggaatcgagaatggagaatggagaatgaagaatcgagttaagtgctttgcgtgcaactttgttgtgacaatttataatttcaattcagctcaattggcgtcttaattgaacgggaaaagtgaaaggcacaagaagcgacccatgtagtcagaaaagtgccaggcattccaaagtcaatgtctgggtctaaaaggtagctgcagtttattatttataggtatttgttcaccttttgtgcatcaaactaatcgttagttgtttgggtttataataataatcgatttgtattctagaggctaaacaaactacactgcaccatttgttttgctaaacgaaacgttaaagtttttcaacatttgtggaagaactatgcatagtgagtcacacagatcgtttacttcagaaatcgaaatcaagacgaatgtaatcaaagaatctgctttgttccctccagttcaagtcatattcgagtgggtagtccaacctgattctcaactttcgccagtgcgaccttaagaagctgaccagcgaatcttgttgcatcgtccagaaccgtgaatcatgctgcccgcagctccagagcgtaacttattatcttttcggaggcgaaacaagttagccttgatatctcgggtctgataacaatcggcatgaataggcacttaagatttggtaatgtggcgagacctggaaaataggaagtgcgcaccgaggaatgggcggaaaaccaagctcagagcggtttcactttccgcctttttcccccaaacttatgcatatttattttttttattggattttgctgctcagcttgcccctggcaaaccggaattcgccgttcatcacgagattagaggcgagtcgaaaaaacgcgggtacgaaatcgaaatcgaaaagtagaggaaaaaatccaggccgcgaacccgagaacaaacatcacttggggcggagatgggctctcagatggattgctggccattttcgcacttggcggctgcgcatgcgcagcagaggaagtgggaagccacttaaccagcacacaggcacactcacagacgagctaagaaaccatcgggtgacataaaaacaagtacattcactgtgctccctggtaagtagctgcacatagggcacatatgtggaaccgtcaacgtgcccagcgtatcgagttcatatcgctggctctccgcaccatgtttcatttcattacccgatctggagttgtttttccgctttagcgaccacgaaactcttagcaccgccctcgaagccagctcgcttataactgaactcgtctctccgtcttcggtctcatgcgtatataatcggctccgtcgcagctctgtggagccactcaagccgaacccgatccaccggcccaaccacatgccactctcagcgaagtcatccaagaggcgaaatgccaaggtgttggagcggggaagtagtcgtgctcagcataaagccaacagagaagaacaacgaactaaaaaggttcgaagagatggcttgctaagtgtgaataccattgaagagacctgccatgcttgttgaaaataaatatatttataactataatttaagagtatacattaaatatagtataatcaaatatgggggtgcaatttcttgcttatttggatactctatatacgagtttctctaagaaaaagagtttccaacttccctactagaatctagaaaatgcacatctactatgccttgagtttgttttcttctttcgtttatattgaaagcaaggcatttctacagttcaccaagcctcgtgtgggagggaagtcactgatcgtatttaaaggctgaagccacacatcttaggcgtaagcaggattatactccatccacagactttcaaactggccgataagtcgcgccaaagctatcggtcaatcgggcttttgcgcgtgaggcaagtgccatctctgctagttggacgtaaacaacgtaaaatcgggaaattagggaaagtccagcggggcgggaaagaaggcagattctgatctgagattgtagacgtgctccaccggcgatggacgtggaggattccgtggcgagcggagcggcatccgcctgcaagcgccaaaagcgaaacacagattcccagaacgatggcgagcctgaagacgcggcgcagattgggtaagtgttgtgtcttgggttgagcatgctctgcggcttggataatccattgatttttcgcccgtggggaaccagtgaggagaacactg

SEQ ID NO: 3152 - DNA, 1597 bp, DROSOPHILA
tttcgtggtcgctaaagcggaaaaacaactccagatcggaaaaccaatccgcaacagatgacgctgaggagcagacttagtggggaagcaccgcagctgtggctgctcctcctcctggcctccactgcgagcagcttgtgggcttcggtggccgccaggacaggacccctgcacgacaaggtggtggtttgctacgtttccacatgggctgtttaccggccggagcagggtgcctatgccatcgagaacttcgaccccaatttgtgcacccatgtggtgtacgcctttgccggcctggacatcacccaggcagccatcaagtcgttggatccctggcaggacctaaaggaggagtacggcaagggtggctacgagaaaatgacgggtctgaagcgcagccatccgcatctgaaggtcagcctggccatcggcggctggaacgagggatcggccaactactccaccctggtggccaacaatctgctgcgcggcaggttcgtcaagcaggtgtccagtttcatacgcaagtacaacttcgacgggctggatctcgactgggagtatcccacgcagcggaagggcaagcccgcggatcgcgagaacttcgttctgctgaccaaggagctgcgcgaggagttcgacgagcacggcctgctgctgacctccgccatcggagcctccaagaaggtgatcgacgaggcctatgacgtgcggcagatctcgcgttacttggactacctgcacatcatgtgctacgactaccacggcagctgggaccgccgagttggttacaatgctccgctcacggcgcccgcggatgatccgctgagtgtgaaattctccattgactacctgctgaaactgggcgccccgccggagaagctggtgatgggcctgcccttctacggacgcaccttcaagacgttggccagtggattcctgaacgacgtcagcgaaggcgtaggcttcaagggaccctacacgcgggaggacggcttcctgggctacaacgagatctgccagacactgagcaaccagacctccggatggacaagggagtgggatccgcaaaccagccaggtgctggccaagtccgagcgaaacgtcttcacccaggagatcaacgtggtgacctacgacagctcccgctccatcgccaacaaggtgttgttcgccatgtccaagcggcttgcgggtgtgatggtgtggtccgtggacacggacgacttcctgggtaactgcaagctggacgaggacacgtacgaggacttccagaaggtgactgccgcgcccaagagatcgagccagaactatccccttctgcggaccatcaacgaggccaccatgctggccgtggacgagctggctgtgccggagccgcagccggatgactccgagaacgagattccgcacggcagcatagcggatcgcaagaatgccggcgcttctatggtcagtctgggcctcggagtcaccgctgtcttcatgctcctgcaccggttggcccagtgagaaattgagggagtgctccggtagccatagtcttagaaacacatcaccttgttcacgtagtcattaaaatccaaattgtattttt

SEQ ID NO: 3153 - protein, 484 aa, DROSOPHILA
MTLRSRLSGEAPQLWLLLLLASTASSLWASVAARTGPLHDKVVVCYVSTWAVYRPEQGAYAIENFDPNLCTHVVYAFAGLDITQAAIKSLDPWQDLKEEYGKGGYEKMTGLKRSHPHLKVSLAIGGWNEGSANYSTLVANNLLRGRFVKQVSSFIRKYNFDGLDLDWEYPTQRKGKPADRENFVLLTKELREEFDEHGLLLTSAIGASKKVIDEAYDVRQISRYLDYLHIMCYDYHGSWDRRVGYNAPLTAPADDPLSVKFSIDYLLKLGAPPEKLVMGLPFYGRTFKTLASGFLNDVSEGVGFKGPYTREDGFLGYNEICQTLSNQTSGWTREWDPQTSQVLAKSERNVFTQEINVVTYDSSRSIANKVLFAMSKRLAGVMVWSVDTDDFLGNCKLDEDTYEDFQKVTAAPKRSSQNYPLLRTINEATMLAVDELAVPEPQPDDSENEIPHGSIADRKNAGASMVSLGLGVTAVFMLLHRLAQ

SEQ ID NO: 3154 - DNA, 2878 bp, DROSOPHILA
ccgaacgagcgctgacgcagcaaaagacgcgtttgtggctgatgaaattggccaggctgcgaaacatgttgcggcacaccttgcactcgtagatcaggctgcactccagactgagcagctggcgcacctgtgggagaatctgattgttatccggggatccaccaaactggggcgcaggagcctccgccattgcgggccacaattgagtcacgtactccactcagatgagactcacctcgctggtgccatcctcataggcccgacgggcctcctcgaatcccgtgtgggcggtgcgcagcggccgctgcagcaggctgatgtcgtcaccgttgtggtccatctgctcctccttgaaagtgtcagagttacaacgtgagcttcgctttctcatggcgctggtttgcgcgcttgctcccactgctaaccaaaaaatttgagacctgtcctagcgcgctgccctacggaatattttcaccgacgtgaggttcttaatctgtttctaattagcgatcaaagtggttttccaattcgaatatggacctgcatcttgcattttttgtattcagtatgaccgtgcttgagcgctgcttctgctgcgatgctgatctggtatttttattaacctgtgcggaattttttgtttcaacttaaaaaaaaacggaagagtcgaaaatatttaatcaggcaaaaccaataagctggaaccacatttgttttaatattcgactagaactaacaattgaagtttgatttctcccttgctcagtgggcgtaacttccatcaattctcaaaacccccaaacaatattgtcaatacataattttggaattagcttattgttaaatctttaattgacatgccaagccctaataagttcagaaaaagcgctaaaagttcctaaatattacctgcaaatgtaatttattcaaatagaaaaacgtttattttggcgttcagcacatggtcacactgatgacttgaaaaaaacatagtgaccggaattaggctcatcatattagtttcaccttttttattaaatcaaaacagacacgatgagctgtccaggatttggagaactaaatataccctcgtcgcgtgccttctgggacgactgcgacgaggatgaattggagaaccttaagccggtggagaagtgcgtgatctaatgttatttacgtaggtagtcctaatttcttggattcgcaggctgcagctgaagtttgatgatgattgcgatggggaagctgcccctgtggagagcgagatgctggtggtcattgagggcgtcaacgtcactcacttcgcctcttctctgctggaaaaggatgcaaagcgtgtgtgcgccattcctgccaataactcgaccctgcactggagtcattcgtccaaacagttgctggccataatcaacgaggacctgaccagtagcggcgaggtagcggagctcctactgccgtacgtgaagcttgccaagaaagtgatcactctgacgcttaagccaaaggtcgagttcaaaagcgaggacatccagctctaccgggatcacattgccgttgtccgcggcataggtgccaaccagaaggatatcactgaactagaggctcccaactttatcgctggagttgcagcaggcggtgagtgatgagtggaaaaggagaaggttgaatcacctcaccatctgttcacctttttttgcagttgccagttggcgggatcagatggaattgcctgttacctctttcgttatttacaccgacaagctgcccctcgacgccacagctgcgcagccagtgatcaaggtacttaaagccgcgggcgttgcctgcagctcgagctacatccctccgcggaaggagagctcttatttgtacatgtgaaactacttttggctgtgctcaacttcctagttttaatgcttgtaaaaatgatacggttgcggaataaaaatcgaactacttaagtacatcaaaaatgctgaggttgtcctcccgactacgttgctccatgtgcgccttggcgatggctatgaactgtggacgggaaagcattgaataggcgggtaccagcaacgatgaggcaagcatgtgcagctccttgtgcccactgcagaacatatcgatgcctagttccagggcgcttccaaagtccgattcatcaactgctatgttggctgcgttggccaccggctgcagcttctccagaaccgcctgcttggcggctccattatcgacgtccttccgctcaagcattgccagcatcttcttgagttcggaatcgctgacagccagcgggcggtatcccacttctgtcttctggtcaaagggcacaacaatgccggctcggtggaatgtcttggccacaacacgcttgttgcgctcccgctgcagtcggtccagctgggccagttctagggaattgtcactcaggtattttgccaccgcctttttggtccccgccaactgcccgcatgagaacggagtggccgcaaaatcgtgctccaggtagtagaggaaagcatcgaaggcatttccagcgacgaattggaactggcagcctttcgcagagtcgttgcgggctattaagagattttccttgtcctgcggcacatcgcgccagtaaccgtagtgaatcccagtgcctcggcgcacgaagatcgtctgaaattctggtggatcgtagtaaaaacgccagtggcgcaggtagtctcccggttcgcctagtttggcgccgtgaaatttaccggctaggaactcaaagggacccaccaactgcagttgaaatactttgtctaggtgctccaagccagcatccttgggcttcgcaggatcaatttttaagcttcccacaaacttccaaaattcgtagaagtccggcggc

SEQ ID NO: 3155 - DNA, 761 bp, DROSOPHILA
aattaggctcatcatattagtttcaccttttttattaaatcaaaacagacacgatgagctgtccaggatttggagaactaaatataccctcgtcgcgtgccttctgggacgactgcgacgaggatgaattggagaaccttaagccggtggagaagctgcagctgaagtttgatgatgattgcgatggggaagctgcccctgtggagagcgagatgctggtggtcattgagggcgtcaacgtcactcacttcgcctcttctctgctggaaaaggatgcaaagcgtgtgtgcgccattcctgccaataactcgaccctgcactggagtcattcgtccaaacagttgctggccataatcaacgaggacctgaccagtagcggcgaggtagcggagctcctactgccgtacgtgaagcttgccaagaaagtgatcactctgacgcttaagccaaaggtcgagttcaaaagcgaggacatccagctctaccgggatcacattgccgttgtccgcggcataggtgccaaccagaaggatatcactgaactagaggctcccaactttatcgctggagttgcagcaggcgttgccagttggcgggatcagatggaattgcctgttacctctttcgttatttacaccgacaagctgcccctcgacgccacagctgcgcagccagtgatcaaggtacttaaagccgcgggcgttgcctgcagctcgagctacatccctccgcggaaggagagctcttatttgtacatgtga

SEQ ID NO: 3156 - protein, 235 aa, DROSOPHILA
MSCPGFGELNIPSSRAFWDDCDEDELENLKPVEKLQLKFDDDCDGEAAPVESEMLVVIEGVNVTHFASSLLEKDAKRVCAIPANNSTLHWSHSSKQLLAIINEDLTSSGEVAELLLPYVKLAKKVITLTLKPKVEFKSEDIQLYRDHIAVVRGIGANQKDITELEAPNFIAGVAAGVASWRDQMELPVTSFVIYTDKLPLDATAAQPVIKVLKAAGVACSSSYIPPRKESSYLYM

SEQ ID NO: 3157 - DNA, 13480 bp, DROSOPHILA
aatcaaagccagcgacaaccatacggactcgttggtgctttgcataaccatataaccaggatattcaggacgtgccagtgtgtttctgtgtgtgtgtgagtgtttgaattgtgtgtgtgtgtgtactcctccgtgtatgtataacacgtgccgtggaaactgcgcggaaacgctaccagtttcagtttttcgctgtagagcattcgacgcgttcgcacgcgttgattttttcctaaatcctaaaaaagaacccacaaccattaagccaaaatctataaaaaaaaattgcaaaacatctcgaaacaaaaagaaaatctgttccagatgtttacgccaagtaaatccagaggaaaagctacaatttaaaagaaaaaaatcgctgtgttggtatgtgtgtgtgtgtgctgctcctgcgctgcctcaacaaatttttcacttgtatgtgtgtatgtgtgtgtaactcgtgtcatgtgaccgcgcgcgcaaaacattttgcattgtttttgcccaagcagttgctgtagttgttgttgcaggatatccagcgtgtacgcgaaaaacgtttttgggggcgaaatagcgtaagcctgcgcaatagtcgctcacatggcagctggccatacacacacatgcacacaaacgcagggataaacaggagttagccgagatttttttgtgccattaaaacgagggaaattcaacgaagaacgccttgaagtaggctaaacaaaaagcggagcagcgattgattccgttacatttccaatcagcataaattgcaagcagtgtgagtgagagtcagagtgccagtgtgtgtgtgtgtgtacgtgtaatactcacgcatatacttacatacgttgagaatcctagaaagcagcatcgcctgctccttttcgttggcgctctcgttctcaattttgcagcagcagcagcagcagcagtagagacagtagaagcagtaaaagcagcagcagcagcagctcagtcgacaactgaccagccaagcactagcatatttcctattggccccttgcaacaaaaagccccgaaaatatattgaaaatttcacaaaaatggtagaagccaaaactgtgaaaaactaaagcgaacgtcttgaagccattaaaaaagcgcgcctattcagtgaatgtgtgtgtgtgcgtgagaattgatgtgtaaaaagaacagtgtattgaaatatcaataaactatcgatgatcctttgaaaattaagaaaaaaaatttaattttttttttgtatgttcaagtgaagaagctgcaggaggagcataagatgaagatgtagctaacatgtgagtagcaacaagcagggccaagcagtgcctatgtgtgtgaaaaatctgtaaatcgaggttatctatacacgcacactcacatgagcagtgagcagaagcgagatagaagctgccgaacatacatacatatacatacacagatttcggcagcatccagcgactccatctcgctcgcactctctccctgcccaaacccactcgcattctcctctactctaaagcaatggcattttaatcatcattaggacgagtggaagggggatagcacactgtcattatcaacagacacacatacacacacacagtcacacctcctgttgtcctgcaggcgccacccaccatattgctctttctctttccatcccccgcaacccagttgctctgcaatgtttgtttgcgggaattaaatttaaagtatgccaacgatttgcttgtccttctccacccactcttcttcgctttttcgccccactgttgcgcgcatttcgtcctggcgacccatatgtgtatgtacatatgtatgtccttgtgttcacgtgtatgtttgtcaaagcgtaaacaattgcgaataaaacaagctgcaaaaaaggaaaaacgacagcaaaaatagcaacaaaaagtagcaagagaaataatgaaacgaaaacagaacaagaattcacacacaaagagagaaatacaaaaaaaggaataccgtgtagcagttgaacaacacacgacatttgcaatgtgcgagtgtgcgaaaaaatcgatttgtgtgccatcaaaaactgcatatataggcaacccatattcccatatatatccgccaccccctcatcccccgcagcacaaacaacctgcccccgttgtgcaacataatgtggcagcaacgattttcaattaacatcaaacaatcgcttaacgtttaacatccgccattgcaatcgcaatatcccgttatacagattgattctctttcattcgcgccatccctttcgcacacccagcaggctcggtgggggggtggagggtcagggtatagggatttagagggtagggagcttggatggctcttaattaatctacgtgtgccattgtcaaaaggctgaatagaaatcaaggtttatgtaatccgccaggccaggcgatacaaaaatgaaaaacaaaagaaatcgaagggagggaagcaaacaaagcgaacgcaaaaaaaaaacggtttaattctagcaatccagactatacacagctgttatcgatatctaaattgatatttcctcatttccgttccaagaaatgcaaatcttgcgacatcaaaacttccggaaaagccatgaaaggaaaaggaagcatattttctatatgaactgctattgaaatcattttcaagcatggtttgtgatttaggtcgactttaaaatcaataaataagtgtgttaaatgtttgctcgttaacataaacattcaattttggaatataatatcttgaagattgaacaaaggtgcccgcaagtatacaacaaaataataaaaagctgcagttttgcatattttatacactttataatttatactttacttacaaagtgattttaaatcatcagagatttgtgtatgctcttaaaaaaacatggaatgaaacttgaccaaaaatgtgttgtgcgtgtaagaggacctcggggagcacttaggatacagaacagagagtagaacatattgtaattgaagctttcaacttgttttcatccgttttaattagatctcccatttcccattctctccctcattgcagcaaatatttcgaccactgttaacctagtttcacatctcaaaaataaaaccaaacaacaaggacgaactcagaccagcactggctcctctgtcttcaattacgcacagctctaccagtatctagagaataacgagtaaaggctaccaaggactcgagggaagagaatcgcctggggcagaggaagaagccaatccccatacttttcggttctcctcggaccagaatcatcacctcccccatcccgaccccggcactaccttcccgctgaaccacatacactctgtccactatccactattcgacaccaccacactctgtgcatccaactatttggccaaccattaatccttgggcgagaccagagcagccccatcgcataactgtggatagcagagcagccggagcacgaggacgactcatgttacaaaaatgaaaaagttcacattcaaaggagttctagatggatttcgacaaagcgttcagccccaagccacacgacaggagcaggagattcaggagcaactcaaggccgatcactttacgttaaagaaagtaagttaaaaacatacgataaatgggatacgagttgaaagtgcccataatcgaaaggcatctgttgcagctagcgggtgttttatttggtagctgtaatgatttgaatctatcataagacacacgcggctataaccgttgtctaagagcttcaaaatcgataataacaaacaataaaagtagtaatttataatactaaatcatacgagttagcgtgattagtacgtttgatccaatttcttctctttatcgcagacctttcgccatggctttccatactcgcccacatccttcgccttcgatccagtacaaaagctactagcgattggcgacaaatcgggctacattcgcatgtaagtgtgacttgaatacaacgtttttctcattatttattaatctcatctttctatatatgaactaattgcagtttgggacgacctggcgtcgatgcccatgccaaacacgagggcgaatccgagtgcgccgtgctctttgcccagttcctggtcaacgagggcgcattggtcaccgtcaccgccgatgacaccattcacttgtggagcattcgccaaaagacaccgcgcattgtgcagagtctgaagtttcagagggagcggtaagttcaagtccattatgtttggtcttattatggatatcacgatatcgtaatactgccgtccataaaacgggttatcaatttggctaattctcaacatattccaacatatgtatatcccccgatgacataatctccatctctcttgcagcgtgacttgcatacacctgcctgtgggcagcaaatggctgtacgtgggcaccgagaagggaaacatacacgttgttcacatagatacatttgcacttagtggttatattattaactggaataaagcaattgaagtgtaagtccaattactcccttagtgacctaaaccgaccgcattaagttctaatcacgggcttaaaccaatttgcagggttagaactagtcatccaggtgctgtgattgcgttatgtgataatccattggatgcaaacaaggtgaatactttgtttcaatgaggaaaatgcctcaagaagatttcactccccttaaacttaatgcatatattatattattatattcgatgactgatgagattctttccgcacagttgcttattgcatttgagtgcgggctgcttgtgctgtgggatctgaaggcgaaatgcgctgagctgcgatggcaggcggccgaggccgtcaagtccctggcctggcactacgagggcaaatattttgtgtcctcgcacacggatggctccatttgctcctggcccacgaagccgcaggctaagccgcagtcgcaggtctgtccgcatggtaagttgcacagtcattatccatatataaatatatttgattcgatttatgtatgctttagctaaaatcaacaaggatggcaatgcggagaaatgcaagccgatatataaagttgacttgaagtccagcgcaactgggtgagtaataagcactgtcgaatcatttgtttactactatgctttatttatattacacggagatagctgaacaacctagggcgttatctttatttttggaacaataaccataaagcaattttacaataatatttcaacaataagaatcattgcgctgccggcgtgtcgataaaacaaatgaataatgataacttgactcattaaaaatttataatcttttaatttgcccgccgcagggaaaccttcacaattttctcgggcggcatgccctcggagaagggctccaagtccaactgcatcacggtgatggtgggcaaggccaccacggtgctggagatggagcacgccgtttgcgatttcataacactctgcgagaatccctggccctgcggtatgttttaaataagataagaacattaagatcgacagagcatatgtataagtcaactgtgattgtattctgcagacttgttggtatttgtgtgatgttatatattatatataagatatattgtataatatgaaataatttacttacttggtttttgtctgcctttacagagacccaggagccgtatgctattgccgtgctgttgcaatacgacttagtattaatagacttattaacacccggttttccatgttttgaatcgccttatccaatggacttacacgaatcacctgttacatgttgcacatatttaaccgattgcccatcggatttggttcctgctttctattcagtgagttttacacgcacccaattttcgttaatatccttcaattgattcaataattcgtgtgctttaggttggtcgcacaacgacaagtaaaaagagctgcttctcggagcgcgaatggccgatatccggtggcgagtggtcgccggcgtcgtgcagctattcggagatcgtgatcaccggacaccaggacggcagcctcaagttctgggattccggtgccggcacactgcagatcctctataagctgaagacagccaagatgttcgagaagccgcgctcccacgtcgcccactcgcatccggaaagcgacaatccgctggcggtgcacctaatcttcctttgctcggaatcgcgacgcctgtgtgtggccggcgccatgggacaggtgatgctcttcaagttccgcaaagtggagtccacgtcggaggtactggtgctggagatacccatactctatgagaattttgatgacatttatgggacaagtcccgagtgcgattttctaacgggccatcaagtgcagaaggctgagtcgagtgattcggataaggtaatgataacttgtgcatgttgttccttcgcaagttccccgctgatttctcgatatcctacatcatatctattacagacggccgagtgttcgctaaaggtgcgcaatggggcgcaacgcaagccgccgggcttccagtcgcagctggtctgcctcaccaccggaccaaatcgccggaacgtgcaggtcacctcgctgtgcatcagctccagttatggcctgtaagtagcatagctgctgccacccatccaaccatccagctagccagccagccagccagccagccaaccgttcatcccattaatcccatcatccccgagacactcgcttcaatccatccgatcatccatcctgcaatccatctgcccatcgatccagccacacacgtacacacaccaccaccaaaaagccccaagcagctcccagccgccaacaataaccagcccagagcaaagccacccaactacccaccagacaaaggacacaggaaagcggacttaaaagatactagctccctgaaccctgcccaaaaaaaaaaaaaatttacttagaccgtagtctagtttgtattcgtaaatgcatgacgttctctgagaaaagcgcctgagacgtagccgcgaacgctcgacgagtgttctagcctgcccaaaaaacctgataacccctgccacgccccccccccccccaatttccacctgcctacgcctctgccccgcccccaaggtgcaccgcttttgttgaatttgtttgcgttgtgtattccgtagtatgcaacagttgcaagcagaccgaaaaaaaaaccaaatcaacgtcccttggtaattacaagcacctaaagcagaatttctggacagaattgtgacccattgacctcttgtcttttcggatctagaaaccgattgcccaaatccaacgccagactggcataaaagcgacgtactcatgactgaaaccgaaacccggacggattcgtattttagtgcctggtgtgtgcgcgtgtgtgagagtgatgatgcgcatcaaaataattcatttgtctttcagttttcgttttcaagggtttcgtatttgcgtttcggtatttaatattgttttttgtttttcattttttaatgtgataatttgctttcgagtttcgtttacgtactagtgctaattagtattttggtatttttttgaaatttttttactttagctaagcactgtagtttgctttcgtatttatttttcttaagcacttttcttatgctaattttttagtactttctaaatatcttaaatattacaataccataatttaatagagtaaaaaaaaatagtaaaacttaattgcataatatgtagtactttctgatgagaagtttaaactattgaaatttttggtacttcagacagctaatatatatatttttatttatttttacttatgtattatgattttttgtatttgtattaccttggtatacgttgcattatctaaattaagttattatcctgatgacgaatagtttcctcgcatttgttttgtgacgttgatttgtatgcagttgattttggaaatatatatgaatattttctgtttttagaatggcttatggtaccgaatatggacttgtcataattgatataatccaaaaaatttgcctattgagtgttgcatgccccgatctgtatggcgcacatgatccttactcgcgaacaccaaaaagtccaaaacgtattgaaaacaaagaggagcaaagccgatcgcccagctcagatcaggtaagtgccctcgctctctctctctctctttctctctctctctctctctgtctgtcagtctctctgtctctctctggcaccgagactaattttataaccgaatcgcagtgaaccgcgcgtacaaacatacactcgaatccataacgaaagtacacagacagaccatataattcaaatgcgccattgatttgaattgaaacacagccacactaacaacacagacaccgcagatcatttgaattcgcaattgatttgaactgaaacacagcaacactgagaacacagacagaccgaaatgtatgctatactattcacgccgaccaacaagtgctcatttgaaacatgttacatactcaatatttttctaaacatcttacatatacatatttgaattttatatgcataccgatatttacttattacataacgaacgaaattttaattacgtatcacatactaacaaatataccaaattgatatatacattatataatctatatatatatatatttaaacatactcgtatgtatgagctaacttttaaaaattgtagccaatgaaacttttgttttggtttgtgttttttgttttcgttttccctttagttaacctatcgctctccctgtctcgctgtcaccttattgcatttttgtggcattttttttataccaatctgatggaatacctcataagtacttagaccccagtccatttatatctatatattacactcacccacatgcaagcaagcaagcaaatataaccaaaatgtttagctgaatatctaaaaggatatgaaactgtagctttagtttagcttggtagttgctatcaagtattttttcgatgtactatagctagcccttttttacagcgaataactaaccatccctctctaactgaagatcacactgatatagttttctctttattgaacacccaactaacgatatcgatccccgaattggctaatggctatttaatacttcggttaccttaaatttggtattttatggtcaagtacaataaaatgtggccatccttttctctttcctatctctatctctgtctccgctttcaagcttatatatatctatctctgtctctaagctaaagtactaaatgcagcatggtaaaaatcatattaacgtattggtttcagttttgtttggttttttttttttgtgttttgcacgaagcttgcctacgatatgatggaaattttatttgatttggatggattggattggtgtcttttctgttttgattgccacgctaaagaccatcgcatagacacgattgatcgctttgattgttgtacatgtacatgtgtggtatgatgcgatatgattcgatgccgatacgatcctatttcattcgattatctttgattcgattcaggtcgatttcgagtcggttcgatttgagttgatttgatctgagttttgcctgaaaaataagtgcctagcgaacacccaagaaacaattacaatcgaaacaacatgaacaacagcgacaacataaatatgtttctccccccctctctctctctctctctgcctctatgtctgtctctctttctctgtgtttgtgtatcaacttattgattgaataattgatgaaaaaagtgtatgtgtgtgatcgttttactttgtcacctctccttcagaacaccttatgtaacataaccaacaatcaaaccacccaccaccaccaatgcagctaacaaattattcaattatttgatatacatatttataacctaattcgaattgataattgatcgtagttcattttattacattttaaattctaaatctaagcatatctgaaacaaattaaatcgttgtattgcctgtgcgtgtgtgtgtttgtgtttgagttttgccaatgcgtatgtgaatgtgtgtgtggtgtacacactcactcctagcatcaaactgttatacgcctaaagtatatcagctaactaagtcgttgcctaaagttaaacccctatccgatgtttgttaatccacaagaaaaccaaacgaatccataacaagtttaaattgtaaattgttgatacaatattcccccagtcccccccccccccttagcaacccaataaccccgtttaagctctgtttatccttgtaaaaaaaaaaaaaaaaaagtacacccccaacatactccaaagaaaaactggagcaaacccaaaaaggcaaataagcagcaacaagaatgcgcagcttccaacccccaaaaatggcataaatatgtatttatatgggtgaaaactgcgaaatgccattgcaaaagcatgccaaaaatttataatccatcctctttcattcactaatttttcacttttccgcttttcgtgacctacttcaatttgctgtatttatacaccctcaatggaaaacttgtgcattacaaattatttgagatttatttctatgaaattcagtaaatatttatcaatatttagagttggcgcccgaagagaaattggcaggaactattccgtttgagagtccaagattttttttttagaaacacatggttgcattgaaaggcagccaatgtaaatactaacaatgtcataaagcatcatgtataaactatattctaataatattatgggaattagaaagattcaattttattcaaatagccccttgtcattaagaatcataatattgtaccatattttcttacgtattttcacctcacttttcgcctttacttgttgctgctatatttttgcatctttgggcttgctgatcaaagagaagagaacaaattaaacagaaaccaaaacaaaaacctacaaaaaacaaaaaaacaaaaataacccagtaacccaaaaaacaaaaacaaaaattaattagtgaatgttaaccccttaatctccatgaagtcctctaaaatcccatgtccgtcgataccgaccactactacttttcttattgttgcctaaacgaacagaaagaaaaacgaaaattaaaactctgcaccctacccctcaaaaatcccgatcttcatctagctgaacgacacgaccagtccggatagtccgtctctcgaatttgtaccggaggctggcgaaacatcggcccacgatggcgtggcgacggcaactagctcacgtcccagttcaccggacccggtggtgaacagtgctcgtgaaacgctgctcagcggatcggcagcggcaacggcggctgcggcagcatcggcggctgtcatgatggccaagagtccccagcgggatgatgcagctcccaaggagctgcaggacagacgaaagtccatgtcctggaaaacgttcaatttgaagcgtcaattatcgaaagtcaatatgaagatcggcggcctgaatgtcaataccgatatggagtcgctaaagaatagctccattttctacacgcccaaggaggtgtcaccggaggctgctacgccaccggcaacagaagaggaggcaacgccggagggcaaggaggacgagtccctggatgatggcgaaatggcgaccaacgcgggagcagcagcagctgcatcaccatcgccggcagttcgtggcaaatttcgctcatccaccacggattcacctgatgagggcgccagcagtagcattgccagcggcattcgtcgtgtggactttgaacagccggctggggtcgaggtggagcgaccaaacaacctgccactggcggatgcaccagctccactgaagcccgcccgtcaaaagttcaaggaaaagtcgcgcgatcagcgacttttatccgttccgaacattaagtatcagccgcgagattcgcgtggcggtgctcggaacctcaagaatgatgtctcaccgctgatgggcggtggtggcggtggaggaggcgttgttggtgccagcagcggcattggtggaagcgtcgctggaggcaagaagatacgtaagtatggccccagcgaaaggatcatcctccatcttatccaaaataacaaatcaaaagaacgctttaagccgaaagtttaacccccttaactataaaaaaaaaaaagaaattttatgtgcagagcgagcgagcgagttctttcctgagtggtcgcaaggcaggcagacagattgtaaatcacgaatccccgaatcggatacgaaatttcgtcctcgttattgagattttactgcgtttatgtgagggtgttctgtggattctgtgtattaatgttatagaacttatctgtgttcgaagtttttagttaaggtgaccgaaaatattcttttccagagactgcatgccaatattaagaagactttgaaacgtatagttaatcgatccaacaagatcaaactaaataataccattgagaaacgcataaacgcagtacatccgctctcgacgtcgcaagtgatccttctcttcgtttctctaaaccctttctcccacccagtctcccctctctctcaccgtttctctcctcctcgaacatcggcgttctgtcgtcgtttctgtttgggtttttcacttttctcgtttcagttttgtgttgtgcctttgctttgcgttgcttttagttgctgcaagctgtagaaaatagcataaacaaatgagatactactgtatacttagcacccctgctcctttgtccaagcgcctgtttccaaaaaaccctgaccctatcaatagcgcagctagagatgtgcatattccaataccggatatagagatgagaaccgaacgataatcaaaattccgatgatgctttattttgttgatttttgaaacggaaacaaaaaccaaaattgcattttgtgtatagagcatactttgtagagagttagctaatttaaacaacaaccaaaatcaagtaaaacgtgacaataaaaaataatgatgtaaaaaacaatacaaaataatacacttgagaaacaatgtgatgcgacaacaacagcaactaacaaacaaaatcacatacgcacccaacctaaacaattacaacaactatgtagaaaacaaaaactttacaaaaagtacaaatttttgccaaaaatttcttatctatgcttcttcttctcctcaatacctaggcaacggatgcagaagagctgcaatacaactgcctgtatgtgattgtgtggaagttctttggtaaatcatttaacaaccaccaccaccatcatcactaccactactcaccagtcacttaaaacaaaacacacaagaacaacaaccactaacaagcaccatcacacccacatacaacatgtaactataaagctctgaaattacttactacttagtatgcaa

SEQ ID NO: 3158 - DNA, 3658 bp, DROSOPHILA
ccaagcactagcatatttcctattggccccttgcaacaaaaagccccgaaaatatattgaaaatttcacaaaaatggtagaagccaaaactgtgaaaaactaaagcgaacgtcttgaagccattaaaaaagcgcgcctattcagtgaatgtgtgtgtgtgcgtgagaattgatgtgtaaaaagaacagtgtattgaaatatcaataaactatcgatgatcctttgaaaattaagaaaaaaaatttaattttttttttgtatgttcaagtgaagaagctgcaggaggagcataagatgaagatgtagctaacatatctcccatttcccattctctccctcattgcagcaaatatttcgaccactgttaacctagtttcacatctcaaaaataaaaccaaacaacaaggacgaactcagaccagcactggctcctctgtcttcaattacgcacagctctaccagtatctagagaataacgagtaaaggctaccaaggactcgagggaagagaatcgcctggggcagaggaagaagccaatccccatacttttcggttctcctcggaccagaatcatcacctcccccatcccgaccccggcactaccttcccgctgaaccacatacactctgtccactatccactattcgacaccaccacactctgtgcatccaactatttggccaaccattaatccttgggcgagaccagagcagccccatcgcataactgtggatagcagagcagccggagcacgaggacgactcatgttacaaaaatgaaaaagttcacattcaaaggagttctagatggatttcgacaaagcgttcagccccaagccacacgacaggagcaggagattcaggagcaactcaaggccgatcactttacgttaaagaaaacctttcgccatggctttccatactcgcccacatccttcgccttcgatccagtacaaaagctactagcgattggcgacaaatcgggctacattcgcattttgggacgacctggcgtcgatgcccatgccaaacacgagggcgaatccgagtgcgccgtgctctttgcccagttcctggtcaacgagggcgcattggtcaccgtcaccgccgatgacaccattcacttgtggagcattcgccaaaagacaccgcgcattgtgcagagtctgaagtttcagagggagcgcgtgacttgcatacacctgcctgtgggcagcaaatggctgtacgtgggcaccgagaagggaaacatacacgttgttcacatagatacatttgcacttagtggttatattattaactggaataaagcaattgaagtggttagaactagtcatccaggtgctgtgattgcgttatgtgataatccattggatgcaaacaagttgcttattgcatttgagtgcgggctgcttgtgctgtgggatctgaaggcgaaatgcgctgagctgcgatggcaggcggccgaggccgtcaagtccctggcctggcactacgagggcaaatattttgtgtcctcgcacacggatggctccatttgctcctggcccacgaagccgcaggctaagccgcagtcgcaggtctgtccgcatgctaaaatcaacaaggatggcaatgcggagaaatgcaagccgatatataaagttgacttgaagtccagcgcaactggggaaaccttcacaattttctcgggcggcatgccctcggagaagggctccaagtccaactgcatcacggtgatggtgggcaaggccaccacggtgctggagatggagcacgccgtttgcgatttcataacactctgcgagaatccctggccctgcgagacccaggagccgtatgctattgccgtgctgttgcaatacgacttagtattaatagacttattaacacccggttttccatgttttgaatcgccttatccaatggacttacacgaatcacctgttacatgttgcacatatttaaccgattgcccatcggatttggttcctgctttctattcagttggtcgcacaacgacaagtaaaaagagctgcttctcggagcgcgaatggccgatatccggtggcgagtggtcgccggcgtcgtgcagctattcggagatcgtgatcaccggacaccaggacggcagcctcaagttctgggattccggtgccggcacactgcagatcctctataagctgaagacagccaagatgttcgagaagccgcgctcccacgtcgcccactcgcatccggaaagcgacaatccgctggcggtgcacctaatcttcctttgctcggaatcgcgacgcctgtgtgtggccggcgccatgggacaggtgatgctcttcaagttccgcaaagtggagtccacgtcggaggtactggtgctggagatacccatactctatgagaattttgatgacatttatgggacaagtcccgagtgcgattttctaacgggccatcaagtgcagaaggctgagtcgagtgattcggataagacggccgagtgttcgctaaaggtgcgcaatggggcgcaacgcaagccgccgggcttccagtcgcagctggtctgcctcaccaccggaccaaatcgccggaacgtgcaggtcacctcgctgtgcatcagctccagttatggccttgttgcatgccccgatctgtatggcgcacatgatccttactcgcgaacaccaaaaagtccaaaacgtattgaaaacaaagaggagcaaagccgatcgcccagctcagatcagctgaacgacacgaccagtccggatagtccgtctctcgaatttgtaccggaggctggcgaaacatcggcccacgatggcgtggcgacggcaactagctcacgtcccagttcaccggacccggtggtgaacagtgctcgtgaaacgctgctcagcggatcggcagcggcaacggcggctgcggcagcatcggcggctgtcatgatggccaagagtccccagcgggatgatgcagctcccaaggagctgcaggacagacgaaagtccatgtcctggaaaacgttcaatttgaagcgtcaattatcgaaagtcaatatgaagatcggcggcctgaatgtcaataccgatatggagtcgctaaagaatagctccattttctacacgcccaaggaggtgtcaccggaggctgctacgccaccggcaacagaagaggaggcaacgccggagggcaaggaggacgagtccctggatgatggcgaaatggcgaccaacgcgggagcagcagcagctgcatcaccatcgccggcagttcgtggcaaatttcgctcatccaccacggattcacctgatgagggcgccagcagtagcattgccagcggcattcgtcgtgtggactttgaacagccggctggggtcgaggtggagcgaccaaacaacctgccactggcggatgcaccagctccactgaagcccgcccgtcaaaagttcaaggaaaagtcgcgcgatcagcgacttttatccgttccgaacattaagtatcagccgcgagattcgcgtggcggtgctcggaacctcaagaatgatgtctcaccgctgatgggcggtggtggcggtggaggaggcgttgttggtgccagcagcggcattggtggaagcgtcgctggaggcaagaagatacagactgcatgccaatattaa

SEQ ID NO: 3159 - protein, 960 aa, DROSOPHILA
MKKFTFKGVLDGFRQSVQPQATRQEQEIQEQLKADHFTLKKTFRHGFPYSPTSFAFDPVQKLLAIGDKSGYIRILGRPGVDAHAKHEGESECAVLFAQFLVNEGALVTVTADDTIHLWSIRQKTPRIVQSLKFQRERVTCIHLPVGSKWLYVGTEKGNIHVVHIDTFALSGYIINWNKAIEVVRTSHPGAVIALCDNPLDANKLLIAFECGLLVLWDLKAKCAELRWQAAEAVKSLAWHYEGKYFVSSHTDGSICSWPTKPQAKPQSQVCPHAKINKDGNAEKCKPIYKVDLKSSATGETFTIFSGGMPSEKGSKSNCITVMVGKATTVLEMEHAVCDFITLCENPWPCETQEPYAIAVLLQYDLVLIDLLTPGFPCFESPYPMDLHESPVTCCTYLTDCPSDLVPAFYSVGRTTTSKKSCFSEREWPISGGEWSPASCSYSEIVITGHQDGSLKFWDSGAGTLQILYKLKTAKMFEKPRSHVAHSHPESDNPLAVHLIFLCSESRRLCVAGAMGQVMLFKFRKVESTSEVLVLEIPILYENFDDIYGTSPECDFLTGHQVQKAESSDSDKTAECSLKVRNGAQRKPPGFQSQLVCLTTGPNRRNVQVTSLCISSSYGLVACPDLYGAHDPYSRTPKSPKRIENKEEQSRSPSSDQLNDTTSPDSPSLEFVPEAGETSAHDGVATATSSRPSSPDPVVNSARETLLSGSAAATAAAAASAAVMMAKSPQRDDAAPKELQDRRKSMSWKTFNLKRQLSKVNMKIGGLNVNTDMESLKNSSIFYTPKEVSPEAATPPATEEEATPEGKEDESLDDGEMATNAGAAAAASPSPAVRGKFRSSTTDSPDEGASSSIASGIRRVDFEQPAGVEVERPNNLPLADAPAPLKPARQKFKEKSRDQRLLSVPNIKYQPRDSRGGARNLKNDVSPLMGGGGGGGGVVGASSGIGGSVAGGKKIQTACQY

SEQ ID NO: 3160 - DNA, 12663 bp, DROSOPHILA
tataaaatcgattatcttacaaacgtatatatttcgttaaataatatgtaatatatatggaaatatgggtttacctataaatacacatgattgtgaacgtatagaaaatataaatttttcgaaacttaatgatgctttctgaagtcagtagtcccttgaaacgtgtaagaataccacgtacatctattacgtattaaaaccacaaatgcttataacgcacttatgtgtgcttagcaccggttcttaaaaatattggaacaatcaatagataatcatcttaaattatataataatcagattaacatcgatacctgaaaaaccttagcacaaattttatgcaatccaaaaagaaaggaaatggcttagtttcagttttttttacattgttttactcccttgattcaggctcagaataaaataacaatttaggaaaaaaaaaaacgaagaaaactaatgtctgtatagggtttctggttctcacagctctaaagacaatatcgcattccacaggttgcccaattttagaaagaaatgagatgcaggaccgtgtttccgaggtgaaatcgtgtgcgtgtgagtaagaaagtgttcgtaagttcgtggcagagttttagtgtgtttgtaagtgccccaattgcctctgctccgccgccattcacccacccacaattctacgtgccattgtggaccatttggatctttagcgcaaattgagcttactctcaccgcctcacttaagctgatttgaaaagagaacttaagccgaagtaaaggaggaggggtcggtgatcgaaaggagaggaaacggaatataagcaaatagcgtcgaacagaaaagaaaagaaaggtgcgggagctgtaaaagcacgaaaggaaacagcaaaggaaaggaaaaaaagaatagagaaaatcaacaccattgaagtgcggattgagattgagattcagattaggcttcggcttcatacaacggcgcatcgcagtttacgagtgtccatcaccactacaacaccgtgcagcaatggaagactattggggtcttagcagcactacgggtacataaccactaacagaactaactagtgactaagccaaaacttagctaacactaagcgtcaaatcgagttaagctagcaccactattttcgtccgactcagtgaccctaaccaatttatttacaaatcaaaaacatgagacaatattgagatcgagaaccacagataagtttataatttactaaaaaagtgcccttttaactaattgacaaataacgtttattttattttccgttgcctttaacgtattgtgcgacggcgacaaaaaagatagaaacaagtttaataaatcaattaggcgtcaaataattttaatgcaatgcgattaaatgggcttgtgcgtgcactgacgtcataggcctctatatgtatgtacatatgtatgtatctgcacgatggcacgcatacacaaatgcatgcacataaatttgtacgccttaaaattccgggtgtgggtgtgtatgcatgcggatctctttatggcccgtgagagcatgtgttgtgtctgagcgcgtaaactgtggcatatgaagcaattgtctaaattggctcattaagtgaaccttaatgacatttactatgcatagtgacaaccaaaactgtttcgtttttatacccgttagtcgtagagtaaaagggtatattagattctttgaaaagtaacaggcagactatataaagtatatatattttttatcaggatcaatagccgagtcgatctagccatgtccgtctgtatgctgaattccgacgttcatacggacagattataggacaaaggcgcagcgcaagtttgttgacccatgttgccacacccactctaacgtccacaaaccgctcaatactgccacgcccacatttttgaaccatgtttttaaatttttagccacgctgaatctaacgcccgaaagccgcccacactttaaaacaatttttaaattttttctcattttattccccaatatctatcgatagcccagaaaaattatgaaattcgcgttcgcattcgcaatagctgagtaacgggtatctgatagtcggggaactcgactatagcattctctcttgttattaatttttttgtttagatgtatttcaaaatcagttaatgcccgcgtatatattttattccatccttttattcgctcaacgttaatgtgaccaacaaaccatgcatggctcgtatgcgcaatgttcctcatataggtattttcacagaataacgtaaaaaaaatatactattcacttttcactcttttttattggtttgatcatagaaaacttaggtagaaggaacctactattaaaaacagatataacttcaactggtatctggtagtattctgcgcacgtaagttcgtatctggaaacgcgattttattttatgcagtctattttctaaacaaagaacgaaggaatactttgtatgtaaaatctttttaggcctaaacagctgataatagcatattattcataaatatgcagaggatagtcggggaactcggctataggtttctctgttgtttttttattatttctttgaaatggttgcaagtgactcctttactacgttgcatgctcttgaaagagaccaatatatatttggccttttcgaagatgaaccgcatcagattcaacctcattttttatttctgtcagaattattggcttgggtgcaggtaaactcacttctaaaaaatatggagacagcaccaagtaagactaactaactaaaaatgggaaagaatatatacagacaaaagccacaaagcatggatcgtttagaaaatttttctttaaacgaaacacaaaagtcatattaatacgcattgtcacactgatttcccttacttatggtcagatataaacttacatatgggtagacacatgtttagtacagagctttttgtgtggtttgaaaggcgatgtgcttcaagtctttctataaaacaattgtgacaatgatgcggatacgtaatatgaagtcttccatttcacatatactattattctgctgtgagtttgagtacttaatagaaagctgaaaattaaaaagcgaaaaaataacgaattcatgctgataagagccaggaaaatgagatattcttagtctggtaaaattagttgtatgagtaaactagtgaggtgggcacatttaaaattgtaaataactattattacaggtggaaggagtacttcttgcaatctttattaaaaatatctttacatcaaatttcttccttgcaagtatttacgtacagatcttctcagaaaagacccgtttccgatatgaccggaattactaggaaattgtgcgaactaatattacaactgttatattcgcacaataataataataatatttcgttaaaaaatccaagtaaatactgaagcagtttactgctgacatttggcaactgagacaatatgatccattttgcatttttgacagcgttcgattgctgtggaaaataatcaaaaatattgtttttctgcatggaaagccgattgctgaataaattcagaagattttgctcgcagattaatacctgtaatatacggtttgtttgccataatgattaattacaatgtgggtactgcaaacattgcttaaagttaacatatttcgaataagcgtataatgaaggctatagttgcataagaacgaataagactgagtacctcttctgaatagctccactcacttatttgacttttctaagattcacatattgtaacaaatccaaagagttcaaaattgcagttattcgatacgcttttactgtttatgattcgctcattcaattatagttaacttaatttactgtgattgaatgtatttctgattgttaaattgattatcattaacactcctcctcccttgtgctgtggagcagagctggttcattcgctataactagggaactctgtaaatgtttattaagcatcattgcattatgcgggttggcggttacaaaatgcgtttgtgtcaattgaccccgggctccgactttctgtgtcgctcaatcttgcgtgtgagtcttcacttctatatagatatgtaggtatacatttatgtttgtggtatttctacgcaccaggccttcatcgacctaaggtccatcgcgcataaagatatttaaaattgagaagaggagaaaacctaacctacatattaatcttacaatttgtttattgttgatgtccaaatgtttgcctatttgaattcggagcactatattcatagtccgaaattcacctaattgcttatattaatgctccaagactaatggcaatcattaaccccggtgttaatcgtcagatcaaacgctcacaatctgatgatttccgaaccgaacgaaacaaagctaattttgtttgattgggtcatatacttggctgactgctggctctgggtatttaattacactgtgctacatttctttagttctggggtgaagtgtatgtgtgttttggtagtacttatttatgcttgcttagccctatttgtgaaattacaaaatcttaatgcgctgaatagtataagtggggtataagtacatattgaatgtataaaaatggaacagaaaaaacgtttatctttaaattgttggattgctttgagatatcaacttaaggggttatggtataaagatgatagtgatgctgaaacttatttgcacaagtccacagttaccatgttgcagagtgctattgtacctacatatttatgtatatttgtatttcgacctacggttaccgcaatatcttctcgtatctactctatgtctctatcaacttatgtagctcaatcgattgacattttgagtggcaagtgagtttagctattgcgtttagttagcacttatttattttaatttgcggattgaagtctgtatgttgatgcttgttctcggcaccggctgccgatttaggtactctacatgcaaaaaaattccacaatcttatgaacaaccaaaaggcgccctatgtttaataagtatttagacgcccgacttagacatttaaatttaggattgaaattgatatctcattattacataaacatttaaagtatcgaagtgttacaattatttgtacattgaaaaggtgacaaccattttattcccttctattctatgctaattattttccaggcattaatcttaaaatagcagcccaaataattttttaaataaaaatacattttgattaaatatttaatataataattgaaattattagacaaaaattatataaaaatgttggttttgattgattcagtattcaagagtcaaataagaaaccatgaaatataatatacaaatgaattaataatttaaatttaatttttgcgaattatatagaattgattttacattttttataaaactctagcagaaaccctttttattaaaaaaaaatacgcccaagcagtaatttacatacttttaacggccaatgtttcctagatttcaagctagagtaacaataatttgcatgcaaagtgcagaaataggaaactaaatctacgattttttcccgtgttgatatgtttttagtttttagctggggcatagttttcggtttcaatttaaagcttcggatgagcttttatcggttttttgttttgcaatacaatttgatgacatcaaaggcgaatttatcgcttccgctgccgatcgttatttggatcggaggtccgtcgcatttttgatcgatgatcaaatgtatctatgagctacgatgataaaaaagcggggcttcggcttctatttttgtttcggttccagtccgacttatgttctggaaccagcagatgtatttgtatctgtagcttactgctcgcgttgcgtctgtatgagtatctggtgtaattgtgtctgtatctcgtgcagtttccatttcggcttctgttttgagtttcgattcctggggtgtgaggtactgggtgccacgttctggattctgattgccagtcttatggtctttcttgcagctctggtggtttagttcattatcaacgcttgagactccgacttgtgatacacaaaaatagaaagacgaggcagtcggaataattcggcaattcggaagcccttgttccctgatcgtctgaagcgtttttttgttcggtgaaaatttgttgcagtgcagcatgaaatgtgcgaaaaccaagtgatttttattctattttgaagttgacataagggcctatgatttcattaaaaattctctttaatgacaagccacttatttattgtgagaatagctgcttataaactttgtcaactcgaggttacatttttcccgcgacgacacgacactctattaaaaaatgaattttttcatagtctccaattttttaattcgtcaatataattttttctatttaattttttttttaactttagactttgtttattattattaagaaaatcaaacacttttgattagtttaagaaataatcggccattgcatctttgacataaataagttctgatgacacgtcttatgacgatgaaaatgatttgaaattttactatataattacactacactctcgctttaacaaattgcttacctacagacagaacacttttattgtgtttaaatttgctcaaatgagggacaggccacacgcaatggtagcgcaaaacaaaagagaatgctatagtcgagttccccgactattagatatccgttactcagctagtgtgaattcggacgcgaaatttcataatttttgtgggatatcggtaggtattggggaataaaatgagaacaagttttaaaattgttcaaaagtgtgaccgttttggcggcttcaggtcgggcgtttcaaaaagatttttggcaaatcaatagaaaaaaatatgggcgtggtagttatgtgcggtttgtgggcgttagagttagcgtggcaacatgggtcaacaaacttgagcagcgtttttgtctctagaatctgtatgcgtaatcttaaccttctagtttttatagttcctgagacctcgaaagttatacggacagacggacatggctagatcgactcggctattgatcctgataaagaatatatatactttatatagtcggaaacgcttccttctgcctgttacatacttttcaacgaatctagtatacccttttactctacgagtaacgtgtgtaagaattaaagactttgagacaattgaatgttttaatcaaaagagcggggccagtgtaaatgagaacattttataaagtgcagattatgtagccaaaaaatagtataaaaaactattgcttaaaatactccagtcgaatgatactctcaaaataagatttaagtaaattttgagaattatcagttaattgcagaaattttgaaagattaacttatgaaactcacttttaaataaagccctttttcattttgattgatcttaagaatcgtaagatttttctttaggcctcggataatccaaaaagttttaaagacatttggtaacaataccataaattttcaccaatctggaacgacttatcctatttgaacaggtttttgtattagcgtattgatattaaaacattaaggctaaatttccgttatttggaaccattggcagtatgaaactttcaactctttttatacgctcagctattggctcagcttagctgatagctaagctaggtaatataagttaatgctttcttaagtgttgaaactaaccttcaataagtaatctttgaatttcgcatatctttcagatataaattgcactcagcccgccatcgatgacttcccccgagacctattctcggaggcgcaaagacagtctggtgctgttgtacttcatgttatagccagtttatatttatttgtagccttagccgtagtgtgtgatgagtactttgtgccagcagttgagaaaatatgtgcaggtagttattcttaaatccactttgaatattagcgtactatcactttcaactaatctagcactcaacatgtccaatgatgtggcgggtgccactttcatggccgcggccacctccgccccagaattatttgtcaacgtgataggaacctttatcacggagggcgacatcggagtgggcacgattgtcggatcggcggtatttaacatcctggcagtggccgcgtgctgcggaatcggagctggcatggcaagtctatttcgtataatcagctatttcctaatcctcgtgaaatgcaaatttcagacaatacccttggactggtggccactgacgcgggacagcatcgcatacggagttacagtggccattctcatttgtgttatgcacgacgagcgcgtcgagtggtatgaggccctcatcctggtctccctgtatgccgtctatcttgcggtcatgtatttcgacaaaactttccaaaagtgcgccaaaggtgagtgatatccttgcggcacttttgttccaaaatgtcagctttggctcacaaaggttacaaaaaaaaagtattggcgtaacaaagaagaaatagttttaagccaatatcaatcgacttctcattagtcggaaatataatgtcaatttgctttattatagaacaaactatagttcttatactttttacgcaagttactcatagaatatatggtatgataaaattcgatgaatactatactacgtaataggggggaacgaaaggaaaacgctacccaataaactatatatactgtcgaatcggatcactagcagccaagccaatcaagccatgttttacattttttatttctcgatttttgtcacgcccatgttgatcgatatgcggaaaatcctttttgaccatacccattctatcgcatgcatattaccaaaccatttatataacaaatttggaaaaaaattaatgaaagaaaagtaatgctacaaggagtctgtagtacattttgattttttgtttaaattaaacatttattcgtttccaaaaacaatgactttttaaataaatatgactagtattaaataattaaaccaaaatctcttttaaattgggcgtgacagcttcttgccttttgaaggcgttagagtcaaatcaaataacttgccgtaaaagttttgccaaaatatttttgcgcaccgatgaaaattgacaagacaaaaaaaaaaaacaaaaaagaaaattataaaattgtgtgaaagtaacggtttgtggctgttagtgttgtttttactacaatagaacccgcactccctatctacaacttctaccttttttagttcccgagatccgagcgttgatacggacagacagacggacacatgaacacttccagattgacggctagtgatcttgatcacgagcatatacatcaactttatacggtctgaaacgcttccgcaacctgttgcataatattctatgaatctaccttaaccttttaaaacaaaagataccactatggtggacttctccgactattgcgttcccgttactcagctaaaagggagtgcaaggaaacgaagtgacaattttttgaaattgacatacttaaattcggaaagttccaaatattaaagtttatacacgcgtacagacggacatggtcagattggctcggctgatgatcctagctcaagggtcggaacaccatcaatattagatacccgttacatcgcttaacaatttgaaggtaaatacttgtctagatgtacatacatagatatttagcataatattcactctgcatctagtaaagtgatttcaatctgaaaagtatacccctagtgtactactgaattgaaagtatgtaacataaacatatatcgggaactatacaaggtagatatttaagtctttaatttgagtaccgaccgtattacaatttttagctactccaactccaattcccacaaaatggaactataaccacaataatgcagattctagagataaagaatttttgcaagtctcggaataaagcataaagtcttgttttatgataattaattaactatgttagtacgtaaagaggcttgtctttttggcttttctccagatacaagttatatatatatacgcaataccttactttcgcaacactacacaggtggcgttaagcaggctcgttctcgcagccggtcctccaactgcagcatacatacaaagaacagcaatgagaaggaaccaggtacacacgacaccaccatttccaactttacactagccaatactgcccacctcttattcctaatgtccgaccctcaacctctctcccacggacccgctttcagagcacaactaatagctgatattaatgttctctactgccgcagagcttgtggaaaaccgcatttgccagaacatggcgaacatacagctaaacggaggacttaacaaagagcaggccaaggccacaagcacatccggagccggtaccaccgcgatttcgataaccacctcgaccatgaccacaactttgagcaccacccatagtgccggaggaggaggtggagcagttggtctttgttcgggaccaggggccattgtgcagatggcaccactagacgatgccgaggcagaatctcacgtggccgtagcagccgctgacgagggccgtaaggaggagggatactctctgctctcatacccgaaggataagagctgctttgcccagtttacctggctcatcatttggccgatccatctgctatttcgcattgccattcctgactgcaagaaggccaaaaacaataagattttcccactgacctttatcatgtgcatagtttggatcggatcgctttcctatgtagtagcgtggatgataacgataatcggtaagatacatgtacatgtcttaatcatagaaaaggctgaacaactctgggtcgttaaaagttgttgtctcaatacatgtggtttgttattttgtaaacataaaacaactcttacttaacaactcttattatatatagtaaaatattaaatatataatatatgttatatataaaatataataatatatataatataaaattaaatatataataaatattatatatataatataagcgacgatttcacgaactaaacgttttcccctgttaaatgtacctatattgctacgcaggagacacactaaagattcctgactcggtgatggggattacgttcctggcagctggtaccagtgtccctgaagcggtgtctagtgttattgtggcgaagcgcggtaagtggttgtctagtgatatttgggaacgcatgtttattcaattatcttttaaaggtcacggatcaatgggaatctgtaactctattgggtcaaacactttcgacatcctgctgtgcctgggggttccctggctgatcaaagcagtatttttcccgatccaaccgggccaaaactacgtggccataaactccgccggattggagtactcggcgatcactttgttgtcgacactgttcctgctttacctgaccttctccacaaacaagtttaagctggacaagaaggtgggcactgcctgtctggtgatgtatctggtcttcatggttttcgcctccctcatcgaactcaatgtgttcttccgcgtcaacctgcccacctgcggtcgatcatgaaattggtctgcgtccaaaagttgtaggatatacgaaggacgacctgcaaaatctgacgttttgatgagcgatataccatttgggatgaatagatggggtgcagagatgacagtcttctggtgctggatccgtttccgattcagtttgcggcagctgactggaagaaccctaagtgcagtggtttaattaattaatatgtattttctgttctattctatctactttgatagttgagttacgttatacgttatgctgttattgtaataatattttttttttattattattaaagtagactctttcacaatcttcggtcgaaacccaaaagataaattcaaatgaatgagaagacattttataatttacggagccgtgcaaagggagaaatgaaaactaaaaacaaaccaaaaaaataaataatgtatttatatgattaatatatatgagatttaacaaagtctgtagtgatagtggatattgttaattggattgccttggcttgtaggacataatatcactgtggacggcagtacacgtagtgacaagtgctcccgaaaatccgatcattcaagtgatacacacgtcgaaaggtaaaaaaaacggattgcatataaagacctttgaataaatatatactctgagggtgtacgaaaaaaagcgttgaaagtgaaacataattaaaaaattctactattaaaaataaatgaaaatttatatcggtttgtccaccacatggttttgacgagggaaaaatactctataaatagatcaatactaataaaagtgttgttaaaaggactttccaaatttatattctgtttccaaagtaaagttccaaaccgaattcaccctaatacaaaacattgctaaaaccatatacattagtttatatatatggagcttaattctgtttttagttaacacttcccttcttatttttggttacaagaaatctatcgagcattatcaagcattcaaacgaagttaattcgctctttaa

SEQ ID NO: 3161 - DNA, 1683 bp, DROSOPHILA
ccactacaacaccgtgcagcaatggaagactattggggtcttagcagcactacggatataaattgcactcagcccgccatcgatgacttcccccgagacctattctcggaggcgcaaagacagtctggtgctgttgtacttcatgttatagccagtttatatttatttgtagccttagccgtagtgtgtgatgagtactttgtgccagcagttgagaaaatatgtgcagcactcaacatgtccaatgatgtggcgggtgccactttcatggccgcggccacctccgccccagaattatttgtcaacgtgataggaacctttatcacggagggcgacatcggagtgggcacgattgtcggatcggcggtatttaacatcctggcagtggccgcgtgctgcggaatcggagctggcatggcaagtctatttcgtataatcagctatttcctaatcctcgtgaaatgcaaatttcagacaatacccttggactggtggccactgacgcgggacagcatcgcatacggagttacagtggccattctcatttgtgttatgcacgacgagcgcgtcgagtggtatgaggccctcatcctggtctccctgtatgccgtctatcttgcggtcatgtatttcgacaaaactttccaaaagtgcgccaaaggtggcgttaagcaggctcgttctcgcagccggtcctccaactgcagcatacatacaaagaacagcaatgagaaggaaccagagcttgtggaaaaccgcatttgccagaacatggcgaacatacagctaaacggaggacttaacaaagagcaggccaaggccacaagcacatccggagccggtaccaccgcgatttcgataaccacctcgaccatgaccacaactttgagcaccacccatagtgccggaggaggaggtggagcagttggtctttgttcgggaccaggggccattgtgcagatggcaccactagacgatgccgaggcagaatctcacgtggccgtagcagccgctgacgagggccgtaaggaggagggatactctctgctctcatacccgaaggataagagctgctttgcccagtttacctggctcatcatttggccgatccatctgctatttcgcattgccattcctgactgcaagaaggccaaaaacaataagattttcccactgacctttatcatgtgcatagtttggatcggatcgctttcctatgtagtagcgtggatgataacgataatcggagacacactaaagattcctgactcggtgatggggattacgttcctggcagctggtaccagtgtccctgaagcggtgtctagtgttattgtggcgaagcgtcacggatcaatgggaatctgtaactctattgggtcaaacactttcgacatcctgctgtgcctgggggttccctggctgatcaaagcagtatttttcccgatccaaccgggccaaaactacgtggccataaactccgccggattggagtactcggcgatcactttgttgtcgacactgttcctgctttacctgaccttctccacaaacaagtttaagctggacaagaaggtgggcactgcctgtctggtgatgtatctggtcttcatggttttcgcctccctcatcgaactcaatgtgttcttccgcgtcaacctgcccacctgcggtcgatcatga

SEQ ID NO: 3162 - protein, 481 aa, DROSOPHILA
MSNDVAGATFMAAATSAPELFVNVIGTFITEGDIGVGTIVGSAVFNILAVAACCGIGAGMASLFRIISYFLILVKCKFQTIPLDWWPLTRDSIAYGVTVAILICVMHDERVEWYEALILVSLYAVYLAVMYFDKTFQKCAKGGVKQARSRSRSSNCSIHTKNSNEKEPELVENRICQNMANIQLNGGLNKEQAKATSTSGAGTTAISITTSTMTTTLSTTHSAGGGGGAVGLCSGPGAIVQMAPLDDAEAESHVAVAAADEGRKEEGYSLLSYPKDKSCFAQFTWLIIWPIHLLFRIAIPDCKKAKNNKIFPLTFIMCIVWIGSLSYVVAWMITIIGDTLKIPDSVMGITFLAAGTSVPEAVSSVIVAKRHGSMGICNSIGSNTFDILLCLGVPWLIKAVFFPIQPGQNYVAINSAGLEYSAITLLSTLFLLYLTFSTNKFKLDKKVGTACLVMYLVFMVFASLIELNVFFRVNLPTCGRS

SEQ ID NO: 3163 - DNA, 4386 bp, DROSOPHILA
aaaggaggtgacgaaagagagaggcaacagaaaaagggatgaatctttagatttggatttgatttttctgacttctcttcgctctcctttcccacactagcatccatccagctacctctatctcgcttccaccttagccgcttcttccagttgtttttgttgttactttccgttcctggcaggaggtgtgtttgtgcgagagagaggggaatgcgcgtttcacctgccaccttattattttccgcaaaccgaccatcgattcacggcagaggtatcacaagaacgagacgccttccacaatcgcgtttaattccgctggatttacgtttctttttttgagttcgagacgaccaaaaacagcttggatccgatccacaatgtgcccgccgctttttccacccgcaatgccgatgtggccagtggtcacactaaaaggcagtgctaccggatcgccgaaccggcattttacataaatgagtcgcttttgctttcttcgttttaacaaaatgggaatacattcttgtgtccggtttttacaatttagagcatatacatatgtctcacaacatatccaggtgttacaaaacaacaaatgaagaacatttttgaaattacgctataatgctactgggtttttatacccgttattcgtacagtaaggcatgtaacagtaaagtatgtaactggtaaaaggaagcgtttccgaccatataaagtatatatattcttgatcaggatcaaaagtcgatttgacttttctcgtctttctgtccctccgtatgaacgccgagatttcaggaactagaaaatcaacaatatttattaatcaacggtattagtgaccacttatcgaatagatttatcgataatcaactaatctatattgacaagtatcgcacaaaatattaactcaaaatgcaaccaccaagattctatcacaaagcatttaagtgtcattgtgaaattattattcatttcacaaataaggggactttctcttcgaaagggtgacactaatagagctacctgtaaattgaaaagtttaaacccaaagaccatgtctacctttggcgctgaagtggatcaggtttggccagcggtcaccggtgattccccgcatctcactaatttcggacgcaaattgctgaaggattgccgccaagtgcagaaaccaatcggaggatacgaaaatttgggcaatgtgattaaattgtccgcggagtttccgctggaggtattacacttgggtgaccccccagccaacgtcgacttacccttccactttcttcttcttgtagttcggcgtgaacagtgtcaaagtataccggcaatctccatcgcggcttgcccggataaatgaggaagtggcatccgcctatccattgatacacgaacgtacattgggcctctacttgcagtacttggagcacaagtgtcgttggggtaagcaattctcttgcctaaatagccttctcaactgatcgacttgccgcatttcaccacaggcaacgcggtggaaaagcccatctaccggaatttatcgctatgcggatttgtgcaacgtctgctggtaaagcgttgcgccagcttctttgcgcggaacgacaagtacctgctggtgagcggagagtccggggccagtggcttcgaagccgtgggtactcgggaggagaaggcgcctctggtgctggccaacgtgctcagctatgacgatatcaagctctccgctctgctttccgtgagctcccgcacggagtttgtcaatgagggcgaacgaaccaattgcggtcacgttgatctgaacacgaaaactttggaacgtcacggggttattgtgggcatgattggagcccgtctgtcgcgacgtaatctaatggagttccaggacattgtaatcgcacgtcagcagaatacgcgtgaaaggggctacggaatggcattggatgagccggctaccacgcgtgatgaggactatcgacgactgtggcgcgagttctatgccacacgggatctcatccacggccaggcagtcattgacaatcagcgtttcggaccatcgaaaaacaagatggacgtgttcgacaatctggtgatgaagcggcgttacgccatcagcttcgacatgctgctgctggaggcagaggcaagggcaaaacgcgtgaaaaagctggcgtacatccatgtggtgggcttcggcttgggcgtgtggaaggcagcagaacagcaggagcgcatcttcatggagaccttcgagcagcgtatgcgcacgctgggcaacaggctcaataacgttggcctcgtgcacttctcctggttttcgatcacacattgcggcggtctaagcaacggatcgctgatagagattcccgggcatccaaaggatggcatcagggtgctcatttccaagcgcaatccagcacgaaaattgagtgatcctgagcacgccggaatgctgctggtagtctcttacgcttgggatggaaacgccctgccgggtaatgaattctggatggtaagtacatagattgacagtgccctcctagccacaaatgttgatattaagtggtgaaacaatatatttatattctgtggtttggccaactgtgtgttctagttttccactaatgccctttatattaaataataagaacattatcaatttaatgagggcatgcattatcagcttagtaagtgtttataattgtgttaagtgcaattataaagataattcaatttagtgatcattaaaccaatggaaagtaacttgacattaaagtagttgtagttcttcctttgatcttaacattttcttctttctaatttcacatattataaacttcattcgttttagaaaatgctgcagtccacaggtgactcctcgacggcctgctccacgttggtggccgagctgcacaatccgtacataaacacgaaattctgcaatggaggcaacctgcacatcgcctcaccggagcacggggtgctccacatagccgaatatgccaagcgggtgattcggagcgagagtgacgccttatgagatacgtgaatctgcctgttatctaatcttatctaatcgtagctactgttttattccacacttgctgtaggtcaattccatgaccttttgacagacgcatgacaattccaaaaaaaaagggaaaaaaaaggattttatattgtaatcgattttataaaacgaccattttaaaccaaaaccaaccaattgattgaattgaaccaaccaattgaagctttaaaaagccatgaaaatgcctcgaaaacgagagaaatatgtaatagaattaagtattttggttaaaccatctttatgtttgtaagcagtgtaaatacatgtgtataaatgcagagcagttccttatgccaaactatatgtgatgtgataattatagcgtgtagcccaatttggagacccaacccaaaccctcgacagtggtcgtcttcggcttgtactcgcaaccgatccatccatcatagccgaattcctggagagccttgaacacaaatccgtagtccagctcaccggaaacatccggctcgtggcgatgcggcacctgggcgatctgaaagtgtccaatcagcgccttgtactcctcgagcgtcttggaaacgttgccgtgcaaatgctgcaggtgatacagatcggccagcaattgaatgttgtccgcagccacatcggccagaattccagcggctttggagtatgaattcatgtagtagccaggcacggcgtacttgttaattggctctatcacgccgatcattttactggctctaaggctatcggcggcgatctttagattggcggtatacgtcttcgtgtagtcactctcctggccgcccttgaagagtccagcggttagatgaatcttgccacagttaacctgtcgggcgaaatcaatggtggcatccaattggctacggaacagcttttccgagccgggcacactggtggagccgaaacgcagctgatcgtcgctcttgtcgaaggccagattcaccagactgaccaccacacccgtctcctttacggcggacaccacgtcgctcgtctcgccttcgggataggggatctctaccgcacggaatccgttctggtgggccagacgaattcgctccgcgatcgacgtcgctctttccgtgaacaaaaagttcagattcgctgcaaacttgagtgccatcttccgttcactaatctccgcctgcgttcacgcttggcaaacaactgggggggaacgatgcgattacccgttttttatattatatctaccgacttttgatactgccaatgtcatatggagcaggagcttttccgaccaaagctttgcgtgatatatgtacatacatacgtaggttttaagttat

SEQ ID NO: 3164 - DNA, 1921 bp, DROSOPHILA
cgaaagggtgacactaatagagctacctgtaaattgaaaagtttaaacccaaagaccatgtctacctttggcgctgaagtggatcaggtttggccagcggtcaccggtgattccccgcatctcactaatttcggacgcaaattgctgaaggattgccgccaagtgcagaaaccaatcggaggatacgaaaatttgggcaatgtgattaaattgtccgcggagtttccgctggagttcggcgtgaacagtgtcaaagtataccggcaatctccatcgcggcttgcccggataaatgaggaagtggcatccgcctatccattgatacacgaacgtacattgggcctctacttgcagtacttggagcacaagtgtcgttggggcaacgcggtggaaaagcccatctaccggaatttatcgctatgcggatttgtgcaacgtctgctggtaaagcgttgcgccagcttctttgcgcggaacgacaagtacctgctggtgagcggagagtccggggccagtggcttcgaagccgtgggtactcgggaggagaaggcgcctctggtgctggccaacgtgctcagctatgacgatatcaagctctccgctctgctttccgtgagctcccgcacggagtttgtcaatgagggcgaacgaaccaattgcggtcacgttgatctgaacacgaaaactttggaacgtcacggggttattgtgggcatgattggagcccgtctgtcgcgacgtaatctaatggagttccaggacattgtaatcgcacgtcagcagaatacgcgtgaaaggggctacggaatggcattggatgagccggctaccacgcgtgatgaggactatcgacgactgtggcgcgagttctatgccacacgggatctcatccacggccaggcagtcattgacaatcagcgtttcggaccatcgaaaaacaagatggacgtgttcgacaatctggtgatgaagcggcgttacgccatcagcttcgacatgctgctgctggaggcagaggcaagggcaaaacgcgtgaaaaagctggcgtacatccatgtggtgggcttcggcttgggcgtgtggaaggcagcagaacagcaggagcgcatcttcatggagaccttcgagcagcgtatgcgcacgctgggcaacaggctcaataacgttggcctcgtgcacttctcctggttttcgatcacacattgcggcggtctaagcaacggatcgctgatagagattcccgggcatccaaaggatggcatcagggtgctcatttccaagcgcaatccagcacgaaaattgagtgatcctgagcacgccggaatgctgctggtagtctcttacgcttgggatggaaacgccctgccgggtaatgaattctggatgaaaatgctgcagtccacaggtgactcctcgacggcctgctccacgttggtggccgagctgcacaatccgtacataaacacgaaattctgcaatggaggcaacctgcacatcgcctcaccggagcacggggtgctccacatagccgaatatgccaagcgggtgattcggagcgagagtgacgccttatgagatacgtgaatctgcctgttatctaatcttatctaatcgtagctactgttttattccacacttgctgtaggtcaattccatgaccttttgacagacgcatgacaattccaaaaaaaaagggaaaaaaaaggattttatattgtaatcgattttataaaacgaccattttaaaccaaaaccaaccaattgattgaattgaaccaaccaattgaagctttaaaaagccatgaaaatgcctcgaaaacgagagaaatatgtaatagaattaagtattttggttaaaccatctttatgtttgtaagcagtgtaaatacatgtgtataaatgcagagcagttccttatgcc

SEQ ID NO: 3165 - protein, 505 aa, DROSOPHILA
MSTFGAEVDQVWPAVTGDSPHLTNFGRKLLKDCRQVQKPIGGYENLGNVIKLSAEFPLEFGVNSVKVYRQSPSRLARINEEVASAYPLIHERTLGLYLQYLEHKCRWGNAVEKPIYRNLSLCGFVQRLLVKRCASFFARNDKYLLVSGESGASGFEAVGTREEKAPLVLANVLSYDDIKLSALLSVSSRTEFVNEGERTNCGHVDLNTKTLERHGVIVGMIGARLSRRNLMEFQDIVIARQQNTRERGYGMALDEPATTRDEDYRRLWREFYATRDLIHGQAVIDNQRFGPSKNKMDVFDNLVMKRRYAISFDMLLLEAEARAKRVKKLAYIHVVGFGLGVWKAAEQQERIFMETFEQRMRTLGNRLNNVGLVHFSWFSITHCGGLSNGSLIEIPGHPKDGIRVLISKRNPARKLSDPEHAGMLLVVSYAWDGNALPGNEFWMKMLQSTGDSSTACSTLVAELHNPYINTKFCNGGNLHIASPEHGVLHIAEYAKRVIRSESDAL

SEQ ID NO: 3166 - DNA, 9550 bp, DROSOPHILA
atgtaagccaaatgcccctcattaaattgaaacacgcgaagtactttcgtttatgatttaaaagtactattcaaaaacgacactttgcaccattaatgagttccgaccactccgctatgtggtgctccttcagcaaaggcagcaatctgataaacgtgcgacaaatttccatattgagtgcaaacatgtaaactaacagctcgcaagttttccccaccagagcgtttcgttcgttcgtttaaaaaacgctctgtggcttcagttgctttccgcagaaacaaaagcatgaaatgtaattaagtaattgccagcagacagacatccctgctaatgggggaactactttgcacatctgacagaatgctttattgttcccactatctcttctctttgctctgatgatggggatgtggatgtggggatatcaaataacagactgccttcaatatttgtgcacgctgtgactccattgcaggattcgaatgagccaggctttgtccaggcagcaggaatcgtcgattttcgcgaaaatactcattcgcattttcgtaattactgcaattagcttagtgcactttgttaatcacggcagggtgcgtattttcatgggccggctaatcattcgataatttatcaaaagcgtgcgaattcaccatgtgcagtcataatttaacgaaaacaatccagaaatgatcaccagtccaagtgcaaattagaattcccatcaaaggagctacggatagatttaatttgctgcacgtaattagccacaactacatacatataacaaccaaatgaacaattgtacacatgcgctactaagagaccacagcacgcaatgtttgtgtttaaacgtatgtgtcgagtaaacatttgtctaagcccgaattattttgacattaattaaacgcccattataggctgcccgcaaatcacaatggcatcccatttaaaggagccaatcacgcagatgtggataaataaatagtctaattaatgtgaattttgacgtatggtttctattattacaggttttgtatttgttatttattggcgatcaatttgatgctaattatggaatccttcacgaggacagcctttatctggtgaatcgaactgagttttgatgggattagctgggaggcgagtttctccgaaagccgagcggtttccgcccctcaggtgccgcgtggagttgcctgcgaccttgggcgtcggctggctccgttggaaccagcttcggactcctcgtccgctcgaccgtcctcatctcacttgctaaacttgaggcccactgcaaaaggataaggaaagcgcacccagcgagagaggaaagacaattaatgagaatgtttctaactaatggctttgtaatgaagcggggaaagttctccaaagtgatttctcctccttttcagctgcgttactcacctgccgcgctgcgtggattcctcagcttggagggcttcttccttagctccgattgacccagtccgccactggttcccggtccgtgggtgtcgatttgcatgctctcatcgctatccgaggtctggctctttaaaaccttcttaagattgatgagctggggggattagagcggacaaataaaattacacaatccgaaatctgatacttcttttgtaagtggaaatgtgtaaataaatgtgtattctaaagtaatgtagatttaaatccaacaaaaattcgtagtgccaataaatctaatacgatttgaagacggggaaaataaagtatatcctttctttggtactcacatcttgttccacgcgctctttgttaatcagccttttagatttctcggcattcgcgtacttaatctgcatttcgatgcaattggaaacgctgtcgcaggagttgacccacgcctgaagggtttccacgatctggccagtgtatccgggcggaatgtcgcggccctgggcgtagtccacttccaaaattcgtgtgttctggaacagctttccgtggatgatgtctgcgtggaggattaaaaggaaaattagagagtttctccctgttagcgttgcctgtaaagcttgttgtcaactttttcttgactaattgcccagaacgagcagtttttgaagttggccaaactctcgcctcaagtgccagcttctgagtgcactgaatgccattgcaacaagtttgttgtgatgcctatggaccactcctatggagtggtgcagttttcttaagggcagccccttcctaggtaaacgaaaacagcagtggcttaagtttctagaaaatggtcttgcagaaaaatggaaatacacaaagtatccttaaatcaaatctgcattgaatgggctaaagcaataaaacaagttggtcaaaaagttgggtagggcacggtagctctggaataacaagaatccgttcttaacaagaacgaggggcacacctacggagtgggtaattctgtataatacggacgcagctggcgagcaaaatagaatttcaatactttgccaattcatttgattattcattcagcttataagtacaaaaaccatagaccgacaattcgcatggattatttacaattccgaaattaatgataattcccaatccagcaataagcacggatgcgcaatcaatcacgccacctttatcccacacagcaaactctcaatcaattaaactgattagaaaatagttagatgagcgcaaatacaacagaacgaagctggctacaatcaaggaaatggaagccgggttccataaattcgaaaatccacacagcagattcccaagtgttggccaaatactgtggtgacccagtcacacacaatgggtaatcaaatagcagcgtattaacttttgttttcaatactttggggcgatctctttaagccaaatgaaagtggctttggggcgattagctttgtttctgactcaattggcaaataaatacaccgcccagcgggcgtaagcggaaaatgcactctgctgcgatggccgacatcaggagtagtttgggtaattaatttgaaatcgtcgttcgtcgtttagctcgtagctgctctgcgggattacaatttacagcaagcggatttggaatcgttttcatccgtgccgacatgagtctgagtcccagttccaaagtcccgaatactgaacccctctgcctctgccactacctctaccccgatccgaactatggcccgaggcactaacttgctcggccgaggaagtggctaagtgacagccgcctctccgttcgccggttttggccatggctaagccctagttaagtccttgagcgctctttgcctttgactttacgaccacttgtgtccttgagtctgcgagtcggcggaaagtcggactcggactggggacgaagtctgcggaccaagtttctgtgtttatggcaccgacttcgcgtcataaatattcactcaaatatgcagggaattcgcccgaagattcaatttctcgcatccactcgctcagacgccctgcgatttgggttgacaatttgtcagacacttttctaattagctggagagttggcgcaaaaatgcttattgatttgatgccgtcgagtgcgcctcgaataattggaaaacatgggggaatttcagattccgctgttgcgcgacgccttggccacaagtgctgtaaactgcctgtggttttccggcgctgacatgtgtcttgtattttcagccatgtgaaaactgtgggcgcctgctgtcgcgtgcggaaaattcaacgccagggcaatcaatcatgcttactgctccgcccgcaaattgcggaaaaagccgttgagggacagcagaatgaatcttcgaagcggcagaaggcgatgatgtcaaaccgccgacggctgtggttctatggcaaatgctgatgaaaatccaatggctgtggctgtggctatggctatctggaaatgaatggaaacgttaaaaaaacgcagtccgtggtacaaaaccttcaggaatttgaccaccacggcgagtgctcttttggtgactcgggaaaaaagcgtttgaatttgaagttgccatgaaaagaatgttacatttctaggattcgcagtttgaaaagacaatttactccgtttttatacgcttccttcgccacgtaaaggagacagatccaattctaaaataaatccaaattcttcatcgattaggctataaccggctgtcctaagttagattagttagttctaaatacaccttaaagaagactctcaaagaagcagacatataggctcacatacagacttttaagttataggacctgtattcataccatttacgcattaaaaagtaaaaggatccattaggaccccgagttctggggacctgtcgctgacagcttaggcaactcttcaaacagttccccacctgccccagagaaatagaatttattaattgaaattcggagcaaacccgaacgacagcagcaggcgaggacaaacggcacaagataaaatttgttaaaggcgtttccagaaaaagggtttgtttctacgctgtctgccttccagcagttataattgcttaattattaaatccttctcattaaaacaggactttctttgtttcagacactataagcccctaaaatggacactgttcgcaaaacagtgaaacgtgcaagaacgcatttagattctgttttttttttttttaattgttaaggaaactgccgtacgcaatacaaataaaattaggaataaatagttgtttaagctccttactcactgatatagtgcagcagctcttttgggaaccccggggctgcaaccgcaagctagcggactggaaacttgtgccatcaatataaagctgctgcaaagttttcacctaaaactgacaaagtgctcagcgcagccacccacagacactcgcccttctcaaagttttccgggcaacccactgcaatgggctcccggcgccgaaatctatgcaatcagaagcagctgcaaaatcggcgggtcccgaggagacggatacgtccggatttagagcgggggcagcaaattatgtccgaactgcgtctcttttgggtactcggctctgcggcaaggtcgcggcttgttcattaaggtaaactggcctttgatgtaacagcttttcagaggataaaagccgctttccatgcagtgttcccgtcattggaacactgttaattaaccgattgcgaaaggggcttacactttttgcggcctactcagaaaatgttatgcacaagtggccagcgctttggtacttcgccgtgcatcccccaaacaaattcatcccacttctctcagaattgcaaatcccccggcccggtggaaagctacttcaaaagccgctcttaagcaccctgaattatgcgaaacttttctttgacacacaaaagaaattaaagaagtgcaccaaaaaactaaaatcaagaaggcgcattctgcgacacattctgtaaatcccagcaactcgacacggcaacagcgagggtgcaatcctcggtgaactcggtggcattccgaaccaccactctcgcctcgacatgagtgcacaaactgttttgcttatattcgtgcgattcccagcatacagctactggtgccgggatgttattgcataaaaagtagttcgaagcagttgggaaaatatttgaaaatgcctgggagattgaaaaccacagaggctgttctggtggggaatgctcgacttatcgattttaggagcagatgccaaagactctcgcttacaatacatttttgagggcggttatccgcactcttactcttatttttacaacttaattaacattcgtagaactgctatgaaagaaagagcaaagaactaaaatacaagttaaagcacatgatgttgtctaaatatcctcagaggtaacaaaacttaacttgagggaatacttattattattacttattattattatatctgaaataaatttaggtactattaatgtaaaccaaacactgagcaaagccgaaacaatcaagagctgtcccactaatggaacgagccgaaatgaatttctggcgaatttgaattctagaaggcatttaattaccatatccccaacccagcgtcctggtagacaaatgatgctctaatgggatgacctggaatcgcgacgagagaaccactcaacctgcccgccggctaatggaggccccgctccgttgccaactacattaaattgcgatgtcagattacggcgcctaatagaacgcaatgatttcgcattccgccagacatctggcacttggcctcctgccacccgcaatgatgctctaatgatggctatcataacataaatcttcgctggggcgggggaatttatttgtctgttcattgcctggatttggaaagcaattaggaagggcaggtgagacgatgttgcgaggagcagatggcgttgagttgtcactttatttgcttacataatggacgtccaagagtccattaaaaacttctgcacgctatttgcttatccagcgctaatgttctggtacgtatgtttagattgtttcatacgtcgagtgggcacttgtcgggagccgctgaaaaccgaacaggactaaccaaaaatccgcctgaaaggctcgttttccagccccatatagcacagcctctgtttgttttcattccggtccatagatcacaggccaaagctcaaaaatcaacagcaccaacaagtttagcaccacattcgagggccctaagtatgcttacacggacgatgtttccgagtgcgatatttgggccccggcttctgggtgttgcgtttgatttaaggctttcagcagacatacaatgcagactgggtcctcggtccggaactacaagtgcaaattgtgtaaatatgcagctgtgccggcgcacagtgatggatttcaagtttctatgcaacagtgggcaaattatgcacatcatctaccaacaatcgtctcctatatgcgagtcatagcaacagctaattgcctgttagtttcaaatgcacaatttaggctacaagtctctattaggattctaagaattgtatgcactgattgtaatcgtatcaaattactcctatttaggtacatacaaaactactaatggtcagcatcttgacaaaagattttcccacagttggaaatatttacgatttgtgattcctcaccttacgcttggagcaaactttttatgtggcaattacgtagcgaagtttgattgtaggcggccaccactgaggcgtgagctcaaaaaggaaatcatcgaggcaaaagtgttcatccagctgacgacgtcggcaacagtaaaaactgtttccccgcggggatgagttgggcagaatcaactggtggggcgccataacgagtggcttaatgaatcttgccgagcataatcctcgtttcttcgcccaattgttttcgtttgccaggatgcgccagctgtcccggctaatcaagtgcactgcccaaaggcggtggccggggtgtggtggtctggaatgggaggcgctagacggcagcacaactttatgaatctactgctttcacagctgctgggccgccggcgcaggtgtacagctgctgaaaaatgctaattgaacgaggaggcgccctttccatggtgagaagtagtcaaaaattagcatttgatttaataatgcaagctgaggagcgaggcagggtcgagatttgtcagcttggcactgaattggctggactttcagctgaaaaatgaatacgtttttaacccaaaaggaaaaggaggaaagctttttttgttgaatgccctagtaaccgtgaaatcgatttcatgcgaaaagggacttttttttttgacttttgagaggtggaaacaactgttttatatgagttttgcgcaaataaaagtaatgcaacattgtatagactacatcggggctgtaaagttgaaacctagttgaatctatccacctaggcgaactcacccgcgtagatggcctctatgatgatatcctccaagtggcggacgttgtcgatctccagttcgctgagcagcagggcatagggaatgctctttgctttaatggccagcgagacgatagtcaggtgctgcagcttcttctgcatggcaggagtcagctcgatgaacttttccggctgtgcacggtattccttgtatgtgccgtatgcgaataggttcagggtctcgaagtgcttggagtccggaccgtctttaagctatgtgtggttttgtggttggtaagttactgccagaatgtgtttcattgatggacgcacctgcaaaacggatggctccgccagtaattcgccaaaaacaaagacattcggggcttccagggcctggcgaatcacatccagcaaagcggcgccggtggatgacttggccaggacacagaacttctccaggaacgtctccttgctcttgctcggctcctcgttgcccagcagcatgtcctgcgtcattttgataacttcaagttggataatttgtttttaaattttgggattgttttgatttttgcaagcacagtgccagtgtgaccgttcatcgatggccaaattatatcgaccgaagtttatcgaagtttcaattcattctatcttattagtgtaatgagttctaactatttcttactacgcacatgacaggacatacttacgatttaattattgtatatctagccataaaaacaaattacagtttttataaaaatattatttgtgttgccctataataaaattagtttaaattacagtgcagagtaaatatactaaatttggtacggtaaacagaattaaggtcacactattatgtctcttgcacaagctgactgccataaaagtgggcgccaagcttaaacaatctgaagttggtcaggccctgtgtgaaaaagtaaattaaaaacttaagatttatgcaaccttagccacagatactaacccgttcattatgcttatgattattttatgttctttggggatacctcctcgttcgctacattgtttttttctaataacagcctagcatttgcactcacctcttggaaatgttggtcattatgttaaagcagggcatccccattttaaaacacttttcgctccacattccatccggcggcacacacagacgcaccctagggggctgtataaaaaaaggagagaagagggcggaaacggcaggctgggcctaaaaaaatatattccttgagctactttggactgccaaaactttgcgccagccacacttgctattattgctgtgggtaggggcggatatgcgaatacgagtataaaaaggctagggtcaaagttgaaaaccctttattgtgtctggggggttgacttcggcatggaagtgggagtgagcgtgattgggaccgccattccctgtatgagatgcgccagctcatcgattatgaaaagttaactaaaggtcagggacccacggggatacacacactcacacacaggatctcacaggaaaaaggtgagcccgagccttaaagatactgcgtctgttttaaaattgcccacagcacagtgttc

SEQ ID NO: 3167 - DNA, 1197 bp, DROSOPHILA
aacggtcacactggcactgtgcttgcaaaaatcaaaacaatcccaaaatttaaaaacaaattatccaacttgaagttatcaaaatgacgcaggacatgctgctgggcaacgaggagccgagcaagagcaaggagacgttcctggagaagttctgtgtcctggccaagtcatccaccggcgccgctttgctggatgtgattcgccaggccctggaagccccgaatgtctttgtttttggcgaattactggcggagccatccgttttgcagcttaaagacggtccggactccaagcacttcgagaccctgaacctattcgcatacggcacatacaaggaataccgtgcacagccggaaaagttcatcgagctgactcctgccatgcagaagaagctgcagcacctgactatcgtctcgctggccattaaagcaaagagcattccctatgccctgctgctcagcgaactggagatcgacaacgtccgccacttggaggatatcatcatagaggccatctacgcggacatcatccacggaaagctgttccagaacacacgaattttggaagtggactacgcccagggccgcgacattccgcccggatacactggccagatcgtggaaacccttcaggcgtgggtcaactcctgcgacagcgtttccaattgcatcgaaatgcagattaagtacgcgaatgccgagaaatctaaaaggctgattaacaaagagcgcgtggaacaagatgtgagtctcatcaatcttaagaaggttttaaagagccagacctcggatagcgatgagagcatgcaaatcgacacccacggaccgggaaccagtggcggactgggtcaatcggagctaaggaagaagccctccaagctgaggaatccacgcagcgcggcagtgggcctcaagtttagcaagtgagatgaggacggtcgagcggacgaggagtccgaagctggttccaacggagccagccgacgcccaaggtcgcaggcaactccacgcggcacctgaggggcggaaaccgctcggctttcggagaaactcgcctcccagctaatcccatcaaaactcagttcgattcaccagataaaggctgtcctcgtgaaggattccataattagcatcaaattgatcgccaataaataacaaatacaaaacctgtaataatagaaaccatacgtcaaaattc

SEQ ID NO: 3168 - protein, 280 aa, DROSOPHILA
MTQDMLLGNEEPSKSKETFLEKFCVLAKSSTGAALLDVIRQALEAPNVFVFGELLAEPSVLQLKDGPDSKHFETLNLFAYGTYKEYRAQPEKFIELTPAMQKKLQHLTIVSLAIKAKSIPYALLLSELEIDNVRHLEDIIIEAIYADIIHGKLFQNTRILEVDYAQGRDIPPGYTGQIVETLQAWVNSCDSVSNCIEMQIKYANAEKSKRLINKERVEQDVSLINLKKVLKSQTSDSDESMQIDTHGPGTSGGLGQSELRKKPSKLRNPRSAAVGLKFSK

SEQ ID NO: 3169 - DNA, 3814 bp, DROSOPHILA
agaattgtacgtgaaataaattttagcgaatttattttgactgaacgcagtaatattcgttcttggctaaaagcgaaagtcgaattaatagtaaagctgactcttaaacctaaaaaccgcagcattatctttaaatggtaagtgcattgattcgtctgggttttgcatccaatccgggttttctccagaagtctcctgcggtaagatgccgtcttgggaaaaccagaataagagattcccaggcagctatcactaattcatgatcaccaattaatctattcggaacagttatcaaacctgatttagcagccaatatatttagtctataattcaataaatcaatatgcatttaaatatgatttttcttttttcctttgtttttcattaaacctcatatgtttgcacagcaagagaaatagaatttatcaaagaaactatgcaaaaatatttatttgctatgtatatgcaattacaattaaataattaaagcaagtgtataaacaaatcaatagcaccaatgcaaagacattcttcttttcatctcgatcttgaaatatttatatttaggtattttcattaaaccgtcttatcagctactgtactgcacttttttttttttaataaacacaaagagaatcggtcattttgcaattacaaatacgaatgctcacacttcccttcgttacgacctgataactgaaaaaagaaaaatgtgcaacgaaaagcagtggatttttgcggtgcgaattaaatggcacacgtatgagaatataattacgagtatattattaaatttattgagcgactggaagcgcgattggaaggcggcaacgggttttcccgcccagccgcaatcaatgagaatcgatccgatcgtagctaatcaacgcagcgtcggcgatggaaaaggcaaatcaaaagccaatctctgagattcaaaaagcttccgagggtcgcggcttgaggttgccgatcgccagtagatcagtagttgattgccagccaccggggacgcagctttgctagcgactcgagaatcaatcggagcggaaaataggaaaatagaaaattgataggaattagaaaataggaaaacctcgcaaaatgctcctgctgataccgcttttcctgacccttttgggggctgaggcccagcaatttggcagtgagttttactcaagaccaccgctccttcgagatttcctaacccattttcaatcctttagaagctatcatgcattttggcaactgcaactcggtggaattcggtaggggcacctgtatcgagaagaaggactgcgacttttatgccgtagataaacttatggaattggccagcaaacaacagtgcttctcccgccagcgacccgatctggtaagtggtattatatactatatatatgtatatattcgcccgatgttcagcaaacacgtttcccaccatcaaccagttttccacgctccgtggagatcttcttcacctgaataatgctatttattagcattaacagctattttaacagtttatttacgtcttactttgcgatttgtacataattgattgtaatacattttttgatttaaacggaaattagagagctattaaaaaaactaaaacggctgatatacccatagtaaaacaacccaatcttcacttgagcttatagtttttattttccaaaaatgtttatatatacaatgcaccataatatatatatatcttatttatttcccattaggtttgctgcccccgcgagacgaatattataccgccattggcacccaggatcagtaatgggaccactaatgccacgagcagcaccacaacgctgaaactgctgcctcgcaccacgccacgcccacccagcggtatcgaccaactgcccgagcatccgtactgcggctccgccttttcgtttcgcttggtcggtggtcataataccggactcttcgagttcccgtggaccactctgctggagtacgagacagtgagcggtggcaaggactatgcgtgcggcgcatcctttatcgcccagagatggctcttaacggccgcccactgcattcacacaatgggcaggaatctcaccgcagccattttgggtgaatggaatcgggacaccgatccggattgcgagaatgatttgaatggcgtacgcgaatgtgctccgccgcatatccgggtgaccatcgatcgaatattgccgcatgcgcagtactcggaattgaactatagaaacgatatagccctgctgcgtttatcacgtccggtgaactggctgcagatgcagaatctggagcccgtctgtttgccaccgcagaggggcaggtatgccaatcagctggccggctcagccgccgatgtttccggctggggcaagaccgagtccagcggcagcagcaagatcaagcaaaaggcgatgctgcacatccagccgcaggatcagtgccaggaggcgttttacaaggacaccaagattacgctcgccgatagtcagatgtgtgccggcggcgagattggcgttgattcctgcagtggcgactccggcggaccactgaccgtagaggcaaacacggcgagcggcaatcgatatgtctatctggccggcgtggtctccattggacggaaacactgtggcacagcgttgttttccggaatttacacccgggtcagcagctacatggactggatagaaagcaccattcgagccaatcgcatttaagcgactctcgactttcgtttccgttttcggctatttttgggcacccataacgcaaagtcaagctcattgtgaccttcaatgacattaaaagcaatttttttgaaatacatacaatatttattatatgtttttttttttacatgaagcgcagtgactttttttatttgtgttttcaactaacgaaaaaaatcccatattgttcaaagcattccaaatcccttgtacaaatgtgcagacagtgtatttgacgttcgggagcatatgacttattggcaacggtgcgtatgaaatgcttaagcagctaccacaggggtttcccccaggaaggttttccctctctttttatttgtctcgttttgcggatcgtcatatcactgacgtcactgatttccggcgtgcaatttactaaacatgtcaacctatcgcctacaatctcgatttgggtctagattaaactgtttgcccatgacacggaaacgcttaaaatgatgatgatgttggtgatgtacgcccagtaactgcagattgctctgatttttagcgaaaatatactggtgacatatgaagtgtactttgaaagcggtcggattttcttttacaaccaactattactaatttaaactgaatgtgtactctgctcttccaagtgaatcataggattcaaacaaattttacaggaaattaaacagtcatcttagaaatccccttggcataactttcattttaagaaattatcttttttcattttatttataattgaataaggttattctacataaaagacaccacatttgtaatatggaacggtagactgaattcattagaatttcgaatttactgtattccctttacattaagcaatttgcccgccatttttcacattttttgcgtagcttctgtggcgttttggtctttttgcagcttattcagaattttctctctgcaatctatttgttgaataaatatcttttcttatgccacggcaaactttcgtaatgtaatacgtttaagcaaacattttgcgcaattgaggcgacaccatggttttttatcattatcgacatcggtttattacttatcattattactag

SEQ ID NO: 3170 - DNA, 1389 bp, DROSOPHILA
agccaccggggacgcagctttgctagcgactcgagaatcaatcggagcggaaaataggaaaatagaaaattgataggaattagaaaataggaaaacctcgcaaaatgctcctgctgataccgcttttcctgacccttttgggggctgaggcccagcaatttggcaaagctatcatgcattttggcaactgcaactcggtggaattcggtaggggcacctgtatcgagaagaaggactgcgacttttatgccgtagataaacttatggaattggccagcaaacaacagtgcttctcccgccagcgacccgatctggtttgctgcccccgcgagacgaatattataccgccattggcacccaggatcagtaatgggaccactaatgccacgagcagcaccacaacgctgaaactgctgcctcgcaccacgccacgcccacccagcggtatcgaccaactgcccgagcatccgtactgcggctccgccttttcgtttcgcttggtcggtggtcataataccggactcttcgagttcccgtggaccactctgctggagtacgagacagtgagcggtggcaaggactatgcgtgcggcgcatcctttatcgcccagagatggctcttaacggccgcccactgcattcacacaatgggcaggaatctcaccgcagccattttgggtgaatggaatcgggacaccgatccggattgcgagaatgatttgaatggcgtacgcgaatgtgctccgccgcatatccgggtgaccatcgatcgaatattgccgcatgcgcagtactcggaattgaactatagaaacgatatagccctgctgcgtttatcacgtccggtgaactggctgcagatgcagaatctggagcccgtctgtttgccaccgcagaggggcaggtatgccaatcagctggccggctcagccgccgatgtttccggctggggcaagaccgagtccagcggcagcagcaagatcaagcaaaaggcgatgctgcacatccagccgcaggatcagtgccaggaggcgttttacaaggacaccaagattacgctcgccgatagtcagatgtgtgccggcggcgagattggcgttgattcctgcagtggcgactccggcggaccactgaccgtagaggcaaacacggcgagcggcaatcgatatgtctatctggccggcgtggtctccattggacggaaacactgtggcacagcgttgttttccggaatttacacccgggtcagcagctacatggactggatagaaagcaccattcgagccaatcgcatttaagcgactctcgactttcgtttccgttttcggctatttttgggcacccataacgcaaagtcaagctcattgtgaccttcaatgacattaaaag

SEQ ID NO: 3171 - protein, 397 aa, DROSOPHILA
MLLLIPLFLTLLGAEAQQFGKAIMHFGNCNSVEFGRGTCIEKKDCDFYAVDKLMELASKQQCFSRQRPDLVCCPRETNIIPPLAPRISNGTTNATSSTTTLKLLPRTTPRPPSGIDQLPEHPYCGSAFSFRLVGGHNTGLFEFPWTTLLEYETVSGGKDYACGASFIAQRWLLTAAHCIHTMGRNLTAAILGEWNRDTDPDCENDLNGVRECAPPHIRVTIDRILPHAQYSELNYRNDIALLRLSRPVNWLQMQNLEPVCLPPQRGRYANQLAGSAADVSGWGKTESSGSSKIKQKAMLHIQPQDQCQEAFYKDTKITLADSQMCAGGEIGVDSCSGDSGGPLTVEANTASGNRYVYLAGVVSIGRKHCGTALFSGIYTRVSSYMDWIESTIRANRI

SEQ ID NO: 3172 - DNA, 3552 bp, DROSOPHILA
tttagaaaatgctgcagtccacaggtgactcctcgacggcctgctccacgttggtggccgagctgcacaatccgtacataaacacgaaattctgcaatggaggcaacctgcacatcgcctcaccggagcacggggtgctccacatagccgaatatgccaagcgggtgattcggagcgagagtgacgccttatgagatacgtgaatctgcctgttatctaatcttatctaatcgtagctactgttttattccacacttgctgtaggtcaattccatgaccttttgacagacgcatgacaattccaaaaaaaaagggaaaaaaaaggattttatattgtaatcgattttataaaacgaccattttaaaccaaaaccaaccaattgattgaattgaaccaaccaattgaagctttaaaaagccatgaaaatgcctcgaaaacgagagaaatatgtaatagaattaagtattttggttaaaccatctttatgtttgtaagcagtgtaaatacatgtgtataaatgcagagcagttccttatgccaaactatatgtgatgtgataattatagcgtgtagcccaatttggagacccaacccaaaccctcgacagtggtcgtcttcggcttgtactcgcaaccgatccatccatcatagccgaattcctggagagccttgaacacaaatccgtagtccagctcaccggaaacatccggctcgtggcgatgcggcacctgggcgatctgaaagtgtccaatcagcgccttgtactcctcgagcgtcttggaaacgttgccgtgcaaatgctgcaggtgatacagatcggccagcaattgaatgttgtccgcagccacatcggccagaattccagcggctttggagtatgaattcatgtagtagccaggcacggcgtacttgttaattggctctatcacgccgatcattttactggctctaaggctatcggcggcgatctttagattggcggtatacgtcttcgtgtagtcactctcctggccgcccttgaagagtccagcggttagatgaatcttgccacagttaacctgtcgggcgaaatcaatggtggcatccaattggctacggaacagcttttccgagccgggcacactggtggagccgaaacgcagctgatcgtcgctcttgtcgaaggccagattcaccagactgaccaccacacccgtctcctttacggcggacaccacgtcgctcgtctcgccttcgggataggggatctctaccgcacggaatccgttctggtgggccagacgaattcgctccgcgatcgacgtcgctctttccgtgaacaaaaagttcagattcgctgcaaacttgagtgccatcttccgttcactaatctccgcctgcgttcacgcttggcaaacaactgggggggaacgatgcgattacccgttttttatattatatctaccgacttttgatactgccaatgtcatatggagcaggagcttttccgaccaaagctttgcgtgatatatgtacatacatacgtaggttttaagttatttagctggcatcagaaccattatttagaattagtatattatttaatttagttcgtcgttagttaaataaaatactagttctaacactcgtagcgttaatatttttaatattattattattatttagtattattatttaatataaaacctgtgtgaaaagcattgactccacctagcggacattaagggaaccattaaataagacgcatgttttgggtcaacattttaattttcaatttccaaaccatgaaatacaaaagcagtggagaaaatgtgaatttggtttaaagagttcaaaactgttaattttgaaaagcaggcagccttcgtcttcacatccttactccttcgaggctaccgtgtgctttgactagttcttttgagagttttgagttgacaatgagcttggccaggaattaaaaaccgacgacgtcacgatatcagtggtctctttggagcaccatgtgaatgtcctggctatcctcgtactggctatcctcgtcttcgctatccttgccgtggctatcctcgtactggcaaccctggtcacggctatccttgtactggctatccatgccgtggctatcctcgtactggctaccctggtcacggcaatccttgtactggctatccttgccgtggctatcctcgtactggctatcctggtcacggctatccttgtactggctatccatgccggggctatcctcgtactggctatcctggtcacggctatcctcgtactggctatccatgccgtggctatcctcgtactggctaccctggtcacggcaatccttgtactggctatccttgccgtggctatcctcgtactggctatcctggtcacggcaatccttgtactggctatccatgccggggctatcctcgtactggctaccctggtcacggctatcctcgtcctttttatccgtgtgctggctatcctcgtcctggttagctttgcccgtgcaaaggctactgttaatcgtcgcctggcaagtcgcaactttacctcgtatagctgtcgtcttcaccttcaccaagcgaaaacgatctttggttgtcaattttgaggatccgataccgatgttctgatggtcacgagctaccagtgcatcgtagccagcgcatttatccttagtgtgattgacattgaaaaagtgtcggaaccacacggcaaatttaaaattttctaccctgtggcccttgatcaaatcattgacctcagctggtaggcttacatttaccttattgaaggctttttgaagttccttgaaattgttaacgtactcgtattcttgattcgaaaaaaacttaactcgcttcaaattgatcagtttgggataaagcatatgcatcaaattacaataggctgcaccggtgcacaactgttcgatattgattaggttgcattggagcgtctcgttgaaccaatcgagaatatcgccacgggaccactgaaccaacgaattatgcgtgacggtcacattgtgggccctcgaagtagccatcgcaagcgaattctctatgtgtctacaagctacttaaaaatacattagcgatgtcttacttggtcattcaacaatcacttacccaaagaaagttgtacaggagcacgtatggtttgccttgttcgattagttttttcgcaagaaagttgcttttggaaaattttggaaaaatgtaaaatatcatgcagcgcgcgtaagccaaagtgaatacaaagttgaccttttcgttttaccaaaatattttgaaaatgtatattggaaatgtgtagttctgttgctttgtttttacgaaattgtatgtacaaattgtttaacaatcggggtatatattatttgtgtgttatgttcacatatcaaatgctcacattggactaaggttttgtccagtctaaagttatgacacaaatgaaaattcatttcatggcctacatgatttgaaaatttttcggcactttttcatggcctgcccatcagattttactgtctagccatgtttgtt

SEQ ID NO: 3173 - DNA, 915 bp, DROSOPHILA
tcactctcctggccgcccttgaagagtccagcggttagatgaatcttgccacagttaacctgtcgggcgaaatcaatggtggcatccaattggctacggaacagcttttccgagccgggcacactggtggagccgaaacgcagctgatcgtcgctcttgtcgaaggccagattcaccagactgaccaccacacccgtctcctttacggcggacaccacgtcgctcgtctcgccttcgggataggggatctctaccgcacggaatccgttctggtgggccagacgaattcgctccgcgatcgacgtcgctctttccgaattaaaaaccgacgacgtcacgatatcagtggtctctttggagcaccatgtgaatgtcctggctatcctcgtactggctatcctcgtcttcgctatccttgccgtggctatcctcgtactggcaaccctggtcacggctatccttgtactggctatccatgccgtggctatcctcgtactggctaccctggtcacggcaatccttgtactggctatccttgccgtggctatcctcgtactggctatcctggtcacggctatccttgtactggctatccatgccggggctatcctcgtactggctatcctggtcacggctatcctcgtactggctatccatgccgtggctatcctcgtactggctaccctggtcacggcaatccttgtactggctatccttgccgtggctatcctcgtactggctatcctggtcacggcaatccttgtactggctatccatgccggggctatcctcgtactggctaccctggtcacggctatcctcgtcctttttatccgtgtgctggctatcctcgtcctggttagctttgcccgtgcaaaggctactgttaatcgtcgcctggcaagtcgcaacttt

SEQ ID NO: 3174 - protein, 274 aa, DROSOPHILA
MNLATVNLSGEINGGIQLATEQLFRAGHTGGAETQLIVALVEGQIHQTDHHTRLLYGGHHVARLAFGIGDLYRTESVLVGQTNSLRDRRRSFRIKNRRRHDISGLFGAPCECPGYPRTGYPRLRYPCRGYPRTGNPGHGYPCTGYPCRGYPRTGYPGHGNPCTGYPCRGYPRTGYPGHGYPCTGYPCRGYPRTGYPGHGYPRTGYPCRGYPRTGYPGHGNPCTGYPCRGYPRTGYPGHGNPCTGYPCRGYPRTGYPGHGYPRPFYPCAGYPRPG

SEQ ID NO: 3175 - DNA, 6651 bp, DROSOPHILA
gtcaatcttggccagcaatcttatgcagttaaaagcaggaaaagattgatgtttcaattgatgttcctacctaagtgaacaatagataacattcgaaacgtgtctaacttcaatttatttataagccacttgaaaagtcaatgaatctatctaatttgcgaatcttcgccttgtttacgcaggtgaacacacccaaggactccgtgcaaattcccatcgccgtattgaaggccggagagacccgcgccgtcaatcccgacgtggagttctacgagtcgaaggtgacattcaagctgatcaagggcagcggacccgtctacatccacgggcacaacatcaaggacgatgtggaggtggtcgacatggaggaggatgacgaggaggatgatgtcgccgaggacgaggaggacgagcacccaaagaagcgcgccaagatcgagaacgccgccgatggtaaaaatgccaagaacaacaagaagaagtaaactgctgaccgccaatcatccatcgaggtttaagctatgaacgtgtagattttaaagcaaaaacagttttaggccctataatacaatacgatgcatactgagaatacaatctagttccttttgaacagctccttttacattcaattcaaagacaacgttgtgtgctcggtcgtgtttccccagcgaatggtctgtcgctcagccaggagttccgcacccggaagcgggagcggatcggactgtgactgatccggacactaatcgaacacacagatttgtatatatattaaagtataactaaagctaagccggacttcctgtacgcgccccttcatatttgcagtatgaaaataaacttgtcggaatacaaacaatattattgcattttactaaagtgggagttcgttttaaacgctctcttacactgatgaactaagtggcaactataaatacttatcttccccgtttagcaaacattcttgaaaccaggcatttaatcaatttcagttttatttctcccatcaattcgttactcatcaattgaaatttcagatttggtaatgctaaagggctatcatgattgcagttctatgaagtggatcaaagcgatatcgggaatgccttcaaagattgcgggtcgctgctagtaaatagtgatctctagtgcttcttcagtgcttgcttagttcggcgagggcataaccttgatgcgctcgaaggcttgtttctccagggtctcgcggtgcttgggatcggcgatctggatgagttcgtacatcctctggcgcacgttcttgccgaacagcgaggcgattccatgctccgtgacgacgtagtggacgtgggcacgcgaagtgacgacgccagcgccttccttcagcgtgggaacaatcttgctctcgcccttgttggtggtcgatggcatggcaataattggcacacccagtccatcgagaccctccgccgctccgcgaatgaagtccacctgtccgccgaagccggagtagaagcggggaccaatcgagtctgagcacacctgtccagtcagatccacctcgatgcagctgttgatggccgtcatgcgaggctgctgtttcacaatgctggtgttgttcacatagtcgatggcgtacatctctgaaaggtggacagtgaggcattagatcgagctcatatcccatacattttcaattcaacttcagtgtttcagaactaaacctaccgatgaagggattgttgtccacgaagtcatacagagccttgtcaccgatgaggaaggagcccacaattctgccctggtgcatcttcttcttgctgttggtgacgcatcccttgcgcacgagctcaacgacaccgttggcgaacatctcggagtggatgcccagatccttgtggttgtgcagggcggcgagtacggcgtctgggatgctgccaatgcccatctgcagggtggcgccgtccttgacgaggttctcggcaatgagcttgccgatcttcttctccacttcggaaatcttaccagttccgtgctgaggcagatcatcggtcacctcgatggcgaggtcgaagtgagacttgtggatgatggcatcgccgaaggtgcgcggcatcttgggattgatttgagctaaagaaggagtagcattagtcccactataaatcatacaactgacgttcacgcaactcacccacaatgagcttcgagttgagcagcgcagcgcgcacacaatcgacgctggtgccgagggagcagtagccgtggttatccggcggcgacacgtggatgaaggacacatctggctttacgatctgcttgtagaacagattcgggatctcgtgaaggaagatcggcacattatcgccacgaccgtcggcaacagccttgcgcacgttggcgcccatgaagaaggagtttgaacggaaatggtccttgtactccggcttggcgtactcgccaggaccctccgtgtgcatgtggcacaccgtgacgcactccaggttgttgctctttccgtgcttggccatcgcgttcagcagagccacgggcgtggcggctgctcctccggcgaaaaccgtgtcacctgaatggaatgaaggcgagaaaccgcaggttttattaccaatatttttattacgcacacgctgctaatcagtcaatcggcagttattgtacactttaatctattcagcaggtcttatctaaagatttgcatgacatgctatccgagcgcctacaaataatgcttttcaatattgtctaattaaattagttatgctttgagtgttcaatgataacgaaataaccaggattactatcagttcttgaactttatgatatcttaatttgaagagcgtggcctaatccattcaatggaatcctgagctggcaattaatgcacttcgaaataaaataagtttataatgtcgctaagagaaaaacttgttttgaaattagaacactctctgataattgataataaaaaacattcatatatatatttatattgttattaaaattgttataaatagtaatataaacattctttagagctttaatcagcaaataatgtttctctaagtcattcatggttatttacatatttttattgcgctggtcatgctttcattgagactataaatttgtttccaaaacgaattgttccgaaattcggtaattttctctctgatcattccacttgctctcgaaagcttaaaagctatagctatacatacatacattcatatgtaaaaatgtatattagttaataggcagagtgataatgcgaatgcgaggagtgggagcgcttattgcccagaaacgcgtgataatgaatgtttgtaaataaataacaccggtttcccagttggcattacatggcaaacatgtcgattcgagattatagtataatatatagattttgtcatttgattaacgagccagaaagtagaagcacatcaattgatcaaaatgtatctgattgggctgtgttacgtaagagaattgtagcttttaatcggaactttgggacgaatgatacttgtatacttggtctataaaaatgtataaattttgtatctatttaatacacatctgaattgcatctctaatgcagtcttaagcacatgcaacatgtttggccaatctattttggtctcccccctgaagaggctggcattccgaagttcctctgtatgagggaatagaaagaaccatgatgtacattaagtcgaacgagcgagccccttcaactggggtaatcatgcgataagtgcgattcttatcggtagacgtctgagccacgtcgacacacacggtcaagttttccgcgaggcttcacaatcaatttatttatttatttaccgttacttgaaaaggccaattatgcatttcttacgcataggcttagttagctagtgcctactgtaccacttattatctgccaaaaacgtgccaaacgaaaaagttttccaaatcaaattacgtcgcagatttggcatggctcgtgttggtgattttggctaaaattagagataccgattttgggtgacgtttcgctgggcgctgcgatgtgccactccccctccaaagacccgcccccctccgcaatatcaccaatttgcagggacctgctgatgagatgccgtagaagtgctaagaaattgagatttaagcgggcgccgagggcgtgtccacatatttgtttgcatctgaatcccaggagactcgcctccaaattgggacaattgaatttaatcagagcagagggttcccaaaaatcagatgactggtttcgttaaacgaacatatacaaattatctaacagatttatcgttttgataagaaagcttgttaggaattaatgaatatttttcgaagcactccattcatgcttttgtttccataattcacctgctgatacacgttgcataaccttgccttcttatagaggtgctgctatataccatagtatatggtatataggttcctacagagagcaggccttatcagcaccacatccagaggccggctgacttgtttatgagctacatacaaggttgttcttgccaccaagctgagctttgcatcggacctttctcttctttttgcccggggtacaaagtacaacttggctggaaactcatctatagcgccgagtatactcgtatgcattattaaatgtgtataaatatctacatatgtacgtggtaggggcacgcacagctggtttcacgcgattaaatgaatataacttacagttgtgctgctgcaacaccaggaattacgaataaaaacatggggtctactgatagccgccacaaggaggatagcattttgataagggcagctacttgaagtgtgatttccctattgtataactcccctaactatttatcatactagaaccccaatcaactaaaaacctattccctatcacaaggtaatacaatacactaaatatttgattctaacttgtgtattatatatccccacgagtggctcctaatcacggtcaattaaatgccagccatccatatacccagcaccctgtgagtgcccttccctatttacgtacatatgtacgtatgtacatgcatatgtgctccaaagtagtttggattgcgggcacacatgggcttacatttgcatggccccacaacccggtgttctcgttttcattctgttttcataagcaagcccactagaaggttacataaccgaaagattgcaaacagcgcaaggcagcgataactgggaggccagttccgctaggacggtggaagggggggcgtggcgggctcctggccaaatgatatgggggccagtgggactcaccggattttacacatgccacggcctcttccggcttgacgattggaggctctcgagcgatgggatgcgacagctcccgcacgtaggtgaagtagttgttgtgggcggagaccgaggaggcggtggccgccgtcttcaggaggctgttcagctggcccacatggcgcgccaattgtttgctcatggtggactgtgtagtgtagtagtgtgtactgagtactctgttgtaggcacgcacgtcgcaaagggttaagcgagaagtccgcgagatgcaggaggcgatgagtggtgggttttcactggggagagactgctgcgctgagttccgtccgctgcggcaccaaatttgcaactggttcgccaagcaaaaacgccataaaagctccgcggcgaaagctctcttccaccgatcgcaatttaatcccgcccagctgcggcctactcctctgcacttcgtagcactcacgtagatgtactcatttgattgtttaatgtgttccaatgtggtaaggaattttgaaatctattgtttctttccacattttattttgatatttcaaaaactaccagctgcctgtgttgagcaacgcacgggcagttcgataataccggctatcgatatttatcgattgttggtgcatttggcgccacttttgaacgctgataagtgcaattcttaggcgaatgaaacacattgttttggtttttaaagtctatactggtagagcatttacttggcgtttattcactaggattattcgttcgattaatcaaaattcctaatacataaaagcgctttggactaacgattaaaaaataacaaattacattagttccgcgttaatatcataaaaagaccttatgtgatgtatacaacgcaattcctctatgtacaggcttaaaacgtaggctcgtagatatatcaaaagtttgatctatgatgtattatagcgcatgtgctgtaatacattgctatgactagtttatgcgatttgctgcctctagatctagactcaaattaattggccgcttgcgaaacggcttcggcacaatctggggatacgagttagtacatatgtatgtatgtgtatggtctatcgctagtattcgtaggtttagtttctggtttcagtttgaaggattgccgccccgtcgcttggaactctgtcgatctttggatctggacggagcctaaacacttccagtgatgatcgacaaactgaagggcgaacggcacaagattggaggttgcaacaacacggcgattccaattgaatgtgtgactagagggttacttatagtatgagttgtgcagcgccggaggcgagggtcttt

SEQ ID NO: 3176 - DNA, 1752 bp, DROSOPHILA
cagcggacggaactcagcgcagcagtctctccccagtgaaaacccaccactcatcgcctcctgcatctcgcggacttctcgcttaaccctttgcgacgtgcgtgcctacaacagagtactcagtacacactactacactacacagtccaccatgagcaaacaattggcgcgccatgtgggccagctgaacagcctcctgaagacggcggccaccgcctcctcggtctccgcccacaacaactacttcacctacgtgcgggagctgtcgcatcccatcgctcgagagcctccaatcgtcaagccggaagaggccgtggcatgtgtaaaatccggtgacacggttttcgccggaggagcagccgccacgcccgtggctctgctgaacgcgatggccaagcacggaaagagcaacaacctggagtgcgtcacggtgtgccacatgcacacggagggtcctggcgagtacgccaagccggagtacaaggaccatttccgttcaaactccttcttcatgggcgccaacgtgcgcaaggctgttgccgacggtcgtggcgataatgtgccgatcttccttcacgagatcccgaatctgttctacaagcagatcgtaaagccagatgtgtccttcatccacgtgtcgccgccggataaccacggctactgctccctcggcaccagcgtcgattgtgtgcgcgctgcgctgctcaactcgaagctcattgtggctcaaatcaatcccaagatgccgcgcaccttcggcgatgccatcatccacaagtctcacttcgacctcgccatcgaggtgaccgatgatctgcctcagcacggaactggtaagatttccgaagtggagaagaagatcggcaagctcattgccgagaacctcgtcaaggacggcgccaccctgcagatgggcattggcagcatcccagacgccgtactcgccgccctgcacaaccacaaggatctgggcatccactccgagatgttcgccaacggtgtcgttgagctcgtgcgcaagggatgcgtcaccaacagcaagaagaagatgcaccagggcagaattgtgggctccttcctcatcggtgacaaggctctgtatgacttcgtggacaacaatcccttcatcgagatgtacgccatcgactatgtgaacaacaccagcattgtgaaacagcagcctcgcatgacggccatcaacagctgcatcgaggtggatctgactggacaggtgtgctcagactcgattggtccccgcttctactccggcttcggcggacaggtggacttcattcgcggagcggcggagggtctcgatggactgggtgtgccaattattgccatgccatcgaccaccaacaagggcgagagcaagattgttcccacgctgaaggaaggcgctggcgtcgtcacttcgcgtgcccacgtccactacgtcgtcacggagcatggaatcgcctcgctgttcggcaagaacgtgcgccagaggatgtacgaactcatccagatcgccgatcccaagcaccgcgagaccctggagaaacaagccttcgagcgcatcaaggttatgccctcgccgaactaagcaagcactgaagaagcactagagatcactatttactagcagcgacccgcaatctttgaaggcattcccgatatcgctttgatccacttcatagaactgcaatcatgatagccctttagcattaccaaatctgaaatttcaattgatgagtaacgaattgatgggag

SEQ ID NO: 3177 - protein, 477 aa, DROSOPHILA
MSKQLARHVGQLNSLLKTAATASSVSAHNNYFTYVRELSHPIAREPPIVKPEEAVACVKSGDTVFAGGAAATPVALLNAMAKHGKSNNLECVTVCHMHTEGPGEYAKPEYKDHFRSNSFFMGANVRKAVADGRGDNVPIFLHEIPNLFYKQIVKPDVSFIHVSPPDNHGYCSLGTSVDCVRAALLNSKLIVAQINPKMPRTFGDAIIHKSHFDLAIEVTDDLPQHGTGKISEVEKKIGKLIAENLVKDGATLQMGIGSIPDAVLAALHNHKDLGIHSEMFANGVVELVRKGCVTNSKKKMHQGRIVGSFLIGDKALYDFVDNNPFIEMYAIDYVNNTSIVKQQPRMTAINSCIEVDLTGQVCSDSIGPRFYSGFGGQVDFIRGAAEGLDGLGVPIIAMPSTTNKGESKIVPTLKEGAGVVTSRAHVHYVVTEHGIASLFGKNVRQRMYELIQIADPKHRETLEKQAFERIKVMPSPN

SEQ ID NO: 3178 - DNA, 2558 bp, DROSOPHILA
tttgtaaataacatagatattaagaatagtttaaattgataccgataagattgggttgcctaagaagagcgtactattgctagtcaattaaattattgtaaataatttcgtttaataaaaaaaaacattgtgtgtatattttatctctagtttccgttaagtcaatatgaacattcccgtggagtttgacatatacaatgtatacgattcttacttatacaatcactattaaacacttaagttacaatatcataatataatcaaaaatccgaaagcacagcaatttgattgatatttctccaaaaatcactacaagatcttataaccgtgtaacctcagggaagtctgtgttattttttgttacgtgtatgactatttaaaaaaggttaaaaaaaagatgaagaatttgatttttacatctaggcttataatgccaatttcagttatattcataaaaagaccaatataaaaacaaaaattcgactcggctagtgataatgatgatgaatatacatactttttaggttcgaaaacgcttcataatacccttaatacccataataccgacatgcgttctaacaattcaagtgtacccttatcctctacaaataatagatataaaaaagttcctcgtcgttttcatcatactgcgatcttatctgggatgcatcaggttggcaacatttaattacttgtggctgcctatgaacttaacttaaaataataactagttataacccagttttcggaaatatgaaattaatgcaaggagatatcggcttgtccaggtaagatttttgtaatgtttacatttattttagatgctttaaagatttttgtatttaaattaatttcgtactatactataacaacacaattgtaatttaatgaaggccaaagtgtctttgattacttttaatcttctaattgtaccttcttataccatataataccgggagccttctcttaaatcgaactgtcagatttgtaaaacatgcacttggtttatattgcaaggtttaatttattttcgaattcgataacattttccttaaatttaaaacaactggtaagaaattatccaaactcaacctagctgtctccaatctttcatgttcctagtcggcgggttcacttagttcttgctggggttagcctcgatgtaggcgatagccttcaggatggcagctgggatcggaggaggagtgggcagcaggtcactctggggctggtatccgttctcgtcagccttgtagctcactcgcacatggacaccctcgggggagatccactcgaagactccgtcgatgttgccgtggatgtctccggtggcggaggaggcagatccgtcgtcgaggaccaacttgctgacaaagccatcgggctggacatcgttgaccagctccttgacctccacattagcgttggcggccaccagggcggcgagagaacagacaagcagctaggataatccaggattagactgcgaagtcactatgctcctcaaggcatacttacgatcttgaacattttgatttgggtggattgtcggactagaaatcttctaagactgatgacaatctatgctcaaatcggtgtttatatatcatcaaaagctgatgcaatgtgcgtattataattaagtcaatgtgatgcatataataaaaaccgtctgggatgcaaattagtcgacttgagatggcttaaccactttcattaggagatgagcattcttagttatttattcaactgaaatattcgccctagtctaaccgaaatgcaaagcaaaccggaccagaaaccagaataattattaagcagtacaatatttaattttctaaaattcaacttcaatatgaactaaacttaagcatagcatagttttcggtgtttcatttggtgtgtggcacgttgacaactctggccaaaagctttgcgggtttttttaaattaaacagtgacatccaaaatattgagatacaacaaaatgtcataggcaactagcacgttaatatgcagtatcacttgcgaaatcgtttattccggtatattgtttattaccacttcggaaccttttaaaatagatgggactgctatcaagtgaagtgtattgggttttttgattttgtacaggcatgattgataaagacttggtcaactcgaaacgtcatcgatgagcacagaatccgaaaaccgtactccatcgcccctacaaaatttctaccgaagcatgtttcatttcggaatctgttcagcagcgcaagacttgttttttgacatttgtatcgcagagtcaagtggagaatttatgggccctgccttttgttggcatcatgggcgtttcgtgataacttagatttggcccaaaaagtaataagcaattcgtttggaaagcaaccaaattgggaatcatataaaaagactctgtcgaccaaagtcagttatcagtcaacgttcgttctcgaccagacagaaatcagccaacatgttcaagtttgtgagtggctcacaggacatttatgaactcgccatctaattggtatcatttcctctatcca

SEQ ID NO: 3179 - DNA, 502 bp, DROSOPHILA
tctagtccgacaatccacccaaatcaaaatgttcaagatcctgcttgtctgttctctcgccgccctggtggccgccaacgctaatgtggaggtcaaggagctggtcaacgatgtccagcccgatggctttgtcagcaagttggtcctcgacgacggatctgcctcctccgccaccggagacatccacggcaacatcgacggagtcttcgagtggatctcccccgagggtgtccatgtgcgagtgagctacaaggctgacgagaacggataccagccccagagtgacctgctgcccactcctcctccgatcccagctgccatcctgaaggctatcgcctacatcgaggctaaccccagcaagaactaagtgaacccgccgactaggaacatgaaagattggagacagctaggttgagtttggataatttcttaccagttgttttaaatttaaggaaaatgttatcgaattcgaaaataaattaaaccttgcaatataaaccaa

SEQ ID NO: 3180 - protein, 112 aa, DROSOPHILA
MFKILLVCSLAALVAANANVEVKELVNDVQPDGFVSKLVLDDGSASSATGDIHGNIDGVFEWISPEGVHVRVSYKADENGYQPQSDLLPTPPPIPAAILKAIAYIEANPSKN

SEQ ID NO: 3181 - DNA, 4197 bp, DROSOPHILA
ggctgaggaatcattctacggtaattacaatttagcagttgcactctataggcagcgaaagggggcaaaagtggacgcgtagaaggcgtatttaccaccgaaaaggcggagtgtctgcgaagcttgccggtgtttttgctctaagatttgccgctggccaatttgtgtgtgtctagcctcaaaccctcggatttgagtgcgcgaataagatacgaatcagaaagtataatggcgactatatcccctccgcaggagtcactttgaccgccgagagcgacagcgtcacgtgggatgtggacgaggactacgcacgcggccagaagctggtcatcaaacagatcctcttgggcgccgaggccaaggagaacgagttcaacgtggtcgaggtgagtactccattcattgtgtatgcgaaacggggcattcagtgcatgtagtaaatcccataaattgtgtatgcgcgcgccggttggtgtcctcttctttttttctttttcattttttttttcgttgcatttttccggccggcggggcagggaccggtttccatttttcccccagaccagaacaacctcgaacttttcgctcgttgtggtgggctagggtaattgtgtctgtacatctgcaaacggccgccgagtaaccagccccggactttcgattgccatggtacattaccaatgggatgtgctaggtacataaattctttttagtacaaggtacttgcaaagaagtactaggtactttacaactgtcccagtaaatccagggacttaggtgttttgtatattgttaggaactttcgagaataactatcaaagcacatcttctttaaagaatataatttttattataataaatatttttaatttgtgctttaaaatttctcattagttgtacctaaccatcattataccttaaccatcaagatcctcatagtttaagtaccccacctttccgaaccaaattcattggcgcaactgtacgcagatacacatacggcaagacaaaagagcactctttattgactcaagtcaacggcgatacacgaatcggctgcctcggcatccgcaattgtttgcattaggtctggaaagcttttcgagaacttgaacatactgcgcagcttcctgtccatccggcaaatcactcccgccgccggaatactccaattccagcagatcatgtcgcacttcagcagggcgagatcttcgcgcagtgacttgaggttcttcgcgaggaatagagaagaggtttcgggtcaaaggtcatagtttgcagcaaagaaagctggcactcaccaaagccactgtcgtatcaattgaggcaatctcgtgtcccttaatgaccaccagtgtggtgggggcacttccctcgctgtttctttgcgtcacgtgcgacacaagcgacattttcaagtactcggctgccgcgtagtccacgctgcccttgagatcggccatggtcacctcaatgccgttaaactaggttgattgccaatagaaattattaggccctatatatgcagtgtgtcagctcaccttctcggttgtcaagaaaaactgcggcttcatgctcttgtagagcaggaaaagcgcattgaagacgatgcccaccaccattccgtactccagggtccagaagacacaggtcagcacggtaaccaggaaaggcagcatatcgcgctctgtaagataaccagacttactttaacttcacgtgggatcccaaatgccatgtagcactcacttttagcccgccaaatctcgccaatggtctcgtactccaccataaagaacatggctgcaatgatgatggctgccagggtcgccttcggaatgtaggcaaatgtggtggtgaggaaggccagggtcatgaggacgagagcgccggtaaccgcaccacccagcggggtttttactccactggcgttgttgatggctgtccttgtaaaggatccagtgataggcatggaggagaagaagctgctgaggatgttgctgacgcccagggcaatcatctcctgcgatgcgtccactatcttgcccttggctgaaagtagaagaagctcaagttatggaatatgaactgaagttattcctccgcactcacagaaggccttggccacagctatgctctccaatatggacaacagtggtatggacaccagggcagtgcctacgttcgataccatgccaccgaagctaatggtttctccagtctctggatcctccgtgtgaaaagggggaagcttgaaaggcggcaggcctggagtgatgctgccgctgactagaaagggcagtttgccatcgttcttcagaagatagcacaggagtatgccaattaacacggccacagcattgcgggccagtgaaatatacttccacacgcttttgaagccgaaagttaggtttttcagttgctgaaattatttaaacatttatagtctcgctaatcaaaccttctaattaagcaatttaattaagcattacccaccctcatgagcagcaggagcacaagtgtgcagcagccgaggatggcatcatttcggcgtgtttgtgttatgtgaccgaagaagtatatccagctgttaaggaacccactggcactactgctaatgccaaagaggctattaacctggccggtggcaatggttagggcggctgccatcgtaaaacccgtggtcaccggcaccgatatgaaccgcatgagcactccgagattgagtaaacccattagggtgatgatgcagccggacagaaagcatattagcaccgcatacgctgggttgccgtccacatatggctgcaccataagcgccatgatggccgtagggcctgtggaagaacgatttgaattacttagcgcaccacctcaccagaggctccccaactcacccactgtgatatccttacaagttccaagcagtatgtacacaaatccacccataaaagcggagtagagcccataggctggtggcagattggccacagctccgtaggctatggcctgtggcacggctgtgaggcccacggtgagacccgccaccacatccatggccaggaagttcaactggtacttgggcagccaatcggtgacgggcaggtatctgtggacggagcgcatgctgcagcagctcctcgcctttgagctcacggcaccgcaaacgttcggcagacgctcccggtagagatcatctggaaagcacaagtgggctatttagtaggtgtgcctcctggggcgccttgaaatcttgatatggccatagttaagtggtttatttgattgaaaaacgctcttttatgtacacccattcgcaatctctgcacatgatctgaagtgcctcgatgatttcctgcggttcggtggtcttgtgacttctggaaaaataccaaagatgtctacaagctgatagacaagttcatccagcaggcagcacaatgccttgatgttagcactttgaaccctctgttttggtgtctcatattctagataattagtgagccgcatatagtatccttggctagtttgtatcttatgcatttatattattcaacgggggaaatttacgttttgatcccttcttgcttgatggacacgttcatccccaggaagccagcttgtcactgataactcatctttcgcagctcgtaatagcactgtcatcttgtggattctcttgtctaattacggactcattaccgggtatttaccataaataatgtaatgtctccgaagacctttgtttagtttcctttaattgtagtttatctcatcaagttttaggtaaactagttctttatttatcacagcacaatcaaacagtgtttgttccttcactaattatagccccattgagtaatagtttgtgttttctgatattcagttggttggttttaatagaaggggaaggagtagtttccttcgtatcacactgctttcacttatcctcttgagggaacgcgcttctccacttaccttcgttatcgcgcatgtcgacaagatctttggagcactttacgatcggccaatactagttttgattcgaattacacgttgcggatgattaattagcagtcacttgttagattcgcgcttgctggactccggttcagatgagcctggctacagtttaaagggaacgaaccgatccactccagtgtgggcagacgagtggtcaggcggccgccagtcgac

SEQ ID NO: 3182 - DNA, 1814 bp, DROSOPHILA
atgatctctaccgggagcgtctgccgaacgtttgcggtgccgtgagctcaaaggcgaggagctgctgcagcatgcgctccgtccacagatacctgcccgtcaccgattggctgcccaagtaccagttgaacttcctggccatggatgtggtggcgggtctcaccgtgggcctcacagccgtgccacaggccatagcctacggagctgtggccaatctgccaccagcctatgggctctactccgcttttatgggtggatttgtgtacatactgcttggaacttgtaaggatatcacagtgggccctacggccatcatggcgcttatggtgcagccatatgtggacggcaacccagcgtatgcggtgctaatatgctttctgtccggctgcatcatcaccctaatgggtttactcaatctcggagtgctcatgcggttcatatcggtgccggtgaccacgggttttacgatggcagccgccctaaccattgccaccggccaggttaatagcctctttggcattagcagtagtgccagtgggttccttaacagctggatatacttcttcggtcacataacacaaacacgccgaaatgatgccatcctcggctgctgcacacttgtgctcctgctgctcatgaggcaactgaaaaacctaactttcggcttcaaaagcgtgtggaagtatatttcactggcccgcaatgctgtggccgtgttaattggcatactcctgtgctatcttctgaagaacgatggcaaactgccctttctagtcagcggcagcatcactccaggcctgccgcctttcaagcttcccccttttcacacggaggatccagagactggagaaaccattagcttcggtggcatggtatcgaacgtaggcactgccctggtgtccataccactgttgtccatattggagagcatagctgtggccaaggccttctccaagggcaagatagtggacgcatcgcaggagatgattgccctgggcgtcagcaacatcctcagcagcttcttctcctccatgcctatcactggatcctttacaaggacagccatcaacaacgccagtggagtaaaaaccccgctgggtggtgcggttaccggcgctctcgtcctcatgaccctggccttcctcaccaccacatttgcctacattccgaaggcgaccctggcagccatcatcattgcagccatgttctttatggtggagtacgagaccattggcgagatttggcgggctaaaaagcgcgatatgctgcctttcctggttaccgtgctgacctgtgtcttctggaccctggagtacggaatggtggtgggcatcgtcttcaatgcgcttttcctgctctacaagagcatgaagccgcagtttttcttgacaaccgagaagtttaacggcattgaggtgaccatggccgatctcaagggcagcgtggactacgcggcagccgagtacttgaaaatgtcgcttgtgtcgcacgtgacgcaaagaaacagcgagggaagtgcccccaccacactggtggtcattaagggacacgagattgcctcaattgatacgacagtggctttgaacctcaagtcactgcgcgaagatctcgccctgctgaagtgcgacatgatctgctggaattggagtattccggcggcgggagtgatttgccggatggacaggaagctgcgcagtatgttcaagttctcgaaaagctttccagacctaatgcaaacaattgcggatgccgaggcagccgattcgtgtatcgccgttgacttgagtcaataaagagtgctcttttgtcttgcc

SEQ ID NO: 3183 - protein, 573 aa, DROSOPHILA
MRSVHRYLPVTDWLPKYQLNFLAMDVVAGLTVGLTAVPQAIAYGAVANLPPAYGLYSAFMGGFVYILLGTCKDITVGPTAIMALMVQPYVDGNPAYAVLICFLSGCIITLMGLLNLGVLMRFISVPVTTGFTMAAALTIATGQVNSLFGISSSASGFLNSWIYFFGHITQTRRNDAILGCCTLVLLLLMRQLKNLTFGFKSVWKYISLARNAVAVLIGILLCYLLKNDGKLPFLVSGSITPGLPPFKLPPFHTEDPETGETISFGGMVSNVGTALVSIPLLSILESIAVAKAFSKGKIVDASQEMIALGVSNILSSFFSSMPITGSFTRTAINNASGVKTPLGGAVTGALVLMTLAFLTTTFAYIPKATLAAIIIAAMFFMVEYETIGEIWRAKKRDMLPFLVTVLTCVFWTLEYGMVVGIVFNALFLLYKSMKPQFFLTTEKFNGIEVTMADLKGSVDYAAAEYLKMSLVSHVTQRNSEGSAPTTLVVIKGHEIASIDTTVALNLKSLREDLALLKCDMICWNWSIPAAGVICRMDRKLRSMFKFSKSFPDLMQTIADAEAADSCIAVDLSQ

SEQ ID NO: 3184 - DNA, 3596 bp, DROSOPHILA
gatgtcattgatcatcggtggcagccaagcgattccttatcgacgtacgatttttccaaataacacatatattttccagtaatatacgttgattttccctttcaccctatagcctcggcgtatctgtacaatcagcagtactgtatggatacattgacgggtcggcagctttatatcggtgaagtcttcacgcgagaggatcagtgcgtccgcatccaatgcctggaaacgctgcaactctgggaggataggtaagcgtgccgtactagtatgccatagcatcgggtaacagatcatcgtactcatccatggtccagctgccaggtgccgaaactgacgcagggcaattgcacgccagttccatcgacgaacccgcatgccgaatatccccgatgctgcccactgtatgagtgcaagagctacgagtcgaattcggggggaactctggagcagaccaacatatatgaccactatggtactctgcgatcatcccatctcactgagatgatagtgatcgacgggcggacaccccctcgtggcgagattcacacggcgtcggcgaggaagtatcaggtgtgagaagtgaactggtactctgttcctaggactacttagtctttagtgcagatctaatgtgtacaaatacaaatggagtttattgcggaatacttgaatatgttaaataaatttaaatttcacattttttttgtctaaagaagtgtattttttccactgtactcgctattcaaacttggcgccctatcgatagcattgcttagcttatcaaataaattatctcagacaacgggctacgatttgaattccttacttcaggatcgttgagtttatatttctatttattttctcgggattttcaatattatattttagcataatatcgatattagcggtatttgtggccgtctgcgataggcatttagttatcacgtagccagacatcgaataacgattgcaccacttatcgataataaagcacaagagacagtaaaatatttaacaatttctacgaatcaacaaattataaagccgcagtgagcaattaaaatcagttggaagaaacgctagtgccccacataggaatccgaatcaagcagcacttaccgaaggacaaccaattgccctctaaccgaatttcaccacaacaacacaatgttgctgcgtctagcactttccaccgcccgtccagccggggctatcaagatcctggcccagtctccggcccagctgttccgggccaatgccaatcccaatctgaatctctccacggtgcgcacctacgcccgcagggtggttcgcacccgtgagcccgtcgaagagatgcgtgctccctcgctgaaggagaaactgatgggtccgccaagtgccaatggtaagtctcttgtgtaatcccccatctatgtatatcggtcgtctaattgtactcttctggcgtgcagcatactccatgggcaagggcgctgccgccggagcagccgccgtgggattgggcgccctgtgctactacggcgtgggattgggaaaacaaaccagcatcgcggataatgccatgtgagtgatagcacgagtctctcacttgcgaaatacagggactttaataactgagattatattttccgtttagcatgtggccccagtttgtgcgcgatcgtatccagagcacctatgcctttttcggtggctcttgcgttctcaccgcggccgcagcagcagccaccttccgttcgcaccgtctcctggagctggcctcgcgtggcggcatcttggtgagtcctcttgcacaattcgtagttcttgccgcctacctgaccaacagacacaacagaacataacacttcctcttcatttgcctttaatcgcttaggcgaccattgcttcgctggcgctggtcattggtagtggagcagttgcccgctcgattgagtaccagccgggtctgggagccaagcatctggcctgggcggtgcactgcgccattctgggcgccgtgatcgcacccatttgcttcatgggcggaccgattttgacgcgcgccgctctctacacgggcggcattgttggtggcttgtccacgatcgccgcgtgtgcacccagcgataagttcctctacatgggcggcccactggccattggcttgggcgtggtgttcgcctcctcgctggcatccatgtggctgccgcccaccacggcgctgggcgcaggtgagttgccagaaagttccactggggctagcaccacttcgcattatattttatgaattgtcaagcggagttaacccattcaactctcttttcgcaggtctggcctccatgtccctatatggcggcctcgtcctcttcagtggcttcctgctctatgacactcagcgcatggtccgtcgcgctgaggtctatccccagtacagctacactccctacgatccaatcaacgcgtaagttcactcctcatccataccgtgctctgaaactctatactttttggttctatcttttagctcaatgtcgatctacatggacgtgctgaacatattcatccgcatcgttaccattctgagtggtggtcagcgcaggaagtgagcactggagacgaacatgtgatgcgaggattataccctctaaaatatacatacatatttatactgttattaaaataaaccgatcgagttaggaagcaaaatgtacgaactttgtgtttcaatttggctaatttcaattagtgtcttaatacactccagacctagaaattaaataatatattgtccatatattatatacaatctctaaaaagaaagcattttttaagatcaatttaaaatgttagtcaattttaagcttgatagcgataaatgtagctagcttttaaccgatatttatagcagttgggttcgttgttatcgatagcttaattacttttattacggatcgtttgccgtattacctaattagttagaaatttacctcgtgcaatatttgttattggtcgtacagaagctctgtttttttttttttaattcaaaaaccgatggcaaagtgaaattgggctctagggatgtatcgatatgcaatcgatgtttcattcagcttttttcgacaggacctaagcattcctgtcaagaattgtttaaatatttcgagtcgagccggtcgacagttcgaaaataagttctcccgcagaagcgccaagattccggattttaggtggctgtgagaaaaacacccacgccgactttccacttcatagacacacttgacaaacattctcgtccctgcaaacacacacaactcgtatttcggtgataatacaacaaaagttagccaaatactgcatatatttaattttctggtcaatccgcagcttcgtcccattgccagaaggtgctcgacgaagtcacgactgccatttccacctgagacaggtgagtgtttgaggaggaggaggtggtggctgccagacgcccgaccgcgcccttaaagccggcaaatcgatttcctaacttgcactcaccacataccgcatgtttgcacgatttcagctggtgccattgcaagtcgtccagtggaagaggcagacgtcaagca

SEQ ID NO: 3185 - DNA, 1198 bp, DROSOPHILA
agacagtaaaatatttaacaatttctacgaatcaacaaattataaagccgcagtgagcaattaaaatcagttggaagaaacgctagtgccccacataggaatccgaatcaagcagcacttaccgaaggacaaccaattgccctctaaccgaatttcaccacaacaacacaatgttgctgcgtctagcactttccaccgcccgtccagccggggctatcaagatcctggcccagtctccggcccagctgttccgggccaatgccaatcccaatctgaatctctccacggtgcgcacctacgcccgcagggtggttcgcacccgtgagcccgtcgaagagatgcgtgctccctcgctgaaggagaaactgatgggtccgccaagtgccaatgcatactccatgggcaagggcgctgccgccggagcagccgccgtgggattgggcgccctgtgctactacggcgtgggattgggaaaacaaaccagcatcgcggataatgccatcatgtggccccagtttgtgcgcgatcgtatccagagcacctatgcctttttcggtggctcttgcgttctcaccgcggccgcagcagcagccaccttccgttcgcaccgtctcctggagctggcctcgcgtggcggcatcttggcgaccattgcttcgctggcgctggtcattggtagtggagcagttgcccgctcgattgagtaccagccgggtctgggagccaagcatctggcctgggcggtgcactgcgccattctgggcgccgtgatcgcacccatttgcttcatgggcggaccgattttgacgcgcgccgctctctacacgggcggcattgttggtggcttgtccacgatcgccgcgtgtgcacccagcgataagttcctctacatgggcggcccactggccattggcttgggcgtggtgttcgcctcctcgctggcatccatgtggctgccgcccaccacggcgctgggcgcaggtctggcctccatgtccctatatggcggcctcgtcctcttcagtggcttcctgctctatgacactcagcgcatggtccgtcgcgctgaggtctatccccagtacagctacactccctacgatccaatcaacgcctcaatgtcgatctacatggacgtgctgaacatattcatccgcatcgttaccattctgagtggtggtcagcgcaggaagtgagc

SEQ ID NO: 3186 - protein, 341 aa, DROSOPHILA
MLLRLALSTARPAGAIKILAQSPAQLFRANANPNLNLSTVRTYARRVVRTREPVEEMRAPSLKEKLMGPPSANAYSMGKGAAAGAAAVGLGALCYYGVGLGKQTSIADNAIMWPQFVRDRIQSTYAFFGGSCVLTAAAAAATFRSHRLLELASRGGILATIASLALVIGSGAVARSIEYQPGLGAKHLAWAVHCAILGAVIAPICFMGGPILTRAALYTGGIVGGLSTIAACAPSDKFLYMGGPLAIGLGVVFASSLASMWLPPTTALGAGLASMSLYGGLVLFSGFLLYDTQRMVRRAEVYPQYSYTPYDPINASMSIYMDVLNIFIRIVTILSGGQRRK

SEQ ID NO: 3187 - DNA, 2739 bp, DROSOPHILA
ttttttatgaacttcaaaactattttatattctacacgattcgcatttctgtgaccattataacccgtttcaaacagttgtcatcattatttccttgctaattatcaaagttgactttgcaaacatttcaagttaatttgcaagcatttgcttattaatattaattaatattcatttcgagcaccagcttgacttttattttattgccaaacggaattgagttcgcactactcataaaaatgggatgtgcagatcttaggcgcacagaaacacctgttcgatttgtccaatctattatgttccatgtttataaaaaaatgtttgccaaaatagaccactggattagttaactaatcatcaagtgtctgaaaaccatggatgaaatagaaagtgtcattcaaaattgttttattaataacgctgtaaaagcgtggcctaacaacttttacatgagaaaaaattataaaaaaattaaacaagagagagctataaagtctcgactattgaatacccgatataatcatgataacagctagtccattaacatcttcaaggatgtttttgccaactctctactcctagatttgaagtttatactagatgattgacaatgtgaagggtattgtataacaggtagtcgatcgttaaagccatgtttgcatcagggttttttttccagtgtaacgctctcaaaccgtctcattttggcaccgaaattctttcaaaaaaatggttattttaacttttttcttacaaatttctatcggtgtaccaccaacatttaaaccgagtaataataataataagtattcgaaaatttcactataccgttctttactgttcttttaacaatatgaagatgaagagtaaacgcaagcaattccaatccggttatattttgctcagccatgacttttgtttaatgaaatattttattgcatttaaaactgtaataaacagaccgaatttatacctaaatctggtttgatggtcttcactttatgtatcgctaattaaacaggttactattggctaagatcaatcacgtaacatccagacagttcgtgataatctgaagcagcgtttgttccctcggccaaaataaatcagccataaacaaggtaactcctgctgccgtcagggaaattaagaccatatctaaatagatttgttgccaaagagtatcgaatttatttcctaactcgataatcatttataatgtctgcatgctgtttaaattctaagggttagagggcaaggtctttggagttgcacctccgattcgaatgtgggtcctggtcgtgtcgattgcttattccttgctgggatgggcctggatgtaggcgatggccttcaggatggcctctgggattggaggaggagtgggcaggaggtcgctctggggctggtatccgttctcgtcggccttgtagctcacacggacgtgttcgccctcgggggagacccactcgaaaactccgtcgatgtttccgtggacatctccggtagcagaagcagcggaaccgttgtccaggaccaacttgcttacgaagccatcggcttggacatcgttgaccagctccttgacctcgggattctcgttggcggccaccagggcgacaagggcgcagacaagcagctaggatattccgggattactcattgaactgtccggctttaaacttcagatacttacgatcttgaacattttgacttggttagattgtcagactaaagaactcgtgagactgatgccaattcgggatcactcgtcggcttttatacgcttatacgcactccccacgaaatcttaaagctgatcaaaagctgatgcaacccgtttttaattaacatttcggccagcataggtctcgtttggttttacggactggttcaagtgacatgcttggtggcgataaaaatcgtctgctgcactctttttgatttctattgtctatgcaaatcgctaccgtaattattctaaaaagaatcgggttactcggaaaagggtaagtccaccttctcattgaaataatttaacatcttccggaatatttagtcagataactttgaattactccagacaaatcatataaaaataacttgattgaataatgtctaagctgctgatagtagaagtttaattattaggaggtgaaaaataactagaaaacaaaacttttttgcgaaccgcttgtagatccagcatacctttcggagcatcatttggtttctatctgcgaaatgactgggaacgggtttatggaatctaacattctgtgttcaccaccctcaagacttgactgaccgggacttgacataaatcctactaaattaaaatctgcataaacattctattcctcaaaaactcttactcatataacctttgtaaataacatagatattaagaatagtttaaattgataccgataagattgggttgcctaagaagagcgtactattgctagtcaattaaattattgtaaataatttcgtttaataaaaaaaaacattgtgtgtatattttatctctagtttccgttaagtcaatatgaacattcccgtggagtttgacatatacaatgtatacgattcttacttatacaatcactattaaacacttaagttacaatatcataatataatcaaaaatccgaaagcacagcaatttgattgatatttctccaaaaatcactacaagatcttataaccgtgtaacctcagggaagtctgtgttat

SEQ ID NO: 3188 - DNA, 682 bp, DROSOPHILA
ttctttagtctgacaatctaaccaagtcaaaatgttcaagatcctgcttgtctgcgcccttgtcgccctggtggccgccaacgagaatcccgaggtcaaggagctggtcaacgatgtccaagccgatggcttcgtaagcaagttggtcctggacaacggttccgctgcttctgctaccggagatgtccacggaaacatcgacggagttttcgagtgggtctcccccgagggcgaacacgtccgtgtgagctacaaggccgacgagaacggataccagccccagagcgacctcctgcccactcctcctccaatcccagaggccatcctgaaggccatcgcctacatccaggcccatcccagcaaggaataagcaatcgacacgaccaggacccacattcgaatcggaggtgcaactccaaagaccttgccctctaacccttagaatttaaacagcatgcagacattataaatgattatcgagttaggaaataaattcgatactctttggcaacaaatctatttagatatggtcttaatttccctgacggcagcaggagttaccttgtttatggctgatttattttggccgagggaacaaacgctgcttcagattatcacgaactgtctggatgttacgtgattgatcttagccaatagtaacctgtttaattagcgatacata

SEQ ID NO: 3189 - protein, 112 aa, DROSOPHILA
MFKILLVCALVALVAANENPEVKELVNDVQADGFVSKLVLDNGSAASATGDVHGNIDGVFEWVSPEGEHVRVSYKADENGYQPQSDLLPTPPPIPEAILKAIAYIQAHPSKE

SEQ ID NO: 3190 - DNA, 2965 bp, DROSOPHILA
gccgcgaggcgcagtacgccacctgcgagcaggaggctcgctgtaccggcgcccacgccgagtgccccaaatcgccggccatggcggacggaaccacctgccaggagcggggtcagtgccggaatggcaaatgcgtgccgtactgcgagacccagggtctccaaagctgcatgtgtgatatcatcgcggatgcctgcaagcggtgctgtcgcatgagcatcaatgagacttgcttccccgtagagccacctgatgtcctacccgatggcacaccctgcatcacaggattctgcaacaaggtatgcttgtggattgactccttacattgcccataattatgctaagctgcgatttctttcagggcgtatgcgaaaagaccatacaggatgtggtggagcgcttctgggacatcatcgaggagataaatgtggccaagaccttgaggtttctcaaggacaacattgtcagtaagtattgcaatcttaaatattacattctgaagatccccactaagccacacttgctcaatcatattttcagtggccgttgtcctcgtcactgcagtcttttggattcccatcagttgcgtcatatcttacttcgaccgcaagaagctgcgccatgaaatgaagctgattgagtggagccagaaactggaccttatacatcccagtgacgagaggcgtcgagtgattcacatacggtaggcgctcagcctcctactttataattatatactgataaccaaccaccaatctatactttcagagtgccacgccagaagatttcggtggcccgagcctgtaattagcacaaaaacccagtgggttccttttgttttaatcttccgtgagcattcttcttaaaactgccacaattcgtttacattaagtgacatatttgaacatacgcaacacagaatgaataaaattccatataatatagaccaaaaacaaaaggtcattataattggatggtttctttacattattaaagtcgtattgaagtttttatttttttcggatcatttagttagcttactggagtgtaatgtgtttctacttcttcttattactcttgccgttcgtctgaggagctgcttcttcgtcgaattccagttcgctatcctcctcctcgtccgaatactcctcgtaaatctgaccgtcgtcaaactcgccaaagttcatctcgacctgagggtacggcaatttgttaggaacaggaacccaaagtagatagaaagatagatagatggatggatggatggatggagctcaccttgccgcatacgtgtacgggtccacttccctgcaccagtttgaaggtcactgatccattggggaactcgacatttggtcttaagctacgggtctcgccgaccttcaacacggcaatggggatcttcaaggttttcttctcgccatcgtcgtttatgttcgtctccgcctggaagcgaaacattaaatttgtgtgcattttatcactgtataatttccgagtttttcgcgaaatatgatatgagttaaatcagccatgtcgcctttaaatttacgacctgcgacgcggggcagattgccggtatcgaggctcacctgtacaacgttgaattcgccggtcttcgcttctgggccgagggaaatctgtttgatgatgagcttgtgcgagtggacgatgtactcctcgggtacatctgggacctcgaactgtgcgatggcctccttctcgctgagtgtgacacctggaagtggacgaacggcgagaagggttggatttccgactgctttttgccggctggaggggagctgctcgcagcgtggctatgggatggctattggagcgctcttccagcccaaatggcaatggtactcaccataaaacgactcggactccatttgcaggccttggaacacagatgtacagtcaattaataaaagaaccttttgtactctacacgtgcccgtaaaacggcgatggctgcagttgtgtgaagcgttgagcggtgctgttatcgaagcgcaggactatcgatattattcgtttaatttgttgggaacttcgcaagtactggtaatgaagacttgaaatattttttaatatattttactgtcgcgttagcttgcaacaaacgaatatagattgtcacattcgattggacactacaagtggcagccctgcgattttgattcccagtctgacaatcatcgatttcggcaccttacgtcggcctggcaaccctgcgacagctaccattttgcaaaagattttgctcaacacgtgttcgccgctggttttgtgtggaattaatattaaatattacctaccatggctgaggaatcattctacggtaattacaatttagcagttgcactctataggcagcgaaagggggcaaaagtggacgcgtagaaggcgtatttaccaccgaaaaggcggagtgtctgcgaagcttgccggtgtttttgctctaagatttgccgctggccaatttgtgtgtgtctagcctcaaaccctcggatttgagtgcgcgaataagatacgaatcagaaagtataatggcgactatatcccctccgcaggagtcactttgaccgccgagagcgacagcgtcacgtgggatgtggacgaggactacgcacgcggccagaagctggtcatcaaacagatcctcttgggcgccgaggccaaggagaacgagttcaacgtggtcgaggtgagtactccattcattgtgtatgcgaaacggggcattcagtgcatgtagtaaatcccataaattgtgtatgcgcgcgccggttggtgtcctcttctttttttctttttcattttttttttcgttgcatttttccggccggcggggcagggaccggtttccatttttcccccagaccagaacaacctcgaacttttcgctcgttgtggtgggctagggtaattgtgtctgtacatctgcaaacggccgccgagt

SEQ ID NO: 3191 - DNA, 602 bp, DROSOPHILA
ttttacgggcacgtgtagagtacaaaaggttcttttattaattgactgtacatctgtgttccaaggcctgcaaatggagtccgagtcgttttatggtgtcacactcagcgagaaggaggccatcgcacagttcgaggtcccagatgtacccgaggagtacatcgtccactcgcacaagctcatcatcaaacagatttccctcggcccagaagcgaagaccggcgaattcaacgttgtacaggcggagacgaacataaacgacgatggcgagaagaaaaccttgaagatccccattgccgtgttgaaggtcggcgagacccgtagcttaagaccaaatgtcgagttccccaatggatcagtgaccttcaaactggtgcagggaagtggacccgtacacgtatgcggcaaggtcgagatgaactttggcgagtttgacgacggtcagatttacgaggagtattcggacgaggaggaggatagcgaactggaattcgacgaagaagcagctcctcagacgaacggcaagagtaataagaagaagtagaaacacattacactccagtaagctaactaaatgatccgaaaaaaataaaaacttcaat

SEQ ID NO: 3192 - protein, 156 aa, DROSOPHILA
MESESFYGVTLSEKEAIAQFEVPDVPEEYIVHSHKLIIKQISLGPEAKTGEFNVVQAETNINDDGEKKTLKIPIAVLKVGETRSLRPNVEFPNGSVTFKLVQGSGPVHVCGKVEMNFGEFDDGQIYEEYSDEEEDSELEFDEEAAPQTNGKSNKKK

SEQ ID NO: 3193 - DNA, 3785 bp, DROSOPHILA
gtcggataaatggtgccgggatatattcgactgcacatggatcccctttgcctttgatattgattctgattccgaatccgattccgcaccgggcttttccttttgcgttgcgttacccataactgtcacggatgtgcaatgaaaaattaccaatcaatgtctcacttcaatagaggaacgtgcagcggcggagggaggaagggagcagggatgcggtggtagatatgccccgaagccagaccaaaatgtgacattttctctggcgaaaagagtgcatttaatagaaaatccgggagatagcaatgggtcagggatgagggggactgaagcgacaaaatgcagctgctcgaatttgtacgattcgtgctcaacattaaatcgtttgcgtttcgtataagttcgaaagtaatgcttcaaccatgtgcaattcatcagaaagtaaaccaagagatctcttaagcttctcaacgaacaattaaatattaggcttatacttaaataatttaaactccttaactcctaaactccatttttatcatatatatgtattatatgcatatataaggtatgaaaataggctgaaggtaaactttgccttgtgatatgttttcggtgaaagtagttagacaaataccatacgttgatccaaactattttaagaatttattgagtagttatcattgaaaggcatttaattttatttcaacacatatacatatgaaatgtattccacatacgcggcccacggcctataaatttaaaattttaaagcagtcaaattgcagcatgcccaagactcttcttcacaaattgccaaatgaatgttcaacttgatttgtttaaattcgatcgatttactttactcgtatatttaaataaatagaattctatgataggaatatcttaactactatatgtacaaaaacatgtgtgtcagtctccaagtctcttggccattatcactcccagctgagtgttttgggcttgtgtttggccgcagctaatcgatcgctgagaacccatcatggccagccactgggttccgcgcgcagcaaggctccttttctgtttgcgctgcctcttttgcctctgccttctgcacttgcgcactcgtccttgtgcccaaaatgtcctgggcaccgtagggagtgcgccctctactgtgcaactcatcgcgtcgcagcttcgttctcggctgtgtcatttgcgtgtcacctacaaatggtcgagagaagtgcgcttcggtttcgtggcggtacggctttcggttccgctctggggaagagagtaactgagcatcgccggacctcaagacagatggtagaggtcctgtggatgttgctggtagctgcactgatgttggtactgctgcgggtaggcatcgtactgctggtgggtctgctgctgagggtaatcattgagcaggccataaccatgactgtgactgtggctgtaagcggggtaggcggcggtggtttggtggtggtggtacatgggcactggcaccgatggtgccccggtggtggcggtgcttgtggcctccagtggcggcagcatcgcggtgtagccggcaccacagtgctccggggagctgtccagcgtgcgatccttcttcgacttcatgcgtcggttttggaaccagatcttgatctgcctttcgctcaggctcagggcattggcgatatcgatgcgacgacgccgggtgatgtatctattgaagtggaactccttctcgagctccagggtctggtagcgggtgtacgtctgacgggtgcgtttcgagtctttgcaatctgtaagcataagcaaagaaaaaatgggttagctaatgagttttataactgcgtattgtttgaaaatatcaaaaatgtatacaaaaacatattttcaatattttcaaagtgtatttttaggggttgttaatcgtgtgtgatgcctacctgatgccaaagtctcctcgatgtgcgaccaattgaaatcgccggctccattcggggctgtcacaattcgatgattgatctcctggctgacagctgacgaggatttctcccccggcgattggggtggcgtgctgatgccttcgaggggcggcagagaggtgggcgtggttggcggaggggtggcaaagtcgccattcttcagcttctgcgtctgcgactggggcgagtagacgtccaagtagtcgacatcctcggaggcgctgggcgtgggcacagtcacgtactcttggtcgtagctgggagcggggctggcggtgaccttggtgcttacggcgggagccttcttcacctgctcgacggttgtgtagaaatagtcgggggtgtacttcagcttcttcacgggattggtgagcagagccctcagtgtgctgggtcgctcctccacggcggcgatgatggaagcagcatcatcttcggccttgcgcttggtggccttgggcggcggggtggtgggttgcacgggcggtacagtctgggtggtcacctgctcctgattgttgtagtagtagcagctctccgagtaactctcctggggatagtagccctgataattggaggtgttctgatagtaggcattgctgcctgaattatcgtagtaggtgggcggcaggctgtgggggtgatacatgttgtacatgttcatgttgtcggcgtagctgtagtggctctggctgtttgtggtggccatatcggatgtgtattgctagatttcttctctaactctgcgatgtgcacgcaacgctggtgagtttgcgaatgagctggtcctgcggcagatcctgcatatatagcaaaatcagagagccctcggcacacgctcgccgttatagcgcataaatatccctgcgcatgacactttgccgcctgctgttcgcagccacccctccggcgaaatgtccttgcaggcacggagaggggaagttatccgaggtcctggcaactttatccgtacggtgcctacctgctgcgcggcttattacctacccatcgcgcccattatcatcgcgatttatccgcccgcgcgcttctcctactcggcgaccttgagacggtgctgcagtaattacggccatgaggtgcctacctatgaggtgcgcagagcgagagggcgcgactctcagccgatctccctctaattgcaataatcataaagacataaaaactgtaaactgttgctgaaaacgttccttcggggcagaggctttttccccggcccgtttatggttccctaaaaatttctctggatttttgccagcgcgcaaaacaccgaagactggctgccagttgttcccggaacccgatgccctttccctccgaatttatttcgtggcactgggcggccaaaggataacattacgtccgatccctgggatcaggaatacgcgtggccgagggtcgcgtgtttgcgctttttgtttgccctcgtggccaagcaagtgcgcaactcccgattcccaaactcactcctgtgcccggtatttgcctaaaaaccaacaaacgcacttccaaaatgactagtaaacagtaaaaactttatgcaaacatcctttgcctaaattttaaaaatatgatataaattatatgcccgctgatttttcaaatgaatactagttttattttattttttacgttatacttttaaaaatgattctataacagcagaaaaccagcaatattttaatagcataatattgttgagaatataaagcttttacgctttttttcggtaactctgtgatataaccctcaagtttttataaattttaagtaggttgtctatggatg

SEQ ID NO: 3194 - DNA, 1605 bp, DROSOPHILA
atgcaggatctgccgcaggaccagctcattcgcaaactcaccagcgttgcgtgcacatcgcagaatggccaccacaaacagccagagccactacagctacgccgacaacatgaacatgtacaacatgtatcacccccacagcctgccgcccacctactacgataattcaggcagcaatgcctactatcagaacacctccaattatcagggctactatccccaggagagttactcggagagctgctactactacaacaatcaggagcaggtgaccacccagactgtaccgcccgtgcaacccaccaccccgccgcccaaggccaccaagcgcaaggccgaagatgatgctgcttccatcatcgccgccgtggaggagcgacccagcacactgagggctctgctcaccaatcccgtgaagaagctgaagtacacccccgactatttctacacaaccgtcgagcaggtgaagaaggctcccgccgtaagcaccaaggtcaccgccagccccgctcccagctacgaccaagagtacgtgactgtgcccacgcccagcgcctccgaggatgtcgactacttggacgtctactcgccccagtcgcagacgcagaagctgaagaatggcgactttgccacccctccgccaaccacgcccacctctctgccgcccctcgaaggcatcagcacgccaccccaatcgccgggggagaaatcctcgtcagctgtcagccaggagatcaatcatcgaattgtgacagccccgaatggagccggcgatttcaattggtcgcacatcgaggagactttggcatcagattgcaaagactcgaaacgcacccgtcagacgtacacccgctaccagaccctggagctcgagaaggagttccacttcaatagatacatcacccggcgtcgtcgcatcgatatcgccaatgccctgagcctgagcgaaaggcagatcaagatctggttccaaaaccgacgcatgaagtcgaagaaggatcgcacgctggacagctccccggagcactgtggtgccggctacaccgcgatgctgccgccactggaggccacaagcaccgccaccaccggggcaccatcggtgccagtgcccatgtaccaccaccaccaaaccaccgccgcctaccccgcttacagccacagtcacagtcatggttatggcctgctcaatgattaccctcagcagcagacccaccagcagtacgatgcctacccgcagcagtaccaacatcagtgcagctaccagcaacatccacaggacctctaccatctgtcttgaggtccggcgatgctcagttactctcttccccagagcggaaccgaaagccgtaccgccacgaaaccgaagcgcacttctctcgaccatttgtaggtgacacgcaaatgacacagccgagaacgaagctgcgacgcgatgagttgcacagtagagggcgcactccctacggtgcccaggacattttgggcacaaggacgagtgcgcaagtgcagaaggcagaggcaaaagaggcagcgcaaacagaaaaggagccttgctgcgcgcggaacccagtggctggccatgatgggttctcagcgatcgattag

SEQ ID NO: 3195 - protein, 410 aa, DROSOPHILA
MATTNSQSHYSYADNMNMYNMYHPHSLPPTYYDNSGSNAYYQNTSNYQGYYPQESYSESCYYYNNQEQVTTQTVPPVQPTTPPPKATKRKAEDDAASIIAAVEERPSTLRALLTNPVKKLKYTPDYFYTTVEQVKKAPAVSTKVTASPAPSYDQEYVTVPTPSASEDVDYLDVYSPQSQTQKLKNGDFATPPPTTPTSLPPLEGISTPPQSPGEKSSSAVSQEINHRIVTAPNGAGDFNWSHIEETLASDCKDSKRTRQTYTRYQTLELEKEFHFNRYITRRRRIDIANALSLSERQIKIWFQNRRMKSKKDRTLDSSPEHCGAGYTAMLPPLEATSTATTGAPSVPVPMYHHHQTTAAYPAYSHSHSHGYGLLNDYPQQQTHQQYDAYPQQYQHQCSYQQHPQDLYHLS

SEQ ID NO: 3196 - DNA, 4474 bp, DROSOPHILA
tagagaagctcacgttcgcaaaacaaagtgtgtattgaattacgcgctatttatattaattaatggcacactgttcgcattttcaccgttagtgcgcgcggcgcatacgacggacggtggatgggaaagggaaaggtcgcggcaaaggagcgcgcgtacacttacgccaaaatgccggcaaaaacaaaatgaaaacacggggatagatgttgatggatggaaacccttttcaaagtccgttttgttcaaagttcgcttttcaactgaccagattcggctttcggttgcgcggccaaaaatgccaaatgccgcgcatagtgtgaccatccgtcagtgcagcgtgaataccgaaaagctcacgcgctgatgctccggttacactacaacaaaagcttttggtacaaatcgaagcttacaacagctttttaaaacgcaatgaacaaaatatttacagagtatttacacgacgagctttttttttcaattgtcaactaattgaaaaaaagctcgttgtgtaaatatttttgacaacctctgtgtatatatacatatgtacatatttaatatgttacacattttttgaaaaataaataattggcgcaatacagggccactttggtttacatagcacaggcaaaacatgttgcttcggagattctaatacacgatataaacgtatgaaaacaagcatgaacgaatataaagtcccttcggctttccaagcctgctggatttatcttcatcggaggtttcatctgaggtgatatggacgaagatggaatgacgaggcatttttttccgatttacacgcagaagcagcacgagcgtcctttttatagcattttaatatgattgtacacagttcgatcgtcactatgcgattgtttaatcattatttaagcttttcaagacatgtgaccagattttagtcgcctttcaagctgagattccgaaaatcagatactttatactatggcgccattcgcgcagcctcacactgattgaaaacaagtaagctgatagctggatacgctgcaaggcaaagtataaaaaacataaagtaaacaaatgtaaacaattcatataagccaagttcaatgagccaaatccaagtaaacaaatgaatttagcggcagaaccggttgttcttgcttatataatacaatatattgctttcgtttcgattctggctgctatcaaaaaagcccaaaactcgtgtcacaaaagtcaagaagcgaccgagcagataatacagctcgggaattaaacaaatgcgtattttttttgtttgaaatcaataaatccaagttggcacgacaataatcaaaatgtataatgaacgcgaataacctttattgtatttcaaacagaaagtacaaatttattttaatgcttttaggaatctatatgtgcaaaaaaaaaatgcactatgtttgctctacactttcaagtttatagaattcaaaaaataaatgcacttttgtactccccatctatattgtatgtatattgtgtcgcttttctcactgtgtgtccgttggctttcggttaattggcacttggatgttggaagttgcccggctggtttctgctttccgatctgggatcgccacttgtcgagctgaccccactgcagtccgccgctggcgctgatcaagaacggaggatgagcattcggtctacccattgcatacccactcgtgtgtatctgcaccttctgctggtgtcgctaccacttttggcaggtgagtacaggaatatctgatcgatcaaggggttttcccagctcagtcgcgtcgagtgactggctgactcacatgtatttcacatccattcaaatggtacttttttcgtcgaagttcacgccacgcccgccataagtccgcaatcgttgcgcggcatcatcttccccgtcgaaaccttcgatgagtgccaactggaggacgtggcgcggacgaagggcacctgccggcgcatggaggactgtcccagtgccctgaacggctggctagagcggcgcgaatcgcccaagacctgctactttgtgaggttcgaccactatgtgtgctgcgccccagctgtagctccaattgtcacccgatccagccagcagggtaagctgacccacctcaacatatccataaataacagacatattgtattattgcaagtatatgtatcatttggccctagtttcgagccttataatgtgttgtcatccatgactaaccacagggtatcccctgacgtttccatttcccccagcctgcaatgaactgaacaaggtgtcaaaggtcaaagagatcgacgagttcttcgtgtcggtggtgggcggcatgcccacccgtccgcgggagttccccttcatggccgcattgggctggcgttcgaacttcgatcagaggatatactatcgatgcggcggcgcccttatcgccaacaactttgtcctgaccgcagcccactgtgccgatttgggcgggtaagttggaacgctaatctgcatgattggcggtttttccctggcaatggaaatatcccctgatattcgtatgtacatagattgttgagctctcaatcctaatgtcgcttcttctcttccagtgagccacccagtcaggtgcgcctcggtggcgacaatctaaccctgaccgagggcgaggatataagcattcggcgcgtgatcatccatccggattacagtgccagcacggcatacaacgatattgcgctgcttgagctggagacggcggccaagccggaactgaagcccacttgcatttggacgcagaaggaggtgaccaacacgctggtcacggccattggttatgggcagaccagcttcgccggtctatcctccgctcagctgctaaaggtgccgctgaaaagcgtgagcaacgaggagtgccagcaccactaccaaaaggatcagctggctcagggcgtgctgggcacgcagatgtgcgccggcgatataaccggcgagcgggacacctgccagggcgattccggcggaccgctgctcatgcaggacggcctgcttggctatgtggtgggcatcacatcgctgggacagggatgcgccagtggaccgccatcggtgtacaccagggtgtccagcttcgtcgactggatcgagggcattgtgtggccggcgcagcaggtgacgaacgcaccgcaacccaaccagatgaccagtttcagtcccgaattcgatctgcgggcgacgatctgagttttgctttcgaaagctccatatatatacaggaatagatttacaaaatgatccagcaagaaattatttgaatatttacatacactattaggtaaatcaacaaatttcaagaaatatttatttttgagctcgtttagtgtttaaaactttatttaaacttaaccgtaagcaaaagccaactgcataatagcgcatatcgaataaacttgctaacaaaatcaacaattgagattttaaataaacaaaaccatatttataacttttcactcatgtccgtttgttggattgagtttcttgtttggaatcatgttgctatttcagccgatacccattggataaacagctgcgcagcatggatatataagtggccagaaccgcaggagacggatacttgagcacgaaccgctgaccactgatgtaccgcaccgagactctgctgctaatcctgacgagcgtcgggataccgtcactggcctatctgcccgatgtgaacatattcaccaactaccgcaccgaggtctataatggtatgtataataggaattgtttgtaaagtgtggcggactaataaagaaatcccacaatatcgctaggcattccatcggagattgataccacaccgttcgtgcggatcggggacaactattactacatcgagcccatgaataaggtgaattggtttcaggcggccggcgcctgtcgcatgatgaacgcccacttggcctccatcgaggataagccggaaatggaggcgctgatcaaatacatgaaggccaaggggttcaagaacaatgattacttttggatatcgggcaatgacctgggcaccgagggcgccttctattggatgtccaacggccgcccgatgacctacgccccttggaacgggcccaagcaaatgccggataactacggcggcaacgagaactgcgtccacatgttcgccacccgggagatgatcaacgatgccaactgcaagatccagatgctgtacgtctgcgaggcgacggaaccgaaaaccttcaagttcacctacattaagtggtagttttcgattggttctaaaataaaaccagcattacatacatatattaaaataagttcaattgaagttggggcaaaaccgagttgttttacgaatattacgaatattggtacatattaaaaacaaaagttgtagtttttgccggcttttatttgtcgcatcgttttgcttatcgcatccgttattctcttttc

SEQ ID NO: 3197 - DNA, 1558 bp, DROSOPHILA
attgaaaacaagtaagctgatagctggatacgctgcaaggcaaattgcccggctggtttctgctttccgatctgggatcgccacttgtcgagctgaccccactgcagtccgccgctggcgctgatcaagaacggaggatgagcattcggtctacccattgcatacccactcgtgtgtatctgcaccttctgctggtgtcgctaccacttttggcagttcacgccacgcccgccataagtccgcaatcgttgcgcggcatcatcttccccgtcgaaaccttcgatgagtgccaactggaggacgtggcgcggacgaagggcacctgccggcgcatggaggactgtcccagtgccctgaacggctggctagagcggcgcgaatcgcccaagacctgctactttgtgaggttcgaccactatgtgtgctgcgccccagctgtagctccaattgtcacccgatccagccagcaggcctgcaatgaactgaacaaggtgtcaaaggtcaaagagatcgacgagttcttcgtgtcggtggtgggcggcatgcccacccgtccgcgggagttccccttcatggccgcattgggctggcgttcgaacttcgatcagaggatatactatcgatgcggcggcgcccttatcgccaacaactttgtcctgaccgcagcccactgtgccgatttgggcggtgagccacccagtcaggtgcgcctcggtggcgacaatctaaccctgaccgagggcgaggatataagcattcggcgcgtgatcatccatccggattacagtgccagcacggcatacaacgatattgcgctgcttgagctggagacggcggccaagccggaactgaagcccacttgcatttggacgcagaaggaggtgaccaacacgctggtcacggccattggttatgggcagaccagcttcgccggtctatcctccgctcagctgctaaaggtgccgctgaaaagcgtgagcaacgaggagtgccagcaccactaccaaaaggatcagctggctcagggcgtgctgggcacgcagatgtgcgccggcgatataaccggcgagcgggacacctgccagggcgattccggcggaccgctgctcatgcaggacggcctgcttggctatgtggtgggcatcacatcgctgggacagggatgcgccagtggaccgccatcggtgtacaccagggtgtccagcttcgtcgactggatcgagggcattgtgtggccggcgcagcaggtgacgaacgcaccgcaacccaaccagatgaccagtttcagtcccgaattcgatctgcgggcgacgatctgagttttgctttcgaaagctccatatatatacaggaatagatttacaaaatgatccagcaagaaattatttgaatatttacatacactattaggtaaatcaacaaatttcaagaaatatttatttttgagctcgtttagtgtttaaaactttatttaaacttaaccgtaagcaaaagccaactgcataatagcgcatatcgaataaacttgctaacaaaatcaacaattgagattttaaat

SEQ ID NO: 3198 - protein, 393 aa, DROSOPHILA
MSIRSTHCIPTRVYLHLLLVSLPLLAVHATPAISPQSLRGIIFPVETFDECQLEDVARTKGTCRRMEDCPSALNGWLERRESPKTCYFVRFDHYVCCAPAVAPIVTRSSQQACNELNKVSKVKEIDEFFVSVVGGMPTRPREFPFMAALGWRSNFDQRIYYRCGGALIANNFVLTAAHCADLGGEPPSQVRLGGDNLTLTEGEDISIRRVIIHPDYSASTAYNDIALLELETAAKPELKPTCIWTQKEVTNTLVTAIGYGQTSFAGLSSAQLLKVPLKSVSNEECQHHYQKDQLAQGVLGTQMCAGDITGERDTCQGDSGGPLLMQDGLLGYVVGITSLGQGCASGPPSVYTRVSSFVDWIEGIVWPAQQVTNAPQPNQMTSFSPEFDLRATI

SEQ ID NO: 3199 - DNA, 3897 bp, DROSOPHILA
atcatatactcggatgacaaggcctacagataagccggccagccagccggccgatcgaggggctcttcatctttcccactcctccattctgtccatttcaatcttagtcagtcagtcaggcgcatcgccgcaaacaggttctacattatatcgccgctctcagccacgttgtatatagccttaaagcattctaaccgtaaccctaactgtatctatgtctaaccataattaagtgcaaccaagtcgcttatgcggaataaacaaatctagtataattcatatttcaagtgtttttgacggcgggcgggaaaactccaacttatttactcagccgtcttttaggtatgcctgccacaagctatagactaccaactaacccacaaagtgtaccttgtaaacaacaattgtttaagctctttaacttcctagcccaaaaacattcgttctatgttgttgtttcttccgggatctttatcaaacgtacacagaaaagcaattcattactttatcttgatttaaattgactaaaccataaagttttgccgattttgttaagagtttctccaaaaatatctttggacaacaagccctttatctttactaggcaccagaaaaattcaaacatcatacaagtctttgatttgagcgattttaatacaataaatttatcattcatgataatttcataaaaatgtatatgtgtataaatatgttatgtataatatgtatgcaacttcaagatcgctattcacagtctttgtattccatatctttcactgaataacaacaaaaccagttattactccatttaaatgctatcgagcttgtgtttttcaatttcaaatgcacaaacttaaactaacaaaactaatcaatacaaactgactttgtgtgaaatgcacggcttaactaagtagtaaccacgaataacaacaactgtcgcctgagactccaatgacttccaaaatcaatatagaaaacaccaagaaaggcaaatcactttggcaactagagagcgggcaaggctcttaattcagatttaagtagggccttcaactgcatggcatgggtaagcctcctaagccatttgagagtacgaggaatacagcttgtagttgcgacgtcggtagtagatcatgaggccatagctggcgaacagcagcgcaattacgattaaaatgagaatgcctggggatggatgaaactcgatgatttaattccattgaaaaccaattgccgttgacttacccgtcgcagttccaagattggcttcctcataagtcatcatcatcgtggatagcttgcactcgcgctcccaatctacgggcaaaacgtcctcgtagatgttcataagtttggtcagcggacaggaaggcccacaaccaggtatgtccagaggcaggggttcagctgtggtgttcttgtagaaaatagagaccaacggggtgttggtctcatccacacgcaactccatcattatgcacgccgtgtagggaggactgtgcagctggggataaaaaaaaaaaagaacaaagcctcaatccgctgctcatatgaaaactttgtcaaactcctacctcaaataatttcagcgcattcaaaacgctggctaccgtggtgtcatgagcactgtagacccacatcgaacgatctggttttaggctcccggaggatttctctttaaaccgctggaatatgtcctttagcaaaggccccgccttcagtctcgccagctttcgcgtataagagctgatggcgaaagcgaaattcgatacatacgtgagctcctctctcccataaaccattttagtccattttggcagtgtcatgttgtacagattctcaatgaacaaggtgttattcaaatactgggcatcaatgaaggtcttcacggggcgtccgcctttttcgctcaaataagcaaacagatttcggtgtttttcggtcaaggccttgaattctggcgatgattccaggctggccagctcatagtcataggcaggacaaggtgccttagcggccagtatgggatcctccctctcgggcgaggtgtgaatgggtatgggttgccagttgatgtccgtgttccagatgtcttccccttgcggctcgtagagaccagccagattcgactgggcactcatcaatgtgcgatccacgtcggtggactgaacgtagatgttctcgttggagtatataggcggtaggaggtttgaatagcgattccgcagccattttcccaggtcgtagtgctcttgcttgcccaactaaaggtcgaaatccgtgttagcctgggtccgtcactagtgcgagccttacttacattggtcaaatctccccagccggtgggccagaacttcctgtcgccccaggggtccgtgggatagggatccacgggcgttctgtcgccgtggcgatatatctgcaaagcataaccgataaagcgggagctacgcacacatagacatagcaactcttacgacatgcacaaacttcagctggcctggcaatgtggccgaaatctccactggatgaccttcagcattagcatagccatgaagcgaattggccagcgcaaaagacagcaaacatataacgcagatcaagatgagccagcgctggcttgggtggttccacattttgcgagccacacttgttacaagtgaaccacagcgactgcgggaaaacatatgtgagcatgcgaatacaggttacggcgtttggtctacggctataacgggtattagttcccttacctcgaccgtataactggcgatctgttcgttcgtcgttcgcatatatacagcaggcagtctgaagtttaccaaatttctgatttctttgtttataattttggggacctgtttgataaccacacaaagcttcgaagtctcgataacgatagttgtccccaaccaaccctagaccctaacagtaatcttttggcgggatgatttaaaaacgcaaatggtgtttatgattgtattgattgattgactcgtcgtatctagttgcacacaagaaatatgattatttaagtattgcataaatatcgaaacaatcttagactacgaataacaaatatactgttgatgttggtcttaaaagtacacggctataggacaaattaaaagtcgtcgtcgttggcttaactaaaagattctgcgcgcggaacaatgaaaaacaaaattcggctattacattattaagtggagtacacgtggactggcaaacatcgttgctgcattgcacttgcttaaaatcttctattgccgcccatatttggcccgggtctgggcccgttgaagctggaaatggcgatgattggggttagtggtttttatgcagacgatatgaatgaacctaccggtttctttggcctggacctccgccgccactgcccaagggcgggaactccgagtgatatgcatttatgccattctgattgtgatttctacctcctgaacctccgcgtttgcttgggcctccttggggactgcttgtctcgtgactgctatcgcgtctgtcattgaatccgcctcctcctccattgaaaaatccacgtcctcccggtggatttcctctatatggcaaaacaagatattatatataatttagaacccaatcttatgcacaacttacccattagtcccacgattgccagagttcattggtccattgccaaagcgtccgaagcccatttgctgctgctgatgctctacaggcagggcaaatccacgtcgatcctgtcgcacatggcttggacctgggccgccgccgccggccctctgatttacggatcctcctcccccgctgctggagctgcctccctgaaagtcactattattgcctcctcccctatatccgctggttggactgttcttaaagtttcttctg

SEQ ID NO: 3200 - DNA, 1573 bp, DROSOPHILA
atcgagacttcgaagctttgtgtggttatcaaacaggtccccaaaattataaacaaagaaatcagaaatttggtaaacttcagactgcctgctgtatatatgcgaacgacgaacgaacagatcgccagttatacggtcgagtcgctgtggttcacttgtaacaagtgtggctcgcaaaatgtggaaccacccaagccagcgctggctcatcttgatctgcgttatatgtttgctgtcttttgcgctggccaattcgcttcatggctatgctaatgctgaaggtcatccagtggagatttcggccacattgccaggccagctgaagtttgtgcatgtcatatatcgccacggcgacagaacgcccgtggatccctatcccacggacccctggggcgacaggaagttctggcccaccggctggggagatttgaccaatttgggcaagcaagagcactacgacctgggaaaatggctgcggaatcgctattcaaacctcctaccgcctatatactccaacgagaacatctacgttcagtccaccgacgtggatcgcacattgatgagtgcccagtcgaatctggctggtctctacgagccgcaaggggaagacatctggaacacggacatcaactggcaacccatacccattcacacctcgcccgagagggaggatcccatactggccgctaaggcaccttgtcctgcctatgactatgagctggccagcctggaatcatcgccagaattcaaggccttgaccgaaaaacaccgaaatctgtttgcttatttgagcgaaaaaggcggacgccccgtgaagaccttcattgatgcccagtatttgaataacaccttgttcattgagaatctgtacaacatgacactgccaaaatggactaaaatggtttatgggagagaggagctcacgtatgtatcgaatttcgctttcgccatcagctcttatacgcgaaagctggcgagactgaaggcggggcctttgctaaaggacatattccagcggtttaaagagaaatcctccgggagcctaaaaccagatcgttcgatgtgggtctacagtgctcatgacaccacggtagccagcgttttgaatgcgctgaaattatttgagctgcacagtcctccctacacggcgtgcataatgatggagttgcgtgtggatgagaccaacaccccgttggtctctattttctacaagaacaccacagctgaacccctgcctctggacatacctggttgtgggccttcctgtccgctgaccaaacttatgaacatctacgaggacgttttgcccgtagattgggagcgcgagtgcaagctatccacgatgatgatgacttatgaggaagccaatcttggaactgcgacgggcattctcattttaatcgtaattgcgctgctgttcgccagctatggcctcatgatctactaccgacgtcgcaactacaagctgtattcctcgtactctcaaatggcttaggaggcttacccatgccatgcagttgaaggccctacttaaatctgaattaagagccttgcccgctctctagttgccaaa

SEQ ID NO: 3201 - protein, 438 aa, DROSOPHILA
MWNHPSQRWLILICVICLLSFALANSLHGYANAEGHPVEISATLPGQLKFVHVIYRHGDRTPVDPYPTDPWGDRKFWPTGWGDLTNLGKQEHYDLGKWLRNRYSNLLPPIYSNENIYVQSTDVDRTLMSAQSNLAGLYEPQGEDIWNTDINWQPIPIHTSPEREDPILAAKAPCPAYDYELASLESSPEFKALTEKHRNLFAYLSEKGGRPVKTFIDAQYLNNTLFIENLYNMTLPKWTKMVYGREELTYVSNFAFAISSYTRKLARLKAGPLLKDIFQRFKEKSSGSLKPDRSMWVYSAHDTTVASVLNALKLFELHSPPYTACIMMELRVDETNTPLVSIFYKNTTAEPLPLDIPGCGPSCPLTKLMNIYEDVLPVDWERECKLSTMMMTYEEANLGTATGILILIVIALLFASYGLMIYYRRRNYKLYSSYSQMA

SEQ ID NO: 3202 - DNA, 9576 bp, DROSOPHILA
tccagcggaaggtcatcaaacagttccaaacgatatttgcttaaaccatgtccatgctcgataaagtccacagcaaagtattttgaatccgatggcttcacctttgtaaatattgcacaaggaaagaggaaggaaacaagagcacacacttaagtttaaaatctcgactaaaagatacccgcttctcacactccctgggcgaagaataaaaagtgcacaccagagatctgttaagagctgtaaagagcagatcgggtaaacccaatctttgactcgtattggccatgtataatcggggtgcaaattgtcttttttctctctcgaacaaaacctgcctgcatggctgatctcaactttctagctttatatttctcgaaatcacagcgtttattgcgttcccttttttagattatggacaatggaattaccgaattacccgtgcaaaagaaattataatatctcatttcaaagttgtatctttttgttgatcaaaggtgatagatagattttgtttacaatattgaaattgcatgtgtgtatttatacccttttctcgtagaataatagagtatactagattcgttgaaaagtaagtataagatatatatattcttgatcgggatcaatagccgagtcgatctgttcgtataaacgtctgtccgtataaacgagatctcaggaactataaaagctagaaggttgcgattcagcatacagattctaaagacgcagtttgttgaccaatgttgccacgcctactataacgctcacaaaccgcacaaaactgtcaagcccacatttttgaacaaatttttaactttttctgattatattccccaatatctatcaagatccaagaaaaatgatgaaatttcgagttcgcattcacactaactgagtaacgggtatctgataaacggagaactcgactaaaccgctctctcttgttttattttacacaggattttaaatatgttcacatttaaatgctgaatgcgtgttacaccttgtcaactattaattttggacactgtcataggatatgtccatgtaaactaagtgagtactgacagttaattagaaggcagggaaaaaacgataaaacgcatccaaaataaattggatggttgaaaaaatcaaagattttttttgactgttttgggttgtttgtaggcgaaatcgtttgaaacagtttagcacaggttatgggtaaatttacatgctcaatatcttttatggttttagagatctcgaagttcgatcagacttctaaacaaatctggtatacacacccattaccacagacattagaatatgagtatgcagaacgccgcaagagttaataagaagacttttgagcccaaagccccaccagcgacttacctgaaccttgagcaacgccttgtctagtccgcttatatgaatttcatgtggctttaggtcggtgacacgcactgattcaggaaaaactttgataccgggtactaatttcaatgacattttatcggaaactcctttggccaccactgcctgttcaaaggagaagagtttgtttaatttaatgaacatcttacactgtttgagactgacctccagctccaggtagacgtcgtgtgtcttgacaatacttagcaactcaataaaaccggtgagcaactgtagtcgacaagagtactgcccgatgctaggctcaaacaatgcatcaactttatacatttttagtaaattacgtcccagagcatccttggccgccaggcgacatgtaaagaaattcaccggtacgcttcccaattccctggcacattttgaaacattttgtgcaatctacggaagggaagcatgtatcaggacaagacacagttattttttacaatttccttacaaggttactatacttttcggactgcaaatggttgcgaataactagttgtccccgatattctggtccgctaaatgtgtccactgatttgacaaacaaaatctgtaggaaatattggttgagatgctgacaaaaggtggtaacaatggatgcaataccgtatccgattcgcgaacttccaggtcatactttaaaaatccgccgcgttttgtctcgtcgccattagtgatctcaatcttttctcccggctttagtcgatgacttaacacctgggcaatgcctgtaatggagaggaggatataaactatgtatcttagtgggtaaaataattttggggtgaagatagaaagtgcgagtgcgacgcccacctaacgcccacgcatattaaaaatgttttgatattttttcatttttttatcagtcttgtcctgaaaaacgggtatctgataggtggggaactcaactatagcattcccttttgttttttgatgtagacggcttcgctcattttcgatgttaagaaaagaatacttgtgattttatatatacaatcgatctgagaagttctccctttgaagagttttaaacagaaaggcttaaattttagactcgactagatggatacgaatatacatatatattttataaaatccaaaacatcatagtggcgttatggaaaagcgtcccaaaattgtgatttaaatgcaagggtataccaatgctcactaaaggtgggattaaagtgaatgcaagcagtaaattactcacctgtatgcttattaatgtaaactatctgctcattggagcttcgccaagtcgatgacaacgttaaaggtgaatcgaaacaaattatgtcgccaacagagaaaatagtctgccggttggataaagttttgtcaaagccaaataagttacagacgacggatgttccattaaaacatttataagtaagaaagcaagttccacttatttgggagaataaataccttggtgggaaataaattgtccgactcgacaacagatagctttatgaagtccatggagtgcttgacacccgttgagtcctttagactaatgccaatgacattgttggtctctcgcatcaagttcaactaaacgaaaatgagtgtaacagacaaatataaattacatttgaatgttaaaatgcgaatgtattcgctttaaattaagacacaagtagccgaacctttcattcaaataattaaaacctaaatgaatttacactttttggtctgagataaaaaaaattgggctctctttaactacttggagaaaggaaagtatacaatttgacatggcaatgatggagcgttacaatcatatgacttaattacacttaccgcaaacgttagattattatctatctggacatccacatcatctttgttgccgagttcatatcgtagtccgttgaaatcctcgatgttgtgcgacagctcgttgcctaaattgtcgtgaagcgacactttaaacacaaagttcattccacgcgggattttgtgttcaagctctcttaatttgaggattggcatcagcgttactaaaatgtattgcacatttttaacttcaattcctatgggtagggattggtccgcggtcgtcgcctatattaaaaatactaaattcaagtcctcccgtgtagggttcgaaaagcaggttctcacaattatcagatcacggccaagagagtcctttgtgtgtacaaggccatctggtgttacactgacaatgccattacttcgatcgtccagtttatagaccacattatccatattagatttaagctgaagaatgcttcgcggcgcagccaaaattgaatccattttaatggcatttggtgttaccagctccaatgttttaaaaactgcaatacaatttttaattattatggtagacataggtggccgtttcagcttgaacgtaccttgtaagtccactgtagctggtggcagtattgttccgtctgccaaagtaaccgatgccgtgattgttgcctttccaggattgagggctcttactctaactgatatcaaatccccactctgatactctattcctgcagtagtaaaaaacgtaatttattactatttgttatgtatagaaactatgtatccaattgcagaggttaagttatactaaactctttgcaaaagagattcgttgaaaaatgtgtaacaagcggaaggaagcgcttcacatcatcaaatatcacagtcatagaaactattgtatattccgtatctgtgcctgctttgaaactcattcaggcaggctcatcgaagaatacattgtttttgttatccgtgctcttggtggccatagagctacagtctcttatctctacagcggtatccgaacacgtttatttttaaacaatagataaaagtatactaacctgcagttgtaaatacattaaatatctcaaccacctgtggttggcttactttccaggagattttagtgttttgcaaggtacccaaaatcatgggcgacaaatcagaaagaccccacaaggtagctggcattacggccccactatgaatgcggaccaaaggcgttcgaatctgtactcctttcagagccactacgtgtacctccaccgagtcctgggagaccacctcgtcctttccagtgacagggttttttagaagacatttgcctacgattttggtggtccccagcttatgggccgtaacaacagtagagcttatagctgacgataaaaaacaaaagggattacgtgattttaagatgatacacaaaaaaacttacttgctacttgctccttctccactgagattatcatgttggtatttgggtgcggtcctccatggaagtacacctgtatactgctgcccaccactagagttgagtcgcgcggaaagagacgaattggagcgaaaacttgaatatttagagggtcgcttgccaccttataaatgcccttgccagactgaaataatattttggtttcgccgacttggttgcccgtaattgtgtagcggatctctccgggtcctacattttcctgctcgcctaggcgcacgctcagtatactttggtctgcgacaacctcggataaatcgtacgcactaagtttgctctggtccacaagcaagagattatcattggtatcaaaaagccttacgatagcttcgattctagtagtgcgttctagccggtccatgctaactacctcaatagccccgattccaaccacagagatggataaatggctgggttcgttcattaagcaacggtcggtcaactcaagacgaacatggccaaggcgtagtggcgtcagcactaggattcgggtattttcattgtattcaacttgaacaatacctgcctcggagagctccagctgcaagtagccgctgccctgggcgattggtattcgctcgctatagcccgaggccagaaaaatgctcatgtaatcttttggcaacaacgtactgttaacggcgtgtaacctaatttcattttcaatcagaggagtgtatattaaacccgtctgaggctgtaaaaaaattatcattaaatttttacggattactaacgttgaagaggattacccacatttttgattccaaagggaggacgctccgcgtgaataccgtgttgggcaagtagcttgtcgttatactgggacaccgttcccttaatgcggaagttggtcgccacttcactcaatgtcaagacaagaaggtcgcgactcggcagggtaactccatgattgaactccaattcagaaatctgacggtgcgggataatgttcttctggtatcgctcttcaccagcggaaaactcccagtcaagccctagtgagctgatattcatgagcctacgattatttgaatcgtgtacctcgatttcaatttcaattttattctctggatctttcaggaataataacgaggtgcgcttctccagggggcaggagtcacgcaggttatggcgagcgtagagctttaggaagcgaggacggacgcaatgcacctttgtggtcacctccgattgatataaggcaaagcttgaggtgggaaggctattatgcactcggtaagtgaactgcgtctcgcccagctcacgacacagcacggtgaacgcagttatcaaattttgcgtgtcgaactctaatttagacacttttaatattttttcatcaaaagcggtagattgtatgatttctgctgccaccgtaaaactgcgctgcggcccattagcataaattatattacgggatgacccaacgggaagaacaacctcgttttctattggatttagcacgactaatggctcaaagacatacaaatcaataatgtcgtaaagcactttgtccatatacatataggaaacgcgtagcgaggtggtgcccacagcggtggcccgcaaccgaagcacatgacacgcctcgtgagcagcctccgccccttcattaccctccaactgcagaatgggctggctgaagtctagttggaagtgaagattatcacaacttgtgtagggaacctctgaattatttattcgagcgtatacgcccacatgcacgtgtacgaagtccttcagggcggtctcaaagttgctccgcgtgatctgaaggcgctcaggggggagaaagtagatatgtgccacacgggaaattttctggttcttggatagagccaccttgacggtggtgtgggcggtcagtttaccaccatctttcagtacctcctggttcacgtaagcggatttcacgtcgcggatttcagttgtggcttggccctgggtgtcaatctggatcacctgtggatttccggagaaccaagcgtagttgttatctccgccagatgcatgaaactgcagctttaaaggttttaagctgttaggatcgtatggcaacaccaccttggttggcgctaactgaagctcctcaaatatctgaagctcagcttgtaccgacagctgcaacataaataacaatattataagaacttttaatataacaaatagacttttggactattattttgagttaaccttctataaaaaatgcaaacaatttaaaattctacatatcactgcggttgactttataaaaatagatatttatttgacttatttaatattttatttacttcgttataaaagaggtgggcaaacgaaatgaattatttttagcggtcggcaagcaataaaaacaaattttaattaatggctttttttttgttagataatatttagtttttagaagtggacaaacgcctaattatatgataataccgcgattctttttaatgggttatatctatgcacatattttctagagtaatatatataacaaacattttagttataaacttacgtctttatatgagccatacacctgagtgattccctctttttttgcttgaccgaaaaggcggcttccgttgcgagtacgatcaacaatggcgaaaaaggattcatccacctctgagttgattgaatatttagtgcccattgtgatcttctgaccgtcggcagcaaaaagatccaatgctatagcgtgatgctcgccttgtactgtcacccaattgagatggggcaacagactgatggacaacctattcggatatgccacagtcaatagagcgctgggtcccttttggacctcatcagagtccgccatgttgcggtctcgcagaaagacctgggtgcgacccagagccgctccggtggcactgtttccacgaaggtatgcaatgctggagtcctccacctccaaataatactgattgttgtctataacgtgcagtcggtccatcttcagctgcagaatgcgaaatgagacggagtctccagccattatggtgacttcggaaggctcaattataatgtttgcaagaacgctgatgtacacctcaactggccgcacatgcttgtactcggcctgaggcatggcgatggtcaccttggcggtgccagtattaatgccctcaaggaggatcatgtgccccttcttgccgtcggcttcaaacttttcaatggtgggcggtacagtgtggtacggactgtccgtgaacgtgaggtatcgcattgcggtgggccttttgctaccgggttccaaaatctcccagtcaaactcgattccctccaaggtaaaaaactcgttgccttgttcatcaaaggcgtgcagctcgaacatggcgggcgcctcctccaggtaaagttgtcgagtggcggtgcgcacatttagactagcaatgacatccacaatcacgtcggaacgcagcgtctcgcccgtttgtacttcctcggcgaagacgattgcagtgttcctccgacgatcgtgagtgcggactgtcaccaccgcctggtatgcacattcgctgaagcccttgtaaatgggcatgacagatatcaagtcctggcgtgaggacgacctgcaagttcagcatagtagtagtagtagttctagaagttataaaattatatctgtatgacgccgatttaccatttgtagcagttcggctcgtcgacttccagggtaaagtttattgccttgtcttcgaatattggtagtaacacacgcgggtggttcaacctagctgcctcagaagcatgatttcttaccaaaatcagcaaaatcatgcaaagaatagaatccatcgtgccggcaaacgagccacgcgcggaacgagatgctggatagggatggacaagaatgacaatatcgcaaatatcaactatcgataaattatattatacgggtttcaaaaataccaatatatcacttattatatgtgatgtaaatcataatcagttgtatatctgtacctcaagttaaacgaagacttacatattacgtataacagctttttttataattatatttatttacaaataaaattgggtttttgcttgtaaatatttatcaaataacatcattttcgggataccctgcaactcagtcttaataggaatattattctttttgtattcctaaaataggactcgcttaagcttaattaacatttatttttctgtaatatctaaactaatcctagttaaactggtgacagctttagaaaaatactgttaacacaactcaactctatacagctgcacatgcagttaattgatgtctgtaatcgaaaagcaaaacgtctggcaacatcgggttgacttcaccggcagctgacttctcatgtaaccatttcgttataaacaagcaatttaagtgatccgaaattggggaagtgccatgctagaatttggtcgaacattgctgcgctggagaacgcggcactgcagtcgcagagtctctacgtggacgccgctggctacggcgtttaatgcgccaccggctaggcggatcaacttcacccacgacgatgttgtaagacccaaagtctgtaaaacgcaggacctctgactaggcatacatggcctttttcccgtagggcctctttggcatgcccgaactgcggagttttgagggcttctatctccttcgagacaatgtggaaagccggacgcaggagctgatctccgaggccacctccgatcaacgacgtcgaaagatggtcgacatttttgacgagctttctgactcattgtgcaaggtggcggacctcgcagagtttgttcgtatcgcgcatcctcagagcagatacacccaagcagcagagcaggcctgcataagcatt

SEQ ID NO: 3203 - DNA, 4813 bp, DROSOPHILA
tccagcatctcgttccgcgcgtggctcgtttgccggcacgatggattctattctttgcatgattttgctgattttggtaagaaatcatgcttctgaggcagctaggttgaaccacccgcgtgtgttactaccaatattcgaagacaaggcaataaactttaccctggaagtcgacgagccgaactgctacaaatggtcgtcctcacgccaggacttgatatctgtcatgcccatttacaagggcttcagcgaatgtgcataccaggcggtggtgacagtccgcactcacgatcgtcggaggaacactgcaatcgtcttcgccgaggaagtacaaacgggcgagacgctgcgttccgacgtgattgtggatgtcattgctagtctaaatgtgcgcaccgccactcgacaactttacctggaggaggcgcccgccatgttcgagctgcacgcctttgatgaacaaggcaacgagttttttaccttggagggaatcgagtttgactgggagattttggaacccggtagcaaaaggcccaccgcaatgcgatacctcacgttcacggacagtccgtaccacactgtaccgcccaccattgaaaagtttgaagccgacggcaagaaggggcacatgatcctccttgagggcattaatactggcaccgccaaggtgaccatcgccatgcctcaggccgagtacaagcatgtgcggccagttgaggtgtacatcagcgttcttgcaaacattataattgagccttccgaagtcaccataatggctggagactccgtctcatttcgcattctgcagctgaagatggaccgactgcacgttatagacaacaatcagtattatttggaggtggaggactccagcattgcataccttcgtggaaacagtgccaccggagcggctctgggtcgcacccaggtctttctgcgagaccgcaacatggcggactctgatgaggtccaaaagggacccagcgctctattgactgtggcatatccgaataggttgtccatcagtctgttgccccatctcaattgggtgacagtacaaggcgagcatcacgctatagcattggatctttttgctgccgacggtcagaagatcacaatgggcactaaatattcaatcaactcagaggtggatgaatcctttttcgccattgttgatcgtactcgcaacggaagccgccttttcggtcaagcaaaaaaagagggaatcactcaggtgtatggctcatataaagacctgtcggtacaagctgagcttcagatatttgaggagcttcagttagcgccaaccaaggtggtgttgccatacgatcctaacagcttaaaacctttaaagctgcagtttcatgcatctggcggagataacaactacgcttggttctccggaaatccacaggtgatccagattgacacccagggccaagccacaactgaaatccgcgacgtgaaatccgcttacgtgaaccaggaggtactgaaagatggtggtaaactgaccgcccacaccaccgtcaaggtggctctatccaagaaccagaaaatttcccgtgtggcacatatctactttctcccccctgagcgccttcagatcacgcggagcaactttgagaccgccctgaaggacttcgtacacgtgcatgtgggcgtatacgctcgaataaataattcagaggttccctacacaagttgtgataatcttcacttccaactagacttcagccagcccattctgcagttggagggtaatgaaggggcggaggctgctcacgaggcgtgtcatgtgcttcggttgcgggccaccgctgtgggcaccacctcgctacgcgtttcctatatgtatatggacaaagtgctttacgacattattgatttgtatgtctttgagccattagtcgtgctaaatccaatagaaaacgaggttgttcttcccgttgggtcatcccgtaatataatttatgctaatgggccgcagcgcagttttacggtggcagcagaaatcatacaatctaccgcttttgatgaaaaaatattaaaagtgtctaaattagagttcgacacgcaaaatttgataactgcgttcaccgtgctgtgtcgtgagctgggcgagacgcagttcacttaccgagtgcataatagccttcccacctcaagctttgccttatatcaatcggaggtgaccacaaaggtgcattgcgtccgtcctcgcttcctaaagctctacgctcgccataacctgcgtgactcctgccccctggagaagcgcacctcgttattattcctgaaagatccagagaataaaattgaaattgaaatcgaggtacacgattcaaataatcgtaggctcatgaatatcagctcactagggcttgactgggagttttccgctggtgaagagcgataccagaagaacattatcccgcaccgtcagatttctgaattggagttcaatcatggagttaccctgccgagtcgcgaccttcttgtcttgacattgagtgaagtggcgaccaacttccgcattaagggaacggtgtcccagtataacgacaagctacttgcccaacacggtattcacgcggagcgtcctccctttggaatcaaaaatcctcagacgggtttaatatacactcctctgattgaaaatgaaattaggttacacgccgttaacagtacgttgttgccaaaagattacatgagcatttttctggcctcgggctatagcgagcgaataccaatcgcccagggcagcggctacttgcagctggagctctccgaggcaggtattgttcaagttgaatacaatgaaaatacccgaatcctagtgctgacgccactacgccttggccatgttcgtcttgagttgaccgaccgttgcttaatgaacgaacccagccatttatccatctctgtggttggaatcggggctattgaggtagttagcatggaccggctagaacgcactactagaatcgaagctatcgtaaggctttttgataccaatgataatctcttgcttgtggaccagagcaaacttagtgcgtacgatttatccgaggttgtcgcagaccaaagtatactgagcgtgcgcctaggcgagcaggaaaatgtaggacccggagagatccgctacacaattacgggcaaccaagtcggcgaaaccaaaatattatttcagtctggcaagggcatttataaggtggcaagcgaccctctaaatattcaagttttcgctccaattcgtctctttccgcgcgactcaactctagtggtgggcagcagtatacaggtgtacttccatggaggaccgcacccaaataccaacatgataatctcagtggagaaggagcaagtagcaactataagctctactgttgttacggcccataagctggggaccaccaaaatcgtaggcaaatgtcttctaaaaaaccctgtcactggaaaggacgaggtggtctcccaggactcggtggaggtacacgtagtggctctgaaaggagtacagattcgaacgcctttggtccgcattcatagaatagagtatcagagtggggatttgatatcagttagagtaagagccctcaatcctggaaaggcaacaatcacggcatcggttactttggcagacggaacaatactgccaccagctacagtggacttacaagtttttaaaacattggagctggtaacaccaaatgccattaaaatggattcaattttggctgcgccgcgaagcattcttcagcttaaatctaatatggataatgtggtctataaactggacgatcgaataacgctgatgccaatcctcaaattaagagagcttgaacacaaaatcccgcgtggaatgaactttgtgtttaaagtgtcgcttcacgacaatttaggcaacgagctgtcgcacaacatcgaggatttcaacggactacgatatgaactcggcaacaaagatgatgtggatgtccagatagataataatctaacgtttgcgttgaacttgatgcgagagaccaacaatgtcattggcattagtctaaaggactcaacgggtgtcaagcactccatggacttcataaagctatctgttgtcgagtcggacaatttatttcccaccaagactattttctctgttggcgacataatttgtttcgattcacctttaacgttgtcatcgacttggcgaagctccaatgagcagatagtttacattaataagcatacaggcattgcccaggtgttaagtcatcgactaaagccgggagaaaagattgagatcactaatggcgacgagacaaaacgcggcggatttttaaagtatgacctggaagttcgcgaatcggatacgattttgtttgtcaaatcagtggacacatttagcggaccagaatatcggggacaactagttattcgcaaccatttgcagtccgaaaagtatagtaaccttattgcacaaaatgtttcaaaatgtgccagggaattgggaagcgtaccggtgaatttctttacatgtcgcctggcggccaaggatgctctgggacgtaatttactaaaaatgtataaagttgatgcattgtttgagcctagcatcgggcagtactcttgtcgactacagttgctcaccggttttattgagttgctaagtattgtcaagacacacgacgtctacctggagctggaggtcagtctcaaacagttgcgtgtcaccgacctaaagccacatgaaattcatataagcggactagacaaggcgttgctcaaggttcagtgtccaaaattaatagttgacaaggtgtaa

SEQ ID NO: 3204 - protein, 1528 aa, DROSOPHILA
MPIYKGFSECAYQAVVTVRTHDRRRNTAIVFAEEVQTGETLRSDVIVDVIASLNVRTATRQLYLEEAPAMFELHAFDEQGNEFFTLEGIEFDWEILEPGSKRPTAMRYLTFTDSPYHTVPPTIEKFEADGKKGHMILLEGINTGTAKVTIAMPQAEYKHVRPVEVYISVLANIIIEPSEVTIMAGDSVSFRILQLKMDRLHVIDNNQYYLEVEDSSIAYLRGNSATGAALGRTQVFLRDRNMADSDEVQKGPSALLTVAYPNRLSISLLPHLNWVTVQGEHHAIALDLFAADGQKITMGTKYSINSEVDESFFAIVDRTRNGSRLFGQAKKEGITQVYGSYKDLSVQAELQIFEELQLAPTKVVLPYDPNSLKPLKLQFHASGGDNNYAWFSGNPQVIQIDTQGQATTEIRDVKSAYVNQEVLKDGGKLTAHTTVKVALSKNQKISRVAHIYFLPPERLQITRSNFETALKDFVHVHVGVYARINNSEVPYTSCDNLHFQLDFSQPILQLEGNEGAEAAHEACHVLRLRATAVGTTSLRVSYMYMDKVLYDIIDLYVFEPLVVLNPIENEVVLPVGSSRNIIYANGPQRSFTVAAEIIQSTAFDEKILKVSKLEFDTQNLITAFTVLCRELGETQFTYRVHNSLPTSSFALYQSEVTTKVHCVRPRFLKLYARHNLRDSCPLEKRTSLLFLKDPENKIEIEIEVHDSNNRRLMNISSLGLDWEFSAGEERYQKNIIPHRQISELEFNHGVTLPSRDLLVLTLSEVATNFRIKGTVSQYNDKLLAQHGIHAERPPFGIKNPQTGLIYTPLIENEIRLHAVNSTLLPKDYMSIFLASGYSERIPIAQGSGYLQLELSEAGIVQVEYNENTRILVLTPLRLGHVRLELTDRCLMNEPSHLSISVVGIGAIEVVSMDRLERTTRIEAIVRLFDTNDNLLLVDQSKLSAYDLSEVVADQSILSVRLGEQENVGPGEIRYTITGNQVGETKILFQSGKGIYKVASDPLNIQVFAPIRLFPRDSTLVVGSSIQVYFHGGPHPNTNMIISVEKEQVATISSTVVTAHKLGTTKIVGKCLLKNPVTGKDEVVSQDSVEVHVVALKGVQIRTPLVRIHRIEYQSGDLISVRVRALNPGKATITASVTLADGTILPPATVDLQVFKTLELVTPNAIKMDSILAAPRSILQLKSNMDNVVYKLDDRITLMPILKLRELEHKIPRGMNFVFKVSLHDNLGNELSHNIEDFNGLRYELGNKDDVDVQIDNNLTFALNLMRETNNVIGISLKDSTGVKHSMDFIKLSVVESDNLFPTKTIFSVGDIICFDSPLTLSSTWRSSNEQIVYINKHTGIAQVLSHRLKPGEKIEITNGDETKRGGFLKYDLEVRESDTILFVKSVDTFSGPEYRGQLVIRNHLQSEKYSNLIAQNVSKCARELGSVPVNFFTCRLAAKDALGRNLLKMYKVDALFEPSIGQYSCRLQLLTGFIELLSIVKTHDVYLELEVSLKQLRVTDLKPHEIHISGLDKALLKVQCPKLIVDKV

SEQ ID NO: 3205 - DNA, 8446 bp, DROSOPHILA
tccaaaacctgaaaactaaaaatttgcattattttttcgaaccctcgcttgaaatatgcaaaattcttgtttataattttaagatctacataacatgaaattccatgtgaaatcccattgtcaatcaaatgacaacgttactaatattatctaaagaactagtgttactgaaaaattaatgtgtacacccctattatgttgacttttccagtcaaaccactaaccgtaaagcgactaacaggaaaagtgcatgatattttcaatttgaaaattgaataaagaaacaggtaaacagccattgccgatgtcttttaagatacttttgtttgacaacataaataaaccgatcccatttcgttatttcatataattcatatttaatcacaattataaatagtattctaccgaatgatatgactatcacatacccgttaataacattaagagtgcaagagaggtgaagaaaatgatcccggatctcgatcatatggacagatggatggacaaaacgaaaagactagtaatgttgatcaagaatataccttggaaacgcttccttgtaattgttgcacattttataaccgagtacgtttttaaggtgtaagttttttattggttaaatatgcttgctctaaaaccctttgacgttccaaagtccaaataaaattccgtttgataattttcgagcatttatctctaaacttattataaacgtaaacataacacgaaagtttttacatttatttttctgccgaaattgacggtagatgatattgcacaataaatgggttcgttttctaacttagggcatgactgcctatttaaacttacatacataatctcattttcataaattaccatgaatgtattaatatatgaagctttactcattcacatgcattgaatcctatcgacataatagaaagatcgttgtacttgattctgtatctgtatcaatcctcagtcctcagtcatccctagaggaatgaatcgccgaacttcatgagtccgatggtcgttgattctcttggtgattcgaactcgcatggaatcgatgttgttggctattgcctccactattgccaccagcattgccagcattgttactattcagctggttttgatcagcctcgcattttactccggtgtcaggaccagatccagttgccagtcggaatgctgcttcggtatgcgagcgtaagatcgcttcagcctggtgcattcggagcgccgtttcaggactcgtatggtgatgggcggtttggtgtgtctgggggtgtgggtgagtatgttggttggtaggagttacggcgtgctgcggatagtttgacgtgtggtggtgatgatggtggtggtgctgctgctggtgttggtggagaacttctattccatgcattcctcctaaactcgggtccgggtcgagggaaccgcgcatcatatgtacgttcatgttcatagcgatcgaggcggcagtagattcgttctgtaaacttggcacatttatgtttggtgaactttgagaacgggagttgctgttgctggggtgagtatggactagcaaatgggacaactgttgctgttggtgctgcggagcctgctgctgttggtggtgatgtgggtgtgcatgttgaaggatatgtgtctggtgtgcctgtgtgtgatcggcgtgctgaaacacggaataacgcatttaaattattgattaaatttgtataacgaaagtaagttaaggactgttataccaataaagaaaaattggtttcccttacaacatttagcacgtaagcttaatacaagaccagttggacatttatgaaaattttaaacgtttttatgtttcgtgatctcgggggtagcaccgttgctggaattgttcattcgcattgcagctgccacatgaacatagaatgtaactgggcgctttgtaagaagtaattattttgaaatttataagaagaaacagaaaacagcggcgtttaaaagcttttttcatgccctttctcatcgccctttctcatagctgccaaacggattttatctaaaaagaaagggctaagcgactgctttttgacttgattctatcttctttccaaaatgcttttctttgtttagtctggtatattattcttacatgttgttggtagggggtagcaccgttgctggaattgttcattcgcattgcagctgccagattaaccacagcggcctgaaccgccgcgctcgggactgctgaagtgtccactccgtcttgtggtcgtgacgcagcaactgctgcagcagcagcggccattagtgacatccggttggcgacatgcagttccgcgtccatggtatattggccggttcccggaagtcgaagctcagccattttatgagagctagcgttgttgttactcgtgcaattattgttgttattcgtggaactgcctatgttgttctggttgctgttctcattttcacttaaaccatggtcgatgtcttggtcttgatctgatgttgtcgatgacgagaggcgtccgtttgaagagcattccgagttagccgaaggggaagggcatttcgagttggatccgtccgagttgtgagctcccgtaggcaaaacgtttccggcatccgcaattccgattcttgtactagcgccactgctggcggctaaggtaaccgctagaagagattctcgttctcgctgctctgcagctgcccgggactggaattaaagaataataattaattttttttgttaaatcaagcgttatatgtaagcgttatatgctttgtggtttttgaatactaactagtacgtattgagccgcgaactgatgtttcggatccatgcgcattgactccatatgggtaagaaggcctggataacaaaacgaatgaagttaattacttgttaggatcaatattattgactagtaccgttttcatgagtgaagacggcctggcaaacgctacatggccacattcgcaggctgtttgtaagttgggagttctcagcgtggcaagccagatgtttccttagggaaccctcgttgacataatgtttaccgcaaactgggcaaggatggttggcagttcttcgcttgcccaaaaagctgtcgattaagctagagccaacagtggcctgatgcgagttcgattcagttgtgcattgggtagcaatttgttcattgctagatccagttccgtttccattgcccgtaactatctgattgagctcgctaaactgggatgaggctgagcagaaaaggacaagacaaaacgaaatggtttgataattatgagagtatgatgtctatcgatatatctattgaaagatagatgtactacatatgtacatgataagttatcaaagttaaagttatcttcttaaagttatctttaagttaagttcagttaagtacgttgaagtcagcagaaattttcttacctgagccaccaggtggggggctcttttccttatgaacatgtttcatgtggtccacaagggcttcagtgccaaggaaaagtttatggcacaccggacaggacgtagcgtttggaccacctattagtgcggcatgctgctgcaagacaccaagatgcagctgtagctcctgttcgcaatgtgcggtgttttacggttgcgagaaaatttttaataggtggagaatgcaaatgggatagatacaaagatcaggttcaggacgatggaagttatataaaaggcaatgaaaaatgcatgatgggaagcttgtaacgcgtactaaccttcgatgtatgtgtacgcaggctagattcagtggcgaaaccctttccacatatgttgcagtgaaaaggacgatttttggcacgctccacctgagcgtcatggtttcgtagatgctgttgtagatttgaaagctgtataaaggctcgaccgcagtctggcagatggcatttatagggtcgttctcctaaaaattgaaaaagagtaaaactattagatattgtctctttctcgaaataataactcttggattaagggagatcacattatttgtgctggacgattcatcctcaaagactatatatgcacatacacataacaagagagaacgttatagtcgagttccccgactatcagataccagttactcagctagtgtgaatgcaaacgcgaaatttcataatttttttgggatatcgatagatattggggaataaaatgagacaggagggcgttagagtgggcgtggccaaaagttttttggcaaatcgatggatatttacaagactaataaaattatgaaaaaataccaactcgtttttcaaaaatgtgggcgtggaatttttgggcggttttagggcgcgccaaaaggttttttgcaaatcgatagaaatttacaagactttataaattataaaaaatattccaaaattgttcaaaattgtgggcgtggcagttttgggcggtttgaaggcgttagattgggcgtagcaaacaatttttttttttgcaaatctatagaaatttactatactaataaaagtgtgaaaaaatatcaacacgtttttcaaaagtgtgggcgtggcaaggtgggtcaacaaacttgcgctgcgtctttgtgtctagaatctgtatgcttaatctcaaccttctagcttttataattcttcagatctcgacgttcatacggacagacggacatggtcagatcgacttggatactgatcctgataagaagaatatatatacttcattctgcctgatacatacttttcaacgattttagtatatcttttactctacgcgtaactggtataattagattcttgataacgaaattcattgaccgctcacaaatttgaaaagatattcaaaacaagatttttgaatcgaatgttatttacttattgtctactacgtcaaaaaatcagcctgaacaattgcaacagatctagaatattttaaggctcaaaaaaccgagatactggaaaacagaccccaaagtttctgctcacgacatgggtaaatagttacagcgcctaattaattgactgactacttcacttaaaaagactaatagcaagcgctcgaaaatattacaaacgagtacttttaattctagttgatacaaaagcaacttcaagaaaagcgctaaagagacagcggcgaatttcagctttaaaggcaaattaatttaatttaatcgcgctattaattaaaacgtggaaggtcagcaacaacatcgatggcaaaaggatctggggactaaaacgtttaggctacttagtgtcacttcgtctttgagttaaactaaatataaataaatattcgcaaagtgcagtcgtgtatacgaaactgcggtcgagtcttacccttgggccagagaaaagaccacgtccgcggcccaagagcaacccttcgccaagttgtcgactaagaaatccgaaataagtgcgggcttacagctcaaaggcacgtagtcgatgtctaaacgacacttcatttgatctgtctctttaagcgcctttaagactgcactgactggactgcagctcctaagtgcccagcccttcctcgcctaatggtctttgctatccattatctatccacccgcaacgtgccgtcagcgtttaagaaaccggccgtgccagtacactgtatggtataattacccaattctgctccgcggcaacggaaaacccgtccgtaaaaaaggtagcattccgtcgctgcctattagggggggacgggaccaaactggttttcaattaaagcgtttttgatttctttctgacagtgtctcgagcagtgggaaggcgctgaagtcataaatggcaattgtaaggttgcaatcaggtgtgaacaagaaatggttaaggtaagcggaaaggaattgggactgcgcgtaaagaaacatgaaatgacattgaatgcagctaatgacgtcgaatatttttgtatggcgctatatacattcttgtattcatcccctccagctgtcctgattcaacaaactttgtgaatcccagctacgagggtgaaacgggaacggctactggctcaaaaagctcttgaagtttatttaattatctttgtcatttctatttgcagtgccgactcagctgcaaagatgcgttgaatgcgagtgcaaaaacacaagcccttattataatacgggcgaacatgagatttgtaaaaagacgtcgaagtccaaggtcagccgaggcacttttttattccaatacagtcttgaaaatagtgctgaactgaggacagtgcccattttaattatttaaggacaagctctgagcatttttaatcatcttggtaattaaatctaatacaattagtaaaaccatataatttttcaaatcgggaccaaaattatccaacaatttttgagttcagccacttattaaaatcgagtattcaagccaaaattgtgctgtgcttacttgaatacaatttaaagtctgcaagccaaaggttgcctgcttttacgtatcggcggtctgtgaaagaacaatatttgttgaagacaagatagaacaatatagtttagttttccgactacaagaaattttaacgtggcagttttgggcggcttgtgggcattagagagtgcgttcccaaaatgttttttgtgtactgatagaaattgaccaggcacattataaaatcaaaaacgactatcagatacccgttacttagcttgtggaaatgcgaacgcgaaatttcatcttttttctaggatatcaatagatattggagaataaaacaataacaaaatacaagaattgctgaaaagtgtgggcgtaaccgttttggtcattttggaggtgtggcccagtgtttttggtgtaccgatataaattggcaagacaaaaattgtgaaatttcgcgttcgtatttccacgagctgagtaacgggtatcagatagtaggggaagtcgactatagcattcattctcccttgtttattatgacgatccaaataggaatccgaaaataaatcaacgtaaaataatttgtatggtaagccaaatgtttcaaattcttcgcttgtccaaacagtatagttttgtacagggtcttgttccgcctaatatgtgtactatttttaacggtaaaaagtacatgttctacattagagctatgtggctcttatttgtgcagttcgattacttacctgtgtgcaggcgcgtgtgctgctggacgtgcgacaactgcttaaatctacgatcacagtaggaacacttgtatggcttctctccagtgtgtaccctgatgtgttgcacgagctggtggttactggaaaagctcttcatacattgctggcactggtgcggcttggtatccgagctaggcgtaatactgccacctaagttggccgagccggtcacgccgtgggtgcccaggccaacgcgaggaatctgctgctgtatttgctgcatcgcgcttttgtgcataaatagctgcaagtgcaaacaacacattcaaaagatgcagattagtttaacaaaccaattttcaatatggtcttggcagaaggcagtgtacacctcaacctcaagaccgcagtatatctctcagtaccgagcttaatgtcagtctgtctgtcataaccaggtatatttatagactgctcttcttcacgtttagcggtaattgccggttttatgtattgtttcgataaaaatgtgtaccgtcgcatgtcggacatgtgaaaaacatgtcagcaaaatcttaatctcttgtggaaagtcgaaatgaaaactatgaattgtaaataaacatatatgattgtggtaaggtaacgtttttggtttcacattgtgaggtcatcatgcgttttgctgatttttaaatattttatcattggggccaataacaagccaataagtacacttaaaaaccaatccaagctcgttcctgatttataattaataacaaaaatacgattatttcagtgaaaaaaatagaaaatataaagaaagtttttaatccagtgcctcgaatattatttactcgttactcctaatacaatggtctgcttggtctgcacgttaatcgttcaggtaaagggtatacgagattcgtagaacagtacataacaggtggaaggaagcgtttctgatcaggatctacagccgagtcgatctggccatttccgtccctttgtccgtataaacgctgctatttcaagaactacaaaagctaaagagttcagattgagcatgcatcttgcagagtcgcagcgcacgtttgtttcaaaatgttgccacaccccttctaacgctcgcaagccgcccaaaactgtcacgcccccacttttggaaaatgttttgatataagtttcatatttttattagtcttgtaaacttgtatcgatttgtaaaacaatttttagtcactcccacttgttactacgctttatatttttgtcttgccactttttacaggtataccaaaaac

SEQ ID NO: 3206 - DNA, 2238 bp, DROSOPHILA
ctatttatgcacaaaagcgcgatgcagcaaatacagcagcagattcctcgcgttggcctgggcacccacggcgtgaccggctcggccaacttaggtggcagtattacgcctagctcggataccaagccgcaccagtgccagcaatgtatgaagagcttttccagtaaccaccagctcgtgcaacacatcagggtacacactggagagaagccatacaagtgttcctactgtgatcgtagatttaagcagttgtcgcacgtccagcagcacacgcgcctgcacacaggagaacgaccctataaatgccatctgccagactgcggtcgagcctttatacagctttcaaatctacaacagcatctacgaaaccatgacgctcaggtggagcgtgccaaaaatcgtccttttcactgcaacatatgtggaaagggtttcgccactgaatctagcctgcgtacacatacatcgaagcagcatgccgcactaataggtggtccaaacgctacgtcctgtccggtgtgccataaacttttccttggcactgaagcccttgtggaccacatgaaacatgttcataaggaaaagagccccccacctggtggctcagcctcatcccagtttagcgagctcaatcagatagttacgggcaatggaaacggaactggatctagcaatgaacaaattgctacccaatgcacaactgaatcgaactcgcatcaggccactgttggctctagcttaatcgacagctttttgggcaagcgaagaactgccaaccatccttgcccagtttgcggtaaacattatgtcaacgagggttccctaaggaaacatctggcttgccacgctgagaactcccaacttacaaacagcctgcgaatgtggccatgtagcgtttgccaggccgtcttcactcatgaaaacggccttcttacccatatggagtcaatgcgcatggatccgaaacatcagttcgcggctcaatacgtactatcccgggcagctgcagagcagcgagaacgagaatctcttctagcggttaccttagccgccagcagtggcgctagtacaagaatcggaattgcggatgccggaaacgttttgcctacgggagctcacaactcggacggatccaactcgaaatgcccttccccttcggctaactcggaatgctcttcaaacggacgcctctcgtcatcgacaacatcagatcaagaccaagacatcgaccatggtttaagtgaaaatgagaacagcaaccagaacaacataggcagttccacgaataacaacaataattgcacgagtaacaacaacgctagctctcataaaatggctgagcttcgacttccgggaaccggccaatataccatggacgcggaactgcatgtcgccaaccggatgtcactaatggccgctgctgctgcagcagttgctgcgtcacgaccacaagacggagtggacacttcagcagtcccgagcgcggcggttcaggccgctgtggttaatctggcagctgcaatgcgaatgaacaattccagcaacggtgctaccccctaccaacaacatcacgccgatcacacacaggcacaccagacacatatccttcaacatgcacacccacatcaccaccaacagcagcaggctccgcagcaccaacagcaacagttgtcccatttgctagtccatactcaccccagcaacagcaactcccgttctcaaagttcaccaaacataaatgtgccaagtttacagaacgaatctactgccgcctcgatcgctatgaacatgaacgtacatatgatgcgcggttccctcgacccggacccgagtttaggaggaatgcatggaatagaagttctccaccaacaccagcagcagcaccaccaccatcatcaccaccacacgtcaaactatccgcagcacgccgtaactcctaccaaccaacatactcacccacacccccagacacaccaaaccgcccatcaccatacgagtcctgaaacggcgctccgaatgcaccaggctgaagcgatcttacgctcgcataccgaagcagcattccgactggcaactggatctggtcctgacaccggagtaaaatgcgaggctgatcaaaaccagctgaatagtaacaatgctggcaatgctggtggcaatagtggaggcaatagccaacaacatcgattccatgcgagttcgaatcaccaagagaatcaacgaccatcggactcatga

SEQ ID NO: 3207 - protein, 738 aa, DROSOPHILA
MQQIQQQIPRVGLGTHGVTGSANLGGSITPSSDTKPHQCQQCMKSFSSNHQLVQHIRVHTGEKPYKCSYCDRRFKQLSHVQQHTRLHTGERPYKCHLPDCGRAFIQLSNLQQHLRNHDAQVERAKNRPFHCNICGKGFATESSLRTHTSKQHAALIGGPNATSCPVCHKLFLGTEALVDHMKHVHKEKSPPPGGSASSQFSELNQIVTGNGNGTGSSNEQIATQCTTESNSHQATVGSSLIDSFLGKRRTANHPCPVCGKHYVNEGSLRKHLACHAENSQLTNSLRMWPCSVCQAVFTHENGLLTHMESMRMDPKHQFAAQYVLSRAAAEQRERESLLAVTLAASSGASTRIGIADAGNVLPTGAHNSDGSNSKCPSPSANSECSSNGRLSSSTTSDQDQDIDHGLSENENSNQNNIGSSTNNNNNCTSNNNASSHKMAELRLPGTGQYTMDAELHVANRMSLMAAAAAAVAASRPQDGVDTSAVPSAAVQAAVVNLAAAMRMNNSSNGATPYQQHHADHTQAHQTHILQHAHPHHHQQQQAPQHQQQQLSHLLVHTHPSNSNSRSQSSPNINVPSLQNESTAASIAMNMNVHMMRGSLDPDPSLGGMHGIEVLHQHQQQHHHHHHHHTSNYPQHAVTPTNQHTHPHPQTHQTAHHHTSPETALRMHQAEAILRSHTEAAFRLATGSGPDTGVKCEADQNQLNSNNAGNAGGNSGGNSQQHRFHASSNHQENQRPSDS

SEQ ID NO: 3208 - DNA, 3131 bp, DROSOPHILA
cacattttgcgagccacacttgttacaagtgaaccacagcgactgcgggaaaacatatgtgagcatgcgaatacaggttacggcgtttggtctacggctataacgggtattagttcccttacctcgaccgtataactggcgatctgttcgttcgtcgttcgcatatatacagcaggcagtctgaagtttaccaaatttctgatttctttgtttataattttggggacctgtttgataaccacacaaagcttcgaagtctcgataacgatagttgtccccaaccaaccctagaccctaacagtaatcttttggcgggatgatttaaaaacgcaaatggtgtttatgattgtattgattgattgactcgtcgtatctagttgcacacaagaaatatgattatttaagtattgcataaatatcgaaacaatcttagactacgaataacaaatatactgttgatgttggtcttaaaagtacacggctataggacaaattaaaagtcgtcgtcgttggcttaactaaaagattctgcgcgcggaacaatgaaaaacaaaattcggctattacattattaagtggagtacacgtggactggcaaacatcgttgctgcattgcacttgcttaaaatcttctattgccgcccatatttggcccgggtctgggcccgttgaagctggaaatggcgatgattggggttagtggtttttatgcagacgatatgaatgaacctaccggtttctttggcctggacctccgccgccactgcccaagggcgggaactccgagtgatatgcatttatgccattctgattgtgatttctacctcctgaacctccgcgtttgcttgggcctccttggggactgcttgtctcgtgactgctatcgcgtctgtcattgaatccgcctcctcctccattgaaaaatccacgtcctcccggtggatttcctctatatggcaaaacaagatattatatataatttagaacccaatcttatgcacaacttacccattagtcccacgattgccagagttcattggtccattgccaaagcgtccgaagcccatttgctgctgctgatgctctacaggcagggcaaatccacgtcgatcctgtcgcacatggcttggacctgggccgccgccgccggccctctgatttacggatcctcctcccccgctgctggagctgcctccctgaaagtcactattattgcctcctcccctatatccgctggttggactgttcttaaagtttcttctgccaggctgtggtccactgttgtcccgctgctgaaaccgattgctgccgaagcgtccctcgttgcccgcgcttccaccgaacttgcctccgcctgcaaatttgttcctaaagccctgtccctgattggaagactcattgttcggtggtcctttcgagtatggagcactgcgctgttgtctgtagttggactcgtttctcacgggaccaaatttggcggccgaggagttcgagctccttgggccttcgttggagaatctgccaccgacttcctcacgaaagttgcgcttgaagttggtattggattcatgaggtctcttgtccgccccgccaccttgaactgaggatgatgaaatacttagatgctggatctttggagtgatcaaagcttaccctgcgagggcctgcgccccggattgtccccagagcccggctgacctcgactgccacctcccgggccgtactttggcctgcccgcctccaccacaatgggctggcccttgaagatggtgccattcagcgctgcgatggccgcctccgccatgtccgtgttctccagatggacgaaggcgcagcgattcatcacgtcgcactcaacgaccgatccatagttggtgaacagtcgacgcagctcctccggcttgcagcgcggcaggctgccgacgaacaccttggcggtctgcaggataaagctagcattactccggattactatggacaatccggcggcgctgcctctttcttacgtacagtattcatgtatttatttttctctacaacttttcgctgtttttttcttttattgaaatggagatggacaactgtgcacctgaccggcagtgtgaccagcgatggctacttccacggccatatcggtagctatcgacatcgatagacccaagccatcacttttgtttaccaattttaaaattttaaaaattaaggtttctcacgagcctgatctatcatgtggcctccagggagcgaggatagctactccgccaaaatggactatggcaagagcgtggtgaacatcctgcccagcgtagagatgctggtgaactttaatggcgaaatgacgcggtctagcaaacggtcatgtctactgtacgcggagagagtggacttcaaggagctgctggtaaatatgcttgtcaagacctcctccgatcaaatttcaatacatcctctgccccacagcaactccgattaacggagaagtccgatcaacggcgcatgtacatcaccacagtggacagcgcctcctttcaggatcttaaacaggatcagtcgctgaatgtgtcattctctgggttcattgacaatgtagtgcgcatgctgaaggactgccagtcgggtaaactggagctgcacctgaccacacgggatcagaacctttcatccggcagggaggtccacgactattatcttcagtttgttgaaattcggtcctttaagaacctagttcaccttagcctgccttgtcgttctgctcccttgaacaccgtactcttctacataaacagcatgctggaagcctcccacaaaaagcaatatattctcgagcaaagtatgcagcaaatgcaggctgaaatcaacgcacaacgcgcgcatgcggaaaggttgaccacggaaaacacaaatatcagggaagctttggccgaaaatactcgcatcttagaggaaaagcatgctgccgaggtccatcaataccaggaaaaactgtccaaaataaacgagcagcgcagcaatgagctggagagaaatcgtagagcgatctccggctttcaggcccaattggacaaggcttcgttggagaaagcagaactaaagtcggcccaagagcaggccgagaaacgatgtcaaaccct

SEQ ID NO: 3209 - DNA, 928 bp, DROSOPHILA
atggccgtggaagtagccatcgctggtcacactgccggtcagaccgccaaggtgttcgtcggcagcctgccgcgctgcaagccggaggagctgcgtcgactgttcaccaactatggatcggtcgttgagtgcgacgtgatgaatcgctgcgccttcgtccatctggagaacacggacatggcggaggcggccatcgcagcgctgaatggcaccatcttcaagggccagcccattgtggtggaggcgggcaggccaaagtacggcccgggaggtggcagtcgaggtcagccgggctctggggacaatccggggcgcaggccctcgcaggttcaaggtggcggggcggacaagagacctcatgaatccaataccaacttcaagcgcaactttcgtgaggaagtcggtggcagattctccaacgaaggcccaaggagctcgaactcctcggccgccaaatttggtcccgtgagaaacgagtccaactacagacaacagcgcagtgctccatactcgaaaggaccaccgaacaatgagtcttccaatcagggacagggctttaggaacaaatttgcaggcggaggcaagttcggtggaagcgcgggcaacgagggacgcttcggcagcaatcggtttcagcagcgggacaacagtggaccacagcctggcagaagaaactttaagaacagtccaaccagcggatataggggaggaggcaataatagtgactttcagggaggcagctccagcagcgggggaggaggatccgtaaatcagagggccggcggcggcggcccaggtccaagccatgtgcgacaggatcgacgtggatttgccctgcctgtagagcatcagcagcagcaaatgggcttcggacgctttggcaatggaccaatgaactctggcaatcgtgggactaatgggtaagttg

SEQ ID NO: 3210 - protein, 307 aa, DROSOPHILA
MAVEVAIAGHTAGQTAKVFVGSLPRCKPEELRRLFTNYGSVVECDVMNRCAFVHLENTDMAEAAIAALNGTIFKGQPIVVEAGRPKYGPGGGSRGQPGSGDNPGRRPSQVQGGGADKRPHESNTNFKRNFREEVGGRFSNEGPRSSNSSAAKFGPVRNESNYRQQRSAPYSKGPPNNESSNQGQGFRNKFAGGGKFGGSAGNEGRFGSNRFQQRDNSGPQPGRRNFKNSPTSGYRGGGNNSDFQGGSSSSGGGGSVNQRAGGGGPGPSHVRQDRRGFALPVEHQQQQMGFGRFGNGPMNSGNRGTNG

SEQ ID NO: 3211 - DNA, 3996 bp, DROSOPHILA
attagatagtagaacttcagcttcagatcatgctgtgccggatcgtcaaagaactttatactgatcttcttggcaatgatctgcgtggatacgtaatcctccttcaacagacaaaggcgcatctgctccaggatgagctccaccttctcgcgcttatccatcgagccataagtctccacttgaagctcctccatgacagtggcagctccggcgacatcgccatcggcttccttaatgtccgccagaatcttagtaagacgggcccgctcgatctcaacgtaaatcttgccctcggtaaccgagcgaagtgtgtcgataagcttcagcttagtctctttgtcgggcgtcttgtccacgtacgtgacgcactcctggatcatcttgaccacagcctgcttcagctgggagcgacggcgtaccagcagagacacgtactcgttgagggcgttccagttggacgcgtcaaagcagatctgacagatggcaaccaggactcgtgagcaagaaaccatgtcggcgcccaggcgcgtctgcttctccagttgtagcatcatctcgatggcttcgtgaaaggcgtcggggtttttcttggccagctccttagccagggggattttctcgttgcacgccggctcgtagtccacctccatcttggtgatgcggccgccatcaaacaaataggtgtccattgtgttctacaaaaaaatgtttacttcaatttttgccgatatgacgaggcagttttccaacctacctatatttcgcctttaccctgctgcagaatctactaaaactgtttttcacgataggaaatgataaatgtcgtcttgcttcaaacctggttggtttgtctgctccttttcttaaagttattggatgcaaaagcggcttttttctaataataatctccgcacaaatttttgcttacaaatgctgtgttaagttggctgcgggattttgtagtgttgaaaaggtgaattttgaagtgatagtaccagagcgagatgtgtcacagtcaaagatatttttgtagggataaaattacgttccaaagggtttttttttataatttcaactcaaagtatgactcaaaatttgtcagaaaaatggaagactgcgaaatcaagaaaacatcggtaaattgcgcatagggttgtcagaggtttaacaatcgaaacaacataatttgcgtaacttctgatttaaaaacaacaatatttttatggcaacaaaatgatataattaccttttttatacaaattctcattctttccaaccctgcaatcaacacataacagttatatcttcaatcgtaatctcagcaccaatagttaaactatcgcttaaacgacacatctgacagcccaatccgtggctagtgttgttggttagtattcaccgtcttgcgttgtccaacattgttggaaagccaatcactttgtttagccgcgaaaattgcgctagaacgcctgcaaaaagctgtctggttttataaacaacgtgatttttgatttttaaagcaacaagttagctgcaaactacttaacggtcacaagtaaaaagttccggaaagatcttctggtccaccatttgcgaaagcgaatcgattgccgccttttgaagtacccaacaatggcacaaatcgagaagtaccaggactttgtgattgatgctctcgaagtggtagactttaagctgagtaagtatccttgtttcgtagcgaggtagaactgcaatgttcccgtttttagtccgtgacaaggccgacatcaacaatgatgccctgacctttcatcccgcaatggcccaccagattttcggggagaccgagacgattttcggctaccaggacttgcacgtccgtgtaatgtacacggcaggacctttgcacatctacttgggcgtcgattacggcaaacgggtgaatgagatctccggcggagagatcaaggcagacgacgtcgtcagcacaattgctcagagtctaccggacggctgctacttcatcaatcttgatgagtttcttaagacactggacaaggctgacaaatttcagcccttcggtgagaagataagcgaatacaggcgggtatcggacgacggcagcgagcgccttttcgagatctaccagtgcgagtacaagagctcatcattcttaaagttctttgcccggctgcagacgttcatcttgtggttcgtggatgctgcctcctacatcgacactgatgatccacagtggtgttacttcttgaggtaagttttctacaagaagattggcttattttgttatcaaaatcagtagctggtttcaataacaacgtcctcttctcattctgcattcctttagctacgaaaagtacaagaacaacgatggccagtggcagtatgccacagctggttacaccaccgtatacgagtactacgcctatccgcaaaacaagaggcccaggataagccagatgctgatactgccgcctttccagaaactcggcttggctacccaattggtcgagagcatttacaggttttatcagtcacagaagaatgttgtggacataacagtggaggatccatctgaggatttccagcgtttgaggaattttgtggacgcgcgatcttgcatgaaattgaagtcgtttgcaccaggcgagatagtcaagggcttcaacaaggagatggtgcgggaagctcgcgaggctctgaaactcaatcccctccaggtgcgtaaggtgtacgagcttttgcgtttattctacaccaatgtgaaggatgaaaaggagtaccgaccctatcgtctggaagttaagaaacggcttaacgcggtctattacaagcagttaaaggatttgaagaaaatggagcgcttcaagatggacactgaaatgctgcgtgctcgcctgccaacggttcaacaacgaatggagcagctgcatgaggaataccgcgtggtcgagcaggagtaccagagcaccattgccaagttgagggcctcgtaggttctgtggatccaaaaggtgttgattaatttatttcgtttctctgttttcaaatatgttgattacaaaatacattatgttgctataagcctacagtaggattcctttgaataaatattacaaattaaatatatatatatatattatgtatttataagatatcagattaccgtgtgcacgtacatagaggagcaatgctgggcgtggggcacttgagcaattaagcgtatataaaacaaaacattacggctaacgagtacgatttatacaggttacaaataattgtgatcgggaagtacacatgggatacgatcattatcgagggtgctgggccagcagcccgtacaactagcacgacccgtattcctccatccacttttcgaagcgggcaacgtcatcggcagagacggacttcttggtgcgcagacgggcgtcctggaagtcctgcaaagtaatcggctggtcaacctcctcgcgtcggatttgcttaatctgatcgggagtgcgtccggaaatgaggcgccgcatggccatcatggaggcgtcccggcacacgttgcttatgtccgatcccgagtagccctgcagttcgtcgccgattattccggtgttcagactgggcgacaggcatacgtccttcaggcagagcttgaggagagccgatcgggtgccctctggagcataatattactattatttactgcaggaaaggaagtggctcgcacttaccgtttgggagaggaatatagattcgcttttcaaaacgtctccggaaagcctcatcgatgtcccacgggtgattggtggccgccagcaccatgatcaccttctcctcctgcatgcttgcgttgagtccgtccatttggatgagcagctcggccttgaaccgccgactggcctcgtgctccgagtcactgcccctggaggcgcatagggcgtctatctcgtcgatgaaaatggtgctgggcgcataaaatcgggccatctcgaacaggagacg

SEQ ID NO: 3212 - DNA, 1850 bp, DROSOPHILA
cgagatgtgtcacagtcaaagatatttttgtagggataaaattacgttccaaagggtttttttttataatttcaactcaaagtatgactcaaaatttgtcagaaaaatggaagactgcgaaatcaagaaaacatcggtaaattgcgcatagggttgtcagaggtttaacaatcgaaacaacataatttgcgtaacttctgatttaaaaacaacaatatttttatggcaacaaaatgatataattaccttttttatacaaattctcattctttccaaccctgcaatcaacacataacagttatatcttcaatcgtaatctcagcaccaatagttaaactatcgcttaaacgacacatctgacagcccaatccgtggctagtgttgttggttagtattcaccgtcttgcgttgtccaacattgttggaaagccaatcactttgtttagccgcgaaaattgcgctagaacgcctgcaaaaagctgtctggttttataaacaacgtgatttttgatttttaaagcaacaagttagctgcaaactacttaacggtcacaagtaaaaagttccggaaagatcttctggtccaccatttgcgaaagcgaatcgattgccgccttttgaagtacccaacaatggcacaaatcgagaagtaccaggactttgtgattgatgctctcgaagtggtagactttaagctgatccgtgacaaggccgacatcaacaatgatgccctgacctttcatcccgcaatggcccaccagattttcggggagaccgagacgattttcggctaccaggacttgcacgtccgtgtaatgtacacggcaggacctttgcacatctacttgggcgtcgattacggcaaacgggtgaatgagatctccggcggagagatcaaggcagacgacgtcgtcagcacaattgctcagagtctaccggacggctgctacttcatcaatcttgatgagtttcttaagacactggacaaggctgacaaatttcagcccttcggtgagaagataagcgaatacaggcgggtatcggacgacggcagcgagcgccttttcgagatctaccagtgcgagtacaagagctcatcattcttaaagttctttgcccggctgcagacgttcatcttgtggttcgtggatgctgcctcctacatcgacactgatgatccacagtggtgttacttcttgagctacgaaaagtacaagaacaacgatggccagtggcagtatgccacagctggttacaccaccgtatacgagtactacgcctatccgcaaaacaagaggcccaggataagccagatgctgatactgccgcctttccagaaactcggcttggctacccaattggtcgagagcatttacaggttttatcagtcacagaagaatgttgtggacataacagtggaggatccatctgaggatttccagcgtttgaggaattttgtggacgcgcgatcttgcatgaaattgaagtcgtttgcaccaggcgagatagtcaagggcttcaacaaggagatggtgcgggaagctcgcgaggctctgaaactcaatcccctccaggtgcgtaaggtgtacgagcttttgcgtttattctacaccaatgtgaaggatgaaaaggagtaccgaccctatcgtctggaagttaagaaacggcttaacgcggtctattacaagcagttaaaggatttgaagaaaatggagcgcttcaagatggacactgaaatgctgcgtgctcgcctgccaacggttcaacaacgaatggagcagctgcatgaggaataccgcgtggtcgagcaggagtaccagagcaccattgccaagttgagggcctcgtag

SEQ ID NO: 3213 - protein, 405 aa, DROSOPHILA
MAQIEKYQDFVIDALEVVDFKLIRDKADINNDALTFHPAMAHQIFGETETIFGYQDLHVRVMYTAGPLHIYLGVDYGKRVNEISGGEIKADDVVSTIAQSLPDGCYFINLDEFLKTLDKADKFQPFGEKISEYRRVSDDGSERLFEIYQCEYKSSSFLKFFARLQTFILWFVDAASYIDTDDPQWCYFLSYEKYKNNDGQWQYATAGYTTVYEYYAYPQNKRPRISQMLILPPFQKLGLATQLVESIYRFYQSQKNVVDITVEDPSEDFQRLRNFVDARSCMKLKSFAPGEIVKGFNKEMVREAREALKLNPLQVRKVYELLRLFYTNVKDEKEYRPYRLEVKKRLNAVYYKQLKDLKKMERFKMDTEMLRARLPTVQQRMEQLHEEYRVVEQEYQSTIAKLRAS

SEQ ID NO: 3214 - DNA, 4868 bp, DROSOPHILA
ttctgtttctccaatttctgatttattttctttttatgttttaatttcactaaccttattttccttttgatttcttacatgtttgttttgtttttattacgcgttgggttttacctgtttcttctttaaatgtgtgtatgtttttggtttggctctggccaaaaaaaaaagaaaaacatttgaagccccaaaaattgtgtataaacatttgactcataaacacacacattcgcactgtaatcaatgagcgttcacaagcatcccaaaaaactaacctagtcgtagtggaactaactaaaagtttagctatgaatgtgactaaccatttaattaacagtgtttaatagtttgatgtagttaaacatagttcctattgaaaggaagagctttaaaatggcaatcttaatggcacagatgtaagctgcacagcttaatttaacgtaaatatagcgtttttaaatgtttaaataacatattttccaataataagcaacttgagagcataagaatttgttttagacttacaatttcccacttatttgaaaaggaaccaatatgatcgacgcgaaataaaagctagaagtgacaattttaaactctttaaatagacgcgcttctggcgaatgacagcgaaaagatcagaggaaagtaaaggggatatgtcttgggagaattgggtctttaggaggcacccgaaagtgcgccacttcacgtgccaatgttcgggaaatgttttattttttctcacccacgcccacctttcgttttgccctccctctcacgttgcaacgtcagtgttccccatttccatttccattttcattttcatcgaagatgtttgtccctgtgtgttcgcttacctttgtatctatgtgtgtcccagctgtgtactcatcgttatgtgcgctgttgtcacattttcctttcggctggtcatttttagacccaaaacaacgacgcaaatgcttggcctctggtcatgactttggcacttgttcgccttcagttggtcggcgcggtgttggccatcccgcctaagtgtcgtatccgtatcggtatcgatcgcaatgtagaaaagttatgattgtgccaaccttccatgcgctcggccaagtcttgaggcagatgtttgcggtccaactccaacagcagcagcagcgcactcataatcagctccattacctcgatttgtcgcccgcgcgaaccatcaaccaactgttagtgtgtccatgcgcatccaatcctgtacctcctgctgtatgtgtgtttcttgggttcaatcaaatccccgatcaatctaccatactatgaagaaccatcctcttgcaggcccgtattagtcttgtacatataaccctcgaaccgatcaatgccagccggacgaccagttgcctgatcgaggaggtagccgagccggattcacagccggagattaagccggtggcagaagcgcagtctgccaaagtatccgaggcttgtgtcgaaagtattctccccgagacagttgaaaagttagaaacagcagaccaggtccagcaggtaatcgccagggatttaagtgaatggattcaccaagctctcaagttgtagccactaataaatgtacacctaacgctactttccttgatgactaaagtttatctttctgtgcactctaggttataccacagttggggaagctttacgtgggcagtagccagcagcagtatgcgcagcagtcatcgcccatcatccaggagccagctactcctactatttacggaaacagcgccgcagccggagcgccgcagttcccgcagcccgcccaaaggcaagagaagcagcctccgcagcagcagcccatctacgctaaccagtatgagctgaatgtggccaaggcggcagctgcagcatctgtttactcacccagctcctccaccaccagcaactccaatcaacagcagcagcagcagcgccggaatgtggcccgtggactgcagtatcgtgaatctggaggactcgagactggacgtgctggcaagcagccacccaatgcgggcatgttgtcaatggacaacttccgtttgctaagcgttcttggtcgcggccactttggcaaggtgattctgtcccaattgcgaagcaacaaccagtactacgctattaaggcactgaagaagggagacatcattgcccgcgacgaagtggagtccctgcttagcgaaaagcgcatcttcgaggtggccaacgccatgcgccatccgttcttagttaacttgtattcgtgcttccagactgaggtaagtagagataagctgaggagttagaaattgaataataatctgtttacattttcatcgtgctagcaacacgtatgctttgtgatggaatacgctgctggcggagatttgatgatgcacatccacacggacgtgttcctagagccgagagccgttttctacgccgcttgtgtggttctgggcctgcagtacctgcacgagaacaagatcatctaccgggacctgaagctggacaatttgcttttggacacggaaggatatgtgaaaattgcggactttggtttgtgcaaggagggcatgggctttggtgatcgcacgggcactttctgtggtacgcccgagtttctggcaccggaagtgctcacggaaacttcctacacacgagctgtggattggtggggcttgggtgtgttgatctttgagatgttggttggtgaggtatgtcgaatggaacaagctttaaaaatgcagttcataatcataataattaatgtttacagtccccattccctggtgacgatgaggaggaagtattcgattcaattgtcaacgatgaggtgcgctatccgcgcttcctatcgctggaggccatagccgtgatgcgtagggtaagctgattgattgcaaaagtaactattcgaaaggagaactaatttacaaatttttttggcagcttttgcgcaagaatccagagagacgtctgggatcttcggaacgggatgcggaggatgttaagaaacaggcattcttccggtcaattgtgtgggatgacctgctcctgcgaaaggttaaaccaccatttgtgccgacaattgtaagttaacttgcacacttcatttataaggttgcatattttaacattgtttttaactgccttgcagaaccacttggaggatgtgtcaaactttgacgaggagttcacgtcggagaaggctcagcttacgccaccgaaggagccgcgacacttgaccgaggaggagcagttgctcttccaggacttttcatacacggccgaatggtgttagaagctcattcttagttcaaggatttactaacgggcctagcccgatccttatagcctatggcctgcttttgcttttacttgtgtacgaaattggtttcgagtaattttacttggcttagtagtcgatgtgagttcaatatttatacatgaagacagcatgataatacagatacaggacatatatatttataaactatatctatatagaaaatacatctactaacgagagaacttttgattgttgctcactggccgagagaccaacacaaaccaaaatacctagttgtccatgttgtggaaaagcaagcatttgtcaatcatccatgcaaccggtttagcatacagtgtacccagaaatcatcccacattgtcgttgcattgtacagcatatagagttgtttccttttccaaacacgagaacgcattgaatagtctgacaaaccctaggaaagccttatacgccaagttgtagttttggaaaccgttttttaagaccggatacaaatagattttatagatgagaagtgtatgtctacaccccagagcagtcattgcaacctattttcataatcaacatacaagaacaaagatatattttatacatatattgcatgcacatcccaggaatcgtcttgctaaacgagctcatcttctatacgacatacaaacatacatatttatctagtaaagtgagagaaagtgaaatatttacagttttaacatgtaagccctgtaaattgccttttgccgcgttttatcaactccccagcccattgcccgagttgtgttataatttaaacatattttttacgtcatatacacacgcaaacatttgttatttattattattataactattatacaagaaaactgtattgctttgagcatttttattcgacgctagatcgatgattgtaaacaatttgttttgcatgcgcggtgtgctttaaaccagatatgaggatcagaaaacaaataaccgctcgacgggatagaatttggaaattccgttgatggatggcatgcaatcggattgttgtacttctaagatctatgttgtatttaatgtaacttttagttcgatttaagcttgtaataatcgattattgaaacgtagtctaagctatcattatgtgaagataattattgataattacaattatgataacgattttgcacacctcatgcgaatcgaaacgagtataaacaatgcagatcttctattgtcatttttattatgattatgctcacaacttgcggctataatcatcgatttaattttaaatctgtaaagtcggattggtgcacatccaatcacattgtttagtttcaagttgcgactgtaatttatatttatgatatgattttaaataaatgtatctatcgctattatttaactgctgtttttgtcgactggttttcgctgagaccttcgctcatttggtaatacaaaatattggcggtattgtccacaacggctaaaaatatgttgctgatagggaataaagtggttaaaaacataaatattattttcataacatttaatacgcaccgttttttaagct

SEQ ID NO: 3215 - DNA, 2417 bp, DROSOPHILA
cttcagttggtcggcgcggtgttggccatcccgcctaagtgtcgtatccgtatcggtatcgatcgcaatgtagaaaagttatgattgtgccaaccttccatgcgctcggccaagtcttgaggcagatgtttgcggtccaactccaacagcagcagcagcgcactcataatcagctccattacctcgatttgtcgcccgcgcgaaccatcaaccaactgttagtgtgtccatgcgcatccaatcctgtacctcctgctgcccgtattagtcttgtacatataaccctcgaaccgatcaatgccagccggacgaccagttgcctgatcgaggaggtagccgagccggattcacagccggagattaagccggtggcagaagcgcagtctgccaaagtatccgaggcttgtgtcgaaagtattctccccgagacagttgaaaagttagaaacagcagaccaggtccagcaggttataccacagttggggaagctttacgtgggcagtagccagcagcagtatgcgcagcagtcatcgcccatcatccaggagccagctactcctactatttacggaaacagcgccgcagccggagcgccgcagttcccgcagcccgcccaaaggcaagagaagcagcctccgcagcagcagcccatctacgctaaccagtatgagctgaatgtggccaaggcggcagctgcagcatctgtttactcacccagctcctccaccaccagcaactccaatcaacagcagcagcagcagcgccggaatgtggcccgtggactgcagtatcgtgaatctggaggactcgagactggacgtgctggcaagcagccacccaatgcgggcatgttgtcaatggacaacttccgtttgctaagcgttcttggtcgcggccactttggcaaggtgattctgtcccaattgcgaagcaacaaccagtactacgctattaaggcactgaagaagggagacatcattgcccgcgacgaagtggagtccctgcttagcgaaaagcgcatcttcgaggtggccaacgccatgcgccatccgttcttagttaacttgtattcgtgcttccagactgagcaacacgtatgctttgtgatggaatacgctgctggcggagatttgatgatgcacatccacacggacgtgttcctagagccgagagccgttttctacgccgcttgtgtggttctgggcctgcagtacctgcacgagaacaagatcatctaccgggacctgaagctggacaatttgcttttggacacggaaggatatgtgaaaattgcggactttggtttgtgcaaggagggcatgggctttggtgatcgcacgggcactttctgtggtacgcccgagtttctggcaccggaagtgctcacggaaacttcctacacacgagctgtggattggtggggcttgggtgtgttgatctttgagatgttggttggtgagtccccattccctggtgacgatgaggaggaagtattcgattcaattgtcaacgatgaggtgcgctatccgcgcttcctatcgctggaggccatagccgtgatgcgtaggcttttgcgcaagaatccagagagacgtctgggatcttcggaacgggatgcggaggatgttaagaaacaggcattcttccggtcaattgtgtgggatgacctgctcctgcgaaaggttaaaccaccatttgtgccgacaattaaccacttggaggatgtgtcaaactttgacgaggagttcacgtcggagaaggctcagcttacgccaccgaaggagccgcgacacttgaccgaggaggagcagttgctcttccaggacttttcatacacggccgaatggtgttagaagctcattcttagttcaaggatttactaacgggcctagcccgatccttatagcctatggcctgcttttgcttttacttgtgtacgaaattggtttcgagtaattttacttggcttagtagtcgatgtgagttcaatatttatacatgaagacagcatgataatacagatacaggacatatatatttataaactatatctatatagaaaatacatctactaacgagagaacttttgattgttgctcactggccgagagaccaacacaaaccaaaatacctagttgtccatgttgtggaaaagcaagcatttgtcaatcatccatgcaaccggtttagcatacagtgtacccagaaatcatcccacattgtcgttgcattgtacagcatatagagttgtttccttttccaaacacgagaacgcattgaatagtctgacaaaccctaggaaagccttatacgccaagttgtagttttggaaaccgttttttaagaccggatacaaatagattttatagatgagaagtgtatgtctacaccccagagcagtcattgcaacctatttt

SEQ ID NO: 3216 - protein, 590 aa, DROSOPHILA
MIVPTFHALGQVLRQMFAVQLQQQQQRTHNQLHYLDLSPARTINQLLVCPCASNPVPPAARISLVHITLEPINASRTTSCLIEEVAEPDSQPEIKPVAEAQSAKVSEACVESILPETVEKLETADQVQQVIPQLGKLYVGSSQQQYAQQSSPIIQEPATPTIYGNSAAAGAPQFPQPAQRQEKQPPQQQPIYANQYELNVAKAAAAASVYSPSSSTTSNSNQQQQQQRRNVARGLQYRESGGLETGRAGKQPPNAGMLSMDNFRLLSVLGRGHFGKVILSQLRSNNQYYAIKALKKGDIIARDEVESLLSEKRIFEVANAMRHPFLVNLYSCFQTEQHVCFVMEYAAGGDLMMHIHTDVFLEPRAVFYAACVVLGLQYLHENKIIYRDLKLDNLLLDTEGYVKIADFGLCKEGMGFGDRTGTFCGTPEFLAPEVLTETSYTRAVDWWGLGVLIFEMLVGESPFPGDDEEEVFDSIVNDEVRYPRFLSLEAIAVMRRLLRKNPERRLGSSERDAEDVKKQAFFRSIVWDDLLLRKVKPPFVPTINHLEDVSNFDEEFTSEKAQLTPPKEPRHLTEEEQLLFQDFSYTAEWC

SEQ ID NO: 3217 - DNA, 4903 bp, DROSOPHILA
tacccgcaatttaactgctctaaggtaaaagaaaaatttgtaaagaaaaaagaaaaatttgtaaatttgtaaatttaatgtattgcaacatatataataaacacggtatgtgccacactgcgaaatatcaatgattttgactttgactgaccaccgtatacggacacacccacaagatcagacccacaaagactcacccacaaaggccttcagctcgtagtctactccgcaagacttgcccacatctccaggagccggctgcaaggacacagaggctgggcaatagggcggaacctcaaaataaaacggatgggcgttcggccccagctttttaattaacctttcctgaagccgggtcatcgggcggtccagctgcatgggcggatagatctgctcatgcgccagatacaggtccttacggaacgttaatcccaaaacatctaggtcttcacgtccgtaccgaaaggcggcaagcacctggccaaaaaccttacggtcctttacgtactctggatcaatgaagacaacaccgtcaatgggatccacgtgcgtgacatggtcgacgaagtcccgtttgccaaggtaaactgttatcttgccgttggaggagctcttcttaaacacccgagtcgcctggcgtctggagctggcatctccaccagtctcgtcgcctgcgcttccgcccccagtgctcccggcagctgttacattggtgctggagccattgctcacatttgctcctccacttcctccaccaccaccgttcattatgttatttggcggttatgcttgttattctgcttttctgctgttcctgcttaattggaactccgttaaataaatatatgtgtgcgttgcgggacttgtgctgcaatttaattttttatgtgtatacttgttccgccatttaccagcactgcttgacagtcattggaaaaataccagggaatattacatactaacaaattatgtacttctctggtatttcaattcagtgcgaacaaaccgatatatgtttggtcgtaccataatcgcagcctataattaatatttattttgcatttttggcacctatttatatttcctaagtgtgccctggcccatagtaagtgacttttaataatttttctttcaataccattaacaattgcttgaattaacattaagtttcctactaagataaaatgcaactgcaggttgacttggctttttaatgaaatataatatatatattataaattcctttagaaacagatgattcatagctgatgattgaggaaacttaccatttggaatgtataaacacatgtaaaatcagaccgttggtaaatatctaatcatagattgtatcctaagtcttaaataaatactttatataaactgtttaatatttattttattttttaaaggcttttattatttttatatgtatacatgtgcatgaacggactttaaaccatatttagtagtggaatagagctataaaaatgagattgaagtctctaaaatactttatttaatcagccttagcaccgatagagcacaacggtcacactgttctgtccctcttttccacgtgcattttattgaacgaaaccacgcgttgttcagtccaaacttgactttgctaattttgcccagaaaacctctaaaagctgtcaaaatggcccaaaagaaagccgtcaccgtcaaaggaaaaaaagctacgaatggagaggaaaagcctttggccaaacgggtaaccaagtccacaaaggtacaggaagaggagacagtagtcccccaatcgccttccaaaaaatccagaaaacagcctgttaaagaagtgccgcagttcagtgaagaggacgagtctgatgtggaggagcaaaatgacgagcagccaggggacgacagcgactttgaggtaagctataaaaaaaacgtggtcttctgaatggatatggctaacattacatgcatagtatgcacgtatatatagatctgcatggataagaatccattttacgttttctttgccacgtggttgtaaagattttataattataagacgagtgcacataacccacgatcctctggttttataccgactcggttcatatatcgataaaaaaaaaattgtctttattggtgctctcccatcagcggttataagaaaattgtctacttttcagaccgaagaggcagcgggcttaattgacgacgaggctgaggaagatgaagagtacaatagtgacgatgaggaagatgatgatgacgatgagttggagcctggtgaggtttccaaaagtgaaggcgcggatgaggtagatgaatccgatgatgatgaagaagcgcctgtagagaagccagtttccaagaaatcagaaaaagccaactctgaaaagtccgaagaaaatagaggaattccaaaagtaaaggttggcaagattccgctgggaacgccaaaaaaccagatcgtttttgtcacaaacctaccaaacggtaaagtaactggtttattatttcatttttcaagtatatttaaacttagtatatttgttccacatagagtatctccacaaggacttggtcgcattgttcgccaagttcggacgactttccgctttgcagcgtttcactaatttgaatggcaataaatcagttctcattgcctttgatacgtcaactggagcagaagctgttctgcaggctaagcctaaagcgttaacccttggagacaatgttttgtctgtgtcccaaccgagaaataaggaagagaacaacgaacgcacggtggtggttggcctgattggacctaatattaccaaggacgacttaaaaaccttttttgagaaggtagctcccgtggaggcggtgactatatccagtaaccgcctcatgcccagagcttttgtacgtttggcgtcggtcgatgacataccgaaggctcttaaactgcatagcactgagctgttttctcgctttataacggttcgtcggatctcacaagaatcgatttcacgtaccagtgaacttaccttggttgtcgaaaatgtgggcaaacacgagtcttacagctccgacgctctagaaaagatattcaaaaaatttggtgatgttgaagaaatcgacgttgtgtgcagcaaggcagttttagcttttgtcacgttcaagcagtcggatgccgccacgaaggctttagcacaactcgacggaaagactgttaataagtttgagtggaagcttcaccgattcgaacgcagcacctcggggagggccattcttgtgacgaacttgacttcaggtgggttacccgtttcgtaaaattgtttaaaattattaatcattatcatgtaaaatttcgttgtagatgctactgaagccgacctgcggaaagtgtttaacgatagcggcgaaatcgaaagcatcataatgttgggccaaaaagcggtagtaaagttcaaggacgatgagggtttctgcaaatctttcttggctaatgaaagcattgtaaacaacgcccctatatttattgagccaaactctctgctgaagcatagattgttaaagaaacgcttagctattggtcagacccgcgccccgcggaagttccaaaaggacactaagccaaactttggtaaaaaaccatttaacaagcgcccggcacaagagaatggtggtaaatcgtttgttaaaagggcaagattttagaacttgaacactacaagaattagctttaagttgcgtagtaccataaatacggccacagccccgataattccatacaacttgatgttatggatttagttgataagagatactccattaaatttttaccggagaaatgctagccgtattcaagcagatgtcgatttttataagcatcggacatggaactaaataaaagtaaataaaaaccccgataagaattttgtattcaacgtcttggttttgggtaactagatacttcaaaaaacgatttactgcttatatgaacgtatacaggtgcgatctccagtatattccgtttttttttttgtgtttgaattttatctcgcttcggtactctcgtatataggttcctatcccttccaaatggcccaatgtacagctgcgcttgttcaaaaagcgagaactatatgaatttcctttgtataattaatttattagtaatacatttttgtagtattttataattttttgaatttttttgttcatactcagaaatctaatatggttggctaacatatgtataaacttgtaaatgtttgtatgtatgtttatattttttgtaaatgccatttagattagtactttaaatttcagtaattgttggttcaaaaaattagtttatcctttttatgtgtaaatatgtataaaaaatcatcacttggataaaagcaacgtatagggagtttagccaacctaaaaaaaaccctttcgattaggaatttcccaatcactctgtttatatatagttcgttcaagctacaaaaaactgtgctcgtgacgcgtttggcttactgacaagtttttgtgtgttatatgtaagtctctgtctcatgttgcttttgaccttgttttataagaaatataatatcgctatcgtaatatagcttaggcagaaaatcactaataaggcaaattaaagtgaagggcactgtgtgggacttctgaaaatacataatgcaaacaagcttactatttaaacttgacaacttatatatctcagagttcgtttaagccgtgcataactcatatacgttgtataggcaaattataagccctagaatattactttttttagatatactttcacgagagctttttctttcatgacgaattgaagtaggtgacactatctttcacaaagcttataaaattatgcctacacaaaggataaaagaatacaaaaataaaa

SEQ ID NO: 3218 - DNA, 2275 bp, DROSOPHILA
acaaaccgatatatgtttggtcgtaccataatcgcagcctataattaatatttattttgcatttttggcacctatttatatttcctaagtgtgccctggcccataaaacagatgattcatagctgatgattgaggaaacttaccatttggaatgtataaacacatgtaaaatcagaccgttggcttttattatttttatatgtatacatgtgcatgaacggactttaaaccatatttagtagtggaatagagctataaaaatgagattgaagtctctaaaatactttatttaatcagccttagcaccgatagagcacaacggtcacactgttctgtccctcttttccacgtgcattttattgaacgaaaccacgcgttgttcagtccaaacttgactttgctaattttgcccagaaaacctctaaaagctgtcaaaatggcccaaaagaaagccgtcaccgtcaaaggaaaaaaagctacgaatggagaggaaaagcctttggccaaacgggtaaccaagtccacaaaggtacaggaagaggagacagtagtcccccaatcgccttccaaaaaatccagaaaacagcctgttaaagaagtgccgcagttcagtgaagaggacgagtctgatgtggaggagcaaaatgacgagcagccaggggacgacagcgactttgagaccgaagaggcagcgggcttaattgacgacgaggctgaggaagatgaagagtacaatagtgacgatgaggaagatgatgatgacgatgagttggagcctggtgaggtttccaaaagtgaaggcgcggatgaggtagatgaatccgatgatgatgaagaagcgcctgtagagaagccagtttccaagaaatcagaaaaagccaactctgaaaagtccgaagaaaatagaggaattccaaaagtaaaggttggcaagattccgctgggaacgccaaaaaaccagatcgtttttgtcacaaacctaccaaacgagtatctccacaaggacttggtcgcattgttcgccaagttcggacgactttccgctttgcagcgtttcactaatttgaatggcaataaatcagttctcattgcctttgatacgtcaactggagcagaagctgttctgcaggctaagcctaaagcgttaacccttggagacaatgttttgtctgtgtcccaaccgagaaataaggaagagaacaacgaacgcacggtggtggttggcctgattggacctaatattaccaaggacgacttaaaaaccttttttgagaaggtagctcccgtggaggcggtgactatatccagtaaccgcctcatgcccagagcttttgtacgtttggcgtcggtcgatgacataccgaaggctcttaaactgcatagcactgagctgttttctcgctttataacggttcgtcggatctcacaagaatcgatttcacgtaccagtgaacttaccttggttgtcgaaaatgtgggcaaacacgagtcttacagctccgacgctctagaaaagatattcaaaaaatttggtgatgttgaagaaatcgacgttgtgtgcagcaaggcagttttagcttttgtcacgttcaagcagtcggatgccgccacgaaggctttagcacaactcgacggaaagactgttaataagtttgagtggaagcttcaccgattcgaacgcagcacctcggggagggccattcttgtgacgaacttgacttcagatgctactgaagccgacctgcggaaagtgtttaacgatagcggcgaaatcgaaagcatcataatgttgggccaaaaagcggtagtaaagttcaaggacgatgagggtttctgcaaatctttcttggctaatgaaagcattgtaaacaacgcccctatatttattgagccaaactctctgctgaagcatagattgttaaagaaacgcttagctattggtcagacccgcgccccgcggaagttccaaaaggacactaagccaaactttggtaaaaaaccatttaacaagcgcccggcacaagagaatggtggtaaatcgtttgttaaaagggcaagattttagaacttgaacactacaagaattagctttaagttgcgtagtaccataaatacggccacagccccgataattccatacaacttgatgttatggatttagttgataagagatactccattaaatttttaccggagaaatgctagccgtattcaagcagatgtcgatttttataagcatcggacatggaactaaataaaagtaaataaaaacccc

SEQ ID NO: 3219 - protein, 542 aa, DROSOPHILA
MAQKKAVTVKGKKATNGEEKPLAKRVTKSTKVQEEETVVPQSPSKKSRKQPVKEVPQFSEEDESDVEEQNDEQPGDDSDFETEEAAGLIDDEAEEDEEYNSDDEEDDDDDELEPGEVSKSEGADEVDESDDDEEAPVEKPVSKKSEKANSEKSEENRGIPKVKVGKIPLGTPKNQIVFVTNLPNEYLHKDLVALFAKFGRLSALQRFTNLNGNKSVLIAFDTSTGAEAVLQAKPKALTLGDNVLSVSQPRNKEENNERTVVVGLIGPNITKDDLKTFFEKVAPVEAVTISSNRLMPRAFVRLASVDDIPKALKLHSTELFSRFITVRRISQESISRTSELTLVVENVGKHESYSSDALEKIFKKFGDVEEIDVVCSKAVLAFVTFKQSDAATKALAQLDGKTVNKFEWKLHRFERSTSGRAILVTNLTSDATEADLRKVFNDSGEIESIIMLGQKAVVKFKDDEGFCKSFLANESIVNNAPIFIEPNSLLKHRLLKKRLAIGQTRAPRKFQKDTKPNFGKKPFNKRPAQENGGKSFVKRARF

SEQ ID NO: 3220 - DNA, 10559 bp, DROSOPHILA
tgttgttgaattgaccaatacagaactaaggggcgaagtgttgcaatcgaaatattaattttcaaaatttataaacaagtatttaagcgctgccagaagtaacatttatttaagcatcaacattgctataaccacatacccaaggggttggaaacattttaattgttggattgttagattaccgagtctactaccttattaacatcatatactatttaatgaaactagtatacccaatatacccataagataggggtaaaaattcgatgcattaagtacactgagtgcaaaaatactgtgtcgcaaatattacaccaaaccagtcttgataggatagaaaacagttatgtatgttttcatcaagaatgctattcgcaagggcaaggctataatagataaatacgactacaaatacatgtttgtattttaatatactggatatactgggtataatgggtacaaatatcaacgagatagccaaaatcaagattgaatcgggtgtacaagctactgtaagattaatctatatatatatatatatgtatgtgtgtatatgtatatagagataggcgttgccaataacttttgcgttttttgcttaaaaataatattgtatcgccgaggacaaaaattacccactgagagacacaaactactagcgtaaaaatatctatattaacagcactggcatcgaaaagtatcttaactcacgtacgagtatatgtattgtgtggccatcttcgatctgcccgccttcgccgactgttcgtgatccgtaggtacacacagacatttaaatcaccaatgcacttgttactgtattgtatttatgtttgtgaacctacacgtatctatgtagaatctgtacaagtatctgtgtttggacaatggcatgtgtgagaggagatccgaactgctccatctaaactaacgaagcattgcaacagctagtgttaatgtcgctcagtccactcgtaagaaacataggaataagacgcagcattcaaaaaatattgacttgtcttacaaaactgattttcattgttcgctacttaatatttagtgataaatatattacttcgggactgataatcttatgaatatacgtgtgagatttggcgatacccttcattacttaggaagccgagcgcataagctcacaccattataatatttaagtgatatgaatattaaatattaaaatttaaaaccaactttttaatcaaagagtttccttaaaattgtttaagttgccgatcaaaagtggaaatttatgcgtgccgttatttgaaataccaatcttttgaaaatgtttacgccgacggttaatattatttaaaaggataattgaatttataaaacgacgtcattcttgttgtggactaactttaatgaaatggacgcctacgcgttacctacatattttcctcttgcgtaagtttttatttgcatattcgagaagtaagccttacaatagaaaaatatctacatttttgtttaaaacgaggaattttaagattacagtccatgaaatgtttagaaatgtgtaagttaaataataacaattaaataataataattaaataattaaaaaaataaaaaataacaataattattgttattattattataataattatatataattacatataattatatatatattatataattattgttattattattataataacaataataataataataaaaataataataataattttaataattataataactatggtaacaataaaaaagaataataataataacgattaacgggtataaaaatgtttattattattataattactattattataatttttatgattaatcaataaataataaacatttttatacccgttactagattcgttgaaatgaatgtaacaggcagaaggaagcgtcttagaccatatatagtatatacatacatgtatattcttgatcaggatcaatagccgagtcgatcttgccatatccgtctgtccgtatgaacgtcgagatctcaggaactataaaagctagaaggtttagattcagcatacagagacaaagacgcaagtagccatgcccactctaacgtccacaaacagcgcaaaactatcacgcccacacttttgaaaaatgtgttgttcttttcacattctgattagtcttttacatttctatcgatttctaaaaaaaaactttttgccaacgccctaaaaccgcccaaaactccgacacccacatttgtaaaaaattgttgggaatttttttcataaatttattagtttattatttattataaatttaagtttatatcgatttgccgacaacatattttaattttttttctcattttatcttttatctatcgatatcccagaaaaattgtgcaatttcgcattcacactagctgagtaacgggtatctgatagtcgggaaactcgactatagcattctctctttttgaaattgcggacgtgcccgtttctgcggttaagagcgagcgtggaaaaaataatttttaaatatcgatagaagtcgtaatctaattttgaatttaaaacgctgcattcaaagatattgctatgttaacatcgaagctagccaaaagaaaattatgttggcgtttacataaaaattatataataataaatagtaaatacattaaaatacttaaaaaaattagactctaactttattgttggttgatcgagaagttacttgaatctgtatgtctgagattaataatcaagaatttttttatatatcaaatgaatcggattataatagcggggtttcttataatcatgtatctaatgtctttgcttatgcttgccggtttgagggcgttagagcgatacaaaaactttttagcgaatcgatagaaatttgcaagacttcatgaaaaacaagagagactgttatagtcaattttcccgaatatcacaaacccgttactcagctagtgaaatggagagtccaaaatttcataatttttctggcatatcgatagatattggggaaaaaaatgagaaaaataaaaaaaattactgaagtatgggcgttagcattttgggtgttttgtaattgttaggaggggccgaagtgtttttggcttaccataaacattgacatcaaattaaataaaatcaaaacattttgcaaaagtgtgggcttggcagtttggtcggtttgtgttcgttaaagtaggcgtggaaacatcggtttgtatggatgggtatgcttaatctgaaccttctaccaaagacactagaataacaagatgcgtaacgccatacaattttttggcacacgattttttcgccgtggctctagaggtggctccaggctctctcgaatttttgttagagagcgagagagcagagagtgctacagcgaacagctcttttcatcgcataaagtgatagcagacacctgtatgtgtgcacacgtatgctcatgcattgtaaatttgacaaaatatgcccttcaccttagaagttctttgactttaaatctatattatttttgatcaattggcacccatgtgaaaaattcttgttttgcattgccttaacgttattattatatgaaaatagattagaaagagccaaatctatgtacatattatcacaaaaataaatttaaaaatgactttatatatttagaatatttgtcattagagtattcgtcttgcggcgtgtaaaaattaattaggcaatgattgttgagtgcttgtgtccgcacttcgtgcctcaagatatgaccaaagcaaagacactagaataattctagacttttgcaataaacagttatcatattcttatggaatttatgaaattccagtagttataataatttctattgtacttcctttaattatttactatatttattaagtcatttaacattaaaagtgtttcaaaaaaaaattatttcgcttttaaaaaattgtcagatgagagacaaattagaattaaacataaatatatatgtgtaaacggtagctaattcgatcggcgattttaacaaacaaattttaaaagctttaattaagcgcgaattttaaaaaaattatttaatttcatcatatttctaggaaattggcaaaaactaccctaatatgtacaatgtaaattcgttttttcgatcagaattgatttcggcccgaaaatagtcttctagcacaacacgcacacatatacgcgttctcgtctcttgtttttactcacacaagcaagcaaattctatttttagatttcttacgctctcagcgtgagcgagcggaaagagagcaattttggtcgtagaatttctgtcgattgccaaacaaattttttacatgaccagtgcaacgccctaaagccgccaaacccgtcacgcctacacttttaaacaatttttaaattttttgtcattatattccttaatatctatcgatatctcagaaaaatgattaaattcacattcacactggtattaacaacgggtatctgatagtcggggagctcatctacatcattctctcttgttttgtgctgtttttgggctttgggtgtaggagcgtccggaaacaaacttagcagtgtaggcgtcactagaatcatgaatcatgattcatctgaacttctggcatatatatatatatacaagagttccttggctcttggacggacttacgatcatggctagatcgactgttcaagaatatatactctaaaaagtcaaacgtttctttctccctaagtaaaaatgatgattacaaaaatgtaaacccaaatacgagatttttgggtgatgatagacgatttatagtacttacgcacttatagatgataaacaaaatttaacaaaaaatttattttatttcctataggtattctgaattgcagtttttagcgtccaggagagcagctgccgtcgctgcagcggctactgttttaccaggatcaccatgcataaaccaacatcacccaactgacgtttcaagctcggtaacagtgccatcaattattccaacgggtggaacatcagattcaattaaaacttcaatacaaccacaaatatgcaatgaaaacacccttcttggaaatgctggccaccagcacaatcatcagcctcaacatgttcacaatataaatgttactggacagccacatgactttcacccggcctatagaattcccggatacatggaacagttgtattctcttcaacgaactaattcagcttcatcttttcacggtatttaacttcttgtatttgtaaaaaagtaaccttaaaaagtatggatttttgtttgttagatccctatgtcaattgtgcatcagcattccatcttgccggacttggtttgggatcagctgattttttgggcagccgaggtttgagctctttgggtgaactgcataatgctgctgtggcagcagcagcagccggatctctcgcaagtactgattttcacttcagtgttgatggaaacaggcggttgggtagccctcgaccaccaggaggaagtatacgtgccagcataagccgcaaacgagcactttcgtcatcgccttattccgattcatttgatattaattcaatgattcgattttcgccaaactctttagccacaattatgaacggttctcgaggaagcagcgcggctagtggttcttacggtcatatttctgctaccgcccttaatcccatgtctcatgttcattcaacccgtctgcaacagatacaagctcatttattgcgtgcaagtgcaggtctgttaaatccgatgacaccacaacaagttgctgcatctggattttctatagggcatatgccaacctctgcttctttgagagtgaatgacgtacatcctaatctaagcgattcacatatccagataacaacatccccaactgttacaaaggatgtaagccaggtcccagcggcagcattctcggtaattgttaattaatttaaaatattaaaaatgattatattatatcgtttatctagttgaagaacttagatgatgcaagagagaaaaagggaccctttaaagatgttgtccccgagcagccttcatcgacatctggcggcgtagcacaagtagaagccgacagtgcgtcttcacagttgtctgaccgttgttacaacaacgtggtaaacaatattacaggcattcctggtgacgttaaagtaaacagccgcttggatgagtatattaattgcggatcaatttcgattccgtcaaatgaatatgattgtgctaatgctgatactacggatatcaaggatgaacccggagatttcattgaaacaaattgtcattggcgtagctgtcgcattgagttcattacgcaagatgaacttgttaaacatataaataatgatcatattcaaacaaacaagaaagcttttgtctgtcgatgggaagattgtacacgcggtgaaaaaccatttaaagcgcagtatatgcttgttgtgcatatgcggcgtcataccggtgaaaagccacacaaatgcacggtaagattaataaattatataaaacaatttatatgaattccattttaaatcatgtgtaaattagtttgaaggctgctttaaggcatattcacgtttggaaaacctgaaaactcatttacggtcacacacaggagaaaaaccatacacttgcgagtatccgggatgtagcaaagcctttagtaatgctagtgatcgcgcaaagcatcaaaatcgaacacacagtaatgaggtaagtctttcatctatataaaagtaatatttttcatttatagctatttttagaaaccgtacatttgtaaagcacctggatgcacaaaacgttacaccgacccgagctctttgagaaaacatgtaaaaacagtccatggagctgaattttatgcaaataaaaaacataaggggttgcctctaaatgacgcaaactctcggttacaacaaaacaacagtcggcataatcttcaagagcacaatatcgactcaagcccttgcagtgaagactcacatttgggaaaaatgttaggcacgtctagtcctagcattaaatctgaatcagatataagctcatcaaaccatcacttagtaaatggagttcgagcatctgacagtttgttaacatattcacctgatgatcttgctgaaaatcttaatttggatgatggctggaattgtgacgatgacgtggacgtggcagacctaccaattgtgttacgtgctatggtaaatattggtaacggaaatgcatccgcctcgactattggaggttctgttttggctaggcaacggtttagaggtcgtcttcaaactaaaggtataaattcaagtacgattatgctttgcaacattccagaaagcaatcgtacctttggaattagcgaacttaatcagcgtattacagaactgaaaatggagccaggtactgatgctgaaattaaaattcctaagctcccaaacacgaccataggaggatatacggaagaccctttacaaaaccaaacaagttttcgtaatacagtatcgaataagcaaggaactgtttccggatcgatacaaggacagtttcgtcgcgatagtcaaaattccactgcaagcacttattacggtagcatgcaaagtcgtcgtagcagtcaatcatcccaggtgtcttctatacctaccatgcgaccgaacccctcgtgtaactcgactgcatccttttatgatcccatttcaccagggtgctcacggcgctctagccaaatgtcaaatggtgctaactgcaattcatttacttccacatcaggactacccgtattaaataaggaatcgaacaaaagcttaaatgcatgtattaataaacctaatatcggggttcagggtgttggaatttacaatagcagtctacccccacctccatcgtcccacttaattgcaacaaacttaaagcgcttacagcggaaagattcagaatatcacaatttcactagcgggcgattttctgttcctagttatatgcattctttacacataaaaaacaacaaaccagtcggagaaaacgaatttgataaagcaatagcgagtaatgcacgacgtcaaactgatccagtgccaaacataaacttagatccattaacaaatatttctcggttcagtacaacaccgcatagctttgatattaatgtcggaaagactaataatatagcatcgtcaattaataaggacaatttaagaaaggatctgttcactgtttcaattaaggctgacatggcaatgactagtgaccaacatccaaatgaaagaataaatttggacgaagttgaagaacttatacttcccgatgaaatgcttcagtacttaaacttggtaaaagacgacacaaatcatttggaaaaagaacatcaagctgtacctgtggggtcaaatgtatccgaaactatagcttcaaaccactaccgagaacaatcaaatatatattacaccaataaacaaattttaacaccgccttctaacgttgatatacaaccaaatacaacaaagtttacagtacaagacaaatttgctatgacggcggtcgggggttcattcagtcaaagagaattaagtaccctagctgtaccaaatgaacatgggcatgccaaatgcgaaagcttccatcaccagtctcaaaaatatatgaacactgacattggctccaagcagcaatcagcattaccgtcagctcatcaacggcaaacagaaaaatcaaattataatcaaatcatagactcatcgatgactagcttgccagaacttaatgtagattcaatatatccacgaaacgaaacagaaaatatatttaaagtacacggagatcatgataatgaaatccaatgcggcattataagtcaatctcaaatgtcaccttccactaatttgaataatgatggtcagttttctaccgtaaatatgcaaccaataacaacatccaaattatttccccctgaaccacaaaaaatagtttgtgacacccaagcgagtaatacttcggttatgcatttagatacatatcagcgtactctggaatatgtacaaagttgtcaaaactggatggagacgaacaacacatctaccaatcaaatacaaagcctcccgggaatgccggtaaacaatacattgtttcccgatgttagcagctctacacatccatatcatgggacaaatatggtgatcaacgatatgactacatcccttacttccttactcgaggaaaatagataccttcaaatgatgcagtaaaaaatgttatctagctaacactgacaagaaatcagtcataataaactattttattctatttagattgtatttactttataggcaatataccaattacaaaacaaaattaaattaaaatcctgattcaacactgtaatattttttacaaatgtcctttaatcaagttcatttattattttacaaaaacgagaattttattttaaatattctaaatacatgtaacaatataatgtcttccgagctattttaaacattaaaatgcaatgattatgctcttactaaataattatttttatttattttaatttattttccccttaataccggcgtaagccctaataagccttaataccggcgtaagccggtattacaataatattaattatgacgccactaacaaaaaaggcgttgcatactcgtgggcttatatttatatggcataattaaaattataaaataatgttttatatattcggtaagggggcatacatatttgttatttcaaattctaaaagcattccaatcccttaccgaaaaaaagacactacaataacgagatgcgtaacgtcataagatttttttgcgcacgattttttcggtgaggctctagatgtggctccaggctctaacgaatttttgttcaaaagcgagagagcggatagctctacaacaaacagctcttttctacgcatacagtggcagccgaaaactttatgtgtgcacacgtatgctcatgcattgtattgcccttcatcttagaagttcttaatctttcaatctatattatgtttgatcaattggcaccatgtaaaaaattcttgatttgcattgccttaatgttattattatttaaatatagcttgaaagtagtagttgccgaatctatgtacatagtatcacaaaataaattttaaaaatgactttatattagaatataggccattagagtattctgcttgcgacatgtgaattacaattgcaatggcctccccgtgttgtcccgtgggtaccgattattacatatattacatataattaattattaacataaatataaatatgtaaacggtagctaattcaagaggcgattttagcaaacgaatataaaaaaactttaaaattataatagtcacggcgtgaatttttaattattattttatttcatcatatacgatacaaaaatggcgaatatccatttcttgtttctttaaacaaaattgatttcggcccgaaaatcgtcttctagcacaactacacacacatacatatatctattgtttttactc

SEQ ID NO: 3221 - DNA, 4853 bp, DROSOPHILA
cattcaaaaaatattgacttgtcttacaaaactgattttcattgttcgctacttaatatttagtgataaatatattacttcgggactgataatcttatgaatatacgtgtgagatttggcgatacccttcattacttaggaagccgagcgcataagctcacaccattataatatttaagtgatatgaatattaaatattaaaatttaaaaccaactttttaatcaaagagtttccttaaaattgtttaagttgccgatcaaaagtggaaatttatgcgtgccgttatttgaaataccaatcttttgaaaatgtttacgccgacggttaatattatttaaaaggataattgaatttataaaacgacgtcattcttgttgtggactaactttaatgaaatggacgcctacgcgttacctacatattttcctcttgccgtccaggagagcagctgccgtcgctgcagcggctactgttttaccaggatcaccatgcataaaccaacatcacccaactgacgtttcaagctcggtaacagtgccatcaattattccaacgggtggaacatcagattcaattaaaacttcaatacaaccacaaatatgcaatgaaaacacccttcttggaaatgctggccaccagcacaatcatcagcctcaacatgttcacaatataaatgttactggacagccacatgactttcacccggcctatagaattcccggatacatggaacagttgtattctcttcaacgaactaattcagcttcatcttttcacgatccctatgtcaattgtgcatcagcattccatcttgccggacttggtttgggatcagctgattttttgggcagccgaggtttgagctctttgggtgaactgcataatgctgctgtggcagcagcagcagccggatctctcgcaagtactgattttcacttcagtgttgatggaaacaggcggttgggtagccctcgaccaccaggaggaagtatacgtgccagcataagccgcaaacgagcactttcgtcatcgccttattccgattcatttgatattaattcaatgattcgattttcgccaaactctttagccacaattatgaacggttctcgaggaagcagcgcggctagtggttcttacggtcatatttctgctaccgcccttaatcccatgtctcatgttcattcaacccgtctgcaacagatacaagctcatttattgcgtgcaagtgcaggtctgttaaatccgatgacaccacaacaagttgctgcatctggattttctatagggcatatgccaacctctgcttctttgagagtgaatgacgtacatcctaatctaagcgattcacatatccagataacaacatccccaactgttacaaaggatgtaagccaggtcccagcggcagcattctcgttgaagaacttagatgatgcaagagagaaaaagggaccctttaaagatgttgtccccgagcagccttcatcgacatctggcggcgtagcacaagtagaagccgacagtgcgtcttcacagttgtctgaccgttgttacaacaacgtggtaaacaatattacaggcattcctggtgacgttaaagtaaacagccgcttggatgagtatattaattgcggatcaatttcgattccgtcaaatgaatatgattgtgctaatgctgatactacggatatcaaggatgaacccggagatttcattgaaacaaattgtcattggcgtagctgtcgcattgagttcattacgcaagatgaacttgttaaacatataaataatgatcatattcaaacaaacaagaaagcttttgtctgtcgatgggaagattgtacacgcggtgaaaaaccatttaaagcgcagtatatgcttgttgtgcatatgcggcgtcataccggtgaaaagccacacaaatgcacgtttgaaggctgctttaaggcatattcacgtttggaaaacctgaaaactcatttacggtcacacacaggagaaaaaccatacacttgcgagtatccgggatgtagcaaagcctttagtaatgctagtgatcgcgcaaagcatcaaaatcgaacacacagtaatgagaaaccgtacatttgtaaagcacctggatgcacaaaacgttacaccgacccgagctctttgagaaaacatgtaaaaacagtccatggagctgaattttatgcaaataaaaaacataaggggttgcctctaaatgacgcaaactctcggttacaacaaaacaacagtcggcataatcttcaagagcacaatatcgactcaagcccttgcagtgaagactcacatttgggaaaaatgttaggcacgtctagtcctagcattaaatctgaatcagatataagctcatcaaaccatcacttagtaaatggagttcgagcatctgacagtttgttaacatattcacctgatgatcttgctgaaaatcttaatttggatgatggctggaattgtgacgatgacgtggacgtggcagacctaccaattgtgttacgtgctatggtaaatattggtaacggaaatgcatccgcctcgactattggaggttctgttttggctaggcaacggtttagaggtcgtcttcaaactaaaggtataaattcaagtacgattatgctttgcaacattccagaaagcaatcgtacctttggaattagcgaacttaatcagcgtattacagaactgaaaatggagccaggtactgatgctgaaattaaaattcctaagctcccaaacacgaccataggaggatatacggaagaccctttacaaaaccaaacaagttttcgtaatacagtatcgaataagcaaggaactgtttccggatcgatacaaggacagtttcgtcgcgatagtcaaaattccactgcaagcacttattacggtagcatgcaaagtcgtcgtagcagtcaatcatcccaggtgtcttctatacctaccatgcgaccgaacccctcgtgtaactcgactgcatccttttatgatcccatttcaccagggtgctcacggcgctctagccaaatgtcaaatggtgctaactgcaattcatttacttccacatcaggactacccgtattaaataaggaatcgaacaaaagcttaaatgcatgtattaataaacctaatatcggggttcagggtgttggaatttacaatagcagtctacccccacctccatcgtcccacttaattgcaacaaacttaaagcgcttacagcggaaagattcagaatatcacaatttcactagcgggcgattttctgttcctagttatatgcattctttacacataaaaaacaacaaaccagtcggagaaaacgaatttgataaagcaatagcgagtaatgcacgacgtcaaactgatccagtgccaaacataaacttagatccattaacaaatatttctcggttcagtacaacaccgcatagctttgatattaatgtcggaaagactaataatatagcatcgtcaattaataaggacaatttaagaaaggatctgttcactgtttcaattaaggctgacatggcaatgactagtgaccaacatccaaatgaaagaataaatttggacgaagttgaagaacttatacttcccgatgaaatgcttcagtacttaaacttggtaaaagacgacacaaatcatttggaaaaagaacatcaagctgtacctgtggggtcaaatgtatccgaaactatagcttcaaaccactaccgagaacaatcaaatatatattacaccaataaacaaattttaacaccgccttctaacgttgatatacaaccaaatacaacaaagtttacagtacaagacaaatttgctatgacggcggtcgggggttcattcagtcaaagagaattaagtaccctagctgtaccaaatgaacatgggcatgccaaatgcgaaagcttccatcaccagtctcaaaaatatatgaacactgacattggctccaagcagcaatcagcattaccgtcagctcatcaacggcaaacagaaaaatcaaattataatcaaatcatagactcatcgatgactagcttgccagaacttaatgtagattcaatatatccacgaaacgaaacagaaaatatatttaaagtacacggagatcatgataatgaaatccaatgcggcattataagtcaatctcaaatgtcaccttccactaatttgaataatgatggtcagttttctaccgtaaatatgcaaccaataacaacatccaaattatttccccctgaaccacaaaaaatagtttgtgacacccaagcgagtaatacttcggttatgcatttagatacatatcagcgtactctggaatatgtacaaagttgtcaaaactggatggagacgaacaacacatctaccaatcaaatacaaagcctcccgggaatgccggtaaacaatacattgtttcccgatgttagcagctctacacatccatatcatgggacaaatatggtgatcaacgatatgactacatcccttacttccttactcgaggaaaatagataccttcaaatgatgcagtaaaaaatgttatctagctaacactgacaagaaatcagtcataataaactattttattctatttagattgtatttactttataggcaatataccaattacaaaacaaaattaaattaaaatcctgattcaacactgtaatattttttacaaatgtcctttaatcaagttcatttattattttacaaaaacgagaattttattttaaatattctaaatacatgtaacaatataatgtcttccgagctattttaaacattaaaatgcaatgattatgctcttactaaataa

SEQ ID NO: 3222 - protein, 1391 aa, DROSOPHILA
MKWTPTRYLHIFLLPSRRAAAVAAAATVLPGSPCINQHHPTDVSSSVTVPSIIPTGGTSDSIKTSIQPQICNENTLLGNAGHQHNHQPQHVHNINVTGQPHDFHPAYRIPGYMEQLYSLQRTNSASSFHDPYVNCASAFHLAGLGLGSADFLGSRGLSSLGELHNAAVAAAAAGSLASTDFHFSVDGNRRLGSPRPPGGSIRASISRKRALSSSPYSDSFDINSMIRFSPNSLATIMNGSRGSSAASGSYGHISATALNPMSHVHSTRLQQIQAHLLRASAGLLNPMTPQQVAASGFSIGHMPTSASLRVNDVHPNLSDSHIQITTSPTVTKDVSQVPAAAFSLKNLDDAREKKGPFKDVVPEQPSSTSGGVAQVEADSASSQLSDRCYNNVVNNITGIPGDVKVNSRLDEYINCGSISIPSNEYDCANADTTDIKDEPGDFIETNCHWRSCRIEFITQDELVKHINNDHIQTNKKAFVCRWEDCTRGEKPFKAQYMLVVHMRRHTGEKPHKCTFEGCFKAYSRLENLKTHLRSHTGEKPYTCEYPGCSKAFSNASDRAKHQNRTHSNEKPYICKAPGCTKRYTDPSSLRKHVKTVHGAEFYANKKHKGLPLNDANSRLQQNNSRHNLQEHNIDSSPCSEDSHLGKMLGTSSPSIKSESDISSSNHHLVNGVRASDSLLTYSPDDLAENLNLDDGWNCDDDVDVADLPIVLRAMVNIGNGNASASTIGGSVLARQRFRGRLQTKGINSSTIMLCNIPESNRTFGISELNQRITELKMEPGTDAEIKIPKLPNTTIGGYTEDPLQNQTSFRNTVSNKQGTVSGSIQGQFRRDSQNSTASTYYGSMQSRRSSQSSQVSSIPTMRPNPSCNSTASFYDPISPGCSRRSSQMSNGANCNSFTSTSGLPVLNKESNKSLNACINKPNIGVQGVGIYNSSLPPPPSSHLIATNLKRLQRKDSEYHNFTSGRFSVPSYMHSLHIKNNKPVGENEFDKAIASNARRQTDPVPNINLDPLTNISRFSTTPHSFDINVGKTNNIASSINKDNLRKDLFTVSIKADMAMTSDQHPNERINLDEVEELILPDEMLQYLNLVKDDTNHLEKEHQAVPVGSNVSETIASNHYREQSNIYYTNKQILTPPSNVDIQPNTTKFTVQDKFAMTAVGGSFSQRELSTLAVPNEHGHAKCESFHHQSQKYMNTDIGSKQQSALPSAHQRQTEKSNYNQIIDSSMTSLPELNVDSIYPRNETENIFKVHGDHDNEIQCGIISQSQMSPSTNLNNDGQFSTVNMQPITTSKLFPPEPQKIVCDTQASNTSVMHLDTYQRTLEYVQSCQNWMETNNTSTNQIQSLPGMPVNNTLFPDVSSSTHPYHGTNMVINDMTTSLTSLLEENRYLQMMQ

SEQ ID NO: 3223 - DNA, 19976 bp, DROSOPHILA
gttcgcattcagacccgtgtattcagaccagaccagcccccggcagttggattattcatatttaaattcatcttacaccctcgctggagctgagggttgctggattttcgagagtgtttgccactcctggcgactcccgttgccccgttgcccggttgccccattccccaactcccattcccccattcacactccgaatataatatggatggaatagctgaataaacaaagtcggggacgcactcattctggaatgttgacagtagtccctattttcgagctgcctgaaaggaggaaacccaatacaactaggaaccacttggtgatggagcaagtcgctttattcacaataacgtttatattcagacatttatatttacacgtacactcacattcatagtcatttatttgtttattcgttatctgttgtttcttatttgttgcaacttaagcaagcagccgtaagcgttgagaattaagagttaaaaacggtttttacggttaggaacaaatccgaatatgtacagcgattcaaatggatcagtagccgccgaataaggaggccaaaggatggggaatcttacatagcactaggtcctagttctagtcttttactgaccgcaacaacctttccttactgagtcccaacaaggtatcgagtttcccttgggcaatgcagatatacagtgagccattgtgattggaaacccaattagtgggtggattttcagcccggctatatccgatatgctcgaggggccgtcgaggtcgaggatggctatcctaacttagctttggtttctttaagaacgaattgaagtttagactagggcgaaacagtgggcatccagtcgaaggacctttgaaatagtgtaaattcgagaccttaaagtagcttagagccaggttttgtcgtcggacgagtcgcggtcggagaggccaggattggcccgccgatagttgttgttgtacggcgaggagcagacgatctgggtctgcatctccggcggcaccacctggatggccggttgtcaggagagcagttgggtggtgttggccgtactgctggaattggtcactgcggtggcactattgggtcctgaccaccgctgctgcatttcctgctggtaggacaaccgtttcctgtgtcctccacctccagatccaccggacgacaatgactccgccggcagactgttcctcagcgtcgcactgcgacctgttcctggggattggaagtgggggaaagtatgattagatgccaccttatccaactaaggatggactggactcaaactcaccgctgtgcgaaattcgatgcgacttgggtgagctgggacaggtataaagtatcgatttctgggtatctatcaatgtgtaactcattagcatacactccttcttgtttcaactgtgagtgttcaaacctaccattgcgcttgatgcgattgtgatccggggaaccggagcaggagtaccgggatgtcagattctcccgccgactaaagggttcagtgcccacgcgcacaaacaggcaccagcggaagaccatcttgaaaccatagcgaaagctggatggaatgaatgaataaatgaattaaatgattaatagaagaactcaagtccattatcattcaaatcttaaatgcgttcccattccgtccgctatataccacttatagctcaataaactttaacttgccccaagggcacttcgataccttcaccctaactagcttagtccagtatttatggacttcaattgtgacaatccccgaacgacatcaagttcttttatttatgagcagcttttccgttggctgccacatccatcccaccgacatccagcacaccgagctagacaccgcttactcatataatctatggtgctacgggagtgttttttacgggccagcgcggcaagttaatatacccgtgttcccccccatgggtagtaaatgtagtaaatggaaataaagagctgcgttgtcgttgacgttgtcgtcatcatttgcatatggagcgccatcaattgtgggaagctgtccgtgatcctgggcggcggagctcacgtgctggcccgttggcttttattccacgtagtaaccccattatccgtctcccttccaggccaacgtttatccatcagtcagatatccgctgactgagcggaattaattgcaatccgctacgtttttccggccacgagcaccgactgccaatttgtacgtccatatatattgaacaacgccttttgtttaagtgcggatatatatatatgatatatgtagcgtttcaacactaacaggttggggcacaagaatagttccacaaaagtggcactatgatctctctcagtcttggcacccctttaagttctaactttaagttcagctccttgaagaaacgaggatgtaaccccagctgtttgcaaacttgccaccaatggatgtcaacttgcgtgcttttattttagccgcagctgtacgacagttttccggaatcatgctgtcatgtgtccacaaactatattcaaagtgcgaggcagtggcacccactcagtagtaatgcagtaatgatgacgagctcattaatttccggggagccggctaaccaatcaactaatcttgccgagaagccgatgtcttgaatgccactgccaccgccactgcacttagtgccctaatggtgctaattcagccgcaaattacccaatttgctgcgggttaaggcaaccacatgagcatggcatggacaggaacatggagccctaatcctgcaaccaaataaagtggcaatcgagtgggctactactcaccgcgaattcatccagcagtatataatgggattgtacatggagttgctcatggccagccagtagatggccaggtaaagttcctggatgaagggcgcctccgtgatggccgggtagcaggatgtgattatgaagtagctgtggaacggcagccagcagatggcgaatatcaggacgaccacaatcatcatcttcaccacctgggaagagcaaagtgagtgcaatgtttaagtcttatcaaatagccaaaagccattagtctattttgtggccagaaggataatcaagtgtgatgtcaactggaattttctaagctgctctttctcttactcagaattcagagctacatttcaatatataattgcttaattgctgtaactttccttgactggtttttatagttcggaaactacaggtaaagttaatctgcacattaaacaacagcgggcagccaattcaaacagaagtttcggaaaatccctaacaattaaaaccctcgggaaacgagtgcaataaaatcagctggggatttaataatgggaatggggacttttaataatttcatgcttaaggcagttcgtgttagaggaatttaatttaacagcatttaatggaattgtacaactaatcttagtatatttattcgcacatctgtaaagttgcctaaaaataaaagcttattcccagatctggtggtctgccaacagcaggtgctcattggtggcgaccagagccagtgagcacaccaaatcccggccagcacttacccttcgcttactccgcacattctccacctggcggggcgtgcactcgccgatggtcttggatccccagagctcgatgcccacgcgcgagtaggtgaccgtcatggagacgatgggcaggaagtaggttagaatgatgatgaggatgttgtagctaaacgagagcagagaccaaacacggtgtttacaagcctttcagttagtcgggcgggcaatgcttttaaaagcccctatcgctccatcggacattgttgctgcctttcggcttttgttttatttttattgagcaagtagcaacttggaatgaatctaaaattaatggccttgcatgtgggacacaatgcataacactgggggccacaggacgcagaacgcagaacgcaaaacgcaggacacccactgctaccaaattgccatacaaaatggttgtaaaaagcaacacgttttatttgccgctcttccttttttgccccaagattttgccaccacccacaatttcccacccatccagtcagtcgttcgttcgtttttttacgagaacttcttgcttcagttttgcctcccccgtccgtccgtaatccccccttcccagtgcggatcaggattgcgattgtccctgcatgtgcaaccgccattctgattgacgtcctgattttttgattttcacctccatctcgatggaaaggaaaacagtgactgttctctatgcacaccactcaaattggatgcttttcagcaatattcaataactttagtttacaatttcaagaacatctcaatgtatcctaacttttctacgaaattaaaggctagcttctccagaacccagataacgaatggatcccatttcatttcctctcagtgcagtgtccaaaaccaccttccattgtcctctctaactgcattggtgtgtccaacaaagtccgacagcttcgatgcccataaatagcgaacagataaaggataaaggatactcacagggactccatcgtggagtgattggtgggcccatcgggccactccgggtagcagaccgtgcggttgctgagcccgcggacgggcacctcctccgtgcggtagatgatcatcatggggcaggagatgagcgtggaggccagccagatgaccgccgcgatggccaggttgcaccgcttgctcatccgcggctgcagtggccggatgatggccacgtatctgaaacgagaggtgccgacttaacacaatttccactgccactgcaggcagccactccaaatgagtttacgccggaagtggggtcctgggaccataagctgattatcgaaatgcacgggtagccacccgaaaaaaaaaaattaccctcgaaatggaattaaaggacggcgctgctgcagaagcgcgccaaagcccgaaagtaattcaatctgcggaattttggcctgccattaaaagttgcagtcattaagggagtttatataggaacctaatagccagcggatggcatcacgttgtggaggtacacatatgtatttcgtcctgcgggattcattctttgtgattttgggtcaggcctttaaaaagattaggtttccgtgattaattttaatggctccatcggtctggggaacataactcatgatttcttttgcggcattaccttaatttatgtgctaaaaacaaacataattcatgtgtcgcctgtttgtaatttactcaatttatatgttccatcgccaagacattactctactttcactgattgttttcgcctaaacagctgaaacattatttatcgtcaaactttttgttttggtctataagtattgatactatttcaattttcaggactccagtccgttgaacttgtacatttgtaatttgtacacgcattgatttgacagtatattttaatttatatgcctgcttacgacttcaaacagataaatcttcaatacatattcagtgctgcgacgcaaatcgagaataatttataaacatttccagcagatatgttcgaatgcagactgttttgtttactacaaaatcgattcgatgcataggctggattaaataggaaatatattacagttcccaaccaattaacaatgaacaagaaagaaagattatttataatatttcaagtcgtttgtcgattactatgtttactcgacagaataattcgattttagctccgtatatttcagatatatgaatcatccataaatgcccaagtaggtggaacattatttatgtatgtactttgtagcacgcgtatttcgatgggcttcgttttgatccttgtgacgggcaatccaattgtgcacccatgtccgcagccctatgaaatcctattaaagcgaatgggttatttggcccggcattctgaccgtgattgatatgggttcggataggtcggataggcatattggtaatgcatatgcatatgaatggtccaacatacataatcgcccagcccacggtccacgtagtccgtaatccactcacctgtcgatggagatggccattagggtgaacactgaggcgcagatgcttagcatcgcgatgaactgggacaacttgcagtagaactcgccgaagggccagtcgctatccagcatatagtagtagttgaaggtgacgttcaggctggacaccatggcgtccgcgatggagagattcactggggatcaggaagagaagagtacgcagcattaccatctgattgggaaaattatgcagaacagaacagcgatgactttgtaaaatcactcagcctcgagggcctacacttaccttttattaatgctgtacatttttaattggactggaataaagtgcactttcacccgcacatttctaccgaaatcaacaggaaatgaatggtatatgtacatgtatatatgtacaccaccgatggatacacttttatcgtgtttcatttgcatggaacgatttacatgccatagacaacaaaacatggggcataagcaaagaaaatggaaaatggaaaagaaaagtctgcctttgtttatttttcattatctactggagataaggcgacgaagtgccggcgcataaaaagcatcacgaaaccgaaacagcacctacaataaaacaaatgtccttttgccgaacattagcccgtgtcctcatgttcctcctcgcctcctgcaggtcctgcaggtcctgtggatcttgcgagtcctgcgacgcctacaagacgacacgaggcgacgtgtcgcattctaacaatcaccctggctcctggggccattgactatgtggctgcgtcatggctatctggcctccattatccccggggcctgctcctgtcagccacgtacccaaatatcgattctggcccattttaattaataaccaaatgctacttttaagcgctcagtcgtgtcaggggttacactttctctttcggagatagcaggacaatcatttataatctgagcacaattaaatgatttttgtcctacagagtttgaaacactactaactacaacagagcatcctatctcaattgtaaaactctaagctgaactgaataaatgaggaaataatttcgcaggaaggattatagaagccctaagtaaaagccatttaacatttcgtacaaaattccctttttaaaacattaatttatccttctacttaatgcaaaagtgagtggaccccgagtacaaacgctgctctacccggcgaacaaaagatgcaaatacgcattgataatgaagccaaagaagattatcatccggtgactgacttcctccaaacccaaacccacgaaaaaccccgagctcggttcgttccagatgtctgtgatgagaatttgaaatttccgtgggcccgaaaatgattaaaacgtcagaacttgttactaataatgattgccaatgtgtatttataaatgcaaattcgaaaagccctgcgagctcaacggacgtttagtttacgtaataataataataatcattacccagccagacaatggaattccagagaggaaggaggatgcttcaggacggcatgattgtgccctgccattgttgtacatgtacatatatacatatatgtatctgaacctgtatctgtatctgaaggagatcgttaaagaagaagagctggattagcggtaagctctgagtaaacggaatcaattccacgtttcttttattgcccttcgtctcaagttgcttgggtgttttattaaaataattgcgcatgcacaaagctggcaatcaggtatccaaccaagtggttgtagtccaagccagcaaaatggcggtaatgtcattacgctgctaaactttgaccaaactttggcagagtctcgttaagagcacatttgtattattaaaggtgtgattagtgtgcacgagctggatgagctgcaaaatgcaaatctaatgcactctgaaacgtgactaaaagcacattcaattaatgagagccgagctcagtcttcagccggcaaactgcataagttgatttgatggccaaagctgaggaaattaaaattaattccgtcctattgccgggctgctccgccacttcatcaaaattgccaacgatggaagggttgcgaagttaatatctgcgagatgcaacggggcggatgcggaatgcagacggatgaggcggagctactctttaggtgccccataaataggtaatccaccctttcgttagtttcccgggcaaaacttaagcaaactcttgacaagagctcgtcgacctgactggacaaacttaagagggaaagttactttctaactgcaggaaaatttggaaattaacgagactttctagcaaaaatcggtcggttatcacatgcttacaaagctctgaactgtctagtttattgcatattacactgactaaccaagcaaatatttactttacgaactaaactcacacggccaacgcgacgtatgagtgatttttattgcgtatacgcaacgtttgcacacacaacagcagcccactcacctatgaaatagttggttaccgtccgcatccgcttggtcgtcatcacgatccagacaacaatcaggttaccgcccgtcgccacaatgaccatgccgccgaagaggatgctccagagcacctgacgccaccacgggaccacaaatgcaaacgagcccgtctccatggacgccgccgcatcctcggccgcgtcttccacgtccccgacggcgggcaggtcggtggataggctgtggatgtggatgggacacagagttacgatggggaattagtgacatcgagattaagtgtgtgtgttatgtttcacggtgtgccccgctccgccataaacgagtgccaagtgggtgatgcgcctatgtaagcatgcgaatgggtgctcttagcttaaaagatatgtgcactgggagaaaaactcaagagaattatttaggaaaacaaaaagtgattccacatactagtttgaatgtgtcttatgctcaaattatcggaaatttcatctctatcacaacagaaaaggtgtatagaatttattctatattatttagaaggatttctctctgtgtagctatatgtgctactccaggatgttgtcgctattaagcgtgtgtaattgtgcgtgcgttgacaaatccgtgtttttctgcagcgccgtctgccacataaaacatggggttcagctaagccggagggcaggagtcccactcctcatctactcaactccatccactccattcctttccactcactcatcgttggctgtcgtcatctttttaatattttgtgggtcctggcttgtttgcttaggctcgcatctaggagagtgttcaaatagagggttggcaatctcggccggaatcctctccatcggatttgtgagcctagatcccggttagtccgccatttggatacacgaactggcgatggaggatggggcaggacggaggtcatgtcatttaatatgcacacagtgtgcgggagacgacactagattggcaaggtggtcattaatgctctgtttattcactcttcagagcaattaaaagatgcccacataagtaattctcactttacacaccccattcacccttttcgcatgacaaactgcggggatttacataaaatgccctttgttcgagctcccaaatgcaaagaggattattgatttgttttttgtggggcctcgacaggcctatgacgagctgaatgggaaatggctgccgaggaaaatgggaaaacagaatgccttgggccaaagaaaatgtcacgacaaaaatattttcactatgccatagcttatattcttgttgatattgctgctgcggtttaaatagtacagagaaatgtgagtcggtgtgggaagtttcctaaaattaataaataatattgcaagcaagatctttaagatagaataaatacctctaaaatgcctgataacgatggaaaaagtcaatttaaaaagttctttttatgccacagtgaagacctattgttccattgttgtaaatactttctcccttaaaaatatattcttcttttcaaacaaatacgtgtgacctcagccagaaatagaccatcaaagcaattagcccatgtattccatattagttgttatgggaatgtggaaagtttggcaaataaattgtgattgtgccacttcagtcagaggaatgtgtacaaatatgtttacgctttgatgcacggattcttttgtgccgaaaaatatgccaggctgagtccttcgtcctgccaattttaagccatcttggccgtctctatttgcacataaatcggacatcagaaatggacaactcggatgggaaaaagagcagccagttaactaccaggatcgactgttgagcactgcctgaaggcagatatatgtggcctccgtttggccagcaaaaaaaaccaaagttattcgcagaatggattttcgatgcgtcagacgcagccatattcccatatccacatagccacatatccaaataattattccacttccagtgccagcgaaacccatttgttggtgctggtggggcagtaaatttgggacatgtctgcaaaaagtgccgacgttttttcagccggaaagaatagagttgaatgccatagacccgcagttttttgtgtatatatgtatgcggaaaaagtaagtgtctccgcataaaatgtgtttgccttctccgccgttttgtgtacttcaaacggaagtgatgagcggaagggaaatgccccagtggatgactgaatgccggaatgactgaacgcaggcgtcattagagatgcacgtgggtgtgggcacaatcatggctgaatcgcggataaaaccgaaacggaggcggactcatcaggacccatcaaaaagccacgcaatgtaagggatcccccatttgggagcaatgaagtagcaggcgtattttacgactcttttaattgatatcgctttaaatgagaagtttcattggtttgaaggggagaaagggaaatgaaaatatatataaaataataaacaaatattaaaggtggtctagaaatggatagcctccctgaaccgaacgttccagactcccatgattcgagtgctctgttcgtgcgtgagtttgattattaattgagtttgtgtcataattaggcatgccggcggatccgagttcaactcacgtctggctgtgattgaaggagctggtggatagggcgagctcctggccaaagtccggcagaggcgtatggttgctggccgagagcacgctgctcatggccgagaaaaggacgccggcgggggtgctccagttgctccaattgctccaactgatgtcgccgtagtcatccgcctcgaagtcactgcgattctccatggctgctgctggtgctgctgctgctgatgttgttttccgcaccccggagtgttttcctttgtctttatccggactgaacgattccggacttaatgttgcgtatccctttgccttgccttatttgctttccatttgccaactgctcgacctgaaaaatgcaaagaaaacggtggcaggaccatctaatttcatttctggcatgtttcgtttcgttttattttatttcttttttttggtttgtgatctttgatggcctcgtgtttggctgctcttggtagctgtttgttgcaaacaatgctttttgatgctcattttcagtgaaaactttgcacattcctgctacgtgctcatgaagggattcatatcgattttgatttcttcttgagtttgtttctcttctcgccctacgtgactcattttcgccctatcttctgctcctgctcccaagaacttttcgatggtttccttctagtgccttgaataatctagaacctaactactcgtcccccggcagagttgccaagtatgtgcctcttgatgaggttgcgatgtggtggccattagtggatcggataccttggaaacttcgggagcgctaaatgccggtgatttgtccagtgcgaacttttactttcgcattcgggccaataatactaatttatgactgtaaacgctaatgaatggcaatcggaaaagaactaaagctgctttaataaaaacatttccttggtgaaatattattcaagctatatgaaaaacaattttctattagctaaatgatattaaccatttaacgtgacgaatgaccctaaagcctaaataaatttgttattatctgtatcttgtgcgttattatgtgaccaaaatagctcaaaaccaattgaaaaagccgagcagagctatttctttttatgagtccccagagctgagttcacctgcctttcgagtgtctgaaggctcgcaaacaattgtttcagaacgacagtaaaccctctcttcgatggcttttttctcgttttgaaagggcagtggggagtggggaaaggtccttactcgccagcgacctggtcgtccttcaattatgcctcggatgtgtccttggcagctcgagataattgcgacggccagtcgcgtcacttgaagtctgacaaaacgataatccgagtagcaacttttcctctccttggaggcgtttttattactttgctggctttcatactcgtactttgctactgtccagccagcaggaatggaaaaatttccaactgtgtttgttcgcaaaaagttaaaggtatgggcagaaaaatatttgtaagccaggaatagcgcatccaaattccggcgaccgcagaaagtgaaagggatccatgcggcttgggtgcgcagcccaaaagtatgctacaattttaaagccgtgcgcatttgcaccacattttatgttgcatgcttttagacaccttaatgcaagtgttttcagtgatatttagtttcatcagatattaaaagaagagatatcaggttttaagtattttttactccccgtgcaccgtttagtgtgtcgggagaacactctatcagcccagtcaatgccccaggaaacaaagatgcatcccgttctcccgagtcgatgcatcgaaagctattaaacaaacacccaggcgagcagcaatcaattgccggcagcttgtctgccgagcaacgattacaaataatgactgcaaatagacaaaataaagcatatgccacagacaaattactaagttggttctggttctagttcggtctagcaactggcaaatggcaactggcaactggcaactgaagtgcaagtgatgcagtcttaatgaagggcaaacaatcttcaaaagaatgctcaccataattggcagatcgtttcacgcccccgaaactaatcgttcgagcaaatatttgaaaaacacttgaaaaaaacgcaacgccaactgaaagctgtccgccttttttcgagttgagcaatgttcgggcatctttttgaccgatgtccgttgaaattgcgttttctgcaataatcgcaaaaaattagattcgcccgcagtttcactgaacttgaaaaatggccaaaatgtcacgttccattgggcagccaccgaaagtgatggaaagtgctgatacggctgaaagtgtcctgctgctgttggttgcgtatacgccgtgttgtgccagcagctttcggccgcagagctgtaaagttttaagcgaatttgtctcgctgactggcgattgtttcccgctccattcccagcagctcaccagctctgtctttatcgcatccagcgcagatagacgacagtagcactgccagctcattggaagcccactagcttggagtacgccagtgctccagacgtcgtcggcttcctcagaacgtacagaacagggtaaacactcaacaccgggctctgccgaactttggaccagcttgctcaaggcgggaaacgcaaatattccactttagcaactttaacttcgatgtgactttgtgggtaatcaggttttcagctgacaacagttagagcttgaaaatctgttcaatattgattatgtggaaatgcaaagctgcctttttttgttaaaataaagcgattcccctcggaccgccgactcgccactgctgcttacagcatttcacatatttcgtatttcttatttcgctggagcgtggaaagcacatgcagcgttcattgcgacccagaataaaaggtccgggcttttccacttccccgcgccaccgtcagttttccttttttgtgtttgacaagtcaagtacagggtggccagggtagtcgccatagttggtgggtctttgtgagcttgtggatggcccagtgggtgggaagtgtgactgcagcaacagtgcggctccatgtaggcagcccagtcccttaggagtgcactggcagaaaagttgggtagctcttcaaagctaatatacatatatatgtattttccattttaaaaccaattcaggctagtaatattctatttatacaaatggagggaattgtgcctgcttctttctggttataaatcattcgatttaaataagattaatacatatttctctgaatagacgtgtgtgtgtgccactacacatgtgtgtcaataggagtgggaccgctgtcctagtgccctgccccgccccctttcgtcctttttccccccaaccccactcctcgtggcatgtcggtccacattcgcagtactttcacttcctgctgccggcctgtactgttctaaaacaatttattaaaaaacaaaaatacgagcagagcgagtgaagtaaagggcccaggccgaggcgaaacgtaataagcacatttctgggggttccgaaagtgaacttgtattgtaattaccaacgccttttgctggcttaaacgagcgtttttaatttccccacaagcacacacactggcgaaacaattaggcacaaaacgagcattaaatatatggggctgcaaattggccacatgcgctggaggcgctggaagcgggctgctcctcctccttcttcgtagctcccgtatctcggcaggcgggtaaaattcatcaaaatgattgtttaatgagctgctcgcgatgccgggagcaagaattcatttgcgagctggatttatctttcgcacctaccgaagagcagacagaaaacaataacaagcgcagaaattaaacaatccccttaatatataaataaagcccggtgataaaagcgccaaaatactatataaacagaagatatacatatatccacatgcgtgcctcgtgaacttggcaacgcaatcgaatgtgttggggcaggacaagttgcctccgcgaatttaattgtcgagcatttcgtgtttgtttgcctctaaagtcgtatggtcaataacagataacgagcattggaagtatttaccaatgaatcagctcgaatacttttgctgaaattaaagctgcttagcattgcgggaaagcgaagatcctaaagtcctaagtattatgtgccatttaagccattctcctggcccataaagaagccacaaaagccatggcagtgattgcaagaaatacttgcggccctcgtgcgacccacaatacgcatacgccccgttgtacgggcaatcgcctttgtgccaccattaccaattaccaccaccagtggacataaaccaggccaaacaggtgagtcggtaagctggtgagctggtgagctggcgaactggtgagttggtgagtcgatgagtggggtctgtgggcatttcaatgtcttatcttatcagctatcggattctatcagtgtgccctgcttagcaatccgagcaaaaataaatacgtaagaagagaaaatagacgggtgctgcagttccgcccaaatgtccaagactctggagctatggatctttggagctctggactcggactacaataaattcagtgccccagcacccacttagtcaatttattgcaattatgtgtaaattgaggaacaaagcggagacagaagtgaagaaaggctacctccgattccccattccccccattcgattcccagcgctgtggctctcactcccatttcaatcatctgccagtcggtgtatattctttggcagatctgctcggcgtggaaagatggggagcagtggcgaggccgaggggcaactgagtacatttcagttttgaattgtattgcttttgcccattgaatgacttctcagctggagcttttaactttcacttattcaaaattgatagatttttttcgtctccggaaatattaaccaattcgctcgacttcatttgggaaaaaattgaatttttattcggatctacgatcaaatgaaatatttgacaaaggccaaatgccaaattaaagttaagcttcacaaagtcataaataacatgctgccacaagtgttatttgcatattgttatgtgcaacattttatattagacacacaaagttgttcaatgccaataaattggacaattgtcttgtggacacatgtgctgggtgtgcgaacaatgccatcgaattaacccatttatttaaaggctatccctgtggaatacacgtcctgtccaccgacaaggacactgcatagctcgatggggctgcataaaagagggacgaactcaactgagcaccgctaaaatatgcacatgattcacggacttgtttaggaccggcactgccttcatttaaattcattcggggcggagatggtgaactggtgtccagctgaaagctgaatgctgaatgctgaaagctggggaagaaagccgaagttacacacgtctccggcgccaaaggacctgctatgctgccctccacctccagcagcacatcctccttcgctccgatgtccaaagtccagtgtccactggccaatgtccagtgtggccgggcaaagacgtcagcagtggggcggatgccgcatcggtttcaatttaattaaatgttttgatgcatgacagcactgtggagcagcactggacatacggaacatacggcaccccactcacttattactgattcgcattcgtattcgcttaaagatacccatccgttcacgcctgcctgaatctttaaaggccgccttttggggccaactaatggcctcggatcccctcctgctcctccgcaagcaattcgcgctgaaaggatttcggtttgctcagctgaccgtcggcaaagcttttgtgcggatgcgttcatttggccgccaaacagccatttatccggatccaaagacccccgaccacatccgacagcccacatcccacatcgacatgcctaaaaccacaggactttgcctcctcactaatcatagttgacattaaatatttagaagcggagaaagttgtgccagccactgattgagttagatgatgtctggaatctcggaggagcaattaagtgtgctgtttggccagcggattcacttgaaagcgcttcacttcgaattcgaaggaaagctggaaatggacacttcgagtgaattaattttcttcaattaaagtggcaattatgtcgggagttcacaagcgaaataccttcgaggtaatgaatgccttgatttgattgatgatttatacttaaatttccgattgattgcagggtggagttcatttggccacaagtacttgattaaattcaattaattaactgctcaaacacttaatcaagttttaacatctaacgaagagatacactttcgtttgcctttggtttacatttttcttaaatatcaactgtgtatgaactctataaaatccagccaggaagtttgcatgcatttaaggcttctatttacgttccccttaaaattaaatggcttaaaaaaaaaaacaaccagcgctgaaacgccttcgaccccaaaataaatacatttgaaacactttgcttatttgcattataaacatcagagctgggcacatgtgaaaatacccaagggataagccaatgcgcacggttttattttattttactttattttatggcacaggatgtacggaattggtgcgttatttaaaaagattatttccattccgccgtgggcctaaaaaacgcaaatcgcaatcgaattaattgtcattccaggagatttgctcttccgaccagatttccgaaatctgagatcatcggagaaccttttcatcgggcaaagtcaattgggtgtgatggtttttggccatcggttaactatttctcagctcactggagtcgtggaactcgttgctcaaattgagtggaaaatcgggatgaatgggaatggcctacagtttgatctttcgaattgggttagtcacttgattaggctctcgatgtaattacatttcgagctaaagttaccagggcagccgaaagttgtccacaaatagcagttttctaattactttggcgactcgaatttccataaacttgtaaaccaatttcggtttggtttgtgcaataaactttgcaattcaagccaccacctcccgaaaacaatgtttttgtaatatggaaaaacaataatgagtggaaagagaatgaaaaaaaaaaaacaaaatactttgggcagtgggagaccgcttaccaggaactatgctgaaatccccacttcttcgctcggccaacgcggcgtatgagcaatgtcagccaattgcaggcagcgaataacaaagaaatcgtatttaaaaataaattccgctgctcgccttctgctgctctgtggtttcggtgtttatgtttattagttttaatcaaaacaccaatttgtatattcactttaacgactagtttatcgtttttgcgtgtttgctcgctacgaaattgaatttgattttcaatccactgggccgaattcaattacgtttacggatcgactgccggcggcatttcagccagctctaagctgattttccagcatttttccaacacttctccgccagcttcagctatcacctatcatcagcgaatttcaggaaccgagaacccggagaaccgacaagtccaaaaaatccggacccgtcgccttttcagttcgaaccgtacgcgcgcgagtctgccgttgaactgaacggaaagcggaaaactgaatgccagccggaattttctgaggctgtgcgcgctgatatgtcggtgttataataagggccacaaaaaagtgggcggtttttttttctgcggcggggggggttcccgtggacctcggggactccggccgcttgttgcatatgttgggatgttgcactggggactagggctcacgtaacccctttgcgttgagggccttttattttatcggagcaatgagcaacgtttccatttgaaaagcgttgaaatctgcgacggaatcgaacggaaacccgcccaaattcaccagtgttgccgagtgttttctttctacgcctgcgccctatcttttcctctcgctctgccttcgttcgctctctgttgtcatacggctattcgtaaacaatccggactccggcgattctgccacgtgcacgccacgcacaagcggaaaatcaaatgaccaagatgtcttacaaaatatacacacatatgcacaatgaatatatcgcttccaaaacagcactttcaaagcgtttaataccacattcaaaggaagatgtttatcaatacactcgaataatttgttttaggtttagaatgcatgtttacaaattcaataggggtatatcattgaaatagattacacatcttgattatcagtgcaaagtgatttgctatttttgctaaggtagccaagtcctaaggctaaaattcccatttcccattaaaattccactttcccaagtggaaaggctacgaaaaattttggattaatttatcaaaatatagaatgtaatacctcgttgagctcgtaattgcatgcctaatcgattggcattcaagttttgttgattttgaaaaataaatttttggccaattttagcaaattttaatgatggtaccccttatcaaatttgcgaaaattggtccaaaaattaatttttcgaaatcaattaaaaagtgatttggatcgattgcttagg

SEQ ID NO: 3224 - DNA, 2210 bp, DROSOPHILA
cgcgcgcgtacggttcgaactgaaaaggcgacgggtccggattttttggacttgtcggttctccgggttctcggttcctgaaattcgctgatgataggtgatagctgaagctggcggagaagtgttggaaaaatgctggaaaatcagcttagagctggctgaaatgccgccggcagtcgatccgtaaacgtaattgaattcggcccagtggattgaaaatcaaattcaatttcgtagcgagcaaacacgcaaaaacgataaactagtcgttaaagtgaatatacaaattggtgttttgattaaaactaataaacataaacaccgaaaccacagagcagcagaaggcgagcagcggaatttatttttaaatacgatttctttgttattcgctgcctgcaattggctgacattgctcatacgccgcgttggccgagcgaagaagtggggatttcagcatagttcctggtcgagcagttggcaaatggaaagcaaataaggcaaggcaaagggatacgcaacattaagtccggaatcgttcagtccggataaagacaaaggaaaacactccggggtgcggaaaacaacatcagcagcagcagcaccagcagcagccatggagaatcgcagtgacttcgaggcggatgactacggcgacatcagttggagcaattggagcaactggagcacccccgccggcgtccttttctcggccatgagcagcgtgctctcggccagcaaccatacgcctctgccggactttggccaggagctcgccctatccaccagctccttcaatcacagccagaccctatccaccgacctgcccgccgtcggggacgtggaagacgcggccgaggatgcggcggcgtccatggagacgggctcgtttgcatttgtggtcccgtggtggcgtcaggtgctctggagcatcctcttcggcggcatggtcattgtggcgacgggcggtaacctgattgttgtctggatcgtgatgacgaccaagcggatgcggacggtaaccaactatttcatagtgaatctctccatcgcggacgccatggtgtccagcctgaacgtcaccttcaactactactatatgctggatagcgactggcccttcggcgagttctactgcaagttgtcccagttcatcgcgatgctaagcatctgcgcctcagtgttcaccctaatggccatctccatcgacagatacgtggccatcatccggccactgcagccgcggatgagcaagcggtgcaacctggccatcgcggcggtcatctggctggcctccacgctcatctcctgccccatgatgatcatctaccgcacggaggaggtgcccgtccgcgggctcagcaaccgcacggtctgctacccggagtggcccgatgggcccaccaatcactccacgatggagtccctgtttagctacaacatcctcatcatcattctaacctacttcctgcccatcgtctccatgacggtcacctactcgcgcgtgggcatcgagctctggggatccaagaccatcggcgagtgcacgccccgccaggtggagaatgtgcggagtaagcgaagggtggtgaagatgatgattgtggtcgtcctgatattcgccatctgctggctgccgttccacagctacttcataatcacatcctgctacccggccatcacggaggcgcccttcatccaggaactttacctggccatctactggctggccatgagcaactccatgtacaatcccattatatactgctggatgaattcgcgctttcgctatggtttcaagatggtcttccgctggtgcctgtttgtgcgcgtgggcactgaaccctttagtcggcgggagaatctgacatcccggtactcctgctccggttccccggatcacaatcgcatcaagcgcaatgatacccagaaatcgatactttatacctgtcccagctcacccaagtcgcatcgaatttcgcacagcggaacaggtcgcagtgcgacgctgaggaacagtctgccggcggagtcattgtcgtccggtggatctggaggtggaggacacaggaaacggttgtcctaccagcaggaaatgcagcagcggtggtcaggacccaatagtgccaccgcagtgaccaattccagcagtacggccaacaccacccaactgctctcctgacaaccggccatccaggtggtgccgccggaga

SEQ ID NO: 3225 - protein, 521 aa, DROSOPHILA
MENRSDFEADDYGDISWSNWSNWSTPAGVLFSAMSSVLSASNHTPLPDFGQELALSTSSFNHSQTLSTDLPAVGDVEDAAEDAAASMETGSFAFVVPWWRQVLWSILFGGMVIVATGGNLIVVWIVMTTKRMRTVTNYFIVNLSIADAMVSSLNVTFNYYYMLDSDWPFGEFYCKLSQFIAMLSICASVFTLMAISIDRYVAIIRPLQPRMSKRCNLAIAAVIWLASTLISCPMMIIYRTEEVPVRGLSNRTVCYPEWPDGPTNHSTMESLFSYNILIIILTYFLPIVSMTVTYSRVGIELWGSKTIGECTPRQVENVRSKRRVVKMMIVVVLIFAICWLPFHSYFIITSCYPAITEAPFIQELYLAIYWLAMSNSMYNPIIYCWMNSRFRYGFKMVFRWCLFVRVGTEPFSRRENLTSRYSCSGSPDHNRIKRNDTQKSILYTCPSSPKSHRISHSGTGRSATLRNSLPAESLSSGGSGGGGHRKRLSYQQEMQQRWSGPNSATAVTNSSSTANTTQLLS

SEQ ID NO: 3226 - DNA, 3962 bp, DROSOPHILA
gtgtaaatatttttgacaacctctgtgtatatatacatatgtacatatttaatatgttacacattttttgaaaaataaataattggcgcaatacagggccactttggtttacatagcacaggcaaaacatgttgcttcggagattctaatacacgatataaacgtatgaaaacaagcatgaacgaatataaagtcccttcggctttccaagcctgctggatttatcttcatcggaggtttcatctgaggtgatatggacgaagatggaatgacgaggcatttttttccgatttacacgcagaagcagcacgagcgtcctttttatagcattttaatatgattgtacacagttcgatcgtcactatgcgattgtttaatcattatttaagcttttcaagacatgtgaccagattttagtcgcctttcaagctgagattccgaaaatcagatactttatactatggcgccattcgcgcagcctcacactgattgaaaacaagtaagctgatagctggatacgctgcaaggcaaagtataaaaaacataaagtaaacaaatgtaaacaattcatataagccaagttcaatgagccaaatccaagtaaacaaatgaatttagcggcagaaccggttgttcttgcttatataatacaatatattgctttcgtttcgattctggctgctatcaaaaaagcccaaaactcgtgtcacaaaagtcaagaagcgaccgagcagataatacagctcgggaattaaacaaatgcgtattttttttgtttgaaatcaataaatccaagttggcacgacaataatcaaaatgtataatgaacgcgaataacctttattgtatttcaaacagaaagtacaaatttattttaatgcttttaggaatctatatgtgcaaaaaaaaaatgcactatgtttgctctacactttcaagtttatagaattcaaaaaataaatgcacttttgtactccccatctatattgtatgtatattgtgtcgcttttctcactgtgtgtccgttggctttcggttaattggcacttggatgttggaagttgcccggctggtttctgctttccgatctgggatcgccacttgtcgagctgaccccactgcagtccgccgctggcgctgatcaagaacggaggatgagcattcggtctacccattgcatacccactcgtgtgtatctgcaccttctgctggtgtcgctaccacttttggcaggtgagtacaggaatatctgatcgatcaaggggttttcccagctcagtcgcgtcgagtgactggctgactcacatgtatttcacatccattcaaatggtacttttttcgtcgaagttcacgccacgcccgccataagtccgcaatcgttgcgcggcatcatcttccccgtcgaaaccttcgatgagtgccaactggaggacgtggcgcggacgaagggcacctgccggcgcatggaggactgtcccagtgccctgaacggctggctagagcggcgcgaatcgcccaagacctgctactttgtgaggttcgaccactatgtgtgctgcgccccagctgtagctccaattgtcacccgatccagccagcagggtaagctgacccacctcaacatatccataaataacagacatattgtattattgcaagtatatgtatcatttggccctagtttcgagccttataatgtgttgtcatccatgactaaccacagggtatcccctgacgtttccatttcccccagcctgcaatgaactgaacaaggtgtcaaaggtcaaagagatcgacgagttcttcgtgtcggtggtgggcggcatgcccacccgtccgcgggagttccccttcatggccgcattgggctggcgttcgaacttcgatcagaggatatactatcgatgcggcggcgcccttatcgccaacaactttgtcctgaccgcagcccactgtgccgatttgggcgggtaagttggaacgctaatctgcatgattggcggtttttccctggcaatggaaatatcccctgatattcgtatgtacatagattgttgagctctcaatcctaatgtcgcttcttctcttccagtgagccacccagtcaggtgcgcctcggtggcgacaatctaaccctgaccgagggcgaggatataagcattcggcgcgtgatcatccatccggattacagtgccagcacggcatacaacgatattgcgctgcttgagctggagacggcggccaagccggaactgaagcccacttgcatttggacgcagaaggaggtgaccaacacgctggtcacggccattggttatgggcagaccagcttcgccggtctatcctccgctcagctgctaaaggtgccgctgaaaagcgtgagcaacgaggagtgccagcaccactaccaaaaggatcagctggctcagggcgtgctgggcacgcagatgtgcgccggcgatataaccggcgagcgggacacctgccagggcgattccggcggaccgctgctcatgcaggacggcctgcttggctatgtggtgggcatcacatcgctgggacagggatgcgccagtggaccgccatcggtgtacaccagggtgtccagcttcgtcgactggatcgagggcattgtgtggccggcgcagcaggtgacgaacgcaccgcaacccaaccagatgaccagtttcagtcccgaattcgatctgcgggcgacgatctgagttttgctttcgaaagctccatatatatacaggaatagatttacaaaatgatccagcaagaaattatttgaatatttacatacactattaggtaaatcaacaaatttcaagaaatatttatttttgagctcgtttagtgtttaaaactttatttaaacttaaccgtaagcaaaagccaactgcataatagcgcatatcgaataaacttgctaacaaaatcaacaattgagattttaaataaacaaaaccatatttataacttttcactcatgtccgtttgttggattgagtttcttgtttggaatcatgttgctatttcagccgatacccattggataaacagctgcgcagcatggatatataagtggccagaaccgcaggagacggatacttgagcacgaaccgctgaccactgatgtaccgcaccgagactctgctgctaatcctgacgagcgtcgggataccgtcactggcctatctgcccgatgtgaacatattcaccaactaccgcaccgaggtctataatggtatgtataataggaattgtttgtaaagtgtggcggactaataaagaaatcccacaatatcgctaggcattccatcggagattgataccacaccgttcgtgcggatcggggacaactattactacatcgagcccatgaataaggtgaattggtttcaggcggccggcgcctgtcgcatgatgaacgcccacttggcctccatcgaggataagccggaaatggaggcgctgatcaaatacatgaaggccaaggggttcaagaacaatgattacttttggatatcgggcaatgacctgggcaccgagggcgccttctattggatgtccaacggccgcccgatgacctacgccccttggaacgggcccaagcaaatgccggataactacggcggcaacgagaactgcgtccacatgttcgccacccgggagatgatcaacgatgccaactgcaagatccagatgctgtacgtctgcgaggcgacggaaccgaaaaccttcaagttcacctacattaagtggtagttttcgattggttctaaaataaaaccagcattacatacatatattaaaataagttcaattgaagttggggcaaaaccgagttgttttacgaatattacgaatattggtacatattaaaaacaaaagttgtagtttttgccggcttttatttgtcgcatcgttttgcttatcgcatccgttattctcttttc

SEQ ID NO: 3227 - DNA, 1575 bp, DROSOPHILA
tgtcgcttttctcactgtgtgtccgttggctttcggttaattggcacttggatgttggaagttgcccggctggtttctgctttccgatctgggatcgccacttgtcgagctgaccccactgcagtccgccgctggcgctgatcaagaacggaggatgagcattcggtctacccattgcatacccactcgtgtgtatctgcaccttctgctggtgtcgctaccacttttggcagttcacgccacgcccgccataagtccgcaatcgttgcgcggcatcatcttccccgtcgaaaccttcgatgagtgccaactggaggacgtggcgcggacgaagggcacctgccggcgcatggaggactgtcccagtgccctgaacggctggctagagcggcgcgaatcgcccaagacctgctactttgtgaggttcgaccactatgtgtgctgcgccccagctgtagctccaattgtcacccgatccagccagcaggcctgcaatgaactgaacaaggtgtcaaaggtcaaagagatcgacgagttcttcgtgtcggtggtgggcggcatgcccacccgtccgcgggagttccccttcatggccgcattgggctggcgttcgaacttcgatcagaggatatactatcgatgcggcggcgcccttatcgccaacaactttgtcctgaccgcagcccactgtgccgatttgggcggtgagccacccagtcaggtgcgcctcggtggcgacaatctaaccctgaccgagggcgaggatataagcattcggcgcgtgatcatccatccggattacagtgccagcacggcatacaacgatattgcgctgcttgagctggagacggcggccaagccggaactgaagcccacttgcatttggacgcagaaggaggtgaccaacacgctggtcacggccattggttatgggcagaccagcttcgccggtctatcctccgctcagctgctaaaggtgccgctgaaaagcgtgagcaacgaggagtgccagcaccactaccaaaaggatcagctggctcagggcgtgctgggcacgcagatgtgcgccggcgatataaccggcgagcgggacacctgccagggcgattccggcggaccgctgctcatgcaggacggcctgcttggctatgtggtgggcatcacatcgctgggacagggatgcgccagtggaccgccatcggtgtacaccagggtgtccagcttcgtcgactggatcgagggcattgtgtggccggcgcagcaggtgacgaacgcaccgcaacccaaccagatgaccagtttcagtcccgaattcgatctgcgggcgacgatctgagttttgctttcgaaagctccatatatatacaggaatagatttacaaaatgatccagcaagaaattatttgaatatttacatacactattaggtaaatcaacaaatttcaagaaatatttatttttgagctcgtttagtgtttaaaactttatttaaacttaaccgtaagcaaaagccaactgcataatagcgcatatcgaataaacttgctaacaaaatcaacaattgagattttaaat

SEQ ID NO: 3228 - protein, 393 aa, DROSOPHILA; identical to SEQ ID NO: 3198

SEQ ID NO: 3229 - DNA, 3257 bp, DROSOPHILA
aagagcagcccactaaatagcattcatttcagagcggaagctggcccgggtgcagaagggcaacaagttgttggacaacctgcgagacaagcggcaggattgcatgcggggattgctgtcttcggagggagtgcccatttccattttcgagcagttccttgagctagacgcgcccatcgaaagcggtcgcctccatcggcacctgctgcccgttcaggccgtaaacgtgggcgaaactttccacatagtggagcacgacgctctgcagcagtcggcagaagaagctcaggaggaggagtaggaggataagccctcggttgagcattaacaaaatcacaatggaatccacgttcggtaaagtcttcatgtttctcacggacctcgcttggaaaagtcgtctcaccatccctgtcatagtcacaactgcatttctcgtcatggacatccgcctgcagatcgagatcaacattcagtccgggcaatttgtgagtgatgcagttgtcttgcaaatctaattcgttgatactcgtattttaaaacctgtttacttgattgttatgttttttttacggttattgttgcttgttattaaaatgcatatgtggcattataaattggtattttttttgtttagaatgccagcgatgtggacgacgttcaggatggcctcgacgatcagtttaggatgcacgatcactggtcggacgacgaaagcggcagtgacatctatacagatgaggagtacacaaacgacgatggcaacagcgaagcgtcccactacagcgtggacatctacgatccctgggggtcagaagacgaggtagacgcgagctattcgcgaaggatgcggttctaagacacaatataaattctacataggtgtaagcgagagtaactagctttatagcttatgtacattcagtaatgtcgagcccctatttattcatctcaaacagtcatattaaacaaaggtatttaagtgcaatatctttattcgcccttacatgtagagtttgatcaactcgtcgcttacggccgagggtgttagtcttccgaggtcggtgaagagcagggtgatgtagacgggtggcgtatagtcgaccagcgggtgcactttgcttacatcgtttaggtgtttgcgggagtactataaataaacccactcttaatcgccgttcctgctttaatgacgcagtaagaacctaccttgtactcgtttggcagatcgcgctgattgagtggatacagacggctgaacttgaagctttcggccagaacgtagaaaggtttcttcatctcacgggcgcacagacccatggtgtaggtgccaatgcggttgataatgccaccactctccaccacggcttcagcccccacaagcacaaagtccaccgattccataacatagccggtggctgagtccagaatgagcgtgcaatcgatgccggccgcatgcagatccttaaccatctcttcgctaagaacggacaatgcttacacctgaattctatcggaaacacaccctagcttacccagagtttcccgtgccgccctgcgtcacataaacgtggaaggactttttgttctgcgaggctgtaatcagcgccttgaggaccacccgggatcgggagtgcgtcaatatacggcagccatcggtaatgaacctttgggcctgctgggcaatcacctggattgggtggtacaatgaggggttagttcatgcgctagcactagcttttcgtatgagagccaacctgccgggaattgagcaacttggtgaggaagatttttccgcgattcaacataatctgccggcactcctccatgtgcttgtcgtccagactgagggtgatgaacctgcaaaagagctctccggcagaaacaatggctgctatagacaaatccgtattccgcatggcagccaccgcttccctcatggttgtgtgtagaatatgaatggttccaactgaggaatatgttgtagatgatttaaaatggttcagtaaagaggtttattagcccactaacattgtttcttttccaggatcattagcagagtcctgatagccgcaatgccggaggacagatccttgtcctcgtccaggagctgcaggaagtatttgaccacatctaagggtgaaagcttgtattatcacttctgcgtaactttagacccattcttagctcaccaaaatcctggccattttccgtaatttgcggcatttttatgaaattgtgaaagcctaccgctgcacgttaaacgtcaacaaaataatcagctgttcgaaggcttatttacacttcgcaattcacaggttaatttatcgattgccaattcgcaccttccgataacgataacgattggcagattgccggggctgaaacgtaaacaatccaaaattctatggctatgtttgttttgttaaacatattcggcccagaattgtagcaaaattcacagcatgtaaattcaagttaaccgccggcaacgcattaaatgaagagtgtcatataagtgagcagtcaacagcgctgggatcgaggcctgagcctccggcgtcgccacaccatgttcaaactggagtcctacatcactccgattctgctgagctacgtggccaagtacgtgaagaacttccgcgacgaggatgcccaagtgtcgctgtgggaaggcgaggtcaccttccagaatctggacctgcgcctggaggtgctcgaggaagagctgaacctcccagtagaactagtttccggccacattcatgaactcagcatcctggtgccgtggaccaagcttatgtccgagcccgtgaagatcgtcatcaataccatagaattcgtggccaagttgccggatagtgagagcaagcagcgcagggcctccttccagcgggagcagcgaaggaaatcgaagcgggagtccgtggagcagccggatcagacgaagagtcctggaccggcaagctcttccagcgtggtcaacaaaatcatcaacaacatcaacctgcagtgccacaacatcatcctgaagtatgtggaggacgacatcgtggtctctatgaatgtgcagacccttaactttagctccgccggcgaggactggaagcccactatggtggacatacacccggtgtccgtcgtcatgcgcaagttgctccaggtctcagatttgaccatctgcttggacaagcgcaacacagctggtaggatagaggtgtgccaggagccggttctctaccgatgtactctggagtgcc

SEQ ID NO: 3230 - DNA, 955 bp, DROSOPHILA
acgtgcagcggtaggctttcacaatttcataaaaatgccgcaaattacggaaaatggccaggattttgatgtggtcaaatacttcctgcagctcctggacgaggacaaggatctgtcctccggcattgcggctatcaggactctgctaatgatcctggaaaagaaacaatttggaaccattcatattctacacacaaccatgagggaagcggtggctgccatgcggaatacggatttgtctatagcagccattgtttctgccggagagctcttttgcaggttcatcaccctcagtctggacgacaagcacatggaggagtgccggcagattatgttgaatcgcggaaaaatcttcctcaccaagttgctcaattcccggcaggtgattgcccagcaggcccaaaggttcattaccgatggctgccgtatattgacgcactcccgatcccgggtggtcctcaaggcgctgattacagcctcgcagaacaaaaagtccttccacgtttatgtgacgcagggcggcacgggaaactctggcgaagagatggttaaggatctgcatgcggccggcatcgattgcacgctcattctggactcagccaccggctatgttatggaatcggtggactttgtgcttgtgggggctgaagccgtggtggagagtggtggcattatcaaccgcattggcacctacaccatgggtctgtgcgcccgtgagatgaagaaacctttctacgttctggccgaaagcttcaagttcagccgtctgtatccactcaatcagcgcgatctgccaaacgagtacaagtactcccgcaaacacctaaacgatgtaagcaaagtgcacccgctggtcgactatacgccacccgtctacatcaccctgctcttcaccgacctcggaagactaacaccctcggccgtaagcgacgagttgatcaaactctacatgtaa

SEQ ID NO: 3231 - protein, 306 aa, DROSOPHILA
MPQITENGQDFDVVKYFLQLLDEDKDLSSGIAAIRTLLMILEKKQFGTIHILHTTMREAVAAMRNTDLSIAAIVSAGELFCRFITLSLDDKHMEECRQIMLNRGKIFLTKLLNSRQVIAQQAQRFITDGCRILTHSRSRVVLKALITASQNKKSFHVYVTQGGTGNSGEEMVKDLHAAGIDCTLILDSATGYVMESVDFVLVGAEAVVESGGIINRIGTYTMGLCAREMKKPFYVLAESFKFSRLYPLNQRDLPNEYKYSRKHLNDVSKVHPLVDYTPPVYITLLFTDLGRLTPSAVSDELIKLYM

SEQ ID NO: 3232 - DNA, 17464 bp, DROSOPHILA
aatggtgcaagaacctcttgagaaataactagcaagtttgagggtcgcattagctagccctacagtgaagaaatccaatacatatacaatgattcattgtgaaaaacggaaatctgacaatctcaaaaaataaaataatattacttctatccctttggcgacgtttcttaataaaaatcccaccaagctcaccattcgttaggtggtacgaattcaaaaatatttataatgagttttccataaacaattgtttattgaatagtgtttactctgtacctctctgcacttgccactttgtttgggcatacatatatgcacatgttttgcagaacgtagatttcaacaggaattgaaaataaacatattcaatcgatagcacaactgggtaacttttgttgcctatggctcattgtgtaaatatgttcaggcggtttgcccttaaatacccaatttgtgaatgcgggaaaattcaattgctttaatttgttgtttttaagaacataaaaatgggttcatatgtatctgacagataagaatgaacttgaacttcatgaatgagtttgtaggagaatagaatttttgaatttcatttaagatattgtctgaatggttggataaattgagtaatttttgtagcagaacttttctgctttgttcttaggaaatagtgtttagttgagcaactgaagacgaataagaaagaacgcgaactcacaagttaaaagaataaaatataaaggcacgtgcattaaatcaacgcgtttaattgaattccttttgattttggttgccaactggctttccattcaagcagactttcgcctatcaaacagtttaacttcattctgatatctaaattcaccgagaaagtgtagcaaagacgatgacattcaattgaaaacgatcgatcgattagaattccaatttgcatagcagttactgtcggcttgttcgcttgtttcaagtgacacctttgtcgacttttcccggcaaagactcgagtggctatcagacagaagcaatcgagaaccgcttaatgagaaagccaaagaaacttgttgaactacaagaaaaagaagcacaagaaggcagaagaacccggagggggaggcaaaaaacattttccagataagcggcagtcggagtcgtgtgaataaaagcgtgtgtatttgttttgtgggtcagcctgttccagctaattaccgtgaacttgtcagcgcacacaaaacggctgtaaaatgaccaaagtgaggtaataaacacggcgaattaacgagaaacccgagtgaataatgtccaaactggtgaagagaatccgcagcatgatcaatccaagcagccagcgggatcgcgaagataccacctcggtatccgcttcagagggcttcattgctcgcaggaagtgccactcgctgccccgaaggagcaatagacactcgaccgcccggcgatcaaacagtggtctgtggaatcgactggtcaccaatgtcttcggaccggaagattcatatgactttgacaacgaaggcgacagtggtggtgccgtattttacaccgattcggtgaacggttcaaactatgagatatctgcagaagtgagttagtcgaacaaaactggataacattttataagattttaagacgatgtcggctggaggttacaactttttttttttttactatagaaccattatattttcatatttcggatacagttctctaagtatgttcatctccttgggttttaaattctttgtgccaatcatgcacttcaaatactgcatagtatttcactatgaactttgtttgattcaactgcagtttttggcttttaattaaattgactgcagtctataaagatgtcacacttctccaagaggtgccgcagtatacgttttttattgtttgtgtttcaaaaacttgaatcgaatttaattacgaatatgtgtataacctttttcttattcccattttttctcacccacagggcgaatacatcaagcatcccgttctgtacgagctcagtcacaaatatggtttcacagagaatctgccggagagctgtatgtccatacggctggaggagatcaaggaggccattcggcgagagatccgcaaggagctgaagatcaaagagggcgccgagaagctccgcgaggtggctaaagatcgacgatccctcagcgatgtggccgttcttgtcaagaagagcaaaagtaaacttgccgagctgaagtccgagttgcaggagctcgagagtcaaatcctcctgacatcggccaacaccgccgtcaatagtaatggacaaggtgagcatccatcaattcccatagagattgggtaactttttctaccgtcgtctcgcttttcgtttcgaaaacccactaaaagccagacataaactgttgcaattatacgagagcaaaagtttcatgcaacaagttttgtgggcaagtgtaacgagtcaagtgtattcccaataaaaacgagggcgtggccaaggggcggggtcactaacgaagctataaccaaaacaagcttcaagaaaaagtttggacactgcaatgaagttgaaagatgttcctttttgtgtagaagataaagataaggttgttggttaattcaatttcaacctggttgtaaagtgtaattcaatcaaccaaaatgtttggtatatcctgggctagttcggatttctaggtcacgtggtttccgggcaagcaatttaaataaaggaatgagtaaattctgtataaaactgtttattataaacaaagattttgtaaagatgtgtattcaaaactttgtattacttgtttccaatggactaaaagtatgaagtagtttcctaaaattaagtgatatttagagcagggacagtttaaaattgctttataataaagctgtaatttagtagctaaaagctataattaataatagtttcaattatgaaaccattgaaattttttttgaccaaaataaaaagccgaacaaaaatgaaagtacttacttccgaaagagagtgacatcaaaacctcacgaatgctgcaattgttcggggctttgggaatggttaagtccgtcttttacgagtctttgtcacgcattttcttttacctttaccacatttttttttggcccatcacctaatgcttcatggtggtgacaagtgaacattgtgctgggtgttaatgatctgattatcgctttatatatgccctcgtatctttaacaaaacactttgtgatagtctcggcgacggacgaaatgttttcttcgttttcttcggtttttgtgagccaacctattgacacaactgccgtaagtgtgatacgtttggtttgtttacatttccgaatggagacagcgttctggcattctatatatctgcttccgtgtttggccaatcccccaacagaagcatttgccccacaagaacccctccaatgtggcattgtgtggcgccagagtcgacttttcatatgtcagacgattgacatgtttggcagctgtcgaagaatgctgcacaaatgccgattctctttgaataaatagctggcgcatatagaaccaaacacacacatttttagtttgtgccaaacaaatggcctttcaaaaataaacaatgggagaaaaagggcataaacaagttttggacatttttgctgagaaaatttggaacaccactgctgattgattgattttttggttaccgtttatttattattaaaataataatacaacagctgtttctaacttgacaagcgaaattctttctttacggtgggtttaaaagtccttatcctaaactggtattgatagaatacttattgtgctgtactctgtgtatctaaatctatgaaaggtttctatcattcaatacttcttacgaaattcagaataaaatagaatctaatctttccgatatctttcagaatcgatcactgcctgcattgatcccaatggcggcttcttggtcagcggtgcagttggtggcttgggcggcggaaacacggctctggagggcggcgcaccggccactgccaatgacaaagtgctcgcctcgctggagaagcagctgcagatcgagatgaaggtgaagaccggggcggaaaacatgatccagtcgctgggcatcggatgcgacaagaagctgctggcggaagcccaccagatgctggccgactcgaaggccaagattgagtttttgcgcctgcgcatcatcaaggtgaaacagaaccgcgagcaggccgatcgcctcaaggcctcgcgccagatgatcgacgagcatggccagacgatcggcgggaacaacagcagccagccgcagagcctggagacgacgctggaggagcgaatcgaggagctccgccatcgactgcgaatcgaggcagccgtcgtcgatggagccaagaatgttatacgcacgctgcagacggcgaatagggcaccggacaagaaggctttgcaggaggtgagttctatcttttaaatctgggttgattatctgtagatatttatatagaagtttcggggaatcaagggtcatgtggtaaaagcataaatctacaagaaatttacaaacaataatctagaagcctagaatctaaactttagataactatataattttggatggcagttgctatggtagcttctattatggaagttctactgttcttggtaattcaaaaagaatcggtatttatgctaatactagagttaattagagctggctggcagccaggtagacacataaaccctgcgagtattcccccgctaagctgaaatcaggtgtgcctgctgccatatggccacacgacgtatgaatcatatttgaattatacgtgcgtatacgtgattttttcccaacttgtggcaacgtcgtgtgaaacgaaacgggaagcggtaaggaggcaataagctaattatgcggctgctttaaatatttttcagttcgtccgctttcgttataatttcaagttttatttttttagttgtttttgtcgctaactgtcgtctcattaattaaacggacgtggaacgtcgccattactagagtcgaagaaaaatgatttggcaagtgtgctcagggcctgccctaataattttggcattagctttttagttcatttcaaattttttagttaatggcattgctgacagaaagatggtcccaaaataaacgcaagacgagtatttttttcaaatttcacaatgcatttaacactgaacgtacatgtgcagggacatagataaactttttcttatttcccaatgtctgcgtttcctgtcgcgtggcaagctcgcttttttcctcgccatgatttatcttttcaccgatgctcgtgcggttttgtctttggattcaacatagacgcatacgtacagacacttagtttccgctgaagctactacaacaacatgttgtccggcctgctgtggcctaaatattctatttgcaggccccattttcataattatttgttctgcgatgcggttgcatctgttagatgcagaaataaaaaagtcgagagcagcagtgcgtttcatatcaatgggaacaagttttccttaacaagacctagtgatggagttctgtattttgggattttcggttagcaagaactttctatagtactgctttttgtacttttcttgctgtgcatccgaatatcgcagaagttattatacgatctgctaaacaataaacacaaaacttctgccgctgcccttttggccatttgggagcgttttgctaaacatttttagaactatgccgtacgctgccgtacataagcattggatatataaacccgtctatatgtctgtgcctctgcttaatcggccaaaaacgagaaacgtataaaaccgtcataagaaacggagcgcaaagttctctggccagcatatgggaaaatgtgttgttcaatgtgcgtgtgcatgtgcgtttctctagcgaattttctcaagcagcttttccttggcgttcagtttgagttggatcgccgttggctacgtgcgacgccgcctggtcttttccgatattttataattagtttttaattgccgcgtcttaacttacgttgcgtttgtgttcctttgtctctagtgttaaataaaaaaaatccactgaatgtggaatgaaataataataacaataataataatgaaataatcgaagtaagctcgcgaaaggcacgcacacatgctatataagtggaattcactggctgagcttgttattacctatttgacattacgcatacgcagcgtgtgctgcaagttctatgcggttatccacccgaaattgcgtaattctcagctctgcactcagtttctctgaattctttttggggtcatcttgcaattttggcgtaacgaaaaataaatcttgttataaataaaatcacataaatttagaaacacaaattttacaaaagctaagaaaaaccgaaagtgttttcgttccgccccatccatttgctaacccccgcgactatagtgtgtgtgcgtttttgtcgaatgaagctaaaaatagtgaaaacaaaaaagccaaattaatatagttcaaactgcctgtaacgaattttacggtttattaaaacaaaaaataaactatttaactaaaaagtggtgtacaaaatacaggacgataagcaaaagtaattggatttgaaaaaaaaaccgagaaattcagatcattataaacactaaaagaattgcttgaatttgcctaaattgtatacaattcaaaggaaaagttttaaaaattataaacaatgtatggggatgttaccacaaattgttgatataaaattacctttaaacagttggaattcaacatttaagccgttaatatatagaatttattcaatgtttggtcgacaataagaactatcaaagcggcttctcgatatttttagcaggaatataaatttcgtgtgtgacgtatatatatatataaaaatatatatgtagtatatagtgcgtgagtgtatttatgtgaatatatcgatggcaccataaccacagccaaaatgtgtttatgccacgaccgcaaaacaagtgtttagggagtcatgagcacgcccacgcccacttcgggggcggttcagggccaggaggttccactgccccatgaactgaccgccgagtggaccgtgcgagcacatctaacttttgcccgagctggcgaaacggtgcaaaaggagttcagtgctccggagactgtgcatccgatgcgcgtggtctacaagtggtgtacgccctgcgaggaaccagaaacagaacaggatgtcgacaaggcaagttgtgacgggaaaatcttccaacctttatttatatccttaaaatcctctacagacagcggctactgcgggaaccagcttccgttccacaaactcctcggccaccaccaatgcggactcggcatttggcagcccacatgcttcgagggctcttaacaaaccacctgagcccactgattgtgctgctcctctgggagccactgcccaagtgtgtggaacccgctgccggagcacctgcaacattatggtgtccgcggtggcagatttcttgcctcaagaggcgggaaccgggtcagtgaatgagccctttgtttatcacagcaaagtgcgagcacagcagctaaaggatgccttctcccagacaagcgacacggaggagcagccagccaggagacgtccagcttacgagcaacgaagggccaccaccgaagcactgatgaattttgccagcaagcgacaagcggaggaggctaacacctatgcggtgcggtttcaaattcataattgatttttaactttctaactaattgcaattttcagccaacctattcgcccacgcccacaacaccttcgtctacatttaagtcggcatcgatgtcgagaattccaccgctagctggcaatataagccaaggaacagctcctaaaatacccaatttgggcgagaagaaacaccgcactgttcacatcgatgtctactgcactggttcagagggtgatgaggaggaggaagccgatgatgagaggcatgcagatgaggagccctctagctcctccgactccgagctggctggtagcaagcgatacgaactggactcgaattccacccctcaaaccgtgctggacaatgagcagatgctattgcgccatcaaagaatctctgggggagctatgcccaggcgtttggctcagaatcatgggaaaaacaaagtggggaaccagcagcagcaaggcaatctaaatttggggcatgccattacaaagtgcagcacagccgaggaagtgtgcgagtccaagcaattgcttttccgcaaacacattggtgatcagcgggcggccaagttggccaatctacgtcagaaatacatgcgccagcccagcgatgagaccatcagcagcacatacccgaactcctcgaggtcaacgatgccaagggatgccacctgcagcagcatttccagtgccgtgggaggaacagattgtgtggattcatcgtggaaggatacagacgatctagatacaccaatagcatcttttggcttaaccaaatccgatagctttgactatgaaaactcgcttgatcgcctgcggataagccagatggagcgcctatggtcccgtcagcactcattggaccagggtcacgcacaaacccatctggggggagcaccatcccctcatgctctgcagacaatcacggaggtgcagtcgcaacgaagttccttccagcgaaacgataccataccctcggagtcggatggcttctccgataccaatggattcaatacctatccgggaaggcagtcgcaattgcagcagatctcgcactttcctcgtaaccggcctggttttctgcagttctttggaccctccggtggtcccggcgtggtagcacaacccactccgccagccactgcacctgttcaacccgctgggtccgctactacggatccgtttcgtatgctccacccgagttttcgatggaagagcgaagcccgcgataatctgagcgtccaggttgcttccggatcaccctcttccgagcgcagttcgccacaactcttgtctgctgcgaccaccgtggtgcgttgtggcagtgaggcgccgccaagcaccacctctgctagtacttttggaactacagtgacgccttcgccaattgcagtgcgacgttttgaaatctcacgcgacagtccaagtcttgcaagtgaagcatccacttccgtttccgggtacacccacgagcatttggagaaggcgcgtcgcttcggcaacgttgtggccatgagaaaacccggccatcatgtgggacccaccaagaatccgaattgtcaatgcgaaagctgtcagcgttggctggccgagaggtttcagctgcgcggaagagccttctcactaggcgagaagcccttattaagacgtccacagctataaaatcataccgggcttacttttctttgtcttaggcttgcatttaacacactgcttttcagattgatacgctccctattaacccaacacccaaaaccgaacctaaatccaactttatttccgattagttgtaagccatgtaagcgaatgttcctcacgcaaaacacaatttgtgcgctgaatcaatttaatgttgtaataaaataaagcaatagttttaactagaaatgtatttatttatttcggcgaatgaagaaagaacttattttaaattatgtatgttttatagggtaaaaaattatttggtattgtgccagatgaaatgaaattattattaattcgttatattttgaaacaggcccatggacgtttgtcggaatcgtcgcgaaaactagatctcttgcgctactccttggatttacgacgccaggagctgcccgccgattcgcccgccgcccagcaattaaaaacggagctgcagatcgtccagctatcgacctccccagctccggtcacctacacgtcactgcagtccggacaagcgggcatactcggcggaaagccgtaccagtcggtatcctcgcttggacgctgtgccagtgtcaccggaaaactggaggttcgcttgctgggctgtcaagatttgctggaagatgtgcccggtagatcgaggagggacaaggacaacaactcaagtccgggtgatttacgaagcttcgtcaagggcgtcacgtcgcgcagcagttcaaagagctattcggtaaaggatgagacgtccattgagatcatggcggtcatcaagctggacaatatcaccgttggccagacatcgtggaagcaatgctcgcagcaggcctgggatcagcgcttctccatcgatctagaccggtcgcgcgaactggagattggagtttactggcgcgactggcgatccctgtgcgccgtaaaggtgctgcgccttgaagagttcatcgacgatgtacgacatggcatggcattgcagctggagccacaaggtctgctatttgcggaggtcaagttcttgaaccccatgatttcacagaagccaaagctgaggcgccagcgtatgatcttcaacaggcagcaagcgaagaacatctcgcgggccaagcagatgaacattaatgtggccacatggggccgcctgcttaagcggaatgctcctaaccatgtgcacatgggatcggcaggatcaggatcttctctaaccggtagctcgcctatggtggttggtgggtctcgcgactctgagtctccgatttcgaggactccctcatccgacgcactggtggaaccggagccctacacgcccggagagcaggcacagaacttggaattcgatcccgatgcaggaattaatgaacacgtggagacgccaggtgaatacccggatccggcggccagtggtctgagcggaatgcgacccctgtccatgcacatgcagggaattagtgtgctgcccccggaatcgccacccgtggccaccggagcagctggtcggcccaatacgctcagcttacagatgccgggtgccagtaaaggacaggtgatccaaggcggacggactgcggcgcctacaacggcgccaccgccaccacctgtgctcaaggcgacatccaccactccgatattggatcaggaggtaagtttgctaatttattttacaatgcgatccgtgtacagttcagtatttgaccgaccctgtataaagatctgcgtatgtactacttagctgtgtacccgtagctggtttgatcgttgtgcctgccactgctcctccgcccactctctcatgtacttattcaccacccacccacttatgcacacacaagcactcaatctgtacagtcatcacattatgaaattttggtgttggttttgcattaagtatctctctaatctgtacatttggaacggtagccgcacttcatacagaatcatgaatgttcgcataattggcagaaagttttacgaacttgagtttgaaatacgagatagttaaaaagtaaatctaatgaaatatgaaatattaagaaaaaatttcgaataactttaaatcagataaattatttgacttatcttcttaaattttcgaaatctatgaaaagtgaacttattttatttcaaaattcaaagtagtttatgccttctctgcctttgagttttcacataattcatcgtcattatcgttcactctttctctttatcctccactcgctttcttcaagaaaagtctttcccttccttgctttgataatcctatcgccttctttattcatctgcccatattcttctttttgtggcccatcgtcatcatgttctctatctatatctctctctctctgtatctgtgtgtttgtgtgcccgtctcggtttccgttttccgttccgtatcgtcatgatttcgttaatcgccgacagctgcaggatgccctgcacgaattcgatttcctgtcggacctggactcacgtcccaccacgctgcgtcgcctgctgaaggagcagaagatggcgctggatgccggcgcgctggagaatctgctgctgcagcagcaacagactgagcagcaggcactgcagcagcgccagcgccaggagcagctgcgtctgcagcagtttcaggaggcgcagcgccaggcgatcctggacctgtgcgtgaaacagagagagcccgcggagcagacatcacccacccttgccaaccaaacgccgacgttcccaccgcttgccagcaatcagatcatgccaagcttaaatgcccgcccttgccaaagccaaagcccaaaccacaacgaatttcagttgcagccgcagccaccacatcccgcccagaaaccgacgaatcccgaaccaccgtccgctgtggaacagcagctgcaccgtccggtcctaatcctgccgcccgtggtgctcctgggtggtcgggaggaggaccgttcggtgccaccatcgccactagtcgagtatcccgaggacgacgacgagtatctgtatcgtggtagcaacgaaaacctgggcaccaggctgcactccagccacagttccagtgccggcgatcgtttctgtgtggaggttaggaggtttttcatttcctggtttggtttccggtttaatttctgtttctccaatttctgatttattttctttttatgttttaatttcactaaccttattttccttttgatttcttacatgtttgttttgtttttattacgcgttgggttttacctgtttcttctttaaatgtgtgtatgtttttggtttggctctggccaaaaaaaaaagaaaaacatttgaagccccaaaaattgtgtataaacatttgactcataaacacacacattcgcactgtaatcaatgagcgttcacaagcatcccaaaaaactaacctagtcgtagtggaactaactaaaagtttagctatgaatgtgactaaccatttaattaacagtgtttaatagtttgatgtagttaaacatagttcctattgaaaggaagagctttaaaatggcaatcttaatggcacagatgtaagctgcacagcttaatttaacgtaaatatagcgtttttaaatgtttaaataacatattttccaataataagcaacttgagagcataagaatttgttttagacttacaatttcccacttatttgaaaaggaaccaatatgatcgacgcgaaataaaagctagaagtgacaattttaaactctttaaatagacgcgcttctggcgaatgacagcgaaaagatcagaggaaagtaaaggggatatgtcttgggagaattgggtctttaggaggcacccgaaagtgcgccacttcacgtgccaatgttcgggaaatgttttattttttctcacccacgcccacctttcgttttgccctccctctcacgttgcaacgtcagtgttccccatttccatttccattttcattttcatcgaagatgtttgtccctgtgtgttcgcttacctttgtatctatgtgtgtcccagctgtgtactcatcgttatgtgcgctgttgtcacattttcctttcggctggtcatttttagacccaaaacaacgacgcaaatgcttggcctctggtcatgactttggcacttgttcgccttcagttggtcggcgcggtgttggccatcccgcctaagtgtcgtatccgtatcggtatcgatcgcaatgtagaaaagttatgattgtgccaaccttccatgcgctcggccaagtcttgaggcagatgtttgcggtccaactccaacagcagcagcagcgcactcataatcagctccattacctcgatttgtcgcccgcgcgaaccatcaaccaactgttagtgtgtccatgcgcatccaatcctgtacctcctgctgtatgtgtgtttcttgggttcaatcaaatccccgatcaatctaccatactatgaagaaccatcctcttgcaggcccgtattagtcttgtacatataaccctcgaaccgatcaatgccagccggacgaccagttgcctgatcgaggaggtagccgagccggattcacagccggagattaagccggtggcagaagcgcagtctgccaaagtatccgaggcttgtgtcgaaagtattctccccgagacagttgaaaagttagaaacagcagaccaggtccagcaggtaatcgccagggatttaagtgaatggattcaccaagctctcaagttgtagccactaataaatgtacacctaacgctactttccttgatgactaaagtttatctttctgtgcactctaggttataccacagttggggaagctttacgtgggcagtagccagcagcagtatgcgcagcagtcatcgcccatcatccaggagccagctactcctactatttacggaaacagcgccgcagccggagcgccgcagttcccgcagcccgcccaaaggcaagagaagcagcctccgcagcagcagcccatctacgctaaccagtatgagctgaatgtggccaaggcggcagctgcagcatctgtttactcacccagctcctccaccaccagcaactccaatcaacagcagcagcagcagcgccggaatgtggcccgtggactgcagtatcgtgaatctggaggactcgagactggacgtgctggcaagcagccacccaatgcgggcatgttgtcaatggacaacttccgtttgctaagcgttcttggtcgcggccactttggcaaggtgattctgtcccaattgcgaagcaacaaccagtactacgctattaaggcactgaagaagggagacatcattgcccgcgacgaagtggagtccctgcttagcgaaaagcgcatcttcgaggtggccaacgccatgcgccatccgttcttagttaacttgtattcgtgcttccagactgaggtaagtagagataagctgaggagttagaaattgaataataatctgtttacattttcatcgtgctagcaacacgtatgctttgtgatggaatacgctgctggcggagatttgatgatgcacatccacacggacgtgttcctagagccgagagccgttttctacgccgcttgtgtggttctgggcctgcagtacctgcacgagaacaagatcatctaccgggacctgaagctggacaatttgcttttggacacggaaggatatgtgaaaattgcggactttggtttgtgcaaggagggcatgggctttggtgatcgcacgggcactttctgtggtacgcccgagtttctggcaccggaagtgctcacggaaacttcctacacacgagctgtggattggtggggcttgggtgtgttgatctttgagatgttggttggtgaggtatgtcgaatggaacaagctttaaaaatgcagttcataatcataataattaatgtttacagtccccattccctggtgacgatgaggaggaagtattcgattcaattgtcaacgatgaggtgcgctatccgcgcttcctatcgctggaggccatagccgtgatgcgtagggtaagctgattgattgcaaaagtaactattcgaaaggagaactaatttacaaatttttttggcagcttttgcgcaagaatccagagagacgtctgggatcttcggaacgggatgcggaggatgttaagaaacaggcattcttccggtcaattgtgtgggatgacctgctcctgcgaaaggttaaaccaccatttgtgccgacaattgtaagttaacttgcacacttcatttataaggttgcatattttaacattgtttttaactgccttgcagaaccacttggaggatgtgtcaaactttgacgaggagttcacgtcggagaaggctcagcttacgccaccgaaggagccgcgacacttgaccgaggaggagcagttgctcttccaggacttttcatacacggccgaatggtgttagaagctcattcttagttcaaggatttactaacgggcctagcccgatccttatagcctatggcctgcttttgcttttacttgtgtacgaaattggtttcgagtaattttacttggcttagtagtcgatgtgagttcaatatttatacatgaagacagcatgataatacagatacaggacatatatatttataaactatatctatatagaaaatacatctactaacgagagaacttttgattgttgctcactggccgagagaccaacacaaaccaaaatacctagttgtccatgttgtggaaaagcaagcatttgtcaatcatccatgcaaccggtttagcatacagtgtacccagaaatcatcccacattgtcgttgcattgtacagcatatagagttgtttccttttccaaacacgagaacgcattgaatagtctgacaaaccctaggaaagccttatacgccaagttgtagttttggaaaccgttttttaagaccggatacaaatagattttatagatgagaagtgtatgtctacaccccagagcagtcattgcaacctattttcataatcaacatacaagaacaaagatatattttatacatatattgcatgcacatcccaggaatcgtcttgctaaacgagctcatcttctatacgacatacaaacatacatatttatctagtaaagtgagagaaagtgaaatatttacagttttaacatgtaagccctgtaaattgccttttgccgcgttttatcaactccccagcccattgcccgagttgtgttataatttaaacatattttttacgtcatatacacacgcaaacatttgttatttattattattataactattatacaagaaaactgtattgctttgagcatttttattcgacgctagatcgatgattgtaaacaatttgttttgcatgcgcggtgtgctttaaaccagatatgaggatcagaaaacaaataaccgctcgacgggatagaatttggaaattccgttgatggatggcatgcaatcggattgttgtacttctaagatctatgttgtatttaatgtaacttttagttcgatttaagcttgtaataatcgattattgaaacgtagtctaagctatcattatgtgaagataattattgataattacaattatgataacgattttgcacacctcatgcgaatcgaaacgagtataaacaatgcagatcttctattgtcatttttattatgattatgctcacaacttgcggctataatcatcgatttaattttaaatctgtaaagtcggattggtgcacatccaatcacattgtttagtttcaagttgcgactgtaatttatatttatgatatgattttaaataaatgtatctatcgctattatttaactgctgtttttgtcgactggttttcgctgagaccttcgctcatttggtaatacaaaatattggcggtattgtccacaacggctaaaaatatgttgctgatagggaataaagtggttaaaaacataaatattattttcataacatttaatacgcaccgttttttaagct

SEQ ID NO: 3233 - DNA, 4711 bp, DROSOPHILA
agtggctatcagacagaagcaatcgagaaccgcttaatgagaaagccaaagaaacttgttgaactacaagaaaaagaagcacaagaaggcagaagaacccggagggggaggcaaaaaacattttccagataagcggcagtcggagtcgtgtgaataaaagcgtgtgtatttgttttgtgggtcagcctgttccagctaattaccgtgaacttgtcagcgcacacaaaacggctgtaaaatgaccaaagtgaggtaataaacacggcgaattaacgagaaacccgagtgaataatgtccaaactggtgaagagaatccgcagcatgatcaatccaagcagccagcgggatcgcgaagataccacctcggtatccgcttcagagggcttcattgctcgcaggaagtgccactcgctgccccgaaggagcaatagacactcgaccgcccggcgatcaaacagtggtctgtggaatcgactggtcaccaatgtcttcggaccggaagattcatatgactttgacaacgaaggcgacagtggtggtgccgtattttacaccgattcggtgaacggttcaaactatgagatatctgcagaaggcgaatacatcaagcatcccgttctgtacgagctcagtcacaaatatggtttcacagagaatctgccggagagctgtatgtccatacggctggaggagatcaaggaggccattcggcgagagatccgcaaggagctgaagatcaaagagggcgccgagaagctccgcgaggtggctaaagatcgacgatccctcagcgatgtggccgttcttgtcaagaagagcaaaagtaaacttgccgagctgaagtccgagttgcaggagctcgagagtcaaatcctcctgacatcggccaacaccgccgtcaatagtaatggacaagaatcgatcactgcctgcattgatcccaatggcggcttcttggtcagcggtgcagttggtggcttgggcggcggaaacacggctctggagggcggcgcaccggccactgccaatgacaaagtgctcgcctcgctggagaagcagctgcagatcgagatgaaggtgaagaccggggcggaaaacatgatccagtcgctgggcatcggatgcgacaagaagctgctggcggaagcccaccagatgctggccgactcgaaggccaagattgagtttttgcgcctgcgcatcatcaaggtgaaacagaaccgcgagcaggccgatcgcctcaaggcctcgcgccagatgatcgacgagcatggccagacgatcggcgggaacaacagcagccagccgcagagcctggagacgacgctggaggagcgaatcgaggagctccgccatcgactgcgaatcgaggcagccgtcgtcgatggagccaagaatgttatacgcacgctgcagacggcgaatagggcaccggacaagaaggctttgcaggaggcccatggacgtttgtcggaatcgtcgcgaaaactagatctcttgcgctactccttggatttacgacgccaggagctgcccgccgattcgcccgccgcccagcaattaaaaacggagctgcagatcgtccagctatcgacctccccagctccggtcacctacacgtcactgcagtccggacaagcgggcatactcggcggaaagccgtaccagtcggtatcctcgcttggacgctgtgccagtgtcaccggaaaactggaggttcgcttgctgggctgtcaagatttgctggaagatgtgcccggtagatcgaggagggacaaggacaacaactcaagtccgggtgatttacgaagcttcgtcaagggcgtcacgtcgcgcagcagttcaaagagctattcggtaaaggatgagacgtccattgagatcatggcggtcatcaagctggacaatatcaccgttggccagacatcgtggaagcaatgctcgcagcaggcctgggatcagcgcttctccatcgatctagaccggtcgcgcgaactggagattggagtttactggcgcgactggcgatccctgtgcgccgtaaaggtgctgcgccttgaagagttcatcgacgatgtacgacatggcatggcattgcagctggagccacaaggtctgctatttgcggaggtcaagttcttgaaccccatgatttcacagaagccaaagctgaggcgccagcgtatgatcttcaacaggcagcaagcgaagaacatctcgcgggccaagcagatgaacattaatgtggccacatggggccgcctgcttaagcggaatgctcctaaccatgtgcacatgggatcggcaggatcaggatcttctctaaccggtagctcgcctatggtggttggtgggtctcgcgactctgagtctccgatttcgaggactccctcatccgacgcactggtggaaccggagccctacacgcccggagagcaggcacagaacttggaattcgatcccgatgcaggaattaatgaacacgtggagacgccaggtgaatacccggatccggcggccagtggtctgagcggaatgcgacccctgtccatgcacatgcagggaattagtgtgctgcccccggaatcgccacccgtggccaccggagcagctggtcggcccaatacgctcagcttacagatgccgggtgccagtaaaggacaggtgatccaaggcggacggactgcggcgcctacaacggcgccaccgccaccacctgtgctcaaggcgacatccaccactccgatattggatcaggaggttataccacagttggggaagctttacgtgggcagtagccagcagcagtatgcgcagcagtcatcgcccatcatccaggagccagctactcctactatttacggaaacagcgccgcagccggagcgccgcagttcccgcagcccgcccaaaggcaagagaagcagcctccgcagcagcagcccatctacgctaaccagtatgagctgaatgtggccaaggcggcagctgcagcatctgtttactcacccagctcctccaccaccagcaactccaatcaacagcagcagcagcagcgccggaatgtggcccgtggactgcagtatcgtgaatctggaggactcgagactggacgtgctggcaagcagccacccaatgcgggcatgttgtcaatggacaacttccgtttgctaagcgttcttggtcgcggccactttggcaaggtgattctgtcccaattgcgaagcaacaaccagtactacgctattaaggcactgaagaagggagacatcattgcccgcgacgaagtggagtccctgcttagcgaaaagcgcatcttcgaggtggccaacgccatgcgccatccgttcttagttaacttgtattcgtgcttccagactgagcaacacgtatgctttgtgatggaatacgctgctggcggagatttgatgatgcacatccacacggacgtgttcctagagccgagagccgttttctacgccgcttgtgtggttctgggcctgcagtacctgcacgagaacaagatcatctaccgggacctgaagctggacaatttgcttttggacacggaaggatatgtgaaaattgcggactttggtttgtgcaaggagggcatgggctttggtgatcgcacgggcactttctgtggtacgcccgagtttctggcaccggaagtgctcacggaaacttcctacacacgagctgtggattggtggggcttgggtgtgttgatctttgagatgttggttggtgagtccccattccctggtgacgatgaggaggaagtattcgattcaattgtcaacgatgaggtgcgctatccgcgcttcctatcgctggaggccatagccgtgatgcgtaggcttttgcgcaagaatccagagagacgtctgggatcttcggaacgggatgcggaggatgttaagaaacaggcattcttccggtcaattgtgtgggatgacctgctcctgcgaaaggttaaaccaccatttgtgccgacaattaaccacttggaggatgtgtcaaactttgacgaggagttcacgtcggagaaggctcagcttacgccaccgaaggagccgcgacacttgaccgaggaggagcagttgctcttccaggacttttcatacacggccgaatggtgttagaagctcattcttagttcaaggatttactaacgggcctagcccgatccttatagcctatggcctgcttttgcttttacttgtgtacgaaattggtttcgagtaattttacttggcttagtagtcgatgtgagttcaatatttatacatgaagacagcatgataatacagatacaggacatatatatttataaactatatctatatagaaaatacatctactaacgagagaacttttgattgttgctcactggccgagagaccaacacaaaccaaaatacctagttgtccatgttgtggaaaagcaagcatttgtcaatcatccatgcaaccggtttagcatacagtgtacccagaaatcatcccacattgtcgttgcattgtacagcatatagagttgtttccttttccaaacacgagaacgcattgaatagtctgacaaaccctaggaaagccttatacgccaagttgtagttttggaaaccgttttttaagaccggatacaaatagattttatagatgagaagtgtatgtctacaccccagagcagtcattgcaacctatttt

SEQ ID NO: 3234 - protein, 1284 aa, DROSOPHILA
MSKLVKRIRSMINPSSQRDREDTTSVSASEGFIARRKCHSLPRRSNRHSTARRSNSGLWNRLVTNVFGPEDSYDFDNEGDSGGAVFYTDSVNGSNYEISAEGEYIKHPVLYELSHKYGFTENLPESCMSIRLEEIKEAIRREIRKELKIKEGAEKLREVAKDRRSLSDVAVLVKKSKSKLAELKSELQELESQILLTSANTAVNSNGQESITACIDPNGGFLVSGAVGGLGGGNTALEGGAPATANDKVLASLEKQLQIEMKVKTGAENMIQSLGIGCDKKLLAEAHQMLADSKAKIEFLRLRIIKVKQNREQADRLKASRQMIDEHGQTIGGNNSSQPQSLETTLEERIEELRHRLRIEAAVVDGAKNVIRTLQTANRAPDKKALQEAHGRLSESSRKLDLLRYSLDLRRQELPADSPAAQQLKTELQIVQLSTSPAPVTYTSLQSGQAGILGGKPYQSVSSLGRCASVTGKLEVRLLGCQDLLEDVPGRSRRDKDNNSSPGDLRSFVKGVTSRSSSKSYSVKDETSIEIMAVIKLDNITVGQTSWKQCSQQAWDQRFSIDLDRSRELEIGVYWRDWRSLCAVKVLRLEEFIDDVRHGMALQLEPQGLLFAEVKFLNPMISQKPKLRRQRMIFNRQQAKNISRAKQMNINVATWGRLLKRNAPNHVHMGSAGSGSSLTGSSPMVVGGSRDSESPISRTPSSDALVEPEPYTPGEQAQNLEFDPDAGINEHVETPGEYPDPAASGLSGMRPLSMHMQGISVLPPESPPVATGAAGRPNTLSLQMPGASKGQVIQGGRTAAPTTAPPPPPVLKATSTTPILDQEVIPQLGKLYVGSSQQQYAQQSSPIIQEPATPTIYGNSAAAGAPQFPQPAQRQEKQPPQQQPIYANQYELNVAKAAAAASVYSPSSSTTSNSNQQQQQQRRNVARGLQYRESGGLETGRAGKQPPNAGMLSMDNFRLLSVLGRGHFGKVILSQLRSNNQYYAIKALKKGDIIARDEVESLLSEKRIFEVANAMRHPFLVNLYSCFQTEQHVCFVMEYAAGGDLMMHIHTDVFLEPRAVFYAACVVLGLQYLHENKIIYRDLKLDNLLLDTEGYVKIADFGLCKEGMGFGDRTGTFCGTPEFLAPEVLTETSYTRAVDWWGLGVLIFEMLVGESPFPGDDEEEVFDSIVNDEVRYPRFLSLEAIAVMRRLLRKNPERRLGSSERDAEDVKKQAFFRSIVWDDLLLRKVKPPFVPTINHLEDVSNFDEEFTSEKAQLTPPKEPRHLTEEEQLLFQDFSYTAEWC

SEQ ID NO: 3235 - DNA, 2140 bp, DROSOPHILA
gagatctcaggaaatataaaaaaaagagaaggttgagattcagaatacagattctagagacaaagacgcagcaaaagtttgctgaaacatgttgccccgccaactctaacgtccacaaaccgcacaagaccgcccacacttttgtgatgtaattgaattcgtcttgtaaaaaccggacacataaacacttttgaactatttttaaatgttttctcattttattcccttatatctatcgataccccaaaaacattatgaaatttcgggttcgccttcacattagctgattaacgggtatctgatagtccgtgaactcgaatatagcattctctcttgttttaaattttattgtcccgatttagcaaagcaaaattgtcaggtcagcaagtttttgtctgataataaagctgactctaattaacacgacgagcatgcatttttaggcccgcacatacagaggaccgagtcacatttccgtttccgatttgcatgtggaacgagtcgcgattccaaacacatactattgcaaatttatttgcattcgacttcttgtatgtccttgcccattgttatgctaaattcatgggggcgtgcggtaataaaacttcccaagagtttatatgaattcgctcttattatctaacacttatcagtgtgtttatccgacaactaaacattcgcccagttgatataaggctaaggttcagccgaaatgatatggcgcatcttattataatttcctttaaaagtaatattgaattcgtttttcaaattgcacgttattcggttgaagaatagttttatttttacgtaaaccaaaccagaattgcttagataaatgagtcaaagtataaaagcatgtagtactaaacatttctcataaaaaatatcacttatacaaaaactacaatcgatcagcttgacttaatacatattccacatccacggcgaaaatattaattactcctcaccaagcagaacttaaatgagtgccccaaacatggattgtgaacagcgcggcgatatagatagcgtcttcggctggatcgccaatctttgcaacaaagaaacgcgtctctgggcgatgctggagctattcgaaaggcgcacccacattgacagcctaggactcttgctatggcattcctttggagctgtgagtggcttgctacaagagattgtgtcaatatatccggccatttatcaagaaattgaattaaccggccaacagtcgcaccggatttgcactgccattgggctgattcaggctatggcatcacatcccttcattggtattcaactcatacgatgccaattcatgtgctatttgatgccattgcttaaaatgacttctcaaactcgcgccgttgagcatgttcgtctctctgtcttgggcgtcatttgcggtctactgaaatcagatcatccggagatcgtatcttattttttgggcactgaattaattccacttaccctgcggcagctggagtttggtaccacaatgagtaaggtgctctgtgcatttgtcttgtaccgcaccttagaacatgaagtgggcttaaagtttgccagtcgaagactggcacgaaagctgcatctgatccatactttggccagggttgtgcaccaactcacactggaaccggagcctagggtccttaaacatgtagtaaggatctattctcgtctggctgatcatccccaaaatctggagctgatccttaagctattgccggctcagattcggaacggctatttttgccaggaaggtttagtgggcttcgagagcgcttctctagagctagctgatcttaaccgtaagctcagtaaaaatgaggaaaaggacaagggtaagggatccataaactcgcaggataattttatataatttttcttttagtttgtgatgatgccatgccggaaaaccattgaagctaaatttcacgcctccttagttttccttcccctaattgtcctaatcaatgcatacaattggtgaaccaatcagatgttttatttggttgcttctggatatctttggttggaggatatgtaagggttctcttgaagcattaagttagaacaatgcaataaacagatcgtaaatattttgataccatttttccaccgtaattgaccc

SEQ ID NO: 3236 - DNA, 888 bp, DROSOPHILA
atggattgtgaacagcgcggcgatatagatagcgtcttcggctggatcgccaatctttgcaacaaagaaacgcgtctctgggcgatgctggagctattcgaaaggcgcacccacattgacagcctaggactcttgctatggcattcctttggagctgtgagtggcttgctacaagagattgtgtcaatatatccggccatttatcaagaaattgaattaaccggccaacagtcgcaccggatttgcactgccattgggctgattcaggctatggcatcacatcccttcattggtattcaactcatacgatgccaattcatgtgctatttgatgccattgcttaaaatgacttctcaaactcgcgccgttgagcatgttcgtctctctgtcttgggcgtcatttgcggtctactgaaatcagatcatccggagatcgtatcttattttttgggcactgaattaattccacttaccctgcggcagctggagtttggtaccacaatgagtaaggtgctctgtgcatttgtcttgtaccgcaccttagaacatgaagtgggcttaaagtttgccagtcgaagactggcacgaaagctgcatctgatccatactttggccagggttgtgcaccaactcacactggaaccggagcctagggtccttaaacatgtagtaaggatctattctcgtctggctgatcatccccaaaatctggagctgatccttaagctattgccggctcagattcggaacggctatttttgccaggaaggtttagtgggcttcgagagcgcttctctagagctagctgatcttaaccgtaagctcagtaaaaatgaggaaaaggacaagggtaagggatccataaactcgcaggataattttatataa

SEQ ID NO: 3237 - protein, 295 aa, DROSOPHILA
MDCEQRGDIDSVFGWIANLCNKETRLWAMLELFERRTHIDSLGLLLWHSFGAVSGLLQEIVSIYPAIYQEIELTGQQSHRICTAIGLIQAMASHPFIGIQLIRCQFMCYLMPLLKMTSQTRAVEHVRLSVLGVICGLLKSDHPEIVSYFLGTELIPLTLRQLEFGTTMSKVLCAFVLYRTLEHEVGLKFASRRLARKLHLIHTLARVVHQLTLEPEPRVLKHVVRIYSRLADHPQNLELILKLLPAQIRNGYFCQEGLVGFESASLELADLNRKLSKNEEKDKGKGSINSQDNFI

SEQ ID NO: 3238 - DNA, 14328 bp, DROSOPHILA
gggctgcaaaggcgagagcccgccgacaataaagagtctgctcaacaatgccaccgaaaacaaagtaagacaaaaaggatttttacataaacccacgcaagacacccacacaaacgcaggccagcagaaacacacacacacactcttacagcgacgaacgtgagtgggcgccaaactaagcgcgcccaaaagtaggcaacggaattttctcggcagaagctgtaggtgcgcgtgtgtgcgtgcatgttgcagtgcgagcgttgccagatggaaagaaacgtatatgtgaatgttcccttgaattttaaactgcaattacgttctttagaggtaattgaaatatttgggattgcttgacgtaaacaaatgagaatgagaaatatttatattttctggttggtatctagaatcactctttgccaaagctaaaaatactataaaattacaccacaaacaaataaatagttcataagctgtatttagctaggttttataggtagcatatttgtctagatgcatattttaagtaatcgtaatgcattgaagattccagaaactactattgacgcatacaaagtcaaaggaccagaaacacaatatctaaatgtgatataaatgtgatataaatttaatacttttcaacacaaaactcagttgggagtcgaatttcgtaatgcgtagttggtgggcaaccatctggccacgctctgtgcaacaccttcccaacaaactgccctacggcaacatttcaacacttggcccacccccaaccgcctctttttccccggcagcatcactgcgagagcgagagagacaacggtagagggggagcgagtgggcagaaggcgatttcacttggccatttcactcatcatcagtttgttttgctccccgtttcgctcagcttcgtttcgcctcggaaaagatcggcttttcacgccggcgatggcgatggcgtagcattttcccatgataagccagttttcccagtcgtcgccaggcgttcgaagattgcgcattcgttcagaaacgcggttccgcccgattcgcatccgatttcggtttccatcctcgagtgctgctgtgcgcctgatagagccccgttcgagccacgcttgtgtgtcccgcagttcctttgagcaacccagtgaagtgaagctaccgtcgcccgaatcccacaccatgtcgaagccgggaacccccaagcacggcgccggctcatcctcagcagctgctgcccccgagaagattagcgtgagttccgacatagcagtttaccgccaggaggacagcttttcgaaaagtgcatcctggctgatttgggatgcagagcatcagaacaccataatatcatgttccacatcactcccgtccgtcaagtgcgttaatgcgcttttctagaattctctctgtgcgtatacgtaatattcgtaacacgccgagctgcaagtgcgagcgactacttctgttaacatctcaagtgtctgagtggtataatctttcaaaaaagtcgggataaatatttgcacggaaattagtgatgaaattgcagacgagtgaattagtttgctataagaccaagttgttctgaataatatttaaaaacctacctaaattaagaaattatgaaatatttctgagcacttgtaccacgaaaaagctattagtttttcttccacatgaaaagggctaaatagcacgtaaatggaaaattatactatcaaaaaaacgtaaggtgttgaaaatgtaatcaactaatttcgtgacagttcgagggctttgtggaattagtctacctaaaattcatcccctttacttccttcaattaaaaaaggtgagcgcgaaatgctaagccagactaagccaccgcgatcgaatagagaaaacagaatacagaatatattgtagaaacatatgctggtgacctcgaattccccttttggcacggggttaccttttgtagttgggtgctgtttgctttttatttttttggccctcggtgcccagtgaactgggctcaaagggcatagcatactttctgtcttgcgcctcataaaaattgcataattgtcgttctgcatgtcgttgtttgtgcgactctttgtgtggtcctgttgatgtggctattggaatgggggcgactcaaccattagcctggaactgcatgtttctttttacgtgccatttgcggtcgcatctggcacacagcaactgcgtagagtgggccaaaacgaatctaggtgctcaaatgggcaaaattatggtgttcgttcggtcttattggcctgctatttccctcttttattaggcagctaattatatggcgacaaagtggtgcggactctaaacggaaataaaggaacatatccaagttgaaagttaaagtgaatgcacccacttcattgaaatatggttaatttattgttgaaatgctacatgttatttgataatttgcggagaaaactaataactggaatataaaaattaaatctttataaatatttgctatgtagcattttttcacttattcgcttttggccctcgtggctggctcataatttccccattttccttttcgactgagctcattaaatcctgaccacaatgtgagctgcgccacttccaccccgaccacatggtgcacaccctcttgtcctgcattgcaatctcaatccaaatatgctgactaaagggctttgctggagtaaatctctgcgatatatggctgtattcctgtccgactcgctttgtttcccagttttccgcagggctcgctcatcccctcaagcggaatctgaatgcgatggaatttaactagggaaaagcataatggggagtcggctgtccatataggggtatgcattatacatgatactgcagaccgggccagacctataccactattcccacgactttttccattttccttcgacattctgcccgcgggtcttccattggccgccttgaagaaacttcccataatttgtgctggcccacactcacacttcaggatataagtccttttcggtcaagtttgcgttctttgttccgcccagccaagtttcttcatcctccgagtttgttttcgccggagcatctggcgtgtcccctgtccacaagacgaaaacttgttgacttcgaaggcatcgaaaaacacgcgtttctccttttatttcaatttttttttcatattttttcctctatgcattgttaagtgagtgggaaacggtggcgtaagaactttgccaccggcaaagtgtcaaagtttgcaaggcaaggttgctcatacgccccgttgccccctgcggctgcgggcgcaaacttaaagaacatttaattggtggctttaagcaccggcctacatgcccgcgtgatttgtttgtgtctattaaaaattccctggcaatgcggtcgcttcgccagaaaagtgtgctggaattttgtttgcacaacttttcgcatcacttgggggcttttgcctttatgcaaccgacccccacccctccccctgcaaggttttccataaattcaaacacttttacccagattttcaccgccctcataacggcatccgcaggctgttggaaaagtgtcggggcataaaaatcccatcaagtatacgtcaaagtgcggccaacttgtgctcctcttagataatgcctggcaaaaaggtcctgcacgagaagtcaaaacgattccaattccaaaatgctgactgtgacttttcgctctggatttaattgcatttcaactagataggcaaattctacttggtctagaagagccattaaatggttcacatctacatatggcaactgaatgttttagtctccgaaaatccacctgccaccaatctttgaatcggactactagggcagaataaatatgtaactatgtcccaattataatgcactgcacaatggcacagtccaccgatgattactatggatacagactcgaatttgtgtacattagcaggatttgctgtgccaaatcagctgggaaattaaatatcatatcaattatgtggcctgcacaatgcacctgcagaattcaatccaggcaattgctaattgaaacatttcgcccgccactgggtattcggaatattaattgagattaatgcgttgttaatagaatgaactcggaaatggcacaagtacgagggaccagaggcggcccatatccgataattaaatctacattaccattacgcatgctggccaggaaaaggacggcaaaaagtgaggaatagcatcaacagaatgagccgggcgagaaggaggcatatctatgtgggcaatccacccccaggacgacacatgacagcacttaaccaaataccaataaaatcctcagagctggggattttggggcgttgggggcatccccaaagtgctacggtgcaagtgcggttattagacaaaatccatttacacttgaattcgcttttggccaaaatgaagtggccaagacgggacctggaccttctgtccgtccgcccatcaacaaactgggaaacggactgaaggaatgcgaatgcaataaattaagcccggggagcagtcccaccgattgagttaggcgtgtccggcgaggaaaatgctgattagcggagaaaataggggattgggttccggaggacgggcctgtggccttaattcaatggcaggcactttgttaaataaactttctgttcaagtggcgaatacttctgcagcagacttggctctctctcgagagtccttaactaggtcccggctttgttttacccgatccacgctgatgagttgaaaccctgatgagccgtgtggtgggcagtgggggatcagagataaatggtgacctatatccacctggctggcgaaacactagtttccaatgatggtgtatacctctgatgggcaattaaacaagcacaagacatttagcctgcatgctgatggatggagtgctgaggtgcgaacttttagccatttcaatcttacaaacttttcgacttgcgtttaacgattttttgaacaagcaaccagatgacaacttctggctacagcaagttttctcgttcttggataaaatatattgtaattggcaaacgtttgttgtttgcctttcgtttttgctcttggagcagctcaaaggatatttctgattcgtttagcagattagaaacagtcagaagataatagatcaatattcaaacgaattttaatgtaatcacacaaatatgtactcaatcttattaaatgtaaggttagataccccattctgaaataatgggagtgcgagggagaaatttcaaaataagcttaaaaaccacacatcgttttgcggaacagagtgtatcaggcatcaagccgtcaactgtgaaatccatcagcaatcctgcagactgaacccgacggaatgacggctcctgcaaacgctaacacaaggatgtgagtcctgggaagggaagggataggaagcgttttgatatgatggatacggggctgccgtgtgtaatgggcacttaggtcgctgccacatgactgcgacattagaggggaatcggggcaaatgggattgccgagggggcacgggtttgggttcacgggttcacaggaatcaagaatcgggatcgaggctgaacggcaacgtgaaagcgcagtcagccggcaggaaaaaagcgatacgaggatgtggaggagatacatgagcgaccaagagctatggcaacacggaaaagcaacagcaaggaggtcaatgagttcagtacagcgacatcccggcaagctgcagcattcagctttggcttggggcagcgcctcagctttggaggacttccacccactcacccacacttctggaaggaccccattcgcttttgttatcctgcggagagcaagtgatacagttttatgcatgttttccaggcattcaggacatcgttttgggcacacttcacatacggtttccttctacgatgcaaaactgaaacgcatatatctgcatctgctagtgatattcaaacagatgcccggaaaatgctcataatgaaaaccaaactttgcggacatgaaaatgcaattcgtgtctcgcaaaattgtactgctctattttgttgatggcaaacaagtaggttatttggcaacgggaaaatacattcttgtgtgtgcggtttaaagaatacctcgactgacattgtagagcatttcaaagtattgatgttctacaaaaaaaaactatttttgggcggtgagaatgggagtggcaagattttggaacaacttacacagcgtagtcgtcaactttctggatttattggttcccgagatctagaagtttatacggacagacatacggactgacaatctttctcaagattatatgaactttatagtgtctttaccagtaacgggtattaaaattgcttacctcaaaaatacgaattcattagctagctgatgactgttgccaattgaagaactgaccccaacttgttccttgaaagtcaacatcatctctcatacatacgtgtttccgtcacaggaaaatctagtcaaagacatgacaactatatagtcgtgtgtctcaattaagaatccagatgcacatggcagcaaaaacaaggcagagtgcaagtattgacccaatcacaagtcaattaaagtgcgacgagcgcagactgaaaaccggaggaagggcgggcgagctagactttttcacgtaaatcaaacgattgagccaaatgactttttaattgactgatgactctggcaatgccaagagccacatgcaagcggccaaaaagtttttctgacgcaaaacgagtaaacattttcgcctttcaattgaaaagaaaaaactcgagagtgaataaaaacttcagttggctgtcgcatcaactttatcccatatcgttggcctacgaaagtcggactgattggactgatcgaaccacgtgttttttggtataaaagaacgctataaccccatacttttatcggtattatttaattagacagaaaacatgtatatatgctcattacgtttctttgaaaatcaaggaatctgaagaagaatttcaaagtataaagtcttcagccttggaatttacatacatacataccacacatcattctttaaagtttcattttgctgggtgtacgtcagagtatcaaaggcattcgactgttagtgagtgaaaattctgccggagccaaccgcactacatccgtcatccgtgatccatgggatataagtgaggtcaaatgtcaaggattccgctgggggaaggtaaatggatgggcttcggaaggtcgtaaagtgcagccagccaagcagccatgcagttcgtcacaggtggcaccatccagatccgtccaaacccaatcccaatcccaatcgcaactccgcccacctttccactttccactttcactttgtgttgagggcgtgccatttattggcaatttcattatttataagcgttttccatggcatgtatatatatactatatttgaacactctgatggacggacaggtgcacaaaaggctacacttgcctcatcgttagttcgtcagtatccctgcaattgcccaggtcctggctcccagttcctcctcttcgtcttcgtcaccaattgtcaacactttgtcgcagtcattcgtggaatgcatcaagtaaataaatttcccacgccctcgagatatactttacgatgtgaattgtacacagttcggaagtcgaattcctcgactataggatgctgctctgctcatgagatgttttttccaatcaataaaagttagcacgattattttttaaagcgggaaaggttcccattgcgctctgctttgtccttggcagaaacatgagtccaatccttacgttcccccgtcctgaccaacccactcacactcaattaatgccaattgattcgtgacggggagcaagccgtctgcttgtttattgtccattatgcagtcgccttatccaagcacggtggccaatcctccccagcttgtcgatggattcgcgtgcgatgcagccagctgcatcctggctttgcattttgcattgtccttgggcggaaagattagctctgtcagctggtaaacggagcgcagttacataaatagccaatttgagtgatttatttatgcgcctaatttgaatggaaaactttttattggcatggccgcaggtgaaacgacgactcacaaatgcatttacataatacccattccgtttatttatctatttactggcttgcacagcacccccaaatgagcgggtggtctgaagctttcgcttaaaccaaatggacattaaggggcttaggaaaattcttggccggaagaggttcttggccctgttggtcttttgacacttgtatagtttcgctcaatttcaataagtgttcgatggacgtgccatggttgtgctattcgaacctggcggcttcgtgtgggttggcatgcccaggactcgcaggacaaaggagactgccgatgctcccgtatcaattcgaggtgcttcgcaggcttatttgctttacgccttaataaattccgaaatgggctctggcaaggcagaggcgcctgaaagtgataggccaaacacaatacacttccctccgcaaatcgaacattttgtgatggggtcctccacatgtagcatattggactaatctaccctaaaaataccataaatgattgggtataacatagcgtcaatacattgtgacactttgtcataataaatataaatatacaaatatacaaaaaagaccaccaaaaactacgtaagcactccagcgccccagtaatacgatctaacgcttatacataagccgatcgcggagcgtgggaatgctgagcatgcactttgccgctcaagtggtcaatgccttctgcatacatatgtatatgtataaatgtaagtaagaatgcatagatataagcaatgtatgtgcgggttagctgaacccaacttcagcacactttgattattcaaataaagaacctcgaacagagcagaagctaagctcttctttcattaaacatcaaaatagcaacctttaaaatagcacctttcacacacagcttgagttacacaaatcgatactttgagcttaacgcaagattaaagtacaagctgaataatagctcttatttaattcgagcacgcaagaatttaaagtggctaattaataaataatatacctatcaaagttgtttgttaataaaaagtgaaggtaggaaaaaccgtttccaagctgataaaatttatatatctattcttgatcaggtatccgagtcgatctggacaaggctatctagttgttcgtatggacatagagatctcgatgtttttccaaaagtaataaaactactttttatatcgacctgttaaaacctgccattttgacctagatcttaatggtatcatatttttggaatatctaaacggagcattgggcttaaacaagatgtgtgcttcgtcactacttattattccgtccgcatggaaaagtatgacttaagcttaaataatacatgaaccacccaaaagaaaggtcatgtttgttgttagctaacccaggcactttaaaattcctaaacttcaaattgaattcggtcaatagagcatggaattcagtttagaacagagtttttaaggctaaaaatacccctgagctttaaaatattcaacagtttggtgggttttccttaaatttcgaattgcgttgcacgagtgggtgggtatttatgaaatgcacacgcacatattcaccatgcctgggcgaggaattcaaattcaaattcgaatccaaatttacacagggcaggacgaggagtatgggcttgatatttgcgggccagggacacaaggtggctgccaggacatcaaggacctgccaaaagcaagcgctcacaaagtcaaatgcagagaaaaacatttcacattttttggtcatttcatgcccgtcatttttcacgcttgagtttgtgtttatggcaacgtgaaaatgattttgccttttttcgaagttttcaagtttccctctaacaaataaccgcattccggacacacacttcaatttattcacaatttcgattaccttcgattactcttgcagaaatacaatatcagcacagagaaatgcggggatctgacggtcatagtgcaggtgagttgggttcggaccgtgtcctcttcaaggagcatcaccttaacctctacactccattcttgtgattttcttgtgatttagggcgacctgtcacagcaggagaaacgcgccgtgttcataacggttcacgacctgggctgcaaccgtaagtagtagtagctcccggttggactaattgactaatcctggtcatgtccccagacaactcattccaggagttcgtgagcagtccctgcatgacggagatcaaggagcgctcctgcttcatccacgtggacgtgccggggcacgcggacaacgcggaggccctggctgacggctttccgtttccctcgctccagtccctgggcgaggacctggtcaccgtgctggactacctgcacgtaaagtacgtgatcggcctaggcgagggtgccggagccaatgtcctggcccgcttcggactggcccatcccagccgggtgctgggcctcatcctgatcaacgcgactggcagcgccgccagtgtagtgcagtccttcaagaacaaggtaaatgagagcgactaagctcttttgttcgtgcttcctgaaattggctgccaagaattcgggccattaggttttcttagcaaacatgataacgtttaagcaagggtttcttaaggcttctttcttaaatgcaatataacttaaatgttagtgttcaaagttgtgaatacaaagatttaatattagattaatattatgtagagtcttgatagtaaagttaaattgcttaaattgagtattaatagaacatatctaaatatatgaatacaaaatataagaaacttccgtgtacctcgtacatgattcttaccatttgtacagcggcgtaaagacgttactcatacgcagtgttgttcaaagccattctaatttaaaatgcacacctattttttattaatatattgtttatttcctggactccactaattgttctgccttctccacttcattgcagttcattagctggaagagcgacgaggtggcccagtcggctgagagctttctgatgtaccacaaattcggacatgtaagtagtggtaatcggaggggcagggcctgttccccatccgcgccagctttactgggccattggcccgccgtggtggagtgcgtgttcttgttggtttgatctcagtgtcgtaatcacttaccttctgttctattttatgtttgaacctaacaaccaaccaaccgccaaatcgaactctgttcgtctgcgcattcaggttatggaggtaaacagatcaaacgtctcttaaaccaatccccttctaatcgaaatcccttcgcaaacctcgattaaaatctgtgctgcagtgctcgctgaaactcgaacacacatacatatatagttttaggtcccctcgtttttgcggcatgtttatttgtttatttacttactcgttgaatttatcgttgttttcttctagaactgggtatgtacatagttttcccctcaagaattggacccaagcccctgtgcaaccaaaattggaaagaaaatatttatccacaatcagcttcattgcatattacatatttgtcaacttgttgtccctacttatgtatttgttttgtgcacgaccttaagtttatagtagatagtagccataaattgtagttcgctactgaatttacgcctcatgcaaatgttctgctttcctaaacactgcttccaaaactactgccggtaaatcaccgaatcctacagcaaatcgtgggcgagaatccggacaaggagaagatcgtggccgagtaccagaagcgtcttcaccgatccctaaacagcaagaacatcggtctctatgtcaaagcatttatgaagtaggtcacacactgcatgacttggattcgaactaaccacgtttctgtgtccctagtcgcaaggaccttacgctcaagggctgcaaggtagatgtcatcctgatcacgggcatgctcagcccctatgcgtccatggtcgagaagctccatcgcgacgtggagaaggagagggtcaccattctgaagatcgagcgggctggcgatgtcctcgccgatgctgtaagtgtgttctaggtctatgccttaagcaatctagaatggggaatacgaatttctttctaagtatgatcgtttttgcccagtcgtagtcaaaattatgaatagaatttaagcaatcaaaactaacgggtgcacatctcgtgaaaaacttgactgttattaagctacctatctaaattcatagaatacctgcagatgtaacttgtcaagtaaattgattgcatagtaaataacattgaaaatccgaaaattttccagcccggaaaggtggcccaatccattctgctgttctgcaagggacaggggctgctcacgtcggtggtgatgccaggcgtggatcgcggacgcgccttctccacggctagctccggatcgctggagggggccaacggatcgcggcgcctgtcgcgcggcatctcgatggaggattatgacaagcccaacatccgccggctcagcatcatgaacagtgagttgcccaagaaggagtaaattagacgagaccacgccacgcccacgttggtagattaagcttgattgcgtatttaaactacttaaactggtaaaatacctttagtctgagcaaaacgtatatgtgtgaacccagagccaaacaatcatcccaagtgtaaccgcttttccgcggattttaggccaaattctaattagtaatcgcttaaagtttttaaagagtagcaaacccaacaacaacacattgaccatccgaatccgaatggacggaaataagccgaaaactgtatttacactgtgtacttaggattagtcttatgtatgtaaccccaagaagcccacctaagaatctgaaacaatgttcaaacatccatatctaaatcttcaactcgaccgaacttatcacaactgctaaacacgaactataaaacgcaatctatttaatacctccgaatagtaaactgtacctaaacacgtagaaactagaatggaaaaatcccaaatgttactcctctactctgtcacccttcaactttctaaactttctatagtgaacagtctcaaatgttgctattttagtaaataaaagaaaaacagaaaaaatcatatacaaagttcgaacagtctaagttgagaccagctttgcgaaagatgcacacggattatatatactcgtatgtatgtgtaaacaatcaaaaccaaaagcaattcgaaaaccaaagaatattaattgtcatgtaggtgtcatgcgtttttcaaagcgagtattaaaaattgttttatcgcattggctttagcttaacatttagtgaagacatttaagtcgaccaagcactcagataagtagatgcaactacaccgttacacaataaagttaaatgaaaacgcctatgctgagttttaatttgttactaaatatcttacacattttgcatggctgtcaaattatcggatgttttggtgggcccaccttttcactcataattgctggctttattcatttaaatcatgtgcattaagcccactaaataactttcattttattcttaaacgtgactttgaaaacgttgtttttgggcgcttaatattgaaaattcaaaaatagaatagaacgcccatctctacaaaattgtccatcactaatccaaacgatagtttgacaagcctgtggtatttcttgcactgctcaaatggtcactctggtgcttaagtgcttattttaacaacaaatttacgagcagttgctggaaaataatgttgatactgagctaacctgtgtccctttttgacccgtcgcccaccaaccagccaagcacatcttctccttcaacaacgtgtacatggacgccccaccgcccacgaagccccctaggggtgtgaagtacggcaaggatgaggtaaatttcttcaagccctcgctgaaaatggtgttcatctcgcgtcacagtttttccaagcaataaacccatctggaaccgcgcctgcttgtgttttccttcgtagataatagttttttaggggccgtttgcctgtcccaaagttgcgggtccaaagttgatgacgacaccatctggttgttgttgctgccgcacgccctcttttc

SEQ ID NO: 3239 - DNA, 1862 bp, DROSOPHILA
gcgttcgaagattgcgcattcgttcagaaacgcggttccgcccgattcgcatccgatttcggtttccatcctcgagtgctgctgtgcgcctgatagagccccgttcgagccacgcttgtgtgtcccgcagttcctttgagcaacccagtgaagtgaagctaccgtcgcccgaatcccacaccatgtcgaagccgggaacccccaagcacggcgccggctcatcctcagcagctgctgcccccgagaagattagcaaatacaatatcagcacagagaaatgcggggatctgacggtcatagtgcagggcgacctgtcacagcaggagaaacgcgccgtgttcataacggttcacgacctgggctgcaaccacaactcattccaggagttcgtgagcagtccctgcatgacggagatcaaggagcgctcctgcttcatccacgtggacgtgccggggcacgcggacaacgcggaggccctggctgacggctttccgtttccctcgctccagtccctgggcgaggacctggtcaccgtgctggactacctgcacgtaaagtacgtgatcggcctaggcgagggtgccggagccaatgtcctggcccgcttcggactggcccatcccagccgggtgctgggcctcatcctgatcaacgcgactggcagcgccgccagtgtagtgcagtccttcaagaacaagttcattagctggaagagcgacgaggtggcccagtcggctgagagctttctgatgtaccacaaattcggacatcaaatcgtgggcgagaatccggacaaggagaagatcgtggccgagtaccagaagcgtcttcaccgatccctaaacagcaagaacatcggtctctatgtcaaagcatttatgaatcgcaaggaccttacgctcaagggctgcaaggtagatgtcatcctgatcacgggcatgctcagcccctatgcgtccatggtcgagaagctccatcgcgacgtggagaaggagagggtcaccattctgaagatcgagcgggctggcgatgtcctcgccgatgctcccggaaaggtggcccaatccattctgctgttctgcaagggacaggggctgctcacgtcggtggtgatgccaggcgtggatcgcggacgcgccttctccacggctagctccggatcgctggagggggccaacggatcgcggcgcctgtcgcgcggcatctcgatggaggattatgacaagcccaacatccgccggctcagcatcatgaacagtgagttgcccaagaaggagtaaattagacgagaccacgccacgcccacgttggtagattaagcttgattgcgtatttaaactacttaaactggtaaaatacctttagtctgagcaaaacgtatatgtgtgaacccagagccaaacaatcatcccaagtgtaaccgcttttccgcggattttaggccaaattctaattagtaatcgcttaaagtttttaaagagtagcaaacccaacaacaacacattgaccatccgaatccgaatggacggaaataagccgaaaactgtatttacactgtgtacttaggattagtcttatgtatgtaaccccaagaagcccacctaagaatctgaaacaatgttcaaacatccatatctaaatcttcaactcgaccgaacttatcacaactgctaaacacgaactataaaacgcaatctatttaatacctccgaatagtaaactgtacctaaacacgtagaaactagaatggaaaaatcccaaatgttactcctctactctgtcacccttcaactttctaaactttctatagtgaacagtctcaaatgttgctattttagtaaataaaagaaaaacagaaaaaa

SEQ ID NO: 3240 - protein, 365 aa, DROSOPHILA
MSKPGTPKHGAGSSSAAAAPEKISKYNISTEKCGDLTVIVQGDLSQQEKRAVFITVHDLGCNHNSFQEFVSSPCMTEIKERSCFIHVDVPGHADNAEALADGFPFPSLQSLGEDLVTVLDYLHVKYVIGLGEGAGANVLARFGLAHPSRVLGLILINATGSAASVVQSFKNKFISWKSDEVAQSAESFLMYHKFGHQIVGENPDKEKIVAEYQKRLHRSLNSKNIGLYVKAFMNRKDLTLKGCKVDVILITGMLSPYASMVEKLHRDVEKERVTILKIERAGDVLADAPGKVAQSILLFCKGQGLLTSVVMPGVDRGRAFSTASSGSLEGANGSRRLSRGISMEDYDKPNIRRLSIMNSELPKKE

SEQ ID NO: 3241 - DNA, 6226 bp, DROSOPHILA
taagaaacttacagctgtaactcacagatacagtttctaatgtttaattacaaattccatgctttaggcactagataccaccgatagcaccatgttcccacccagttctgaaggacacatccgagtgtctcgacgtgactaggccaagcaggccccacagattataatccccaaggggaccaggtcatcaggatgcaccaggtactcagctacgagacggcggtgcgggccaacagctctcgggagttccgcgagtacgtttccaagcgcacctgtgcctccctggtgctaacgattggcttcttcatgctgataacaggtgagtgcattcacaggacagcgcctaatgagtcactcttgtgtgtcgtggtttcgcaggatacttgctcggtaattttgtggccgagcgcaagtaccacattcgccagatgacgaaagacggcggcaggtccgtgaaactgagcagcgccgagtatgccagcctgcaggagctgcaatcatatcagaaggccaaggatcagctgttgctggccgcccaggagctggacaagctgcagcagcaggacgagagcgagcggtatctggccacgtcgctgaacacggagatcttcaacaggtacatatcctgcacgcaggatataccgcccaacacgaacattgcggccagtcagttcacggaacagctgatcgacaacacggtggccaggcagcgccactgcttgatgatcatccagcgggtcatcgacaaccacctggccaacagccagctctagagctctagggcggatgccagcgatggtttagcgggccaatgttcgacatttgacatttatgtgtgtatgtgcttttaggtgtgctcaatgtgtgtgctcccagctaattagaaattaggttttgtaattcattgtgaaagtattagatcacacaagttttttatacatgtctgcattaaaagttaaactttaaatagatgctaactattttggtaattggctaatgtttagttcgatgagttatgctgacgatacattgggttcacgcccttaatgggcaggaaatggcctgcactgttgaagacccactgctccagcgaaaccacgtcgtcgtcggagaagagcagatacaaatacttcagagtggagcccaagaagaaggacccctgcacgtcatccggttccgaagtaacgttgttaacgtccatcactccagtatatccgtagggcattcggcagtacttctctatcgcctgcaccatctccaatccccacaagcggtactgtggatgatgggttatgcgccacagaaccaagtaagtttccgcgacttccggccgtaaattgtaatagttcctctggagcggctctatttcctgctggctttcctccgtgaaggcaaacgtatccggacccaaccgagtgggagaactccagtagctgtcgtgacaagtatctgtgaggcctatgccaatatgggcatacttttcccagtgcttcatttgggtttctgctgctcccaggacaaaaagcccgccggcaaagcaatcggagtgcctcatacgatggaaaagagtgccattcctgaacgtggacacgtaggtcacgtcctcgggattgatgacaaccagattttgagccacagctagcatggcttctttgaaggtatcagcattttgagtatcagttctcccggactgaatccatgactttagcagggtatcataaagtcggtgcatggagcagttgtaattttcccacttaccaaattttgtgcaataggcattgggataaaggccattgggcctggttgttttagctaatatctcgcggatagcatccactcgctccctgtacaccggatatccagagacttcactgagatagtagaactccaggtgcagagagccaaattcagaagtgcgagagatatcacttaggtacttcgtgagggtgctgccttcttttgggaccactagtcgtctgggtataccagttggcgtgtcgaaggcaggcaggatcttatcggcaatatggatggccttgtccatgtagagggaatccccggtgagggaatatagagtgagcatgggacacagcagcctggatgtcagttcataaacggacaacgcttcatcaacccggtccaaatggaaggatttctctatccaatcccgagaacgcctcaactctttgttcagacccatcaaatgcaaagtgtccaagctctcgatgatagtggcaccaagcttgtaggttgcgaagtcgccaccaaaatggacacgacgggaaatcggacgaaactcgttggtgccccaaacaacgcgagcatagtttcgccaggcgtgcatcatcatctcctttatcttcgcccgcatatcgtcaggattcatatccttcaatgaattgtcattcgatggtatgttcttctgaaaggattctctcatcattgcacggcactgaatatatgtaatcactattacgccgactgtgaaaattccggtagctatgatccgaattctcgatttggtatttgccgtataccaattatattgcgcccgtcgaataacgaagaaaaagaagtacattctgagactaagtcagcctacgtttgacgtaaagtgagatcgaagtaagtgcaatttgctaaaacgagctgaaccgacccaagttactggacacttgattaaacatttgaattccctttgtttctactttaagtacgaatgcatgtctgaagttatctacggtttaactgtaggccaacaaaatagtttatataaatacatacttaaaattacatataagtttggatattgaatgtaactatttgaaaactactgtgtagatataatattgcgcatttgccgaatggctgttaccagtcgcggctcgcatccgctgctgagggtcagatactgatctggagcagcctttagcagcgtgaggatctgagacaactgaaggttgatggacaagcccaactcttcaagaacgttggacaggtactcgatatccacgctgagctgagtagccgccgaggaaggcaacgacttgatttgcagtatttgcgtaacgtacagaacacagcactgctctacgaccagcgagagcaggacgtcggcgcatggaatggcctgcgtatacttgatgttgcacacctcgagagcctgtttcagcagagaagatggcgacagcagcagcggctccaggtgctgcggcaaagtcagtagatactgacctatttgggtgatgctttcctgcggggcgaagctgaacgagggcatttcaatgcccgacgcagcgtgatcctgcacaggcggacgaatgtgcgccaagtgagtttcaatcggttgcagcaatatattaagagtgatgtcatgcgtatcggcaaagtgactctttaacgtggcataaatctgcggaaagatacccaggctatccgttgcctccgacttcttttgctgataatcagctatgctattcaatagctgggtgcgagccgcatggtcacaggtctggaatatggtgatggggcctcggttggatggcttagtcagcctattggacaacatgaccatgcgcgtgtgcaagtcctgttcgaactgatgcagttgaacctgaaagtcggccaggcattgcagctgagacatggtgtactgcaacagcgaccagttttcactctgagccgcatagctgctggatcccaggctgagtccaatctgacgttggatgcgcccaaagctctccagctgccgcttgaatatgccgtttagcaaggtgataagtttgcaaagagccaaatcactcgtaatagaggcacaacgttcgcaggcctctttcagccactcgtagagcttccgggtactctcctctagatgtcgcacaccatcgctgggagtggcttggttggaggaaaggcgatccacctgagatggaatatttatgaataaaattcaaaattccttagctattacatggcattacctgtgtggatagttgggtctcctccaggcgcgggtactgttggataaacttgtggaaatactcgaaaatcgcctcaccgagcaggcgatgcaattcctcggacaaggttatgtgcgattgctcaagaagggagtttaagtgcagcacaaaactgtgattaaccttggcgaacaaggccagcatctctaatctttcattggaggtcttcaaaagctgcaaaatatgggcatcccgtgtgggttgcaatgccggcaatagttcggcaataaccaggaagggctgcggggagttctcgccgaaaaggttggagcaccacttgacctggcgctggcagtgctcgagcagctgatcgtagtaaagggtaagaaactgctgctgctgaggctgggactccgtgccctgcaactccagagtttgcttccattgctgctgccaaaaatttttttgcacagctcggtaatactgctgcagctgtggcagccgctgaatgctggtgaagatctgaacgaagtgctgggcttgctccgtattgccttcagcaaagcactgtaccacgctgggggaggcaagcgcctccaagcggtttttgaagtcctccacttgggtctgtcgctcagcgtggcctggcagctgttcctgggcgtgcagggacttttgcagggctattagcttatcacagactccctgtaaagagttaattaatatgggatctcagtagtgagactgctttgctatgcacacctttagatcattgcgttcaaatccatcctctagttcagctagtaggtttccccagccatcagactcctgtagcgattccttggccacttggagcttttggcttttggtgttcaagcgctccaaggtggccatgcattcgccggtttcgctttgcactgcagctacctccaatcgcatggcactcatcttctcttgcagccggtgtacatctgcctgcagcgctgcggattccttagcgatccttggcatgctggccaccacttggcgacttgactcctccacagcattgtttacctggaaatcgataatgtttacaacagatccatggatgtgcagctccacttacgttgaatatatacagctgcaacttggccacgtaactcctgatgaaggcggaggcagcctcgctatcatcgcgaccattctcctccacaaacttcttgtagtttgcgtttatccattccgcaggactaaaagttgtctccgaaagagccgaaacatccatggtgttgatggcgttgatccaagcagtatgaccgtgtcgcgagcgtgaaaataccgggtgggtaatttgcggataatttgtttaaatgcgaaaacttttaatgctagtctctttaaatattatgcagagcagatacatgaaaatatgttcttttacgatcttagttaaacaattattttttattaaatttgaggaaacctattaaaattaaattattgcggatgtcgtgcggatgtcgaatatgctcgcggggcgttttggtatttcaggaggattgccctaacgggcacactgcaaataatacaatattttcgtaggagttttttggatttatgtaggtttatttggtttttaaaacatgtcacttggcaatgccgatccctggcacttgaaaaatactatagttaagcaaggaatctccgggtccgcgaataatagcgaaagttttgaggacaacttcacgcccttgccctctggaaacgagagcaacgtccaaaaggacgggaaaatcgagccccttccggattccagcgactatttaaagctacttggtacggggacacagtttgtcaaacgaagagcagcccactaaatagcattcatttcagagcggaagctggcccgggtgcagaagggcaacaagttgttggacaacctgcgagacaagcggcaggattgcatgcggggattgctgtcttcggagggagtgcccatttccattttcgagcagttccttgagctagacgcgcccatcgaaagcggtcgcctccatcggcacctgctgcccgttcaggccgtaaacgtgggcgaaactttccacatagtggagcacgacgctctgcagcagtcggcagaagaagctcaggaggaggagtaggaggataagccctcggttgagcattaacaaaatcacaatggaatccacgttcggtaaagtcttcatgtttctcacggacctcgcttggaaaagtcgtctcaccatccctgtcatagtcacaac

SEQ ID NO: 3242 - DNA, 3573 bp, DROSOPHILA
atggatgtttcggctctttcggagacaacttttagtcctgcggaatggataaacgcaaactacaagaagtttgtggaggagaatggtcgcgatgatagcgaggctgcctccgccttcatcaggagttacgtggccaagttgcagctgtatatattcaacgtaaacaatgctgtggaggagtcaagtcgccaagtggtggccagcatgccaaggatcgctaaggaatccgcagcgctgcaggcagatgtacaccggctgcaagagaagatgagtgccatgcgattggaggtagctgcagtgcaaagcgaaaccggcgaatgcatggccaccttggagcgcttgaacaccaaaagccaaaagctccaagtggccaaggaatcgctacaggagtctgatggctggggaaacctactagctgaactagaggatggatttgaacgcaatgatctaaagggagtctgtgataagctaatagccctgcaaaagtccctgcacgcccaggaacagctgccaggccacgctgagcgacagacccaagtggaggacttcaaaaaccgcttggaggcgcttgcctcccccagcgtggtacagtgctttgctgaaggcaatacggagcaagcccagcacttcgttcagatcttcaccagcattcagcggctgccacagctgcagcagtattaccgagctgtgcaaaaaaatttttggcagcagcaatggaagcaaactctggagttgcagggcacggagtcccagcctcagcagcagcagtttcttaccctttactacgatcagctgctcgagcactgccagcgccaggtcaagtggtgctccaaccttttcggcgagaactccccgcagcccttcctggttattgccgaactattgccggcattgcaacccacacgggatgcccatattttgcagcttttgaagacctccaatgaaagattagagatgctggccttgttcgccaaggttaatcacagttttgtgctgcacttaaactcccttcttgagcaatcgcacataaccttgtccgaggaattgcatcgcctgctcggtgaggcgattttcgagtatttccacaagtttatccaacagtacccgcgcctggaggagacccaactatccacacaggtggatcgcctttcctccaaccaagccactcccagcgatggtgtgcgacatctagaggagagtacccggaagctctacgagtggctgaaagaggcctgcgaacgttgtgcctctattacgagtgatttggctctttgcaaacttatcaccttgctaaacggcatattcaagcggcagctggagagctttgggcgcatccaacgtcagattggactcagcctgggatccagcagctatgcggctcagagtgaaaactggtcgctgttgcagtacaccatgtctcagctgcaatgcctggccgactttcaggttcaactgcatcagttcgaacaggacttgcacacgcgcatggtcatgttgtccaataggctgactaagccatccaaccgaggccccatcaccatattccagacctgtgaccatgcggctcgcacccagctattgaatagcatagctgattatcagcaaaagaagtcggaggcaacggatagcctgggtatctttccgcagatttatgccacgttaaagagtcactttgccgatacgcatgacatcactcttaatatattgctgcaaccgattgaaactcacttggcgcacattcgtccgcctgtgcaggatcacgctgcgtcgggcattgaaatgccctcgttcagcttcgccccgcaggaaagcatcacccaaataggtcagtatctactgactttgccgcagcacctggagccgctgctgctgtcgccatcttctctgctgaaacaggctctcgaggtgtgcaacatcaagtatacgcaggccattccatgcgccgacgtcctgctctcgctggtcgtagagcagtgctgtgttctgtacgttacgcaaatactgcaaatcaagtcgttgccttcctcggcggctactcagctcagcgtggatatcgagtacctgtccaacgttcttgaagagttgggcttgtccatcaaccttcagttgtctcagatcctcacgctgctaaaggctgctccagatcagtatctgaccctcagcagcggatgcgagccgcgactggatatgaatcctgacgatatgcgggcgaagataaaggagatgatgatgcacgcctggcgaaactatgctcgcgttgtttggggcaccaacgagtttcgtccgatttcccgtcgtgtccattttggtggcgacttcgcaacctacaagcttggtgccactatcatcgagagcttggacactttgcatttgatgggtctgaacaaagagttgaggcgttctcgggattggatagagaaatccttccatttggaccgggttgatgaagcgttgtccgtttatgaactgacatccaggctgctgtgtcccatgctcactctatattccctcaccggggattccctctacatggacaaggccatccatattgccgataagatcctgcctgccttcgacacgccaactggtatacccagacgactagtggtcccaaaagaaggcagcaccctcacgaagtacctaagtgatatctctcgcacttctgaatttggctctctgcacctggagttctactatctcagtgaagtctctggatatccggtgtacagggagcgagtggatgctatccgcgagatattagctaaaacaaccaggcccaatggcctttatcccaatgcctattgcacaaaatttggtaagtgggaaaattacaactgctccatgcaccgactttatgataccctgctaaagtcatggattcagtccgggagaactgatactcaaaatgctgataccttcaaagaagccatgctagctgtggctcaaaatctggttgtcatcaatcccgaggacgtgacctacgtgtccacgttcaggaatggcactcttttccatcgtatgaggcactccgattgctttgccggcgggctttttgtcctgggagcagcagaaacccaaatgaagcactgggaaaagtatgcccatattggcataggcctcacagatacttgtcacgacagctactggagttctcccactcggttgggtccggatacgtttgccttcacggaggaaagccagcaggaaatagagccgctccagaggaactattacaatttacggccggaagtcgcggaaacttacttggttctgtggcgcataacccatcatccacagtaccgcttgtggggattggagatggtgcaggcgatagagaagtactgccgaatgccctacggatatactggagtgatggacgttaacaacgttacttcggaaccggatgacgtgcaggggtccttcttcttgggctccactctgaagtatttgtatctgctcttctccgacgacgacgtggtttcgctggagcagtgggtcttcaacagtgcaggccatttcctgcccattaagggcgtgaacccaatgtatcgtcagcataactcatcgaactaa

SEQ ID NO: 3243 - protein, 1190 aa, DROSOPHILA
MDVSALSETTFSPAEWINANYKKFVEENGRDDSEAASAFIRSYVAKLQLYIFNVNNAVEESSRQVVASMPRIAKESAALQADVHRLQEKMSAMRLEVAAVQSETGECMATLERLNTKSQKLQVAKESLQESDGWGNLLAELEDGFERNDLKGVCDKLIALQKSLHAQEQLPGHAERQTQVEDFKNRLEALASPSVVQCFAEGNTEQAQHFVQIFTSIQRLPQLQQYYRAVQKNFWQQQWKQTLELQGTESQPQQQQFLTLYYDQLLEHCQRQVKWCSNLFGENSPQPFLVIAELLPALQPTRDAHILQLLKTSNERLEMLALFAKVNHSFVLHLNSLLEQSHITLSEELHRLLGEAIFEYFHKFIQQYPRLEETQLSTQVDRLSSNQATPSDGVRHLEESTRKLYEWLKEACERCASITSDLALCKLITLLNGIFKRQLESFGRIQRQIGLSLGSSSYAAQSENWSLLQYTMSQLQCLADFQVQLHQFEQDLHTRMVMLSNRLTKPSNRGPITIFQTCDHAARTQLLNSIADYQQKKSEATDSLGIFPQIYATLKSHFADTHDITLNILLQPIETHLAHIRPPVQDHAASGIEMPSFSFAPQESITQIGQYLLTLPQHLEPLLLSPSSLLKQALEVCNIKYTQAIPCADVLLSLVVEQCCVLYVTQILQIKSLPSSAATQLSVDIEYLSNVLEELGLSINLQLSQILTLLKAAPDQYLTLSSGCEPRLDMNPDDMRAKIKEMMMHAWRNYARVVWGTNEFRPISRRVHFGGDFATYKLGATIIESLDTLHLMGLNKELRRSRDWIEKSFHLDRVDEALSVYELTSRLLCPMLTLYSLTGDSLYMDKAIHIADKILPAFDTPTGIPRRLVVPKEGSTLTKYLSDISRTSEFGSLHLEFYYLSEVSGYPVYRERVDAIREILAKTTRPNGLYPNAYCTKFGKWENYNCSMHRLYDTLLKSWIQSGRTDTQNADTFKEAMLAVAQNLVVINPEDVTYVSTFRNGTLFHRMRHSDCFAGGLFVLGAAETQMKHWEKYAHIGIGLTDTCHDSYWSSPTRLGPDTFAFTEESQQEIEPLQRNYYNLRPEVAETYLVLWRITHHPQYRLWGLEMVQAIEKYCRMPYGYTGVMDVNNVTSEPDDVQGSFFLGSTLKYLYLLFSDDDVVSLEQWVFNSAGHFLPIKGVNPMYRQHNSSN

SEQ ID NO: 3244 - DNA, 2817 bp, DROSOPHILA
aaagttggaaaaaatcgggcttattctattatgattattctatgacgtttttacgcaaccaacttgtgtatataaatcacttttcatgaattatctaacatacgtctatgaattcagccagagttcgtgaattggcgattgtacaatttatttgacagcgccatccgataaaggaaaaggaattagatacgtcttcaattttctgaattggttttcccttgaccggtgtcaattcgaaaataatcttttctatttgctttggtgacttttgagctttttattgtaaaagattcattgaaatatatgtaacaggtagaaaggagcttttccgactcttctaaatcgatcaggccaagtccgtctgtccggccgtataaacgcctcgttatattgacgctccactctaacgcccacatccgctcagaactgccacgcccacatttttgaattaatatattattttttttgtcaatgtttataggtattctaaacatacctataaacaaacctataaacatacctataacaaaacatattgaagccttctaattaagcgtaaaaattgtattaatcaccaaacattacgaaaaaatgcacaaaaattgtctgcagcaatgattctgagctattaaatatgagatataaaatctatctgtttcacacattaacctattattgctatatgatacattccccctttacagtgcgatatttggaatatgttttattgatgactatgtattcaaaactggtcaaagaaagtactttccttagatttgaccacaagttaggccaacgagccacaaaacaattagtaatgacataattttcaatcgccatgactcctcgattagatttattcacattgaagcacctataaaataaatctcacgcgattagatacggataagatagtgtctgctggaaatcagaaggctaaattaccgggtgtccgaatataagaggcagtcgccaagttgggcattgcccatttggaaaaatgacattcggcaaagtagcgattttgctctgcagctttctgctgttcttggtgctgcccgtacagtcggcgcctggtaaactgaacggtcgagtggtgggcggtgaggatgcggtgaaaaatcagtttccccaccaggtctccctgaggaacgccggttcccacagctgtggaggttcaattctgaccagaacctacatcttaaccgccgcccattgtgtctccaacgaggacgtgaatcatgtgattacgccaatcgctgcggagcgtttcaccattcgagcgggctcaaacgatcgattcagcggtggagtccttgtccaggtggccgaggtaattgtccacgaggagtatggtaacttccttaacgacgttgctctgctgcgactagagagcccactgattctgtccgcgagcattcagcccatcgatctacccactgtggatacgccagcggatgtagatgtcgtaatttccggatggggaaggatcaaacaccagggagacttgccacgctatctgcagtacaacaccctaaagtcgataaccaggcagcagtgtgaggagctgatcgatttcggatttgagggcgagctgtgcctgctccaccaggtggacaatggtgcttgcaatggcgattccggtggcccggccgtatataacaaccaactggtgggcgtggccggattcgtcgtggacggatgtgggtccacctacccggacggatatgccagggtcttttactttaaggactggatcaaaaagcactctgatgtctaagaatgtcaagcacgcaaatgaatttaacctagaatataaaccaattttttttgtataaatttaaaaatgtataaataaaaaattgttttatttatgataaaggaagtgttaaaggtttggtattttttttaaatgttccgtaaatcactagcgttgaaattaaaaatgattggcgttttgtttgcacttgagagataagcaatctcgggaaatcaggcgtgtaagtgtttcgatctatacaataaattaatgttcaggctagattaatcatgataaataatacaagggctggcagtaccacttcaacctccgaagagataagtcgtgcctttcagtctaaagcctcgctttcgcgtaagcccaaaactcttatcagcaaaatcttgataaacaaatatcaaccacaaagagaaaataaaaaacttaacaacaaaaacaacaataccggctaatccgggctcaagcccttaaccaacaatcatgacagacccaccaaacatttacaaaatcacttcaaaaacataccaatcccaattaggcgaacctaaatttataattattaaaagaaatgacaacaactctttcgaaagaacttcaccattcatcataaaaaaatcggtggactttgcctgtggaggagaagttgagggatgcaaacgtacaagagacggcaacctgctaataaaaaccaaaaatgaatttacaagccagaaaactcctaaaactaacaaaaattgcagatgaggatgtaacagcaagtgaacataaaacattaaacttctctaagggagttatttactgtaaccgaccttagacacatcgacgaagacacaattctacaagaactaaaaccacaaaaagtatctgaagttaaaaaaataatgaaacggcaaaaccccaactctaactccgacaccaacaacatcacattagttgaaactggactcataattataacctttgaatcgcataagctccccgagatagtacgaatcgggtacgaaacagtccgagtacgagactatatcccactccca

SEQ ID NO: 3245 - DNA, 817 bp, DROSOPHILA
atgacattcggcaaagtagcgattttgctctgcagctttctgctgttcttggtgctgcccgtacagtcggcgcctggtaaactgaacggtcgagtggtgggcggtgaggatgcggtgaaaaatcagtttccccaccaggtctccctgaggaacgccggttcccacagctgtggaggttcaattctgaccagaacctacatcttaaccgccgcccattgtgtctccaacgaggacgtgaatcatgtgattacgccaatcgctgcggagcgtttcaccattcgagcgggctcaaacgatcgattcagcggtggagtccttgtccaggtggccgaggtaattgtccacgaggagtatggtaacttccttaacgacgttgctctgctgcgactagagagcccactgattctgtccgcgagcattcagcccatcgatctacccactgtggatacgccagcggatgtagatgtcgtaatttccggatggggaaggatcaaacaccagggagacttgccacgctatctgcagtacaacaccctaaagtcgataaccaggcagcagtgtgaggagctgatcgatttcggatttgagggcgagctgtgcctgctccaccaggtggacaatggtgcttgcaatggcgattccggtggcccggccgtatataacaaccaactggtgggcgtggccggattcgtcgtggacggatgtgggtccacctacccggacggatatgccagggtcttttactttaaggactggatcaaaaagcactctgatgtctaagaatgtcaagcacgcaaatgaatttaacctagaatat

SEQ ID NO: 3246 - protein, 259 aa, DROSOPHILA
MTFGKVAILLCSFLLFLVLPVQSAPGKLNGRVVGGEDAVKNQFPHQVSLRNAGSHSCGGSILTRTYILTAAHCVSNEDVNHVITPIAAERFTIRAGSNDRFSGGVLVQVAEVIVHEEYGNFLNDVALLRLESPLILSASIQPIDLPTVDTPADVDVVISGWGRIKHQGDLPRYLQYNTLKSITRQQCEELIDFGFEGELCLLHQVDNGACNGDSGGPAVYNNQLVGVAGFVVDGCGSTYPDGYARVFYFKDWIKKHSDV

SEQ ID NO: 3247 - DNA, 3197 bp, DROSOPHILA
cacacacacacacgaaacacccactcaatgtcaacaatcacactcacaaacacatcgaatcgaatcgaggaatattatcacagccattttagccttagcacaccaaagttttacccaccattcctgtttgatgtatttagcatcaagatatgatctcctgcaaacggaaactaacacacaaacacaacaacaacacactgaagcacgcggattgtgttcatttatcaatgatttccactttgactatataattttaagtgctatgtgatttcccttgatttatatatgtatttgtacacacttatttaatcctaataagtaaggacactccacacacacacccaacaagaaacaacaaatacatatatataaaatacgtacgtatacacacacgcacacacagaacttatgagaagcgaattggaaattttcaaaaaaaaaaaattgaggaaaatccatttgccgtcaatttttgtatgcagcatacgaaatcatacgaaatctatcagcttcttcatggcatttttttcgtgtctgtgtatgtatattttttaaacaaaaaccaaatggaaaaagacgaacgtaactggaaatccaaaaaaaaaaaaacactaacgattacacgccgaacaagaatgataaattaaattacattttaaatgtacatacaccactataaattgaaacttttctaagggggttaaatcgagggcatttcgtgcactaaaggtgcttaagaaatttattatattctgaaaaatcatcaagttcagaacgcttatatcaaaaaaaaaaatatatatattgctatcccgctcttttcggtgaagattcttgaagatctgcgtagatcgttgaagaatgtcttctcgagttctgaagtgaaattaatttgaattcccgttcccaagaaaaacaaagcgttcactttccaatttagctaaagtcgatctacgcgattgacttctttgtacatttggttaaaatatcaaaatttggtctactcagttctattcaggaactcgctgactattgttagaaactcctgcggcttttcaaagtgcactaaatgtccggcatccagccagtggatctcagaattgggaaacattttctgtatctgtggccattgctcgcgtctaataaagatggcaaaaagattcaattagtttagtttacttagcacctcgggatccaagttacctcatgtaaggtgatcgcgtgccgcaaatgaacgtagtgggtcccgtgtacggcggcagttcctccaaattactctgatatttgtcgaagcgggtgaggaattcacgaagaacatgggcattgcaggcccaagagaaactataggaagattatctcattttaaagcggttcccaaaaaaggccaaatacatatgtggcaaacttacgcgccggtgtcaggattttttcggagattcagcatgataaagtcaacggtctcgtcttcggtggctttcagtagtttttcccgtgcaattttcctgccctcagacatggacatgcttggcgaaaggtccagggagaccatcgcgtcgaaaatttccgtcatctcgcccgtggaacggggcacgctaattggcgatatgtccaccactatcaaacgttccaccaactcgggctatgataatggaaaaatgattgtttaacatttaactcagtttgtgcataaggcgcaacacttacatattttcgagcgaagtacatcatggacctgccgcccatgctgtgacccatgcaggcggcattcggatgactgcgctgctccataaacaaacgcaaatcctcgctcatcgctttggaattgtggacactcgaatgtggactctcgccatgattcctcacatcgatggcgtacacctgtaggttaaaataaatacacattggcttgagcattgatactttggctaaacgcataaattggtaagctcacctttcgggaaacttttcgcaccagagccttgctaattcctcgccaattttgcttggaaccaaagagtccatgatatgtgagcagtggtggactcgtctctggattctcgccggtgtacgaatcgaagcttagttcaacgggatccggtatttccgaggagtactcccttctgaccaccaattgggttcgcaggatctttcccgcgggaaatggaagtgaacgtaacgatttcgtcaggcgctgcatttggtggccccagtgtgtacacacgccaccggcgggaaaactaattgggcagtggtatgttgccgccgaggggggttcgttgctttgctaaagttgcgtaattattgttaatttgcagcaatttcgataaatttcaacattttgccaattgtgtacggagtccagctgaccggtgttttatttttcgacaacatgtagtttggcaattgtcaagggcgtagatgaaaaaactaattatacaaattttaagtcatgaatataaatatacaatattttttgtagtcgttgaaaatggtttggttataaatagattagaaacacgtttttcttataaatttatctttgacaattaaccgttatcatactctgtaattttttgcatacacctaagccattttatcataaataagcacataaaatatgtgcaagtatttaccaaatattaatggggctcttaaccccttacgaccccttccaaacgatggctctgttgacaaagtggcaacactggcgcgcaaatatctcgatgctagccatggcatgaaccattttggatatttacttagtcatgtctgtgcgtcagccacataagctaagataacatcaccgactaggcacgcacgcttttcgccgtatttccgggcacgccatgcacagtcacactggcagctgccatattctttaggcaaacgttttctgtcggaaacagttttttcattaacacaaaaaaaggcatccagagcatttgctgtagcacaaaaacatcgaatttccaacgctaccaggtaaaccagtcgccgccgagccgccggaaaaacgggctttccagttcgtctttagcggtaaaaagattgaaggaggaaagcgcggcgctgacgtcggcagcggtagaggcagcgcagcggcgctcttgctcgcattcacactactcaaacataggtaagcagcaacaagaaatcaagcatattgtcaaaatcagagcaacaaattgatatatttt

SEQ ID NO: 3248 - DNA, 927 bp, DROSOPHILA
atgcagcgcctgacgaaatcgttacgttcacttccatttcccgcgggaaagatcctgcgaacccaattggtggtcagaagggagtactcctcggaaataccggatcccgttgaactaagcttcgattcgtacaccggcgagaatccagagacgagtccaccactgctcacatatcatggactctttggttccaagcaaaattggcgaggaattagcaaggctctggtgcgaaaagtttcccgaaaggtgtacgccatcgatgtgaggaatcatggcgagagtccacattcgagtgtccacaattccaaagcgatgagcgaggatttgcgtttgtttatggagcagcgcagtcatccgaatgccgcctgcatgggtcacagcatgggcggcaggtccatgatgtacttcgctcgaaaatatcccgagttggtggaacgtttgatagtggtggacatatcgccaattagcgtgccccgttccacgggcgagatgacggaaattttcgacgcgatggtctccctggacctttcgccaagcatgtccatgtctgagggcaggaaaattgcacgggaaaaactactgaaagccaccgaagacgagaccgttgactttatcatgctgaatctccgaaaaaatcctgacaccggcgctttctcttgggcctgcaatgcccatgttcttcgtgaattcctcacccgcttcgacaaatatcagagtaatttggaggaactgccgccgtacacgggacccactacgttcatttgcggcacgcgatcaccttacatgagacgcgagcaatggccacagatacagaaaatgtttcccaattctgagatccactggctggatgccggacatttagtgcactttgaaaagccgcaggagtttctaacaatagtcagcgagttcctgaatagaactgagtag

SEQ ID NO: 3249 - protein, 308 aa, DROSOPHILA
MQRLTKSLRSLPFPAGKILRTQLVVRREYSSEIPDPVELSFDSYTGENPETSPPLLTYHGLFGSKQNWRGISKALVRKVSRKVYAIDVRNHGESPHSSVHNSKAMSEDLRLFMEQRSHPNAACMGHSMGGRSMMYFARKYPELVERLIVVDISPISVPRSTGEMTEIFDAMVSLDLSPSMSMSEGRKIAREKLLKATEDETVDFIMLNLRKNPDTGAFSWACNAHVLREFLTRFDKYQSNLEELPPYTGPTTFICGTRSPYMRREQWPQIQKMFPNSEIHWLDAGHLVHFEKPQEFLTIVSEFLNRTE

SEQ ID NO: 3250 - DNA, 3522 bp, DROSOPHILA
catttcccaaagtgattgcagccgcacctggtctctccacgacaacatgatctgcatcaacactgacggaggcaagtccacctgcggaggcgactctggtggccccctggttacacacgacggcaaccgcctggtcggagtgacttccttcggatccgccgctggctgccagtctggtgctcccgccgtcttcagccgcgtcaccggatacctggactggatccgcgacaacaccggcatctcctactaagcagttgatgttccttaattctgaggggtttcttcaataaacgattatagcaagcaactcaagttctgtttttgggatgggattcagatgtcttcttgcttaagtaatgaaatcaataaaatatttccaagtgaagggaaatatattaaactgcaaacggaaataaacttattccgatttccgatttatgtatcggaaaaaatcaagctttaggaacacataatgacgaaccatcggactatatgcaaatatatatatatggatcatacgtcttattattatgtattattattatgtattgtttataattattatgtatattatgtatataaaaagcaaactggattgaaaatggtgtatgtagaatattggacttgttatatttgcaacataattaaagtgcataaacataatataaatttatgttattataaatagctgcaagtggactttcctagcttaaacagttttaaatataggaataccctatagtcgctactagcgttcaacagctatcatatggatagaatataaaaataggatataaaaataagttaaacaatctcgttttaaaaacatttaaggaaaatatgagattacttttagttttataatatatgtacatttaatgtacataatagaatatataaatatttagctctcaataatgtgcccctcaatctacaactgaataaatagtttggtcgaatttttcatttttgctataatcgtttattgaacatcaactgcttagtaggagatgccggtgttgtcgcggatccagtccaggtatccggtgacgcggctgaagacggcgggagcaccagactggcagccagcggcggatccgaaggaggtcactccgaccaggcggttgccgtcgtgtgtaaccagggggccaccagagtcgcctccgcaggtggacttgcctccgtcagtgttgatgcagatcatgttgtcgtggagagaccaggtgcggctgcaatcactttgggaaatgatctggacatcgacggactggagccagtcgggcagtgggctgccatcgtaggtgccgccccatccggaggccacggcccaccatccggcgtagtcctggtagcggtcgttgtagctgggcagctcaaccttgttgaccaggctccagaagtcgacgtgcggggtacggatcagggagatgtcgttgtgcaggttgccgctgttgtagtggtggtgctggatgatgtcgccactgcccacccagtgggtgtactggggctgggtgcggatgctggctccgtagttgatggtcactccactggctccgttggtgcagtgggcggcggtcaggacccaggtgttgccgatgatcgagccaccgcaccaccagtttccgttgccgctgaagagcagacccacgatgtagggcaccttgccctcgtaggctgggtagccgttggtgatgcgaccctgaatgtccttgatgggcgtcggggtcagcttctgggcgggagcgggcacagcagtagctgcggccacggccaaggccaggaatacgaacagtttcatcttggtcaagtcttgcaactcaatggtgttccgatgtcgaagcgcctttatatacagaagtggtccgtagtcttatctcgaccaagagcccttccttccacacgtatgtaaaatgggagggcagtaaattttaatcaagttatcatcgcgagccatcgtcgactgataagtccactacaggtgattttttttttttgtaaattatggcctaaatttgaagtggaatgacatgtgccttatttgcaacttactcttcagtatgatagtatcatgtaaggacattcacttcacctaaaatatattatatactcagattacccaaatgaggagtaaagtattttatgatctttaagaaatttaaattctgaataatgtttattgaaagtatttactaccaatttcaaaaaaaagtgtgataaaatattactcatacggcacattgtacagtttttgttctcaacaagttgatttttagattatcaaaaaataaaacactaataggttaatattacataggtaatgtattaaatggtatgtattatgtaatatgtaatgtattgattatgtattattggtaattttatctctaaacatgaatatgccactatcttccaagaaattaataatacacaaaatataacagcatatgttcttcatttatttaaaacttgtttaagcacctttttgctttgaaattagtaaagtttttttttaataatagattccagtctcctcctttatccattccaggtacttggtgaccctagtgaagccagccggtcctccaacctggcatccgtaagcggagacgaaggaagtgattccgataagcttatcaccctcctttgtgaccagaggaccaccagaatcaccctggcaggtggcctttccgtccggagtttccacacagatggtgttctcggaggcggtatcagttccgtagtaagcctggcactccgccacggagatcactttcagatccaccactcgcagatcctccaccacattgctgccatcgtaaatggcaccccatccggcggcctgaacccaattgttttcgtaagagttgtatcggtcatccaggctgggaagctctattttgttgaccaggctgtagaagtccacatggggagtcttgatcagggccaaatcatgatcgagtccaacgtagtggggatatctgatgaagttctcgctgctcactgtgtggcggaaggcaggttcgttgtagttgacggcaccatagtacagtgaagcctcatcagcactgcaatacgatgatttatcaaagagcgttaattatttgtgaaatcaaataactcacccagcggtacagtgggcagcagtgagcacccaagtgtgtccgattatggatccgccgcaccaccaccagtttccgttgctgttcaagctcacacccacgatgtagggaacctgaccctcggacgccaggtttccgttggtaatacgaccctcaatccctccatgacgaatctccagatcgcgtggatggaccagcgaatggggcacagttagggcactacagaccccaaggaaggcgagcgacaagagtgtaagacccctcatattgaaagactaaaaggctcccatggtggtcccaatactatatagcttagccataatcactatcgatgctaattcaaagtgcgaaatcttatctcgcagcacttttatcaacgaaaaagtttgatttatactagcag

SEQ ID NO: 3251 - DNA, 843 bp, DROSOPHILA
aatctattattaaaaaaaaaaaaatcacctgtagacttgaccaagatgaaactgttcgtattcctggccttggccgtggccgcagctactgctgtgcccgctcccgcccagaagctgaccccgacgcccatcaaggacattcagggtcgcatcaccaacggctacccagcctacgagggcaaggtgccctacatcgtgggtctgctcttcagcggcaacggaaactggtggtgcggtggctcgatcatcggcaacacctgggtcctgaccgccgcccactgcaccaacggagccagtggagtgaccatcaactacggagccagcatccgcacccagccccagtacacccactgggtgggcagtggcgacatcatccagcaccaccactacaacagcggcaacctgcacaacgacatctccctgatccgtaccccgcacgtcgacttctggagcctggtcaacaaggttgagctgcccagctacaacgaccgctaccaggactacgccggatggtgggccgtggcctccggatggggcggcacctacgatggcagcccactgcccgactggctccagtccgtcgatgtccagatcatttcccaaagtgattgcagccgcacctggtctctccacgacaacatgatctgcatcaacactgacggaggcaagtccacctgcggaggcgactctggtggccccctggttacacacgacggcaaccgcctggtcggagtgacctccttcggatccgccgctggctgccagtctggtgctcccgccgtcttcagccgcgtcaccggatacctggactggatccgcgacaacaccggcatctcctactaa

SEQ ID NO: 3252 - protein, 265 aa, DROSOPHILA
MKLFVFLALAVAAATAVPAPAQKLTPTPIKDIQGRITNGYPAYEGKVPYIVGLLFSGNGNWWCGGSIIGNTWVLTAAHCTNGASGVTINYGASIRTQPQYTHWVGSGDIIQHHHYNSGNLHNDISLIRTPHVDFWSLVNKVELPSYNDRYQDYAGWWAVASGWGGTYDGSPLPDWLQSVDVQIISQSDCSRTWSLHDNMICINTDGGKSTCGGDSGGPLVTHDGNRLVGVTSFGSAAGCQSGAPAVFSRVTGYLDWIRDNTGISY

SEQ ID NO: 3253 - DNA, 4458 bp, DROSOPHILA
tcccagccatgggtgagtaagatcatatacatcggacttggatatcagagtttgactgctaagtataaactgcgcaaaagctgcattgttaccatcctcgccttagcgttattaacatgtcacactcacctccatgtatttgggattagtgaccataatattggagtagtaacctatccaataacgaaagttatccttgccgtactcatgccaccagccaaaaaaccggttcaaaatctctggagagcaaagttaaaacatatcattacttgctctacaattagatagaagccatagtctttaatacagcaaaaaacgacggatgaattccctgacgaagatttgttaagttaatcccattgatcggtactgcagtgacctttagtatatttagtctcagtgttatcattcgtacacaactgttatgtgatcagtcacacctatcgagcgatgttatctagaggggactttgatcccacacattgagattgtctagatggagcacctacctgtgggagtgtttcccatctgatgagcattgcccaccaaaggcagcatacttgggccttggaatttgttcagcattcgctttcgccgcagtagtccaagctcgaaataggtcaccaagaacagtggaagggcaagaaaagcgcacagtacgatccacattttgaatgcgaccacagacaaccgatcggtgcagcgagtaaatcggatttgagtagaaacctcaagactctctgcgtcagtacttcaaccggttgcggcagacagttctcagtctctcgcgcttggatatacatccacacataagaagcagcctatgactatctcccaaattttaaactaatatatgggcactcagcatgaccttctatatgctgcgactaagtttcttgatgaacatttctcttgaaaatggcttacacgtgtggaaactataatttcaaattttttaagctaattaacatagtctcaatggttcaaagattaaaacgagttgatttgtttcaaaagttttatgtgttgtatgagacaaagtgattaacagcttcctaataattgtatctgtggggacggcatacctaaaaaaacacaggtatgcaaaattaaagcaccaaacttaacagagatcaataaattgacattttagtgcctttccttcagccgaatgtatagaccattttcggatttcagggtcagcacagcggaaagaatagggtcgtatttgtgacggtatggatcgcgcttcttcctctcggcatcagggagtccaatagtggtgcttatatagccatccttagagacgagctcatccagagcaggaagcacctcgaagttcctaatgatcttggataccacagtcttaatctccagcagggcgaacttctgaccaatgcagtttcggggtccagcgctgaagggtacatactcaaaaggtcctggtttctccagctcaaagcgctcaggtcggaacttgtggggatctttgaacaccttttcgttataacccagcatcacgagacccaggttcagtgtggtgcccttgggtacgagatccccatctataagcaagtatggtactgttatgtaaagctctttaaattgctttaattaatggttacctataacatagtctttctccgtaaatcgtccaatgaaaggcacgctgggataaacacgctgggcctccttgataaagagatccaagtacttcatttgggatatttcctggaaggtggcatcgcgacccagttcggaattacccattacttcgcgttgctccttaaatagtttgcgctataatagcaagggaagttagtcatttaaagatttggcgtctcaagcaatgtactgaacctgttcatcttgatgtctagaaagcaaatagacagcgaacgacactccagaagtggtagtatcatgtccttcaaacataaatgtggagacctcttcgtacagttccttggagttcaggggacgaccatcaatagtggaggacagcagagtgtctaaaaaggccattttcttgcgagtgaactcatctcccgcgttggtcgaaactgcacccgatttgtgggcttcaatgcgcttagcgatgatctcgttggtaaagtcctgcagtgtttttagagtcctgctataggccgggtagtccggagccaaacgatacagcagttcattgcgcttcagcgggtggaaggctctcatgttgatgttgtagcacatgctgaaaaggatcaagagtcatgcaatctgatagttcgactacgaggtacgaaactaactctttgaaggcctgcacaatggaagagctgcggttttccatggcattgatggacacacccatcgctgtgtcgcaaatgacatccagggtcaaatagtgggcctgttcttggaagtcgaatatattgtccccggcagcaactgtctttaagtgcttgataaacttggtggagttctcgttcatcacctcgtggaagtcctgcaggatgttgaagtggaatgctggggtgatcatcttgcggtgtttatgccatttgctgccagtactggtgaggagacctaatcccagccaagggtgtgttagttgataaatgtcggactttgtgatcagcgtctgactgctgagtatgaactgaagaagtacgaaaataatagagtcacatgattacatgattggtggaaattcgctgtaactcacttcaaggtacttggagctggtgaccaatacattagaatacgttccaatccaaaagacgaagttgtcttttccatactgatgccaccaggagaaaaccgtgtcgagtatttctatatagacgtgagaaaatgccattagtaggcggatcgcgtaccaatatcggtattccgtagataatcattgcttgtttttggcacgcgattttcagtattcattagtgcagtataatacatacatacatacatcgtatattacacaacacaaatcaaagcctcgtcattatttttgcgatactcgacctaggctacgattagcccatttctacaagtgccagtagccccattatctgatagttaacacccttgttttccggtcgtaaagtcgctggcccaaaataaccttacttgaatagcctcgccgctgagtagattcgatgcgcagttacctcagtcacaacgctattcgagatgggtaatttcaggtgtgtcctctgcgtggctaacgctacgacttttccggctcctatgaaaaacccacctgacggattcttgcccatttgatgagcgtttcccatcagcggcaggccgcgggggccgttgaacttgttaagcactcttctccggcggaatgtgctcaactccagatatgcaaccagcagcagtggtagggccagaaaaatatacaacacgaaccacattttcgatcgcgagttccacgacaaccgtccagcccgcgaatcactggaaatatgagagcttatttgggccggcgggcggtttaaatacgagagataccaatatcagccagctccccagtcgcttgctcccttatctgccgttttcctaatccaactgtagtctcccgaatataagtatatattttggtgctttcagcatgacttgccgaatcaatatcaggttttttaagatgagccccctgattaatcgttagatgagatggagaaccaatagttttcgagactgcgcttaaatgtgtaacagttaactttttttaaaactgtatccagtatatattgttttatggcagcaaaaaatggaataaaacaaaacgttgataaacattcgctcacaacaagaaagagaaatcgggagaattgatgaacacattatgtttgcaaaatgtttttaagattactcttacagaaattgaagagaagagagagaaagtcgcttgctcttcttagcttatcagcagcaagacttaaatttggtagaaatcacagacgtaaggtaaaatccactgcaaatttaaatttacatttacatttaagaaatgatatcagcacagtgtgcgtttatttttcgattattctgttccgctccgtcacgttttgagttacatatgtaaatagaagcaatctttttggaagagttttatagagatagttttagaactgagagacgcacatggctatatcgatataatatcagtcaataaaacatgatactgatcaagaatatatatactttatattctcgctgcaaaattcgaacttaagccaaacacgaaaaacgttttaaaagaaatccaattttttacattgtctctgcatcatgacttgtagtatgataaaagcattataaaagcatatgggaaatgcattctttcgtaaaaatatgctttcggaaacgagttaatttgtgaatttacatcaaaatgaatagctttgaagataaatctagtggaagagaagaaaatgttaaaaagcggcattattctgttcgttgttcttc

SEQ ID NO: 3254 - DNA, 1787 bp, DROSOPHILA
tctcatatttccagtgattcgcgggctggacggttgtcgtggaactcgcgatcgaaaatgtggttcgtgttgtatatttttctggccctaccactgctgctggttgcatatctggagttgagcacattccgccggagaagagtgcttaacaagttcaacggcccccgcggcctgccgctgatgggaaacgctcatcaaatgggcaagaatccgtcagaaatactcgacacggttttctcctggtggcatcagtatggaaaagacaacttcgtcttttggattggaacgtattctaatgtattggtcaccagctccaagtaccttgaattcatactcagcagtcagacgctgatcacaaagtccgacatttatcaactaacacacccttggctgggattaggtctcctcaccagtactggcagcaaatggcataaacaccgcaagatgatcaccccagcattccacttcaacatcctgcaggacttccacgaggtgatgaacgagaactccaccaagtttatcaagcacttaaagacagttgctgccggggacaatatattcgacttccaagaacaggcccactatttgaccctggatgtcatttgcgacacagcgatgggtgtgtccatcaatgccatggaaaaccgcagctcttccattgtgcaggccttcaaagacatgtgctacaacatcaacatgagagccttccacccgctgaagcgcaatgaactgctgtatcgtttggctccggactacccggcctatagcaggactctaaaaacactgcaggactttaccaacgagatcatcgctaagcgcattgaagcccacaaatcgggtgcagtttcgaccaacgcgggagatgagttcactcgcaagaaaatggcctttttagacactctgctgtcctccactattgatggtcgtcccctgaactccaaggaactgtacgaagaggtctccacatttatgtttgaaggacatgatactaccacttctggagtgtcgttcgctgtctatttgctttctagacatcaagatgaacagcgcaaactatttaaggagcaacgcgaagtaatgggtaattccgaactgggtcgcgatgccaccttccaggaaatatcccaaatgaagtacttggatctctttatcaaggaggcccagcgtgtttatcccagcgtgcctttcattggacgatttacggagaaagactatgttatagatggggatctcgtacccaagggcaccacactgaacctgggtctcgtgatgctgggttataacgaaaaggtgttcaaagatccccacaagttccgacctgagcgctttgagctggagaaaccaggaccttttgagtatgtacccttcagcgctggaccccgaaactgcattggtcagaagttcgccctgctggagattaagactgtggtatccaagatcattaggaacttcgaggtgcttcctgctctggatgagctcgtctctaaggatggctatataagcaccactattggactccctgatgccgagaggaagaagcgcgatccataccgtcacaaatacgaccctattctttccgctgtgctgaccctgaaatccgaaaatggtctatacattcggctgaaggaaaggcactaaaatgtcaatttattgatctctgttaagtttggtgctttaattttgcatacctgtgtttttttaggtatgccgtccccacagatacaattattaggaagctgttaatcactttgtctcatacaacacataaaacttttgaaacaaatcaa

SEQ ID NO: 3255 - protein, 526 aa, DROSOPHILA
MWFVLYIFLALPLLLVAYLELSTFRRRRVLNKFNGPRGLPLMGNAHQMGKNPSEILDTVFSWWHQYGKDNFVFWIGTYSNVLVTSSKYLEFILSSQTLITKSDIYQLTHPWLGLGLLTSTGSKWHKHRKMITPAFHFNILQDFHEVMNENSTKFIKHLKTVAAGDNIFDFQEQAHYLTLDVICDTAMGVSINAMENRSSSIVQAFKDMCYNINMRAFHPLKRNELLYRLAPDYPAYSRTLKTLQDFTNEIIAKRIEAHKSGAVSTNAGDEFTRKKMAFLDTLLSSTIDGRPLNSKELYEEVSTFMFEGHDTTTSGVSFAVYLLSRHQDEQRKLFKEQREVMGNSELGRDATFQEISQMKYLDLFIKEAQRVYPSVPFIGRFTEKDYVIDGDLVPKGTTLNLGLVMLGYNEKVFKDPHKFRPERFELEKPGPFEYVPFSAGPRNCIGQKFALLEIKTVVSKIIRNFEVLPALDELVSKDGYISTTIGLPDAERKKRDPYRHKYDPILSAVLTLKSENGLYIRLKERH

SEQ ID NO: 3256 - DNA, 3097 bp, DROSOPHILA
cgatgttcgtcccttgatctttgtccgcccaacctgttcagccggcaaagacatcagtagctgcgacctgtgcagatggccactgctactgctcccgtccaaatcaccagcgtgatcctctttgcgctcctgcgatccgctggcctgttccttgaaattatcctcggaggaggactcgctgcacggcgcaaagttatccgatggcttcatgatccacttagcctcgtctaggcgccgcgatatgggtatccttgcagaagtcggtggagctggccttcgacgcaacgtggatgtggcagtggtttgcataacaccccttgcaggaacaccaccaccagttgctctcttgggcactgccttgccagcttctgctgtcaccgcagttgcaggacttgctcgattcggtggtctcttgggcacagctccagctgctgatggtccactagcaccattcgatggtcttggattcgatttgactggcggctgtgatgcactcgttcctcctcctagtcttgaagctcctgctgcacctggtacatctgcgtcctttgtgggctttggatttctttggcttggtggtttcgatggagcaccacgtgctgttggctcgccaccttttgcggcgacaccagttcctgttttggtctggagcgccttgtttcgatttactggataacggcggcctccgcccaagaattttgacatttccgtagacattgcgtttacgccgaaagttttgtaataggtctcttggtcgaacgggaatttcaattgatctcaaaatttagtttttgtactttttctcaatggttgaaaacgattttgttgaatttttatgcaataatttaacataatgattggtaaagagaataaataggaatgacatttagtagagttacatagctactttgatgtgaaaaaaaaaaaatatgttcgaattgtccaagttaagtcatggctatgttttcaatctggatatcaaactttcgataaacccatcaacaaatccaaatttgtagtttctcggcgagattgtgggagatgtgctgtgcaccgatgtgtgggccctcggtctgcgggccttcgatgtgcaacccgcccgcttgtcgtgtgccactggagccactgcatccgtcaacagtctaccactgctgtccgtccacgaagtgcacgctgtgctgtaataacgaatcaaaacacgagtgccactgcacctgccagcgcaacaagcacatcgtggaggcgttcagctgcctgttccgggttagcaagttccagatcctgaccaccctctttctactggcctatcatgagagcagaccgctgccgcgctttccgcgcgatcgcaactggtcggtgatggagaacgtgaaggcaccgtactcggagttgcacgacctgaggatctacgacagcctgttcgatcgctgtggcaaccgcatcgatccgctcgaccaaaagaacacgtacaagctgttgcgcctgatctttctcggtccagtgctggtgcccgatcagcaggcacagctactggccatgctgtacacgctaaatgcccatgccgtctgtcccgtggatctcaatggcctgctatcggtactgcagtatgtgaagctggatgagctggtgtgcggcatcttggagcaggacggacgagcgaaacgtttccacagcgggcggcagtgcttggagctgtgcaatctctaccagaaagtggtcgccacggacaaggatgcggttattaaaaagcatcgccgtcgcaaggagaagtccaagagcaaggattcggaggcacagaagaagccgcgtagaaccatcaccgcgcagatatactgcacgcgtcgcgttccggagcccgaggatgttagctcacggatcgagactatcactccaatcgtacgcagtacagccacctcgttgcgtcgctcctccaacaagaaaagctggatgccggtcaatcggagcagcattaataactcggagaagggatctcgccggggttcgcgcaatctcgcgggttcaccgaagagaaacaagccggaagtgtccaatgtgggagtgcgaatgcagggcggcgaccgccaaagaacgaagtgaagccacagtgatttataagtctcccccatctgtttttaatctcggtccatctacatttactaaattccgtaatgcaaatggtttttcttctcatctactatgatttattgatcacaaattagtggtatactgatacatagaatcctgtacatccggacatatcatgtccatgtccatgtcagttatattctgcgcttacaccgcggactaggcagatactccccgagcacttgctcctcgaggagacctgtgtaggtgggcgggatgaccatggtatcttccgagggcctgcgcagttgtccgtgcctccagtccaggctgtcatctgcgtccgcatcatcgtcactggaggattgtatggtatcggaatcattgtcacccgactgctgcatatttctggatgggatttcggaagaggcgcgttttgctctcaagctctcgaaaaatatggcaagtggcgagagattggacattttcttcggttcattagctaaaggagaagctcctgcgacttgccgtcctccaccttccatcctgaacgacgattggtccctttccgtatttccccttgcattacaactggtggttgtttcattcctcaacggataattctcgtagtatgtcgatgtggatggtcccctgtaaagtggaaaatcatgtatgcggtttttcgccccttgagcttgtagatggcaggcatcgtttgagtggagcatccccctcatctggttttgatacggcctggttgacaatgtaggattctgttcttggctgtagcctctttgatggtagtaatccagttgcggattgtgtcccgatctaggcctagttccacccagagctttgaccacacctttaagaccctgagcggcggctcttatggctccagctcgatcccttcccagcccttcttgatatgtcgcctgaccagagtaggagttattccgtggactattctgcatgacgtagttgttttgcgtataatacggcgagccatcaa

SEQ ID NO: 3257 - DNA, 1097 bp, DROSOPHILA
aacaaatccaaatttgtagtttctcggcgagattgtgggagatgtgctgtgcaccgatgtgtgggccctcggtctgcgggccttcgatgtgcaacccgcccgcttgtcgtgtgccactggagccactgcatccgtcaacagtctaccactgctgtccgtccacgaagtgcacgctgtgctgtaataacgaatcaaaacacgagtgccactgcacctgccagcgcaacaagcacatcgtggaggcgttcagctgcctgttccgggttagcaagttccagatcctgaccaccctctttctactggcctatcatgagagcagaccgctgccgcgctttccgcgcgatcgcaactggtcggtgatggagaacgtgaaggcaccgtactcggagttgcacgacctgaggatctacgacagcctgttcgatcgctgtggcaaccgcatcgatccgctcgaccaaaagaacacgtacaagctgttgcgcctgatctttctcggtccagtgctggtgcccgatcagcaggcacagctactggccatgctgtacacgctaaatgcccatgccgtctgtcccgtggatctcaatggcctgctatcggtactgcagtatgtgaagctggatgagctggtgtgcggcatcttggagcaggacggacgagcgaaacgtttccacagcgggcggcagtgcttggagctgtgcaatctctaccagaaagtggtcgccacggacaaggatgcggttattaaaaagcatcgccgtcgcaaggagaagtccaagagcaaggattcggaggcacagaagaagccgcgtagaaccatcaccgcgcagatatactgcacgcgtcgcgttccggagcccgaggatgttagctcacggatcgagactatcactccaatcgtacgcagtacagccacctcgttgcgtcgctcctccaacaagaaaagctggatgccggtcaatcggagcagcattaataactcggagaagggatctcgccggggttcgcgcaatctcgcgggttcaccgaagagaaacaagccggaagtgtccaatgtgggagtgcgaatgcagggcggcgaccgccaaagaacgaagtga

SEQ ID NO: 3258 - protein, 351 aa, DROSOPHILA
MCCAPMCGPSVCGPSMCNPPACRVPLEPLHPSTVYHCCPSTKCTLCCNNESKHECHCTCQRNKHIVEAFSCLFRVSKFQILTTLFLLAYHESRPLPRFPRDRNWSVMENVKAPYSELHDLRIYDSLFDRCGNRIDPLDQKNTYKLLRLIFLGPVLVPDQQAQLLAMLYTLNAHAVCPVDLNGLLSVLQYVKLDELVCGILEQDGRAKRFHSGRQCLELCNLYQKVVATDKDAVIKKHRRRKEKSKSKDSEAQKKPRRTITAQIYCTRRVPEPEDVSSRIETITPIVRSTATSLRRSSNKKSWMPVNRSSINNSEKGSRRGSRNLAGSPKRNKPEVSNVGVRMQGGDRQRTK

SEQ ID NO: 3259 - DNA, 2633 bp, DROSOPHILA
accgagggcgaggatataagcattcggcgcgtgatcatccatccggattacagtgccagcacggcatacaacgatattgcgctgcttgagctggagacggcggccaagccggaactgaagcccacttgcatttggacgcagaaggaggtgaccaacacgctggtcacggccattggttatgggcagaccagcttcgccggtctatcctccgctcagctgctaaaggtgccgctgaaaagcgtgagcaacgaggagtgccagcaccactaccaaaaggatcagctggctcagggcgtgctgggcacgcagatgtgcgccggcgatataaccggcgagcgggacacctgccagggcgattccggcggaccgctgctcatgcaggacggcctgcttggctatgtggtgggcatcacatcgctgggacagggatgcgccagtggaccgccatcggtgtacaccagggtgtccagcttcgtcgactggatcgagggcattgtgtggccggcgcagcaggtgacgaacgcaccgcaacccaaccagatgaccagtttcagtcccgaattcgatctgcgggcgacgatctgagttttgctttcgaaagctccatatatatacaggaatagatttacaaaatgatccagcaagaaattatttgaatatttacatacactattaggtaaatcaacaaatttcaagaaatatttatttttgagctcgtttagtgtttaaaactttatttaaacttaaccgtaagcaaaagccaactgcataatagcgcatatcgaataaacttgctaacaaaatcaacaattgagattttaaataaacaaaaccatatttataacttttcactcatgtccgtttgttggattgagtttcttgtttggaatcatgttgctatttcagccgatacccattggataaacagctgcgcagcatggatatataagtggccagaaccgcaggagacggatacttgagcacgaaccgctgaccactgatgtaccgcaccgagactctgctgctaatcctgacgagcgtcgggataccgtcactggcctatctgcccgatgtgaacatattcaccaactaccgcaccgaggtctataatggtatgtataataggaattgtttgtaaagtgtggcggactaataaagaaatcccacaatatcgctaggcattccatcggagattgataccacaccgttcgtgcggatcggggacaactattactacatcgagcccatgaataaggtgaattggtttcaggcggccggcgcctgtcgcatgatgaacgcccacttggcctccatcgaggataagccggaaatggaggcgctgatcaaatacatgaaggccaaggggttcaagaacaatgattacttttggatatcgggcaatgacctgggcaccgagggcgccttctattggatgtccaacggccgcccgatgacctacgccccttggaacgggcccaagcaaatgccggataactacggcggcaacgagaactgcgtccacatgttcgccacccgggagatgatcaacgatgccaactgcaagatccagatgctgtacgtctgcgaggcgacggaaccgaaaaccttcaagttcacctacattaagtggtagttttcgattggttctaaaataaaaccagcattacatacatatattaaaataagttcaattgaagttggggcaaaaccgagttgttttacgaatattacgaatattggtacatattaaaaacaaaagttgtagtttttgccggcttttatttgtcgcatcgttttgcttatcgcatccgttattctcttttcgctaattatacaatcagttagatttacgatttttgcatactaaattgttacgattccgattcttacacagctattgaactctatcatatacatacatgtattatcgatcgattcatttgattcacttgaattgaatttagttgcgttaaatgtagttaattaaatttaatttaatttattaatacccactaatatcgcgacgacaaaaaactgtgtatgtttcgagtatatgcatgtgtgttatataacaataacggcacacgtaatatgaaagttgggaactgcgaacggagcgcaaactgaaacgaaaacgaaggactgaatgggcaatgatggacgaaggatgaaacgatttcgaatgcatggaatccagtggggaaatgggttagttttacagttagatctgcggcttacttgctaggctaggcgaaaacgtgatcgatattgaaaaaatctacgacataatctcaacattcatagcgagtatgcatgtagtggtgtattcgtgtgtgtgtgtgtgggagtgcttatgtgcttacatatgctctggtacacagttatgtagtctaagtagttgtcgatttacgatttaccatttacgagtcttacgtggctagattgctaattctaaacatttgtttgttcacattaatccacaagttatgcatataaatattgtatatttatcaattagttaatattagtaactacatacatataattcatataaatattcaacagacgagtgcataaatttaataattcttatatgttactctcgctcgctctctatttcgttccttattact

SEQ ID NO: 3260 - DNA, 567 bp, DROSOPHILA
atgtaccgcaccgagactctgctgctaatcctgacgagcgtcgggataccgtcactggcctatctgcccgatgtgaacatattcaccaactaccgcaccgaggtctataatggcattccatcggagattgataccacaccgttcgtgcggatcggggacaactattactacatcgagcccatgaataaggtgaattggtttcaggcggccggcgcctgtcgcatgatgaacgcccacttggcctccatcgaggataagccggaaatggaggcgctgatcaaatacatgaaggccaaggggttcaagaacaatgattacttttggatatcgggcaatgacctgggcaccgagggcgccttctattggatgtccaacggccgcccgatgacctacgccccttggaacgggcccaagcaaatgccggataactacggcggcaacgagaactgcgtccacatgttcgccacccgggagatgatcaacgatgccaactgcaagatccagatgctgtacgtctgcgaggcgacggaaccgaaaaccttcaagttcacctacattaagtggtag

SEQ ID NO: 3261 - protein, 188 aa, DROSOPHILA
MYRTETLLLILTSVGIPSLAYLPDVNIFTNYRTEVYNGIPSEIDTTPFVRIGDNYYYIEPMNKVNWFQAAGACRMMNAHLASIEDKPEMEALIKYMKAKGFKNNDYFWISGNDLGTEGAFYWMSNGRPMTYAPWNGPKQMPDNYGGNENCVHMFATREMINDANCKIQMLYVCEATEPKTFKFTYIKW

SEQ ID NO: 3262 - DNA, 4153 bp, DROSOPHILA
aactactacgcccgatccagggatcctgcccgatctccctaccagtgggatgcctcctccaaagcaggtatgaacttatctatatttactctgcttagtatgaacaatctacactgaactaaaacatttggttaagtgcgttacaaagactccgaaatctcacctcactgaagggccatctgacattctattggaatacaaatgctaacatttttaaaagacatgacgaatgatagccgtttgaatataatagctaatcaaatacattttatatattgacgttgcagtgtgataagaagctttatatgttctgataagaaaaacatttgtgatacttctattgtactaatctaagttttacttatgtagcactgacattgcggttcttattgatattccatttatatataccactttcaggcttcaccagtgccgatcacacctggttaccagtggctgatgactacaaaaccaacaacgccctgcagcagctgcgagctccacgttcccacctgcagatcttcaagaaactggtgcgcgtgcgcaaggagccatcttttcgccagggagaactcaacattcaggcaatcgacgacgatgtgatcatctattcacggcaagtctatcaatctttaagatctttaagcttcgattactaaacgtttgtctctcgaatagacaaaagaccggaagcgatctctatgtaatcgttctcaacctgggtagcacctccaagaccttggacctgaccaagtattacgaactgggcacccaggcggaggtcattaccacgtccttgagctcccagtacatcgatggcgatgttatcaaatctacggagttcgttgccaatccctatgtgggcaccgtcctagtggctgtctaagctaattttattcaaataagtgacaataaagtagcgctgataaataaaatgtgaattatacatgtacttatcaaagtttgcaaagtcgtagcccataagcatgcaagtgtttattcatgtactatcgcatacaagcctctgcttcatgcgtagatgtagaccattttcggacttcagagtcatggatgccgacaaaattggatcatacttatggttgtgagcatcacggctcttcttctctgccggctgaagacctagagttgtgcttatatagccatccttggaaacgagctcatccagagctggcagcacctcgaaatttcgaatgattttggacaccacagtcttgatctccagcagtgcaaacttctgaccaatgcaatttcggggaccagcactaaagggcacgtactcaaacggccctggtttctcacggtcgaagcgttcgggctggaatttgtgaggatccttaaaaacacggtcattgtatcccaacataagaaggcccaagttcaaggtagtccccttcggcacaatgtcaccatctaaaaacataatcctgattactgataacgcctaaatttgtttcgaagattcaccaattacgtagtccttctcagtaaagcgaccaatgaaagggacactcggataaagacgttgcgcctcctttataaacaaatccaaatgtttcattgtggatatctcctgaaacgtggcatctcgaccaagtccagaagcgcccatcacatcgcactgctcgttaaataatttttcctgcaaacagaaagtaatatattattaaattcgcttcgtcaaaactagttcttcaaatcggttacctgttcatctggatgtcgagaaagtaagtagactgcaaaacctacaccagatgtagtagtgtcatgcccttcaaacataaaggtggaaacttcctcgtaaagctcttgggaagtcagaggacgtccatccactttggatgacagcagagtgtccaaaaatgccattttcttgcgggagaactcgtcagccttaatgccgacttcaagccctgattttcggacttcgattctcttcgctattatctcattggtaaagtcctgcagggttttcagtgttttactatattctggatattcaggagcaaagtgaaagaggtatttgttgcgcttccacggactgaaagctctcatcttaatggtgtaggtaatactacaagtgaaaaaaaatttatgtaaatctttaggaagatttgtatatattatggaatatcccataatacatactctttaaaggcttgcacaacggaggaacttcggttttccatggcattgatggacacacccatagctgtatcgcaaatgacgtccagagtcaaataatgtgcctcttcctggaaatcgaagatgttgcctccgtctgccaccttcttcagctgatctatgaacttggtggagttctcgttcatgacctcgtgaaagtcctgcaggatgttgaagtggaaggctggggttatcatcttccggtgtttgtgccatttgctgccagtactggtgaggaggcccaatcccagccatgggtgagtaagatcatatacatcggacttggatatcagagtttgactgctaagtataaactgcgcaaaagctgcattgttaccatcctcgccttagcgttattaacatgtcacactcacctccatgtatttgggattagtgaccataatattggagtagtaacctatccaataacgaaagttatccttgccgtactcatgccaccagccaaaaaaccggttcaaaatctctggagagcaaagttaaaacatatcattacttgctctacaattagatagaagccatagtctttaatacagcaaaaaacgacggatgaattccctgacgaagatttgttaagttaatcccattgatcggtactgcagtgacctttagtatatttagtctcagtgttatcattcgtacacaactgttatgtgatcagtcacacctatcgagcgatgttatctagaggggactttgatcccacacattgagattgtctagatggagcacctacctgtgggagtgtttcccatctgatgagcattgcccaccaaaggcagcatacttgggccttggaatttgttcagcattcgctttcgccgcagtagtccaagctcgaaataggtcaccaagaacagtggaagggcaagaaaagcgcacagtacgatccacattttgaatgcgaccacagacaaccgatcggtgcagcgagtaaatcggatttgagtagaaacctcaagactctctgcgtcagtacttcaaccggttgcggcagacagttctcagtctctcgcgcttggatatacatccacacataagaagcagcctatgactatctcccaaattttaaactaatatatgggcactcagcatgaccttctatatgctgcgactaagtttcttgatgaacatttctcttgaaaatggcttacacgtgtggaaactataatttcaaattttttaagctaattaacatagtctcaatggttcaaagattaaaacgagttgatttgtttcaaaagttttatgtgttgtatgagacaaagtgattaacagcttcctaataattgtatctgtggggacggcatacctaaaaaaacacaggtatgcaaaattaaagcaccaaacttaacagagatcaataaattgacattttagtgcctttccttcagccgaatgtatagaccattttcggatttcagggtcagcacagcggaaagaatagggtcgtatttgtgacggtatggatcgcgcttcttcctctcggcatcagggagtccaatagtggtgcttatatagccatccttagagacgagctcatccagagcaggaagcacctcgaagttcctaatgatcttggataccacagtcttaatctccagcagggcgaacttctgaccaatgcagtttcggggtccagcgctgaagggtacatactcaaaaggtcctggtttctccagctcaaagcgctcaggtcggaacttgtggggatctttgaacaccttttcgttataacccagcatcacgagacccaggttcagtgtggtgcccttgggtacgagatccccatctataagcaagtatggtactgttatgtaaagctctttaaattgctttaattaatggttacctataacatagtctttctccgtaaatcgtccaatgaaaggcacgctgggataaacacgctgggcctccttgataaaga

SEQ ID NO: 3263 - DNA, 1630 bp, DROSOPHILA
ctgcaccgatcggttgtctgtggtcgcattcaaaatgtggatcgtactgtgcgcttttcttgcccttccactgttcttggtgacctatttcgagcttggactactgcggcgaaagcgaatgctgaacaaattccaaggcccaagtatgctgcctttggtgggcaatgctcatcagatgggaaacactcccacagagattttgaaccggttttttggctggtggcatgagtacggcaaggataactttcgttattggataggttactactccaatattatggtcactaatcccaaatacatggagtttatacttagcagtcaaactctgatatccaagtccgatgtatatgatcttactcacccatggctgggattgggcctcctcaccagtactggcagcaaatggcacaaacaccggaagatgataaccccagccttccacttcaacatcctgcaggactttcacgaggtcatgaacgagaactccaccaagttcatagatcagctgaagaaggtggcagacggaggcaacatcttcgatttccaggaagaggcacattatttgactctggacgtcatttgcgatacagctatgggtgtgtccatcaatgccatggaaaaccgaagttcctccgttgtgcaagcctttaaagatattacctacaccattaagatgagagctttcagtccgtggaagcgcaacaaatacctctttcactttgctcctgaatatccagaatatagtaaaacactgaaaaccctgcaggactttaccaatgagataatagcgaagagaatcgaagtccgaaaatcagggcttgaagtcggcattaaggctgacgagttctcccgcaagaaaatggcatttttggacactctgctgtcatccaaagtggatggacgtcctctgacttcccaagagctttacgaggaagtttccacctttatgtttgaagggcatgacactactacatctggtgtaggttttgcagtctacttactttctcgacatccagatgaacaggaaaaattatttaacgagcagtgcgatgtgatgggcgcttctggacttggtcgagatgccacgtttcaggagatatccacaatgaaacatttggatttgtttataaaggaggcgcaacgtctttatccgagtgtccctttcattggtcgctttactgagaaggactacgtaattgatggtgacattgtgccgaaggggactaccttgaacttgggccttcttatgttgggatacaatgaccgtgtttttaaggatcctcacaaattccagcccgaacgcttcgaccgtgagaaaccagggccgtttgagtacgtgccctttagtgctggtccccgaaattgcattggtcagaagtttgcactgctggagatcaagactgtggtgtccaaaatcattcgaaatttcgaggtgctgccagctctggatgagctcgtttccaaggatggctatataagcacaactctaggtcttcagccggcagagaagaagagccgtgatgctcacaaccataagtatgatccaattttgtcggcatccatgactctgaagtccgaaaatggtctacatctacgcatgaagcagaggcttgtatgcgatagtacatga

SEQ ID NO: 3264 - protein, 531 aa, DROSOPHILA
MWIVLCAFLALPLFLVTYFELGLLRRKRMLNKFQGPSMLPLVGNAHQMGNTPTEILNRFFGWWHEYGKDNFRYWIGYYSNIMVTNPKYMEFILSSQTLISKSDVYDLTHPWLGLGLLTSTGSKWHKHRKMITPAFHFNILQDFHEVMNENSTKFIDQLKKVADGGNIFDFQEEAHYLTLDVICDTAMGVSINAMENRSSSVVQAFKDITYTIKMRAFSPWKRNKYLFHFAPEYPEYSKTLKTLQDFTNEIIAKRIEVRKSGLEVGIKADEFSRKKMAFLDTLLSSKVDGRPLTSQELYEEVSTFMFEGHDTTTSGVGFAVYLLSRHPDEQEKLFNEQCDVMGASGLGRDATFQEISTMKHLDLFIKEAQRLYPSVPFIGRFTEKDYVIDGDIVPKGTTLNLGLLMLGYNDRVFKDPHKFQPERFDREKPGPFEYVPFSAGPRNCIGQKFALLEIKTVVSKIIRNFEVLPALDELVSKDGYISTTLGLQPAEKKSRDAHNHKYDPILSASMTLKSENGLHLRMKQRLVCDST

SEQ ID NO: 3265 - DNA, 4140 bp, DROSOPHILA
aagttcctctacatgggcggcccactggccattggcttgggcgtggtgttcgcctcctcgctggcatccatgtggctgccgcccaccacggcgctgggcgcaggtgagttgccagaaagttccactggggctagcaccacttcgcattatattttatgaattgtcaagcggagttaacccattcaactctcttttcgcaggtctggcctccatgtccctatatggcggcctcgtcctcttcagtggcttcctgctctatgacactcagcgcatggtccgtcgcgctgaggtctatccccagtacagctacactccctacgatccaatcaacgcgtaagttcactcctcatccataccgtgctctgaaactctatactttttggttctatcttttagctcaatgtcgatctacatggacgtgctgaacatattcatccgcatcgttaccattctgagtggtggtcagcgcaggaagtgagcactggagacgaacatgtgatgcgaggattataccctctaaaatatacatacatatttatactgttattaaaataaaccgatcgagttaggaagcaaaatgtacgaactttgtgtttcaatttggctaatttcaattagtgtcttaatacactccagacctagaaattaaataatatattgtccatatattatatacaatctctaaaaagaaagcattttttaagatcaatttaaaatgttagtcaattttaagcttgatagcgataaatgtagctagcttttaaccgatatttatagcagttgggttcgttgttatcgatagcttaattacttttattacggatcgtttgccgtattacctaattagttagaaatttacctcgtgcaatatttgttattggtcgtacagaagctctgtttttttttttttaattcaaaaaccgatggcaaagtgaaattgggctctagggatgtatcgatatgcaatcgatgtttcattcagcttttttcgacaggacctaagcattcctgtcaagaattgtttaaatatttcgagtcgagccggtcgacagttcgaaaataagttctcccgcagaagcgccaagattccggattttaggtggctgtgagaaaaacacccacgccgactttccacttcatagacacacttgacaaacattctcgtccctgcaaacacacacaactcgtatttcggtgataatacaacaaaagttagccaaatactgcatatatttaattttctggtcaatccgcagcttcgtcccattgccagaaggtgctcgacgaagtcacgactgccatttccacctgagacaggtgagtgtttgaggaggaggaggtggtggctgccagacgcccgaccgcgcccttaaagccggcaaatcgatttcctaacttgcactcaccacataccgcatgtttgcacgatttcagctggtgccattgcaagtcgtccagtggaagaggcagacgtcaagcagaccggccaactgaccatcgatcctggccaggagtttgccatggaacgccgctacctgaagaatccctttcccgatttcgccggcggggagaatacacctttcgccagcgacgaggagcacatcaaaaatctgatttgcacctatgtggacgccatactggagcactgtcatccgaacagcgatgatgaggacaatcgcggtgatctgtatgtgggcaatgccggcatagccttcatgttctggaagctcaacagctgcgagcagacacgcgatctctatccggcactggatcacgcggcctccttcatccgcaatgccaaggtgaatgccaatcggtacaagaagcgctccgccgagcgctactcctttctgtgcggcaatgctggtatctatgccgtctcggcagccatatcgcaggcgctcaaggagaccgaggagctttccgacgacttggccaacttcaagtcgggcatcccgtgcagcaaggagttcatgcacaccaaatacggctgcgatgaggtgctggttggacgtgccggctatctatccggttgctattggctaaacgatgtactgccggagaagaagatcaccgacgatgacctggtatccatatgccagctaatcgtgaccagcggccgcgagtacagcaagcagaacaactcgccgtgtccgctaatgtaccaataccatggcacggagtacctgggtgcggcccatggcctgtgcgccattctgcacatgctgttggacagcccgtggttccgcacgcttcccatttcggcgccggccgccgagttgcgcgacatcaagcgctcgattgacttctttctggagctgcaggacagcgatggcaactttccggtggccctggaggatctgcgctccggcagggataagcgtctggtgcactggtgccatggggcacccggcgccgtttatgtgctggccaaggcctatctgatcttcaaggaggagaagtacttggcctcgctgcgtcgctgtgcggatatggtgtggaagaagggcttcctgcgcaagggaccgggcatctgccatggcgtcgccggcaatggctatgtcttcctgctcctgttccgcctgaccaacgagatgaggtacctgtacagggcgcacaagtttatggagctgctaaccaatgccgagttcaagctgcgcgcccgcacaccggatcgtccgcatagcttgtacgagggtgtggccggcaccgtttgctacctcgtggatctgctcgagccggagcaggcctactttccgttcatggatgtctttcactaaacccgtaggcggcgacccactccacctattcagcccgaccaatgctcaacacaacatactttcgaatcagggagagttatcatcatttctagtcacttgtttgccgatttttctctcattgttgcctttgcgttcacccagcgaactgggacgttggagtgaaagatggagaaggatgctaggtgctgcatagatcccaggtcccgatggagcccgtatccgatctctgagcgcaccgcttgctggaatgttctcagtcattctcatatcaaaattctctgtgctttacgctaagcaattaacttaatacattgatacttatacacagacatattacatatacattatatttatatacaatttatagtatatgtgtatatatatatatatacacttcatataatacatatatatatatacatatacatacttgcgctgacatcttatatacagacaaacataatacttacatgcatagtgtgctttatacctacgagtaatccacgacgagctctcaatctatttgtcaatgagaatgaaataaattattgtactattttatacggatatgtacaatcccgtgaccagtttcgatccatcccaccacggcaatcgaatccatggtcatacgggtaaataccccaaaaaaaatgactcttattcagatcctttggcatggttaaggtaaaggagggaatctatatattatatatttactttcaggaacctatagcttaccgattccttgtacggattattgccaagttgcggttttatttatatttgattcactatctgcattatcttaagtactttggctgatgtaaaagcacgcttatcggatagaaattgattgaaatctggtttattagcgtcttataaacctgatacgaatgaatatacatctaatggattgccttgtggcattaaagtaagttccaataatatgcgaatatttctaggataacgtatgttaagggtccgtatcgagtgtaatctaaactaaaccttgtagttcgctaaaaagggaggttccatctacttgtaatttaactaattcgcttttggcgctataaaccaaattgattgcctgtttattacatggctgtgcgatggctgtccagatcccacgcccatatatatattttattttggcccagaacgtaataaacgatcgcttgtaggaggagggtcactccactccacttcataccatacatcaagtgccgtgcatgtgtaacatgtgtcagcagttgagtatcaccggaatagcgaccgtcgtatccgtttggccatatctcagccatactggcttatcggcgatctataggtgcatatcattaagtgtgttttgataccc

SEQ ID NO: 3266 - DNA, 1961 bp, DROSOPHILA
aagcattcctgtcaagaattgtttaaatatttcgagtcgagccggtcgacagttcgaaaataagttctcccgcagaagcgccaagattccggattttaggtggctgtgagaaaaacacccacgccgactttccacttcatagacacacttgacaaacattctcgtccctgcaaacacacacaactcgtatttcgcttcgtcccattgccagaaggtgctcgacgaagtcacgactgccatttccacctgagacagctggtgccattgcaagtcgtccagtggaagaggcagacgtcaagcagaccggccaactgaccatcgatcctggccaggagtttgccatggaacgccgctacctgaagaatccctttcccgatttcgccggcggggagaatacacctttcgccagcgacgaggagcacatcaaaaatctgatttgcacctatgtggacgccatactggagcactgtcatccgaacagcgatgatgaggacaatcgcggtgatctgtatgtgggcaatgccggcatagccttcatgttctggaagctcaacagctgcgagcagacacgcgatctctatccggcactggatcacgcggcctccttcatccgcaatgccaaggtgaatgccaatcggtacaagaagcgctccgccgagcgctactcctttctgtgcggcaatgctggtatctatgccgtctcggcagccatatcgcaggcgctcaaggagaccgaggagctttccgacgacttggccaacttcaagtcgggcatcccgtgcagcaaggagttcatgcacaccaaatacggctgcgatgaggtgctggttggacgtgccggctatctatccggttgctattggctaaacgatgtactgccggagaagaagatcaccgacgatgacctggtatccatatgccagctaatcgtgaccagcggccgcgagtacagcaagcagaacaactcgccgtgtccgctaatgtaccaataccatggcacggagtacctgggtgcggcccatggcctgtgcgccattctgcacatgctgttggacagcccgtggttccgcacgcttcccatttcggcgccggccgccgagttgcgcgacatcaagcgctcgattgacttctttctggagctgcaggacagcgatggcaactttccggtggccctggaggatctgcgctccggcagggataagcgtctggtgcactggtgccatggggcacccggcgccgtttatgtgctggccaaggcctatctgatcttcaaggaggagaagtacttggcctcgctgcgtcgctgtgcggatatggtgtggaagaagggcttcctgcgcaagggaccgggcatctgccatggcgtcgccggcaatggctatgtcttcctgctcctgttccgcctgaccaacgagatgaggtacctgtacagggcgcacaagtttatggagctgctaaccaatgccgagttcaagctgcgcgcccgcacaccggatcgtccgcatagcttgtacgagggtgtggccggcaccgtttgctacctcgtggatctgctcgagccggagcaggcctactttccgttcatggatgtctttcactaaacccgtaggcggcgacccactccacctattcagcccgaccaatgctcaacacaacatactttcgaatcagggagagttatcatcatttctagtcacttgtttgccgatttttctctcattgttgcctttgcgttcacccagcgaactgggacgttggagtgaaagatggagaaggatgctaggtgctgcatagatcccaggtcccgatggagcccgtatccgatctctgagcgcaccgcttgctggaatgttctcagtcattctcatatcaaaattctctgtgctttacgctaagcaattaacttaatacattgatacttatacacagacatattacatatacattatatttatatacaa

SEQ ID NO: 3267 - protein, 419 aa, DROSOPHILA
MERRYLKNPFPDFAGGENTPFASDEEHIKNLICTYVDAILEHCHPNSDDEDNRGDLYVGNAGIAFMFWKLNSCEQTRDLYPALDHAASFIRNAKVNANRYKKRSAERYSFLCGNAGIYAVSAAISQALKETEELSDDLANFKSGIPCSKEFMHTKYGCDEVLVGRAGYLSGCYWLNDVLPEKKITDDDLVSICQLIVTSGREYSKQNNSPCPLMYQYHGTEYLGAAHGLCAILHMLLDSPWFRTLPISAPAAELRDIKRSIDFFLELQDSDGNFPVALEDLRSGRDKRLVHWCHGAPGAVYVLAKAYLIFKEEKYLASLRRCADMVWKKGFLRKGPGICHGVAGNGYVFLLLFRLTNEMRYLYRAHKFMELLTNAEFKLRARTPDRPHSLYEGVAGTVCYLVDLLEPEQAYFPFMDVFH

SEQ ID NO: 3268 - DNA, 3086 bp, DROSOPHILA
tacctgaaaagctgttatctattacccgggggaatcatagtagcgagtcatggatgcgtagtcacactggtatatttcataattacacgaaataattaccgcaactcacttcaagaagtagatgcccacgccgatagtagctggccacataatcaaggggctcaataagcaatcgatgaaaatgcacattttgaatatctttgtacaattccttgtatttagggtgttgtcagatcttatttcaatcgttgagtgcgttctggtacgaacagcacagctgttaatatattactgagcacagctaccccacacaaacatatattatcgctaattcggagtgagaacctgacgaaatggagaacgtcgggagagagattcttaacgaaggtcaagagaaaacgaattctcaataatatgttatgatagtggaaagcattcaaacaaataaaagcaattccattgatgtttatatttactcaatgggtatattacgcgtggagtaaaagggtataataggttcgctgaacagtatgtaacatatagaataaagtttatatttagacttgatcagcaacactagtcaaaacgatccatccagccatatccgtccgtttgaacgtcgagatatagggaactaactgattcgttatgttacatacatactttccaactaatttagtataccctcctactccaggaataacgggtacaaaaataaagcatgaatcatccaaattgattccatcacttttacaaaaaaaacaaaagaatttgaccatttttctttagtactgaacacagaaatgcaacaatgttgatctcaaaatacaaattttagattaggtaaagcttttttgggagcatttctttattttcagcttgtagaatccgtaagaattctacaattcaaacataaattattacattttgcgttagtcttcattatgataagctattaaaataataaattatgaaatggcgagggataaactaatggttgcttaatcaactttggttgaattcacgccggtccacttctcgctctccgcccagaggaactttccagtcttgtcgtcctgggcagctgcggacacttcctttggctggcagtcgctaaagtagagcccggaaacatcctttagtgcaggatccagggctgcgtagagagtggtctgcgctccattgcgaggggttttgaagagtacccacaggaggggcttgagcagtagcctaagcgatacgagtgttaatatcaaactcaagtagtgcccacttatgtcttctatcttactgtgcaaaggggtgtttcaggaacttccaattcctcgacagctccgtgtccacggcaccgggatgtagggagttggttgtgacccccgttccctccaggcgcttggccaattcccgggtgaacaggacgttggccagcttgctctgactataggcaccgattctgctgtacgacttttcactgtttaggtcggcagttttaatgaaaccttgggtgtgcaccaggctggaaacgttcacgatgcgactgggtgcagttttctagtgagattaagcagggagtttggttaacaaggtgctaagaaagtcctgagtacccaaaataccttcaatacgtccagcagcaagtgggtgagcaggaagtgtcccatatggttgactcccaactgcatttcgaagccatccttggtcagtgttctgggacagtgcataactcctgcattgtttatcaggacatgaagcttatcctgctctttcttgaatctaataaacgagggaaatcagtaacgcattcgtcgatctatcatgtttgcgtttacccagcagcgaatttgcgaatggattccagcgaactcaagtccagttctcgagagaatatgttctggttatttgtctccctgataatatcctggcgcgccttctcgcaccggttcatatcccggcatgccatgtacacagtgcctcctcgcttggcaatctccaggaccgtctccttgccaatgcccgtgttggcaccggtgacaatgaacaccttgccggtctcatcggtctgcttggtgaactgaccgccctgcatgtattttctgaaattcattaattcttatcactctatttcaacacaggccgcaattcacgagcgtattaatcattactcagcagtagaactattccatgcaaataccttagcaagtaggcagccagtccgataatggacggccaaaaatgagggggcagcacaagcaattagtaaggcagcccattttgtttggatacagtatagatcttgccgccgtttgtgttcgtttcacttgctggttctgtcaatgaatgtttgcccgtccgtttggaactgccttttatacgaaatgtacgctatctgctccaaaatacacgaaagccacaaaacgcttactcacgatgagtttgattcgaaactgcgagagaacgaaatatgtttggggtttgctgagagctttttgcttctagtttataaaaacctcattgcaagtcgagcaaatgcatgataagctaaataactatctgcaagtctaatttaattaatacctaatcttataataccatattattctattattattattcttatttatattctattattttcgattagtttttcacctgcttctatgacagctcatgacttaaaccgaaatcatatattgctaaatagttcagattctagtgacgccaaggcaacgttaactaaatgtttatttaaaaaatgcaattactaaatcagtttatttaagattactcagataactggttccaagacttccagccaaatgtttttaaaatgtttgtaatgtttttacaaaagttgaacagaacatctagctcatttagcttattctattaaatgtatttcaacaatacagggtaagagttaaaagagtcataaagttgctcatatattaattcccgtccacttttcactttccgcccataggaattgggcatcatcgtcatactgggcggccgagcccacgtgcttctgcttgcaatcgctgaagtatcttccagatactttttccaaactgggatccagggcagcg

SEQ ID NO: 3269 - DNA, 904 bp, DROSOPHILA
atgcagggcggtcagttcaccaagcagaccgatgagaccggcaaggtgttcattgtcaccggtgccaacacgggcattggcaaggagacggtcctggagattgccaagcgaggaggcactgtgtacatggcatgccgggatatgaaccggtgcgagaaggcgcgccaggatattatcagggagacaaataaccagaacatattctctcgagaactggacttgagttcgctggaatccattcgcaaattcgctgctggattcaagaaagagcaggataagcttcatgtcctgataaacaatgcaggagttatgcactgtcccagaacactgaccaaggatggcttcgaaatgcagttgggagtcaaccatatgggacacttcctgctcacccacttgctgctggacgtattgaagaaaactgcacccagtcgcatcgtgaacgtttccagcctggtgcacacccaaggtttcattaaaactgccgacctaaacagtgaaaagtcgtacagcagaatcggtgcctatagtcagagcaagctggccaacgtcctgttcacccgggaattggccaagcgcctggagggaacgggggtcacaaccaactccctacatcccggtgccgtggacacggagctgtcgaggaattggaagttcctgaaacacccctttgcacagctactgctcaagcccctcctgtgggtactcttcaaaacccctcgcaatggagcgcagaccactctctacgcagccctggatcctgcactaaaggatgtttccgggctctactttagcgactgccagccaaaggaagtgtccgcagctgcccaggacgacaagactggaaagttcctctgggcggagagcgagaagtggaccggcgtgaattcaaccaaagttgattaag

SEQ ID NO: 3270 - protein, 300 aa, DROSOPHILA
MQGGQFTKQTDETGKVFIVTGANTGIGKETVLEIAKRGGTVYMACRDMNRCEKARQDIIRETNNQNIFSRELDLSSLESIRKFAAGFKKEQDKLHVLINNAGVMHCPRTLTKDGFEMQLGVNHMGHFLLTHLLLDVLKKTAPSRIVNVSSLVHTQGFIKTADLNSEKSYSRIGAYSQSKLANVLFTRELAKRLEGTGVTTNSLHPGAVDTELSRNWKFLKHPFAQLLLKPLLWVLFKTPRNGAQTTLYAALDPALKDVSGLYFSDCQPKEVSAAAQDDKTGKFLWAESEKWTGVNSTKVD

SEQ ID NO: 3271 - DNA, 3163 bp, DROSOPHILA
gttttccaaactgcgacagtggttctgagtccatcggtagagcctttccagagcgccctcctgatgcaatgtcatctcctccatgatgtcgatggctgctgtttggtatccacactgcatcagcagccggcagtcagcgtgaatgctttgtactctgtccaatacgcgaaagaagtccgccacaatgggtgcatctttggcagcgccatatagtaactggtgctcggctccgcttagctgaaaacgagccagaaaagcttgcgcaatctgcttatgcacctccaagcggtccctctcccgctgcatggtgttggtctgcttgatcagatccttggtgagcgcctttgaggtctccagatccgatttcatcgtctctactgacgtggccatcgtgtccagatcttcgcacacggcatccagcgagagcttcacctggcggaaggccttcagaaagttctcgttgatgcccacggagcggtgttcgatctggctacgcagattcctgcgattctgcagcgtattctccgtgaagaaagtggacagaccactcagagcatccaatgtgtcctggaaccgtaacgcggttattcgctattggccaagcttgggtaaattgggcactgaccttgtccgactccaggcgagcctcaaggatcttgttgaccctcttctggatcctgtccagctcctccggtttttcctgcgtcgagctcatcttaaacagttgagagtggccaggtgcgcgaaaagtaaacataagtttgaaaaatacttaagacctaaatgaacagatgtaatatctcctttattaattttattttaaagatatgtttaattttatttaaagctatcaatatcaaagcatagctactaaatgtttgaaacggcaacattttttagatcgcactttactttaccccaaaaataccaaataatatttactgaatccctggttcacatgttatagaaaaataaaacagttgcgttttcgacaaattaaaaacaatttcttaaaataagttgtagtcatctaagttttaaatacatccaattaaatggctgccctggccagcttgactgcccagtacacggattccgagaacgagggcgatgctagtccggattcacaaaactccacggcgtccctggtttagtttcaccttaactttagtcgaaatcttataatctcactaaatgcatttctcaatacccaggtaatcataccgcccaagcgacccacgccgacgcccaccaaacaggacgaagaaagcaagcgatctaaggagaagaaaaagaagcgggccaagaaggtgcgtcggttggtgagctaccaggatgacaccctgatttctgacgaggacgaggaccgcgccgcagcgtcctctagtgaagaggagtccagcagtggcgacgagagcaatagttccaattcccagagcgaagacagtcccaaagccaaggataaaagcaatgctggtagtggttccaaggacggggacacgcccatggaggtggacgaggagccggcatgtttcccggtcgaagaacgcacggctgagagctacgaaaaggatgccaagtacgccaagtacaagttccagctgccacccgagccaaaggggaagccgtccgccgaattagtggccaaaatcactaaaatgtacacaaagatgaaccagaccaatatggacatgaatcgcgtaatacaggatcgcaaggaatttcgcaatcccagcatatatgacaaactaataagcttttgcgacatcaacgagttcggtaccaactatccgcccgagatctatgatcctttgcagtggggcgaggagtcctattacgagtccttggcggcggtccagaaaacggagatggtgaagcggcagaaagatcgcaaggacatggacaaggtggagcaggccactgcgttggcccggaaagtcgaggaggaggccaaaaagcggtaagcatgcatttaatctactgtatttattgaattcatttgttaattcgacttcgtcctgcagcaaatccaagtgggatcaaccggcaccttcgtcaaccgttgttaagaccactcttccggctctaaccaccacggttacgggcaccaagggcactgtcatttccgcctttggatcgctgccgaagaagccagccgtttagattttaatttttaaataaacatttagttttaaacattctcatcccaaggctttcaatagaagccttttttgggtttgtttttccttttttacacggtctttggtttttattatgttctgtttcttgacagcttacactgtatgttataatgaacaacaaataatatgtaaaaatcatcgctgtttttaaatacattttgtttaccttcagttttaggaataccccaagtgcgcacatcacatacgaaagtgttcaatggtattttcttggtatatttaaaacctattctgcatattgttctcactctggcgcggtcacactggctgtaactcgaacatccgtgtgtgttgggttgtacttttgcgttttaaattacaaaaacacaaataaatacagtgtttatttattggaagcagtcggcgttatgatttgaaaataggagtgcgtgatacctaattcgattgatagattcggagtaaaatttggagaacacaacacagggcagagcaacaacaaccacacaccgagagaaaagagagaagacaacgcagcaacagcaaaagaatttttcgatctgagccgaatgagtgtgtgtgtgtgtgagcgagatagcctaagatttgtataaaaagatgaagaagatgccgagattattgtttaacccaatgtccatgtatgtgcgtgtgtgagtggtgaaaaattcagtttaaacattcttggccgtgccattaattcaaggtgcatataaatgcggatgtggccatttaaacggcaaccggtatttcgtctgcccctcgcttcccatcctttttttagctgcgcgagtcgctattttgccgcaactggcgctgcatctctccttcccctcgcactcgctagaaagcttatttataaatccaattgcaagagcggaacagaaaataaagaaaaagaagcaccgttcaattgtgggcaatttcaatgggcgaacgccattgtctctggaatatgcataatattt

SEQ ID NO: 3272 - DNA, 1033 bp, DROSOPHILA
aaacaatttcttaaaataagttgtagtcatctaagttttaaatacatccaattaaatggctgccctggccagcttgactgcccagtacacggattccgagaacgagggcgatgctagtccggattcacaaaactccacggcgtccctggtaatcataccgcccaagcgacccacgccgacgcccaccaaacaggacgaagaaagcaagcgatctaaggagaagaaaaagaagcgggccaagaaggtgcgtcggttggtgagctaccaggatgacaccctgatttctgacgaggacgaggaccgcgccgcagcgtcctctagtgaagaggagtccagcagtggcgacgagagcaatagttccaattcccagagcgaagacagtcccaaagccaaggataaaagcaatgctggtagtggttccaaggacggggacacgcccatggaggtggacgaggagccggcatgtttcccggtcgaagaacgcacggctgagagctacgaaaaggatgccaagtacgccaagtacaagttccagctgccacccgagccaaaggggaagccgtccgccgaattagtggccaaaatcactaaaatgtacacaaagatgaaccagaccaatatggacatgaatcgcgtaatacaggatcgcaaggaatttcgcaatcccagcatatatgacaaactaataagcttttgcgacatcaacgagttcggtaccaactatccgcccgagatctatgatcctttgcagtggggcgaggagtcctattacgagtccttggcggcggtccagaaaacggagatggtgaagcggcagaaagatcgcaaggacatggacaaggtggagcaggccactgcgttggcccggaaagtcgaggaggaggccaaaaagcgcaaatccaagtgggatcaaccggcaccttcgtcaaccgttgttaagaccactcttccggctctaaccaccacggttacgggcaccaagggcactgtcatttccgcctttggatcgctgccgaagaagccagccgtttag

SEQ ID NO: 3273 - protein, 325 aa, DROSOPHILA
MAALASLTAQYTDSENEGDASPDSQNSTASLVIIPPKRPTPTPTKQDEESKRSKEKKKKRAKKVRRLVSYQDDTLISDEDEDRAAASSSEEESSSGDESNSSNSQSEDSPKAKDKSNAGSGSKDGDTPMEVDEEPACFPVEERTAESYEKDAKYAKYKFQLPPEPKGKPSAELVAKITKMYTKMNQTNMDMNRVIQDRKEFRNPSIYDKLISFCDINEFGTNYPPEIYDPLQWGEESYYESLAAVQKTEMVKRQKDRKDMDKVEQATALARKVEEEAKKRKSKWDQPAPSSTVVKTTLPALTTTVTGTKGTVISAFGSLPKKPAV

SEQ ID NO: 3274 - DNA, 6299 bp, DROSOPHILA
ctaattgacacgcacacaagtgcactactgcggtcataaacaaaccgctcgttgggaaagaagaaaggtggaagggaaagagagctgacaaagctaaccaggcgaaattgcacatttaacagaagaaaacttatttttaacaacataacaatgactaaaattaacgttaaactgccacgattggggttaaaactcaccttggcaagaagcacggtgtaaactggttttcggttctcactcaaaacaaaccaagaatgcactcgcaatcgaattccactcaatttacacgtttacgaaactttggccattaaaacctcgagaggatttgtatttttaaatgcttacagcaccttaccacatatatatatagctatatatataaatttgctattgtttttactttctcaccatccacaaaaacttgttttcgttgtcgctactctctattttggcactctactcgcaactgagctgatttagcaattaaaatgcaacctctttaaataaaaacaattacttttcgtgcactccactaacgacaacaataaggacaaacgggcgcgacgcacaacaacgcaattctttaatgcacttaagtattttcgtcggtcaattggagctcgtttggttttcgcaagcaccgcaattactatttactttattttatatttgcgtacgcacaccaccgcacgaagcagaaatttatttaacttatttaaaattcagcaagaaacggacaaccgacttacttagctgcactcgccagtgtgaccgctttgcgagtgttggatgagctagtagtgtggccctagcgcactccccaggaaatactcactgtgaacagtcactctttccacttataacacttttcacttgaaaataaatttgaattctatcttaaaactacattgtttatttgcggagtagatacgcctgtaccacctgggataagcagaatgaaaaacagctggagtaattaaaacactagtccccgctcatttcagatctccaccgtcatggacacgatcaaactgtggcacagtgggcaagttcggtgcctggagatctcggtgggagctgcgcagtggtggcaggtggtacagatccatatgttgttcgtcggctgggtgatgggtttcccggaggagatgcacgccgggaagcgagcattgcactcggggcaggagggggagctgaaaggatcggcattccatgagtatcatcattataatccagcttctgacgtcgacccttcacttacctatctggcacgggcactccgcaggaatagcaatccaccctatcgccagtggtgtcctccggatcgtacttggcgaagatcccagccgccaactcctcgtaccgttgaagggtagcctcgggaagatgagcctgttgctccaacttcatgaaagccttggagcaggttccgaaggcccgatccgcacagctggccagtgccaacaggctgtagatgtgctctggaggcaggacgtcctcgtagtcgcgcagcctcaccgcagtgaccaccgcactgtggacgatcccgaagcgaagctgcctctgggctaggagcatgaagtggtaggcctcggcgcagtgccaaagcctctcgatggcggccgcatcctccagggcaatggagtccagtagggtgttcctgccgctggcgtagtcgatctccgtcgtggccacagccttgaggtgctcctcggccagcagagcagccagcacgtacagcttcttgattctcagcagcggagcacgcttctcttgctcccgttccgccatttgagaaagcaggcgagctgcatctagatgacgcccagcattccgctgcatctcgatggcttccttgaggcgtccctcctggagcaactgtgccgcgtgcttggctatgagcgtttgcacctggggcagctggaacctctgggccagctcaacagcctcgccccactgccggagattaacgcaggtggcgacggcggccttctggtcgccgaatcgaagatgggcttgaacagcctcggagcacatgcccacggaggccagcatctcggccagcttcggaagcagcgggctcttctccggtagccgttccacgcacttttccaagtcgtcgaactgctccaagtggtacagagcctccatgtaaccctccaggtagtgggacttctcgtagtattccctggcactctcccaggagcgcaggttggcgaagtggtggccaatctcccgccaagcgatctccatctgctggtccgacactcccgatcctcccattctgtacagctgcaccacgcgaaaccaatcgcaaagggtcatgcgcagctctatggccagatcgcgacgatccgcgtccaggtagagcttctccgcctcctcgaactctccgtagaaggctgatatctccgccctctgcagctccttggagtgtatggtgcgcagtctcttgaccaacttaatgcccgggtagtgggcacaacggacaaaggcgttctccgccgtctccagttccagtttcttcaacgcagactccgccagcagtcgccagagcctcggatgcgggttgtcctcaatgaactgcttggcatcctccagtcccacgtgctccagtagatcgtcggtatcgcgcagggactttaccctcagctgaatgatatgcgaaaaattctgcagctcacccacgctgattatgtcgtccagcaggacactggtgatctccaagtcctcgaaggtgcatatgtagccggagcaggacacgggctcctcgggatcattgccccggaagatatacatgcgcgttttctccatcagagccagcagcagtgggttatccgtggcccagctcacggcccaaacgtccttgcgctccacccgactgaagttcagttgggtctccctgttgtcgtccaggtcgagcagggtcatcacgcccatatggtcgataatggcggctcgtctaagtaaggagtataaatattactagtatcaagggagtgtggtggactacccacgtggaattgcagttgatagccatcttgtagaccttggcgttcatcaggtggcggttcctcagagccacgtttgctatgctgtactcgttgatagcgccggattccctggcgacaaggagcagcttctcggagagtgccagcgcacagatgggatcactgattccccgctgcgtggagtgaccatcgccactgctactgctcagcatcaggtccttggccatttccactcccgtgggcgtgtcgtcgatatggaaccgcttctccttgcgcgccttcacattgtgcagggtggaggcactctgaagggagatcaatgggggttagtcaattggtaaccaggttgatgactgaaagtgcccaccttgggtgtgtggtagtgccaaattagaatctcctcctgggacgctatggccacatagctcgagttgatgcccacaaagcagggtctaatatccgtgtacttggctaaaaataactgggattagtccgaaacatcaacaacggtgatctactcacaatccacggtggtgccaattgaattgcagaggagcaactggtagaccctatcgtccgcaggattacttcggttctccagggtgctcagcgcaatctccttgatgttgctgctgacacactcgacgcccaggacgcaatgctcgctgctggacgccaggcacaaggtgggctccacctccttgaggaaactctgatttgagacggtgttccagaaggtgatcacgctcatgggcgactccctggttgcactgccgctgttcaggaacaccacagtcttctcgaagtaacaccagatgtagtccggtcggatgttggcgaagtagatgaacgaatccacggccatggcgatgcgcagcgatttgccctcccagctaagcgaggtgatgtcggtgccaggcaccttcagagtgcggtagatcttgcccagcggcgagtagaagcacacctggttggtgtcgcgctgcgaagtcggacttaccgcgtccaaggtggtgccacaaatggccaacacagtgccatcatggttccacttggcgtccacattgcgcatcccagtgtcgaagattgcgggtgctaaaagtcatgtgggttagttaggagactctagagcttgcatcacctcctaccgtcgtcattttcgttcctcatgatctgcacccttccgttctcatagcaaatggccagaactggacgctttcgactctggacgaccctgccactgaaccagcagatgctggctatgcggtgacctctggaggaggagccgccacttatgttcacgcactggatgtgcagcttcatctggagtacataaccaaccaaagtgggtaagtatgaaggataatcaagtactaacttacagcaaagttgccttggttatcgtacagatgacactccccgttggccagcgcaaagaggattagccgattgtccggactccactgcacgccagtcagatgggtgcccttcagctccttgccaaagatgcggttgccatccactgagcccactataatcgccccatcctcatagacgatgcagatccgcgatccgtccgacgtccagctcatgctggccaccgtggacttctttctgtcgttggtcatctcctcgtaccaggatcccttgtacagcatccacaccatgatcacaccgtccgtgtccgaggaggtcagcttctgctgcgcatcgttccaggtgaccacccgcaccgactccttgtgcccatccagggtctggttcatcgacaaattggaaacggcggccagcccgcccttgctctgtccgttgggagtggctggagatgggcataaagtaatgatcaaatcggagcagtatatggtattaaaaacgggttatgttatgagatatatcttgatacttggaagtagttaactttctttatcttgattattggaaacagtaagctttaatgagtattgagcaattgagattcaacacgttcgattaggcacaaggaagattagaaagtacctagatgtccgacccaggttacttcctatccctgatcgtggcactcaccctggtccagtttcaggaccttaagcagtccatccgttccggccactgcgatgtagccctcctccttattccaagcgatgcaattgagcttcacattattgggtatggcaatctggaggagagaccttgtagaccatttgttggtaccctaagtgaagcctacctttttgctgaggtaaacgaacatcttggagttgcaagtgcacttggattctttcagttctcttcaatgtttttccgcatttgctgtggcagcaaaactaattggtttccatggtgatcccaacttcggtttgtcagctggccaaagacccaagcctgttttgggcccaaaaagtggttcaattggtattggtggcaagtggcagtgaagcacctgctgccacctgttgctatcgaagcacctgtgtgtgttatcgagggcggcacatttaaaaagttgatgttctaccaagtagattaaaatgtttaattatgtcaaaggaacagactatgtttacttaaaataagatataggcaatacaaaaagttaagcttcttaaatgcaatagcttataatttaaacattgtagtttatgacaactgataaagttttccacatgaaataaaacctacccattatgacctaatcgatttgaaaacctttccaattgcgagtctagttacacagcattatcaagtaaataagtaggaattaaatcataaagataatatataactgaagtggactgtaatagattcctaatttcacaattccctacataaattgcatttctaatagttacttctacattaaattcagttaaatcacagggcacgcgggggatatcaggccagtcgaatacccctctttagcaattcgtgaaccagcttggtggccagaaacatgtagaccagcagaatgatgacggactcggaatgagagcgatcctctggcctgagaaagatgttcaccatgccggtcagaatgttggccaccaggaagaatgtcaatccatttttgttcagagcctggctaatcgtgaacggaacaacggatccgccccttttcttgaccacagcctcccccgatagaagacccttctcatgatcctcccacggattcggatcccacggcatgacgctgttgatcgcaaagtctatggctccgaaactggcacacaaagtggtgctcccgatggccagcatccatatgacatagcccagattgcaggtcacccggga

SEQ ID NO: 3275 - DNA, 3655 bp, DROSOPHILA
agaactgaaagaatccaagtgcacttgcaactccaagatgttcgtttacctcagcaaaaagattgccatacccaataatgtgaagctcaattgcatcgcttggaataaggaggagggctacatcgcagtggccggaacggatggactgcttaaggtcctgaaactggaccaggccactcccaacggacagagcaagggcgggctggccgccgtttccaatttgtcgatgaaccagaccctggatgggcacaaggagtcggtgcgggtggtcacctggaacgatgcgcagcagaagctgacctcctcggacacggacggtgtgatcatggtgtggatgctgtacaagggatcctggtacgaggagatgaccaacgacagaaagaagtccacggtggccagcatgagctggacgtcggacggatcgcggatctgcatcgtctatgaggatggggcgattatagtgggctcagtggatggcaaccgcatctttggcaaggagctgaagggcacccatctgactggcgtgcagtggagtccggacaatcggctaatcctctttgcgctggccaacggggagtgtcatctgtacgataaccaaggcaactttgctatgaagctgcacatccagtgcgtgaacataagtggcggctcctcctccagaggtcaccgcatagccagcatctgctggttcagtggcagggtcgtccagagtcgaaagcgtccagttctggccatttgctatgagaacggaagggtgcagatcatgaggaacgaaaatgacgacgcacccgcaatcttcgacactgggatgcgcaatgtggacgccaagtggaaccatgatggcactgtgttggccatttgtggcaccaccttggacgcggtaagtccgacttcgcagcgcgacaccaaccaggtgtgcttctactcgccgctgggcaagatctaccgcactctgaaggtgcctggcaccgacatcacctcgcttagctgggagggcaaatcgctgcgcatcgccatggccgtggattcgttcatctacttcgccaacatccgaccggactacatctggtgttacttcgagaagactgtggtgttcctgaacagcggcagtgcaaccagggagtcgcccatgagcgtgatcaccttctggaacaccgtctcaaatcagagtttcctcaaggaggtggagcccaccttgtgcctggcgtccagcagcgagcattgcgtcctgggcgtcgagtgtgtcagcagcaacatcaaggagattgcgctgagcaccctggagaaccgaagtaatcctgcggacgatagggtctaccagttgctcctctgcaattcaattggcaccaccgtggattccaagtacacggatattagaccctgctttgtgggcatcaactcgagctatgtggccatagcgtcccaggaggagattctaatttggcactaccacacacccaagagtgcctccaccctgcacaatgtgaaggcgcgcaaggagaagcggttccatatcgacgacacgcccacgggagtggaaatggccaaggacctgatgctgagcagtagcagtggcgatggtcactccacgcagcggggaatcagtgatcccatctgtgcgctggcactctccgagaagctgctccttgtcgccagggaatccggcgctatcaacgagtacagcatagcaaacgtggctctgaggaaccgccacctgatgaacgccaaggtctacaagatggctatcaactgcaattccacacgagccgccattatcgaccatatgggcgtgatgaccctgctcgacctggacgacaacagggagacccaactgaacttcagtcgggtggagcgcaaggacgtttgggccgtgagctgggccacggataacccactgctgctggctctgatggagaaaacgcgcatgtatatcttccggggcaatgatcccgaggagcccgtgtcctgctccggctacatatgcaccttcgaggacttggagatcaccagtgtcctgctggacgacataatcagcgtgggtgagctgcagaatttttcgcatatcattcagctgagggtaaagtccctgcgcgataccgacgatctactggagcacgtgggactggaggatgccaagcagttcattgaggacaacccgcatccgaggctctggcgactgctggcggagtctgcgttgaagaaactggaactggagacggcggagaacgcctttgtccgttgtgcccactacccgggcattaagttggtcaagagactgcgcaccatacactccaaggagctgcagagggcggagatatcagccttctacggagagttcgaggaggcggagaagctctacctggacgcggatcgtcgcgatctggccatagagctgcgcatgaccctttgcgattggtttcgcgtggtgcagctgtacagaatgggaggatcgggagtgtcggaccagcagatggagatcgcttggcgggagattggccaccacttcgccaacctgcgctcctgggagagtgccagggaatactacgagaagtcccactacctggagggttacatggaggctctgtaccacttggagcagttcgacgacttggaaaagtgcgtggaacggctaccggagaagagcccgctgcttccgaagctggccgagatgctggcctccgtgggcatgtgctccgaggctgttcaagcccatcttcgattcggcgaccagaaggccgccgtcgccacctgcgttaatctccggcagtggggcgaggctgttgagctggcccagaggttccagctgccccaggtgcaaacgctcatagccaagcacgcggcacagttgctccaggagggacgcctcaaggaagccatcgagatgcagcggaatgctgggcgtcatctagatgcagctcgcctgctttctcaaatggcggaacgggagcaagagaagcgtgctccgctgctgagaatcaagaagctgtacgtgctggctgctctgctggccgaggagcacctcaaggctgtggccacgacggagatcgactacgccagcggcaggaacaccctactggactccattgccctggaggatgcggccgccatcgagaggctttggcactgcgccgaggcctaccacttcatgctcctagcccagaggcagcttcgcttcgggatcgtccacagtgcggtggtcactgcggtgaggctgcgcgactacgaggacgtcctgcctccagagcacatctacagcctgttggcactggccagctgtgcggatcgggccttcggaacctgctccaaggctttcatgaagttggagcaacaggctcatcttcccgaggctacccttcaacggtacgaggagttggcggctgggatcttcgccaagtacgatccggaggacaccactggcgatagggtggattgctattcctgcggagtgcccgtgccagatagctccccctcctgccccgagtgcaatgctcgcttcccggcgtgcatctcctccgggaaacccatcacccagccgacgaacaacatatggatctgtaccacctgccaccactgcgcagctcccaccgagatctccaggcaccgaacttgcccactgtgccacagtttgatcgtgtccatgacggtggagatctga

SEQ ID NO: 3276 - protein, 1205 aa, DROSOPHILA
MFVYLSKKIAIPNNVKLNCIAWNKEEGYIAVAGTDGLLKVLKLDQATPNGQSKGGLAAVSNLSMNQTLDGHKESVRVVTWNDAQQKLTSSDTDGVIMVWMLYKGSWYEEMTNDRKKSTVASMSWTSDGSRICIVYEDGAIIVGSVDGNRIFGKELKGTHLTGVQWSPDNRLILFALANGECHLYDNQGNFAMKLHIQCVNISGGSSSRGHRIASICWFSGRVVQSRKRPVLAICYENGRVQIMRNENDDAPAIFDTGMRNVDAKWNHDGTVLAICGTTLDAVSPTSQRDTNQVCFYSPLGKIYRTLKVPGTDITSLSWEGKSLRIAMAVDSFIYFANIRPDYIWCYFEKTVVFLNSGSATRESPMSVITFWNTVSNQSFLKEVEPTLCLASSSEHCVLGVECVSSNIKEIALSTLENRSNPADDRVYQLLLCNSIGTTVDSKYTDIRPCFVGINSSYVAIASQEEILIWHYHTPKSASTLHNVKARKEKRFHIDDTPTGVEMAKDLMLSSSSGDGHSTQRGISDPICALALSEKLLLVARESGAINEYSIANVALRNRHLMNAKVYKMAINCNSTRAAIIDHMGVMTLLDLDDNRETQLNFSRVERKDVWAVSWATDNPLLLALMEKTRMYIFRGNDPEEPVSCSGYICTFEDLEITSVLLDDIISVGELQNFSHIIQLRVKSLRDTDDLLEHVGLEDAKQFIEDNPHPRLWRLLAESALKKLELETAENAFVRCAHYPGIKLVKRLRTIHSKELQRAEISAFYGEFEEAEKLYLDADRRDLAIELRMTLCDWFRVVQLYRMGGSGVSDQQMEIAWREIGHHFANLRSWESAREYYEKSHYLEGYMEALYHLEQFDDLEKCVERLPEKSPLLPKLAEMLASVGMCSEAVQAHLRFGDQKAAVATCVNLRQWGEAVELAQRFQLPQVQTLIAKHAAQLLQEGRLKEAIEMQRNAGRHLDAARLLSQMAEREQEKRAPLLRIKKLYVLAALLAEEHLKAVATTEIDYASGRNTLLDSIALEDAAAIERLWHCAEAYHFMLLAQRQLRFGIVHSAVVTAVRLRDYEDVLPPEHIYSLLALASCADRAFGTCSKAFMKLEQQAHLPEATLQRYEELAAGIFAKYDPEDTTGDRVDCYSCGVPVPDSSPSCPECNARFPACISSGKPITQPTNNIWICTTCHHCAAPTEISRHRTCPLCHSLIVSMTVEI

SEQ ID NO: 3277 - DNA, 3464 bp, DROSOPHILA
ggatcgcactggactaaccgtctcacttattcgccgccaaatcggctggaacgacaaggctcccaaggctaaagccgtgataacgccggcagaggccacggcggaggtggagggcctgccggagaacattttcacggaacccttgaacttgcggaatgtgacaaccatcacccagcgacatagccagccggcggaccagcccacggccgttgggagtctttatcctcagcgcaggtccctgtggattaagcggtcgcttcgttgccgccagtgcgagcacaatctaatcaaaccggagtaccatcccacatcgataaagtaccgcattcagcacttcgccagctaccatgttcctgaagtggtgatggtgcgctgcgagcagccactggtggcaggaaaaagcaacgccattttgctgaagctcacgaatccgactatatacgatatgacaattcgactgttgactgcatctcctcctgaggatccacagctgtcaacagaggccactcgtgttgcgaaagaggaacccatttcttcgtccccacttctaaaagcagtgggcatcacactgtcgcgtcaaaactcaacacgggaggtaaaacgagatgtgattgatatatccaatgccgaaatagttccgttggagagcgagttcgttctgaaccagcgcgatgactcgaaagagttcgacgaggacgtgcaactgtccaccgaggagcccaagtttattgtctggcggaagggcaacaaggtgcttttgcggctacagtttaccccagcagaggagctgtccggattagcagacgtcgttctgggcttctatatgcagtacacatacgtcaacaccgtaaacaatgcgcaagagaagagggaacccacaacccatgtgctccactccagggtgtttatcacggcgggagcaactgagcagaaagccaactaaactggaaacttattagccaacaggcgtactaatcgacttatgcgaaatatgaaatatgctttatgaaagctagagaaatatgtatttatttattaatccgttcgtgaaacagcagctagtattcaagtataataaaaggcttgttctaacactattcgttcttctttagttattagcttccagcttatctaatccggtccacttctcgctctcggcccacaggaacttggcaaccttatcgtccaaggcaccagaagccacaggctttggtttgcagtcactgaagtacaggccagagatgttcttaagctccggatccaaagcagcgtaaatcgaggtctgagctccactcttcggtgtctttaaaagcggccaaatcattggctttaaaaagaacctaggaaggttaacaggtattactgggaaggtcctaattcacttattcatcacttacttcacaaggtttgtctggaagaaggcccagttccgcgccagctcagtgtccaccacaccagggtgaagggcatttactgtgactccgctgccctccaaacgcttggccaattcccgggtgaacaggacgttggccaacttgctctggctgtaggctaggccctcatcatacgacttctcgctgttgaggtcggctacgttaatggagccacgcgcatgtgccagactggacacaacgacaatgcgactgggagccgagttctgaaattttgtaagaccattatctgacgcacttgactattatatagcacacttgccttcagtacgtcgagcagcaagttagtcaacaaaaagtgaccaatatgatttactcccagctgcagttcgtagccatccttggttagggtcttgggacaacgcatcacgccggcattgttgatcaggacgtgaagcttgggttgctccttcttgaagctgattgataggataggtttttaaatcttacagagacaagaaaattctctggaggtaagcttacccatcaacaaatttgcgaatggagtctagggaacttaggtccagctctcgagagaatatattctggttatttgtctccttgatgatatccttgcgggccttttcacatcggttcatatccctgcaagccaagtacacagttcccccacgtctggctatctccagagccgtctccttgccaatgcccgtgttggcaccggtcacaatgaatacctttccggtctcatcggtgtccttcgtaaactttccaccttgcatgtactccctggaattatcaataggaattacctgaaaagctgttatctattacccgggggaatcatagtagcgagtcatggatgcgtagtcacactggtatatttcataattacacgaaataattaccgcaactcacttcaagaagtagatgcccacgccgatagtagctggccacataatcaaggggctcaataagcaatcgatgaaaatgcacattttgaatatctttgtacaattccttgtatttagggtgttgtcagatcttatttcaatcgttgagtgcgttctggtacgaacagcacagctgttaatatattactgagcacagctaccccacacaaacatatattatcgctaattcggagtgagaacctgacgaaatggagaacgtcgggagagagattcttaacgaaggtcaagagaaaacgaattctcaataatatgttatgatagtggaaagcattcaaacaaataaaagcaattccattgatgtttatatttactcaatgggtatattacgcgtggagtaaaagggtataataggttcgctgaacagtatgtaacatatagaataaagtttatatttagacttgatcagcaacactagtcaaaacgatccatccagccatatccgtccgtttgaacgtcgagatatagggaactaactgattcgttatgttacatacatactttccaactaatttagtataccctcctactccaggaataacgggtacaaaaataaagcatgaatcatccaaattgattccatcacttttacaaaaaaaacaaaagaatttgaccatttttctttagtactgaacacagaaatgcaacaatgttgatctcaaaatacaaattttagattaggtaaagcttttttgggagcatttctttattttcagcttgtagaatccgtaagaattctacaattcaaacataaattattacattttgcgttagtcttcattatgataagctattaaaataataaattatgaaatggcgagggataaactaatggttgcttaatcaactttggttgaattcacgccggtccacttctcgctctccgcccagaggaactttccagtcttgtcgtcctgggcagctgcggacacttcctttggctggcagtcgctaaagtagagcccggaaacatcctttagtgcaggatccagggctgcgtagagagtggtctgcgctccattgcgaggggttttgaagagtacccacaggaggggcttgagcagtagcctaagcgatacgagtg

SEQ ID NO: 3278 - DNA, 1095 bp, DROSOPHILA
attgaaataagatctgacaacaccctaaatacaaggaattgtacaaagatattcaaaatgtgcattttcatcgattgcttattgagccccttgattatgtggccagctactatcggcgtgggcatctacttcttgaaggagtacatgcaaggtggaaagtttacgaaggacaccgatgagaccggaaaggtattcattgtgaccggtgccaacacgggcattggcaaggagacggctctggagatagccagacgtgggggaactgtgtacttggcttgcagggatatgaaccgatgtgaaaaggcccgcaaggatatcatcaaggagacaaataaccagaatatattctctcgagagctggacctaagttccctagactccattcgcaaatttgttgatggcttcaagaaggagcaacccaagcttcacgtcctgatcaacaatgccggcgtgatgcgttgtcccaagaccctaaccaaggatggctacgaactgcagctgggagtaaatcatattggtcactttttgttgactaacttgctgctcgacgtactgaaggcaaccgacctcaacagcgagaagtcgtatgatgagggcctagcctacagccagagcaagttggccaacgtcctgttcacccgggaattggccaagcgtttggagggcagcggagtcacagtaaatgcccttcaccctggtgtggtggacactgagctggcgcggaactgggccttcttccagacaaaccttgtgaagttctttttaaagccaatgatttggccgcttttaaagacaccgaagagtggagctcagacctcgatttacgctgctttggatccggagcttaagaacatctctggcctgtacttcagtgactgcaaaccaaagcctgtggcttctggtgccttggacgataaggttgccaagttcctgtgggccgagagcgagaagtggaccggattagataagctggaagctaataactaaagaagaacgaatagtgttagaacaagccttttattatacttgaatactagctgctgtttcacgaacggattaataaataaatacatatttctctagctttcataaagc

SEQ ID NO: 3279 - protein, 309 aa, DROSOPHILA
MCIFIDCLLSPLIMWPATIGVGIYFLKEYMQGGKFTKDTDETGKVFIVTGANTGIGKETALEIARRGGTVYLACRDMNRCEKARKDIIKETNNQNIFSRELDLSSLDSIRKFVDGFKKEQPKLHVLINNAGVMRCPKTLTKDGYELQLGVNHIGHFLLTNLLLDVLKATDLNSEKSYDEGLAYSQSKLANVLFTRELAKRLEGSGVTVNALHPGVVDTELARNWAFFQTNLVKFFLKPMIWPLLKTPKSGAQTSIYAALDPELKNISGLYFSDCKPKPVASGALDDKVAKFLWAESEKWTGLDKLEANN

SEQ ID NO: 3280 - DNA, 3321 bp, DROSOPHILA
gcagagcctgggcacgaacgctcgagtcctgcgagtcgatgtagaaggctaacttccatacgtaatgacgctcaccctccattttggtggcaaaacgaccgattaccagcatggcgttcttctgcgtatgcgccgaaccggagcgcagctgctccttggctaggtgggccacctgggttttgtacgatatgggcaacatgtgcttcctgcgctccccgattcgaaacaggcacatcatgccctgggcgagcaccttttgggacacctccttcctcaacaagaagataaagtagtcgatgatcatggtaagcgcctgctcggtggcacactcgcaacccaatccggacagcagctcgagcagcttcacccggatggaggtgtcgctatcgcgttcctgcagctgatacagttggaagatcttgctggccacctccttaagctcgcccatttccacgtcctcataggatatctcatcggttatcttgaccaagagctccagcagttccctgctattcgcggccgtcattgggggagctccagtcgccgcagccggcggatttccgatgacacctgttgacggggctcccgtcgaagcaactggtgtcccagtgggcaggaccaacgcaccggcgggcaggttgcccacataggcgtccaattggttgagcgccgtcagcttgcgctccacattgcccacttttccggatttcccgcccttggcatcagcggccagcgtttgcagacgcagcttcttcaccggcggcgacccgtccaccgtttccacgtaggtgcctacgcgcttcttaatggccagcgccatggtttccttttcctttgcgcgattcaaccaatgcagactagagttgcactcttccacctggtttaggtaaaccgcaaattagagatggcacaccactgatgccaaccacccgccactagcgatggcatcgtgaccgcgcaagaggttcttgctggtggataacccataactaaataaattgctttcacaagagtgataatgctaatatcaccaggcatttaataattatattattttaaaaaaatgtgtcatttagtaatcatataaagaaaacgaggcatattttttggacatttcactttgaaggcgtgaaacatcgatagtatagtgaaaaatcgatgttttcttttcgtcttttgttttgctctcgctcttctccatgaagtgataacttctcaacaaagtgatgatgatccatcaaccactatttgggtattcatcctcaattcggattgattcgcccgtaaatcattacttatatttaaatccttgtttctactatgtcatctcacatgggcacagttatgatttctccacgctcaaaacggacaaggggtcatcatctaccttgcccttctttttggctgcgcaattcttaacgcatctcatggctttgaataagactttttccgagggtagcgtcggttccacctgaccgatggcgtctgtagttggggataattattgaatggatcactaaaagttggatgtcgagcactaaacttactcataagcgaacgaaacagatgttcgtgatcttttagtcttttctttttctgattcccatcaatattgtagttcagaaggatgtcctcggagaaaatgagtcttatggtgcggcttaatcttccctggcgcaggaatttccgcatggaattcgtctgatcagggatcatataagtacaactatataatattctattgatggaaaagcatgaggaaggagaaacttacatagatccccctggagtcctggcttatcttgtgattcacttcgaccagatcctcctcatacataattggaaaatcatcgtccggatttcccttcgccttcggcttggtcgttttcatcgactgcttaacgaattccgtaagtgtcttaaccgccctcgtcaagttttcgatttctgcgcgctgcgacaggacttgggaattgagttctaagtgggttaggtaatgtaatatgatccggtgttataagatatgtatgtcacaaacataccatctatctttgttagcagcatggcattggctgcgatatgactattctcggtggcgaggcaaagtctcttgatttcaggcattgcttcgttaatttttagcattaaagtgaatacatatgtatatttagtttatgaattgaggaaagtccctaatggaagcgattcgcttcgctacacagttaagctccaaatggaattcctcgctgtttcatcattgccttcgctaggcgacgaatgggaaagtaagggcacgggcaaaaactccctcttgctcatcacatatgagtaactggtgaatcagtgatgacgacgtctgattagcggcggaactgtacagtagtacagagaacatggtgaaagccagaatatcgcatgacaaccaatcgcataagccacaggataaataatactaattgtttataataatcacaatgtttttaacgaatttagttggtgatgcgtcctgtcagttgagtaggtgggaatagcatggactttccccaaataacaaatgctaagttgggtttttttaaaattgatttaatacattttttttatgttacagttaaatttgaaactatatttaacaagcaatttggatgtcatcgatattttgtaataggaccattcacttagcggagtcatcaaccttggcgaatctagcgagcacatccacctctcgcttatcaggtctatcgataacatcgctcatcaatcgattcgtgaaccagctctatcgcgaaacggtcgcgtgttcgcacgcaaattgcaatataaatccacagaaattgacagggaacgttgctaaagggcgaaaaacaatcgtgccgcgattgaggcctgcgatctgcacaggaaatgcacaattgcgaagcgcaatttgataaattcggtaatgttcgattctcgaaagaaccagtcgtgtgcgtctgtatgtgcttcaaatgtcactctgtgtgcgggtgtgtggggagtgcataaaaggcatagaggcagcaaggagtgaaagagagagctccatcggcagcgcaacgaaagtgagcgagaagcagaaattgttagtgcttataaggatatgtgagaagggagagtgagacagtaagaaagaacggaagaagcagcagcgacgccgaccgacaacaactgtaattttccattaatttttgggcgggttttgtgctgcacaataatacaactggcataatataacttggcttattttttataaccaacatgtgtattttgttcacgttttgctgcgtgtgtaggtgtgagtat

SEQ ID NO: 3281 - DNA, 1124 bp, DROSOPHILA
tgatgagcaagagggagtttttgcccgtgcccttactttcccattcgtcgcctagcgaaggcaatgatgaaacagcgaggaattccatttggagcttaactgtgtagcgaagcgaatcgcttccattagggactttcctcaattcataaactaaatatacatatgtattcactttaatgctaaaaattaacgaagcaatgcctgaaatcaagagactttgcctcgccaccgagaatagtcatatcgcagccaatgccatgctgctaacaaagatagatgaactcaattcccaagtcctgtcgcagcgcgcagaaatcgaaaacttgacgagggcggttaagacacttacggaattcgttaagcagtcgatgaaaacgaccaagccgaaggcgaagggaaatccggacgatgattttccaattatgtatgaggaggatctggtcgaagtgaatcacaagataagccaggactccagggggatctatacgaattccatgcggaaattcctgcgccagggaagattaagccgcaccataagactcattttctccgaggacatccttctgaactacaatattgatgggaatcagaaaaagaaaagactaaaagatcacgaacatctgtttcgttcgcttatgaacgccatcggtcaggtggaaccgacgctaccctcggaaaaagtcttattcaaagccatgagatgcgttaagaattgcgcagccaaaaagaagggcaaggtagatgatgaccccttgtccgttttgagcgtggagaaatcataactgtgcccatgtgagatgacatagtagaaacaaggatttaaatataagtaatgatttacgggcgaatcaatccgaattgaggatgaatacccaaatagtggttgatggatcatcatcactttgttgagaagttatcacttcatggagaagagcgagagcaaaacaaaagacgaaaagaaaacatcgatttttcactatactatcgatgtttcacgccttcaaagtgaaatgtccaaaaaatatgcctcgttttctttatatgattactaaatgacacatttttttaaaataatataattattaaatgcctggtgatattagcattatcactcttgtgaaagc

SEQ ID NO: 3282 - protein, 194 aa, DROSOPHILA
MPEIKRLCLATENSHIAANAMLLTKIDELNSQVLSQRAEIENLTRAVKTLTEFVKQSMKTTKPKAKGNPDDDFPIMYEEDLVEVNHKISQDSRGIYTNSMRKFLRQGRLSRTIRLIFSEDILLNYNIDGNQKKKRLKDHEHLFRSLMNAIGQVEPTLPSEKVLFKAMRCVKNCAAKKKGKVDDDPLSVLSVEKS

SEQ ID NO: 3283 - DNA, 3176 bp, DROSOPHILA
ggttcatatcccggcatgccatgtacacagtgcctcctcgcttggcaatctccaggaccgtctccttgccaatgcccgtgttggcaccggtgacaatgaacaccttgccggtctcatcggtctgcttggtgaactgaccgccctgcatgtattttctgaaattcattaattcttatcactctatttcaacacaggccgcaattcacgagcgtattaatcattactcagcagtagaactattccatgcaaataccttagcaagtaggcagccagtccgataatggacggccaaaaatgagggggcagcacaagcaattagtaaggcagcccattttgtttggatacagtatagatcttgccgccgtttgtgttcgtttcacttgctggttctgtcaatgaatgtttgcccgtccgtttggaactgccttttatacgaaatgtacgctatctgctccaaaatacacgaaagccacaaaacgcttactcacgatgagtttgattcgaaactgcgagagaacgaaatatgtttggggtttgctgagagctttttgcttctagtttataaaaacctcattgcaagtcgagcaaatgcatgataagctaaataactatctgcaagtctaatttaattaatacctaatcttataataccatattattctattattattattcttatttatattctattattttcgattagtttttcacctgcttctatgacagctcatgacttaaaccgaaatcatatattgctaaatagttcagattctagtgacgccaaggcaacgttaactaaatgtttatttaaaaaatgcaattactaaatcagtttatttaagattactcagataactggttccaagacttccagccaaatgtttttaaaatgtttgtaatgtttttacaaaagttgaacagaacatctagctcatttagcttattctattaaatgtatttcaacaatacagggtaagagttaaaagagtcataaagttgctcatatattaattcccgtccacttttcactttccgcccataggaattgggcatcatcgtcatactgggcggccgagcccacgtgcttctgcttgcaatcgctgaagtatcttccagatactttttccaaactgggatccagggcagcgtacagggtcgtctgtgcgccattcctagccgtctttatgaatatccatataataggggctatgagcaatctaaaggcgagccgaaagttaatagctgatgggatgatgcaatcagcaaacttactttccaaaccacgaacccaaaaagggtgtattgcggaacagttccgtgtttactactccgggatgtagggcatttaccgtgacccctgttccgctcaggcgtttcgccaactccctggtgaagaggacgttggccaatttgctctgacagtaggccatctttctgtcataggacttttcgctgttcaggtcgtcacgcttaatccttccgaagcggtgagcaatgctggacaggaccacaacgcgactgggcgcggaactcttcaggacatcgagaagcagaagtgtgaggaggaagtggcccatgtgattcactccgatttgcatttcaaatccgtcctccgtcagcattttggggcagtccataatgccggcgttgttgataagaatgtgaagcttgttttgctcccgcttaaagctaaaaagtattaaattgagtacctttatttatatgtgtattcattaaggtcaataggaatgtgcttacccagcagcgaagttcctaatggacttcatggagcacaggtccaattggcgtgcgaagatgttctggttgttggtcgctttgatgatctcccgacgggcattctcgcacttcttcatgtcccgacaagccatgtacacggtagctcccctgcgggccagctccagaacggtctccttgccaatcccctggttgcagccggtcacaatcgccactctgccggtctcattcgttttcgtggtgaactgacctccctgcatatattgtctaactggctgaggttaaagggccatcactgagagtggacaaaactcaccggagcagatagattccgatggccgaaagagctgacccatatgccagcgggcagaacaggtaatccgtgggtgcactcatctttccgctccgaatgctaccagctccaagtggcgactggccagatccagtccccttacacatttctttatacgagcaatatcaaaacctcggaatgtccatacttgaaacattaacgtggaccggtataaaacatcgttttaagtttaaggttggagggtttacgattgccgcgtcgccgagggaaacggatgcttccgtaagtttttatcgtccggccaaagtttattatgtaagctgtatagatagaatcataataaccgtcgatcatagggtaatgtagatatagctaaagtgtattactagaatgagtttcagacctaggctttcagatcgtcttaaatgatgaatgtgggaaagctctctataaatacaccttatttaaggctctgttttcacagcaatcgatttgtaaaaattacatttaatgaccagcttctgcgatgacgaggggaagtagttagtcttccatgttattagcttgcataaattaaatgaaatgataatttttgggcagcagctccgtttatttttggattgagcaatacttacttaatttaccatgtaatttgttggagagccttttgttttgtttgggccttttactttcatttggccattttcgttaatgcgaatagtactaacacccgaattcgattcgattaacatactggccggaatacaatgagcacaggctcgcattcacccggagccatgtggtccgccaccaactttcgcaggcatcaaagaaagccaaaccaagttctccatcggtggtttttcaagggcagtgcctggatcatctacgagcaatatcaaaacctcggaatgtccatacttgaaacattaacgtggaccggtataaaacatcgttttaagtttaaggttggagggtttacgattgccgcgtcgccgagggaaacggatgcttccgtaagtttttatcgtccggccaaagtttattatgtaagctgtatagatagaatcataataaccgtcgatcatagggtaatgtagatatagct

SEQ ID NO: 3284 - DNA, 1003 bp, DROSOPHILA
agctggtagcattcggagcggaaagatgagtgcacccacggattacctgttctgcccgctggcatatgggtcagctctttcggccatcggaatctatctgctccgacaatatatgcagggaggtcagttcaccacgaaaacgaatgagaccggcagagtggcgattgtgaccggctgcaaccaggggattggcaaggagaccgttctggagctggcccgcaggggagctaccgtgtacatggcttgtcgggacatgaagaagtgcgagaatgcccgtcgggagatcatcaaagcgaccaacaaccagaacatcttcgcacgccaattggacctgtgctccatgaagtccattaggaacttcgctgctggctttaagcgggagcaaaacaagcttcacattcttatcaacaacgccggcattatggactgccccaaaatgctgacggaggacggatttgaaatgcaaatcggagtgaatcacatgggccacttcctcctcacacttctgcttctcgatgtcctgaagagttccgcgcccagtcgcgttgtggtcctgtccagcattgctcaccgcttcggaaggattaagcgtgacgacctgaacagcgaaaagtcctatgacagaaagatggcctactgtcagagcaaattggccaacgtcctcttcaccagggagttggcgaaacgcctgagcggaacaggggtcacggtaaatgccctacatcccggagtagtaaacacggaactgttccgcaatacaccctttttgggttcgtggtttggaaaattgctcatagcccctattatatggatattcataaagacggctaggaatggcgcacagacgaccctgtacgctgccctggatcccagtttggaaaaagtatctggaagatacttcagcgattgcaagcagaagcacgtgggctcggccgcccagtatgacgatgatgcccaattcctatgggcggaaagtgaaaagtggacgggaattaatatatga

SEQ ID NO: 3285 - protein, 296 aa, DROSOPHILA
MQGGQFTTKTNETGRVAIVTGCNQGIGKETVLELARRGATVYMACRDMKKCENARREIIKATNNQNIFARQLDLCSMKSIRNFAAGFKREQNKLHILINNAGIMDCPKMLTEDGFEMQIGVNHMGHFLLTLLLLDVLKSSAPSRVVVLSSIAHRFGRIKRDDLNSEKSYDRKMAYCQSKLANVLFTRELAKRLSGTGVTVNALHPGVVNTELFRNTPFLGSWFGKLLIAPIIWIFIKTARNGAQTTLYAALDPSLEKVSGRYFSDCKQKHVGSAAQYDDDAQFLWAESEKWTGINI

SEQ ID NO: 3286 - DNA, 7338 bp, DROSOPHILA
gacaaccgttagcaaagtagagaacgtttttggaaaatgcgctccggcgctgataataaaaaaaagtgatatataaaaattaaatcgctgcaaacttatttacttgggtagaggacagatgaaaagattaatacctggtttgtagaagcaccaaaacaaagtattagccgtcatgggaatggaatttttccttgatttttattaagttgcctattttccttaacagtaaactattttggctctaatattaatccttaaattttttataaatagctcaatgtaaaaaaatgtttattcaacaacagctaacaaaaaaatgacaagaattttgttaaccatgagtttcatcacctctgcgacttccctcaatcagaagtacgtacacaattacttagtggcctattgcgtatatcatttatgtaagacttttcagcgcctcaaccaatttcattactacacacaatgttgccgcatgcggcgactgctttaaggtatgccaagcgattagtcacaaccattatctctatgggcaattagaaaacatttccatttctatttttgacatttttattttaatcttatcgcctacgactaaaaacaaactctcgcattggttgggcggctacatgggtagaaacaaactaagacaaacaatttagcatcgtaggtaacttaggtaacttaggctaacgactgtttaggagtacatctttatgtgtatgtataattcctaaggttaagtcttaaaaacaaaaggacattttgttggtaatttgcgacgcgcaagagtaaaggtaaacgtaatacaaaacttattgaatctagggttgcccggtaatgaatctgcgacctttacgggtcgaggtcagcgaataaggcatagccaggtaaggaataagcgatggcgatactgatgactcacaagcgaaatgctataagtgactgagtttggcgctgacagaatgggtgtccaagctcatggcccaaattgtctgatctatcactgatgcggctcactggagctgctgaaggtgcggctgcgactcaggcgcctggcccgctccgccagctccgcctgctcgctttgtccttccgagaggagatgaggtagctgcagaatgttgcgcagctggcttttcaactgcttggtctgcgggcgttgctctggctgggcggatagcatttgctggagcaagtcgtactgctgcgggtaattgacagcgaaatccttgggatactggccgtcccgaagactgcgcagtgtcttgatccgctccatttcagtgctgaagtacacgtgcagctcgaagaagatcagtcccagtgaatagatgtccaccttgtagtcgtagtgctggcccaaaagctgctccggcgacatgtataagtgggtgcccacctgctgggtgtggcgggcacaggagggcaggccactctggtccccacacttggccaccaggttggggatatcggccatgtcggtgacgagcccgaagtctccaatctttatctgtccatcctgcgagaagaatatgttgcttggtttcaggtcccgatgaatcagacccttcaaatgtacatagtcaacggcatcaacgatctggtgaaaaatgtcaccaatgtgggcagcccttgtttccgaccggttgtcccttaaccagtcgcgcagactctccttgcggcatagctgcatctggatgtagaggtacaccttgctgggcttggccaccgttccgttcagaatcgtggcactggagggcgtaggttggctcccgttttggttgttattgtgattctgggccagtgccaaggtaaggggcttccttctagctttattatcgtcattcgcatcatcacttccactgctcttggggcgcacagattcgatttgaaacgaattggagaccagttggtgctgtgagtagtttatgttcttaaggtcaaacgaggccgaatggatgtcaatggacacggagctgcgatgtcgtttctcatggtctccctgctgctcttcatcctcttcatagtcgtcgtcggtatcatcctcctcctctgcccgtaaagcggctgactgcgactcgctgcggaattcaatgagcgagtcctcttcctcatcgtagtcgtactcctcgcgtatgttcttgagtgatgactcgcctggtagatgaaagtcgtgactacaagcggtgctattggctgcatccgaaacccaggacaagagctgctgttggcgtttctccttcaactgctccgtcaacgaaggcattgtactatcgtccggcgtctctatctggatagaggtggacagctcgtgggcaagcagcttgcgatcctcttcttcctgccaaccagtcggcggtgtctcggtccaggactggaaattttacaataaagagttttatcatcagataatacttaaaaacttaattttaacttttaaatagatagaagaacttacatggaagtatcgcacgatgttgtggtgctcacaactagccaaagttcgagcctcgcgaaggactcgctgtcttgaagattccttattgggtagcgttatgcgcttaatggcgtatcggttctcatccagcttgttcttagcttcgaagaccactccgaaaccaccgcgaccaaggcactgcatcaactcgaagtcggactgaaagcgggaagtgtaatgctcgcctgaatgagttgtagactccgaaatggtgcgctgatttgcttgtccaggtgggaagctaaaacgatttccaggtcgctgcatcggcaccactggacctagtaaagcctgtgtggatgcttcggtggcctcgatggccgtttgaacaggcacatgacgttcaatgaccagatactctcgctccacgcgctggtttcgttggcccatgaaaatatttagaatcacagccgacgtaaatgctatgaccacgatttccttccaccagaaccacaacgacaatatcacaacctttacaggcgcatcaatgtcatccaaactaaagcccaaatcgtcgttgacgctatggtttccagtagcttccgttccctcagatgtggcattggtaggcgatgttggagctgtgattgctggaaggtcagttggattattctgcgtactgcactcttgcgggccgttcagatcgccagtggtgtagaagtaaaaaccattgccattgacaaactccgatgcattcaatacggactgcgctgccacagcgaagttttcatcatcatagggcaccagttcccctccttgtgccacagctccctcagcaatcatttcagggtcctcctggtctttccggaagattaccagcgatttgctactggcggatatcggcttccagggaatcctgggcatcaggctggtgtcgcctgtaagctgctgatagaccttggtctggtccataatctcctggcgtagacgtattgactcctgaatatacaactgtttatcgtacatgcccaagtagatggatggcgggctttgtggcgcattgggcagctccgtgtcattttcgtcctggtcccaaagccactgggccgagctaaacaaatcaataggctgcaattcgtcgtcggcatttgtattccaggcactcacaattgggtgatcaaactgaaaagcacacgaaaagtactaagtaaatttgcctttaatattaaagccatcaccacttaccttgtacttccacagcatagtctgtggctcacttttgctgaaggcgcagataattccctcgggcactaccacctttatatccacatccaaaacagccagctccagctcatcgcgcggctgtagctggcactcggaaggtctcaccagatccaactcatgctgacctacgctaaagttccaacgctccactccggtccgggattccacggcccgaaccgtttgtgtctggcggcggacgataataacgtcgtcaaggagaggatcatggcgcactatgtagccggcctcgtcccttaactgttctccgtcctccagctgatcctcctcatcgggctccctaatggtgtcgtcgattgcaagcccttcctccgtagagtttacacatccgtttagagaacattcatacagcagctggccagtgcgaacggaaacaccgtatgagcgtgtctccttgcctccggatataaccagatcatcgctgaatttggcgctcgagctgagtaggtgctccgccgtgattggaatgggatcgatggagtccccgtcgaacttgtagatgccgccgctcaaagagggaatcatgcgtacgaactgcccattgttggtcagctccaatcgatggatgctggacgagattagtggccccggtccggtgggcacactccagcgcagtttgccggacttggcgatgtccagagcgctcagtcgaccatcaagcgtggaaatgtataggagtctgtggatagaataaataatgcaataccaagttttaatgtttttatttccatatttaataaataaatatcgactactccatattagctaatagtccataatggcggaatttgccaaattgttattttcgctaaatgataccgtgtcagcgtaacaaggattttgtagcttgtggaatttagagtgggcgaggccaatatgtttttaaaagccgttcttgttaaatataagaataccgtataccctttatgtaggtaatatccaattaccatgggcgagcttgaaataaacaaacacaagattttgaagaaaaaacaaaaaacacagcatacatagattcaagtaatgatttgatttttatgtaatattttctattcgtgcaattaatgtaaaaattgaattttctgtaagtgagtaagcctttggttaactgtttaaaatatttcaactcgaaagattaaatactagagttaaatttgcaattatacaaaaagttgatttgtgcttgcaaccgattccgtcaccaggtacacggtgcatggggcaagaataaaggaaagcaggaaaaggggcacactggcagacccagctgacagcgtagaaaaggtaaatgggaagtaaactcagctgtttttgcgccaagaagacaagaactcgaggaacaacaagtgtcagttggcccctctccatttcccctatcgccatctctgtcgcgcccaccaaggagccgaaaatggcgcccgcaaaaaggggggataaagcaaacggggggagaattgtgaaattcagtgaaaaccttgcacaaacgcaaaggaaagcaaaacaatcggggaaaccagttcggattggcatgcttgccaaacaacatatctagacgtctgcctcaaacaaaaattcagttaagatcttgcaaatgactcaccgcatgcttgataagcgcgtccactgattacgggttttcatagttggccaaggtgcaaacatgtgggttcatattatcagatcgctcccagacttcaagttgaacagaagctctccgaatttctcgtgttagacgggacaaggtacttaaagctaagggccgtcgcaaatgttaccaacttgtcggatcagccgagaattttgagctacgtattttcactggccccccgtcgtaccacagttctcttcgaattccccgttttagctgattaaataggcacttttcgagtagttcaaccaaatatcactaacgtgttcttcgcaatatttgcctaggtgctggctgctcgtttatccacttgcaccgcgttttagcgaatgttcgagaacataaacataacacacacataacgcactcttcttcttctgctacaatccattcgataccagtgcattcctcccgatactttggttagggtacgtaccttcttgcaacgcgacgctcctcctgatctacgcagtgttcgagcccggggggacggggagatccggcagtctggagctccgaatcagtagttgggtgcccagctagcacctgggcgggatcgaaagccaccaggccggccatagtgagcgtgacgatctgcaggaagctcaggctccggcgacgatgcctcacgatgccatccaggtcgtcctgcatcgtacgcgcatataacgtaatcctggtcgttggcgatcggacgcggggaacggtgcagaaatgcaagtctctaattggttcgaacggtgacgtgttgacctcacttcggggggtcggttggtggaacagcggcggcagtggctcccggcaaggtcggcgcacatctccgcatcactctcgatggctcctgcagcaatcaatcgcaactccactatttaaatccactaaaactggtcagtttatgtttttgttccgattgggccgcaaaacgcgcgattgcaagtgtgaccgcgttttgacagccttaaaataacagatgacaccacaatacagtttatttcgtcattacctaaaagtaccaaaaaaatacacacggtgggaacagtttcactaaggttttactattttaaacttttccagtaactaatttaaaacaatgtttgacgcccatgttttgacacaaatagggacaacttaacaataattattaaagtagatgaagtattatttccatctcatctcttattgaatacttctattattcgacgtgttttaaaaataaattctattcggctataattctgacacataccaaatgaaattcaaacattactttaatttaaatatgctctaccttctaaaaatatgttaggtggtatattcgtcataatatagaaacgtttattacaacatttattctttttaaaaaacttttgattactatgaaaccatttccttgatttttttagaaaccgcattgttgattaacagaaacttgaattcgtatgattttcgagcagaaaggctacgccatacacccctagtgtccttgcgaaaagattcgttagtagtacacactacagtattcgttgactttggcaatacaaaaaatagttttgagattttcaaaactaattaaaatctattatggtagaagtggtatgtctgatctaaaggaacgacattagccaagagtctcgaaatccacattcaattcgtactctaaaacgtttccatcgtcttcatctgctacttaagatcaatataaatggattttaatgcgaagtggatggtcccgccaaaagataattcattgcagtagggaaagtcaaaccgaacagccatcaatcgatatacagattaccgtcaactttcaatcggtatctcgccttaataaaaaagccaagttgcgttttaattaaatttaaagtgtttcatttaatgtaaaacggattttttactcctgcaggtcagtaattcaagtcggatattaacttaaatccttgatgggtacagc

SEQ ID NO: 3287 - DNA, 3723 bp, DROSOPHILA
aaaacgcggtcacacttgcaatcgcgcgttttgcggcccaatcggaacaaaaacataaactgaccagttttagtggatttaaatagtggagttgcgattgattgctgcaggagccatcgagagtgatgcggagatgtgcgccgaccttgccgggagccactgccgccgctgttccaccaaccgaccccccgaagtgaggtcaacacgtcaccgttcgaaccaattagagacttgcatttctgcaccgttccccgcgtccgatcgccaacgaccaggattacgttatatgcgcgtacgatgcaggacgacctggatggcatcgtgaggcatcgtcgccggagcctgagcttcctgcagatcgtcacgctcactatggccggcctggtggctttcgatcccgcccaggtgctagctgggcacccaactactgattcggagctccagactgccggatctccccgtccccccgggctcgaacactgcgtagatcaggaggagcgtcgcgttgcaagaagactcctatacatttccacgcttgatggtcgactgagcgctctggacatcgccaagtccggcaaactgcgctggagtgtgcccaccggaccggggccactaatctcgtccagcatccatcgattggagctgaccaacaatgggcagttcgtacgcatgattccctctttgagcggcggcatctacaagttcgacggggactccatcgatcccattccaatcacggcggagcacctactcagctcgagcgccaaattcagcgatgatctggttatatccggaggcaaggagacacgctcatacggtgtttccgttcgcactggccagctgctgtatgaatgttctctaaacggatgtgtaaactctacggaggaagggcttgcaatcgacgacaccattagggagcccgatgaggaggatcagctggaggacggagaacagttaagggacgaggccggctacatagtgcgccatgatcctctccttgacgacgttattatcgtccgccgccagacacaaacggttcgggccgtggaatcccggaccggagtggagcgttggaactttagcgtaggtcagcatgagttggatctggtgagaccttccgagtgccagctacagccgcgcgatgagctggagctggctgttttggatgtggatataaaggtggtagtgcccgagggaattatctgcgccttcagcaaaagtgagccacagactatgctgtggaagtacaagtttgatcacccaattgtgagtgcctggaatacaaatgccgacgacgaattgcagcctattgatttgtttagctcggcccagtggctttgggaccaggacgaaaatgacacggagctgcccaatgcgccacaaagcccgccatccatctacttgggcatgtacgataaacagttgtatattcaggagtcaatacgtctacgccaggagattatggaccagaccaaggtctatcagcagcttacaggcgacaccagcctgatgcccaggattccctggaagccgatatccgccagtagcaaatcgctggtaatcttccggaaagaccaggaggaccctgaaatgattgctgagggagctgtggcacaaggaggggaactggtgccctatgatgatgaaaacttcgctgtggcagcgcagtccgtattgaatgcatcggagtttgtcaatggcaatggtttttacttctacaccactggcgatctgaacggcccgcaagagtgcagtacgcagaataatccaactgaccttccagcaatcacagctccaacatcgcctaccaatgccacatctgagggaacggaagctactggaaaccatagcgtcaacgacgatttgggctttagtttggatgacattgatgcgcctgtaaaggttgtgatattgtcgttgtggttctggtggaaggaaatcgtggtcatagcatttacgtcggctgtgattctaaatattttcatgggccaacgaaaccagcgcgtggagcgagagtatctggtcattgaacgtcatgtgcctgttcaaacggccatcgaggccaccgaagcatccacacaggctttactaggtccagtggtgccgatgcagcgacctggaaatcgcgagcattacacttcccgctttcagtccgacttcgagttgatgcagtgccttggtcgcggtggtttcggagtggtcttcgaagctaagaacaagctggatgagaaccgatacgccattaagcgcataacgctacccaataaggaatcttcaagacagcgagtccttcgcgaggctcgaactttggctagttgtgagcaccacaacatcgtgcgatacttccattcctggaccgagacaccgccgactggttggcaggaagaagaggatcgcaagctgcttgcccacgagctgtccacctctatccagatagagacgccggacgatagtacaatgccttcgttgacggagcagttgaaggagaaacgccaacagcagctcttgtcctgggtttcggatgcagccaatagcaccgcttgtagtcacgactttcatctaccaggcgagtcatcactcaagaacatacgcgaggagtacgactacgatgaggaagaggactcgctcattgaattccgcagcgagtcgcagtcagccgctttacgggcagaggaggaggatgataccgacgacgactatgaagaggatgaagagcagcagggagaccatgagaaacgacatcgcagctccgtgtccattgacatccattcggcctcgtttgaccttaagaacataaactactcacagcaccaactggtctccaattcgtttcaaatcgaatctgtgcgccccaagagcagtggaagtgatgatgcgaatgacgataataaagctagaaggaagccccttaccttggcactggcccagaatcacaataacaaccaaaacgggagccaacctacgccctccagtgccacgattctgaacggaacggtggccaagcccagcaaggtgtacctctacatccagatgcagctatgccgcaaggagagtctgcgcgactggttaagggacaaccggtcggaaacaagggctgcccacattggtgacatttttcaccagatcgttgatgccgttgactatgtacatttgaagggtctgattcatcgggacctgaaaccaagcaacatattcttctcgcaggatggacagataaagattggagacttcgggctcgtcaccgacatggccgatatccccaacctggtggccaagtgtggggaccagagtggcctgccctcctgtgcccgccacacccagcaggtgggcacccacttatacatgtcgccggagcagcttttgggccagcactacgactacaaggtggacatctattcactgggactgatcttcttcgagctgcacgtgtacttcagcactgaaatggagcggatcaagacactgcgcagtcttcgggacggccagtatcccaaggatttcgctgtcaattacccgcagcagtacgacttgctccagcaaatgctatccgcccagccagagcaacgcccgcagaccaagcagttgaaaagccagctgcgcaacattctgcagctacctcatctcctctcggaaggacaaagcgagcaggcggagctggcggagcgggccaggcgcctgagtcgcagccgcaccttcagcagctccagtgagccgcatcagtga

SEQ ID NO: 3288 - protein, 1141 aa, DROSOPHILA
MQDDLDGIVRHRRRSLSFLQIVTLTMAGLVAFDPAQVLAGHPTTDSELQTAGSPRPPGLEHCVDQEERRVARRLLYISTLDGRLSALDIAKSGKLRWSVPTGPGPLISSSIHRLELTNNGQFVRMIPSLSGGIYKFDGDSIDPIPITAEHLLSSSAKFSDDLVISGGKETRSYGVSVRTGQLLYECSLNGCVNSTEEGLAIDDTIREPDEEDQLEDGEQLRDEAGYIVRHDPLLDDVIIVRRQTQTVRAVESRTGVERWNFSVGQHELDLVRPSECQLQPRDELELAVLDVDIKVVVPEGIICAFSKSEPQTMLWKYKFDHPIVSAWNTNADDELQPIDLFSSAQWLWDQDENDTELPNAPQSPPSIYLGMYDKQLYIQESIRLRQEIMDQTKVYQQLTGDTSLMPRIPWKPISASSKSLVIFRKDQEDPEMIAEGAVAQGGELVPYDDENFAVAAQSVLNASEFVNGNGFYFYTTGDLNGPQECSTQNNPTDLPAITAPTSPTNATSEGTEATGNHSVNDDLGFSLDDIDAPVKVVILSLWFWWKEIVVIAFTSAVILNIFMGQRNQRVEREYLVIERHVPVQTAIEATEASTQALLGPVVPMQRPGNREHYTSRFQSDFELMQCLGRGGFGVVFEAKNKLDENRYAIKRITLPNKESSRQRVLREARTLASCEHHNIVRYFHSWTETPPTGWQEEEDRKLLAHELSTSIQIETPDDSTMPSLTEQLKEKRQQQLLSWVSDAANSTACSHDFHLPGESSLKNIREEYDYDEEEDSLIEFRSESQSAALRAEEEDDTDDDYEEDEEQQGDHEKRHRSSVSIDIHSASFDLKNINYSQHQLVSNSFQIESVRPKSSGSDDANDDNKARRKPLTLALAQNHNNNQNGSQPTPSSATILNGTVAKPSKVYLYIQMQLCRKESLRDWLRDNRSETRAAHIGDIFHQIVDAVDYVHLKGLIHRDLKPSNIFFSQDGQIKIGDFGLVTDMADIPNLVAKCGDQSGLPSCARHTQQVGTHLYMSPEQLLGQHYDYKVDIYSLGLIFFELHVYFSTEMERIKTLRSLRDGQYPKDFAVNYPQQYDLLQQMLSAQPEQRPQTKQLKSQLRNILQLPHLLSEGQSEQAELAERARRLSRSRTFSSSSEPHQ

SEQ ID NO: 3289 - DNA, 4603 bp, DROSOPHILA
caacgcgccgatgctgtttcgttcttcctcttgcttttctatcctgtcctttggcttcctttccttcttcctctccacaccaatcactgcgtgggtatgtgtgtataggtgtgtattggaattcgcaaaggtatttgattaggaaagctgggatttgtttaaacaattagcatgcatcactttttgcaaatttgttacagtaacttgggtcaacccacgcccacttttataggtgcggctgttgggcaggatttgctttttggcagtggtggtggtgtacgtgtgcgggatgcttctgtgtgcgtgcgagagagcacattggagtaccgttatcgctggagccacattttcttatttgacatacacttttttgttgcacacgcacacgcgtttcgttgttttttttttgttactttagtaaaatttattttctatactctctttcttgaaagctttcttttaaccgttttttgtccttatctcttggtatgtacgacacacacgcttcacatacgttctagtttttggcagttgttcaattgttcgaattaattccgatttcggaatttgttgttttaacgatttatgagttttttcggtgcggaaacaataacatttaattcattttaagccgagaagaaatgcaaatcaatttttattttcggcaacactcgaagaactatcgttatcgattgcgatttcttttacctgtagtatttcgtgtaacatacttttgggtggtgcagaaaagagtcacgctcgaatatactaaactgggctgccaacttagcttttgatttgttttcttgattttatattaacacaccaaataaagaaattgcttaagacaactgtcccttttaagatattatttcccagattaatatacgtatatttgattattggtgacaattttggatacaaaagccaaagttatcggccactttaatactaataaaatatgaccaatatttggcatttcttgtctaaatatttgcagccactctaagattaatattttaccaacttcttttagcaataaaaagtaaatatctttactgaaaacgtcaactaaggtctcccacatacaacttaaaatggacgacatacgtagcagcatagatgatatgatggaccgctttaacgacagcattacccattcggcacccaagaaactacttttcaaccggctttccgcctccttcgatttaggagtttgtaagttgtaatttacaggcgcgaacgtagaaactaacaagtaactcctctactagcacccaataagcgacgtcgggaacgggaatcaccggaacgcagtcttaacgacaccgcctcttccctcaatatgcccgccaacgattccatggcttctttgcagaacagcaaactacggaccgagctgatcgaaaccaaggccatagtaattcagctgcgtaacgaaatcgaaaagaagagccgggaacacaaagaggccatattgctggctgagaacaagagcacggccttaaaggatcagtgcgacatcaccagcaagaagaatttggagctgcaggacgatcttaaggcgcttcgtaagcgagagctggtcttgaagaatgaggccagtcgggccaccgccgagttgaaccaacttaggcttaagttcgatgaatccacgctcaagttgcagaaggagaagtacctgcagaaggaggatgcccgcgatgtgcacctgtgcatcaacaacgaactgagcgaatatcgccgcatagcccagcgggccgatctcgaactgcagtctacgcgcaacgaactggagcgcctacgtcaactcaatgaggagttacaggccagggcttccggattcgagcagctgcgcgccaatcacgagaagcaaacgcaaagcttgaaggtggccaacgatcgcattcaggagctggagttcgaaattcagtcgtatagcgactggaaggaggtggtcaaaacctcacgagagcgcctggccagtgttccagatttgctagctgaggtggagcatctgcgcagccacaacaagcatttaaacactctgataggcgataaattgcttctggaggagcaggtctacgactacaaaacgcgactggagcgggaggaaggtgctcgggcggaagcagcttccctgcaggtgaaactgcttcacatggagcaagaactcaaggaatgggtcaaggtggcccaggatcactgcttggccaacactttggtcagcccaatggccctacgctcgcgcattgagcaactgctaaaagaagacatcattcacgtggcagagaagacatcatcggcttcggataccaagcatttgaatgtaggttttgtccaatgtgttccaagtccaatttatctgactccattttatagaccacaattcgagatctagagcataagtgcgccatttacttgaagaacatcgaggatctcaatatcggactgaaacgccacaagaacttcaaggagcgactgcagcgcaaactgatcaccgtgtctaaggagcgcgacttctacaaacaactggtggaaaacttcgacaaggacacgaccctgagcaatgccagtgtggcggacatgacgcaggacatgcaggtgcgggtccgaatggaggtgcttgaacgcaccgtaaccggatacaaggacatgtgtgccacgttggaacgcgagattcaatccttgcgccagcaggagcttgtgaacgaacctgccggagagggatacgatagcgtcaaaaaggaactggatacgctgcggatggaaaacgatcggctgcgtcggcgcaaggaggaactggagatggagatgatgcaccgctgcttgcggggcgacttcaacatgaaggacttcaaggtggtacactttagtgaaaatcccgctgccgaagcctatgagtccaccaaaaacatgatggagaagctgcaggcggagattgagcgactcaagcggcgcaacaagaagttggaggacgataacgagcaaaggctcaatgaaaccaccagcacgggcggcatgacactgaactttaaggagttcaatcaacttcaagccgaattagagtccgccaatggcaagatgcggaagatgagggattgcttcaaggcggcccgagaggagttccgcgatgtgtgctacatgctgctaggctataggatcgatcgaatcggtgccaacagcaactatcggtgggtagcgattccatagatcctccatcttagttgctaacatttaatatttctcttgcagcatatcgagcatgtttgcagagggaccggatgactatctggacatcagcctcaacgaatcgaactgtttggcgctactggagtcgccatattcgcacacattcaatccacctattgatcagcagctggcagccagcaactttcccgcattcttttccgccctcaccctagaactattccaaaaggccactgtcacgatgacttaggtcatcattactttagtctgtcttagcttaagctagccgagtatgaaggcattgaaacttattcttgtccgcatcagatatacgattggttttttattttaccacgctaacaataaacttccccacatataaatacatataaattatagtaatgcacaatagaaattggaatacccaatccactaagtggaggtcaggatgtgagccacctgctccggcgttctgtgcagcagctgctccggctgctcgaagccgttggccggatcgtggacgcgttcgtagatctgcttgtagatggccacgatcacgttgaaggatcgcttctgaacggcggcccggtgactgctggacattatgagctgcacctgcggcaggagcaatacatcgggtagttccagaaaggcgtccatcttggacatgaagatcttcagcaggtttgtttctattttagattgattgctctgcagaatggcgtagatgggacccagattgaggttcgccaccagcgatgatgcctgctcggaggtcagtgtgtccaactgggcatccgactgcgcctgcagccgctccacgcgctcatccatatattcgtagacagccagcgagctttgcatgtgatgcagacagttcaaaaggtacacacccatgtccacggtgggcagatgggcagcactttcttgcacggactgcagcagcggatctatcacgcagctcacgatctttgttatgtcggcctgccggccatcgaccatggtggccaccgaaagaatctctttgagcatatttagcaaacgtgccacgcttggcggcggtacaagatccctttgcggcggttccaaggccaggcccgatcctccagagggacgctgcaaaacacttctcacctgggcagccaaggcgcccaggtagatctgctcactgctcttctgaagctccaccaaacactcctccaggctgccgccctgcaccacctggcgcattatttgctggtagaagcgtaacagattggaaatggtaaacaacacaatagtgtccttctccgcctgcagtatcgtctccactcgaacctttagaggatgacaaactccatcggctatgtagcccaaagcgttctgcagctggtcggaaatatctattgcaaaa

SEQ ID NO: 3290 - DNA, 2433 bp, DROSOPHILA
ccactctaagattaatattttaccaacttcttttagcaataaaaagtaaatatctttactgaaaacgtcaactaaggtctcccacatacaacttaaaatggacgacatacgtagcagcatagatgatatgatggaccgctttaacgacagcattacccattcggcacccaagaaactacttttcaaccggctttccgcctccttcgatttaggagtttcacccaataagcgacgtcgggaacgggaatcaccggaacgcagtcttaacgacaccgcctcttccctcaatatgcccgccaacgattccatggcttctttgcagaacagcaaactacggaccgagctgatcgaaaccaaggccatagtaattcagctgcgtaacgaaatcgaaaagaagagccgggaacacaaagaggccatattgctggctgagaacaagagcacggccttaaaggatcagtgcgacatcaccagcaagaagaatttggagctgcaggacgatcttaaggcgcttcgtaagcgagagctggtcttgaagaatgaggccagtcgggccaccgccgagttgaaccaacttaggcttaagttcgatgaatccacgctcaagttgcagaaggagaagtacctgcagaaggaggatgcccgcgatgtgcacctgtgcatcaacaacgaactgagcgaatatcgccgcatagcccagcgggccgatctcgaactgcagtctacgcgcaacgaactggagcgcctacgtcaactcaatgaggagttacaggccagggcttccggattcgagcagctgcgcgccaatcacgagaagcaaacgcaaagcttgaaggtggccaacgatcgcattcaggagctggagttcgaaattcagtcgtatagcgactggaaggaggtggtcaaaacctcacgagagcgcctggccagtgttccagatttgctagctgaggtggagcatctgcgcagccacaacaagcatttaaacactctgataggcgataaattgcttctggaggagcaggtctacgactacaaaacgcgactggagcgggaggaaggtgctcgggcggaagcagcttccctgcaggtgaaactgcttcacatggagcaagaactcaaggaatgggtcaaggtggcccaggatcactgcttggccaacactttggtcagcccaatggccctacgctcgcgcattgagcaactgctaaaagaagacatcattcacgtggcagagaagacatcatcggcttcggataccaagcatttgaataccacaattcgagatctagagcataagtgcgccatttacttgaagaacatcgaggatctcaatatcggactgaaacgccacaagaacttcaaggagcgactgcagcgcaaactgatcaccgtgtctaaggagcgcgacttctacaaacaactggtggaaaacttcgacaaggacacgaccctgagcaatgccagtgtggcggacatgacgcaggacatgcaggtgcgggtccgaatggaggtgcttgaacgcaccgtaaccggatacaaggacatgtgtgccacgttggaacgcgagattcaatccttgcgccagcaggagcttgtgaacgaacctgccggagagggatacgatagcgtcaaaaaggaactggatacgctgcggatggaaaacgatcggctgcgtcggcgcaaggaggaactggagatggagatgatgcaccgctgcttgcggggcgacttcaacatgaaggacttcaaggtggtacactttagtgaaaatcccgctgccgaagcctatgagtccaccaaaaacatgatggagaagctgcaggcggagattgagcgactcaagcggcgcaacaagaagttggaggacgataacgagcaaaggctcaatgaaaccaccagcacgggcggcatgacactgaactttaaggagttcaatcaacttcaagccgaattagagtccgccaatggcaagatgcggaagatgagggattgcttcaaggcggcccgagaggagttccgcgatgtgtgctacatgctgctaggctataggatcgatcgaatcggtgccaacagcaactatcgcatatcgagcatgtttgcagagggaccggatgactatctggacatcagcctcaacgaatcgaactgtttggcgctactggagtcgccatattcgcacacattcaatccacctattgatcagcagctggcagccagcaactttcccgcattcttttccgccctcaccctagaactattccaaaaggccactgtcacgatgacttaggtcatcattactttagtctgtcttagcttaagctagccgagtatgaaggcattgaaacttattcttgtccgcatcagatatacgattggttttttattttaccacgctaacaataaacttccccacatataaatacatataaa

SEQ ID NO: 3291 - protein, 730 aa, DROSOPHILA
MDDIRSSIDDMMDRFNDSITHSAPKKLLFNRLSASFDLGVSPNKRRRERESPERSLNDTASSLNMPANDSMASLQNSKLRTELIETKAIVIQLRNEIEKKSREHKEAILLAENKSTALKDQCDITSKKNLELQDDLKALRKRELVLKNEASRATAELNQLRLKFDESTLKLQKEKYLQKEDARDVHLCINNELSEYRRIAQRADLELQSTRNELERLRQLNEELQARASGFEQLRANHEKQTQSLKVANDRIQELEFEIQSYSDWKEVVKTSRERLASVPDLLAEVEHLRSHNKHLNTLIGDKLLLEEQVYDYKTRLEREEGARAEAASLQVKLLHMEQELKEWVKVAQDHCLANTLVSPMALRSRIEQLLKEDIIHVAEKTSSASDTKHLNTTIRDLEHKCAIYLKNIEDLNIGLKRHKNFKERLQRKLITVSKERDFYKQLVENFDKDTTLSNASVADMTQDMQVRVRMEVLERTVTGYKDMCATLEREIQSLRQQELVNEPAGEGYDSVKKELDTLRMENDRLRRRKEELEMEMMHRCLRGDFNMKDFKVVHFSENPAAEAYESTKNMMEKLQAEIERLKRRNKKLEDDNEQRLNETTSTGGMTLNFKEFNQLQAELESANGKMRKMRDCFKAAREEFRDVCYMLLGYRIDRIGANSNYRISSMFAEGPDDYLDISLNESNCLALLESPYSHTFNPPIDQQLAASNFPAFFSALTLELFQKATVTMT

SEQ ID NO: 3292 - DNA, 17478 bp, DROSOPHILA
cccctgccaccctacgagcacaagccggccaagaaccaggcggaggcagacgccaccctaaaggcgctgcggcgccagcaggaggtgggccagcgacaaactctagtcgccatcaacacggactacatcacggagagcatcgcggtgcacaagggtgagattgtcacgctgtgcgagtgccgcgagtccaaggatcagcgccagtggttctacgtgcggacgagggacggacgcgaaggcttcattccggccgaggtggccggccatggctacctgtagacctccaccttctggtattggtatgggtctctaagggtcatatgaaagggattagaaagcttaatgttaactatggacatcctttgtcatattaaccaaccatcatataattgctatatctagaatatcttaatctttaagattttctcatgattttgtggtaaattacttagctttatatttcgactctttccattactgagtaaagtatcattcatgaaaaaatggagcccaaccaccgtaagttgtccaaagagcaccttctcccttttaagatttccaaaaggacccaccccaaaaacaagtcaagttctacatttaaatgaattaacttaatacccatcttaagcactcataggccactaattccattcgcgatccttagtacgcttctagttgtaaactgtattcatatcggtgtccgtaattgaattgaattgtatctgtatctgtgtatgtttatgtgcgtgagtgtggatccttcgcaggatcttgtatttatctagcctagcattacgagtactctatgtaatagaaaacttgcttaaatgaaatcaaagacgaaagcgaagacggaacctatttatataataactgtacttgatgcttctaataaataacagacatttaaataaatataaaaaaccattgcgttactattgacctgggtaagtgggtagaaaagcaattgcatatttatacatatttgtattattcattttattatacacgtttcactcagaattgatatgtgtatatgaagataacataacgattttcagggtagttataaatgggttaacgttccaatatttgaactaattttttatttttttttaatgatctctataaatgtattgtttatgcactctaaaaataagtttcttattaaaaatataaataccatatacttaagctattgatttcaatctgtatatgcatgggttcgatttaaaattattgcaacctccgatccgagtttgtctcacaggcactctgcaattttaccaggaagaggtgttgtaggtacttaatttaatatgatttcacttagggagttagtcgcctatatgagcataaatgttagcacaatttgggtcgaatgaaggagacatttacaaaagtgaggaccgttgctgggttgtaaagggcccctaaataataatttacaattggttgagctgacatggctttgttgagcaagaactacaagaaaactacaattacatatcgaatgcaagacaaatgctacgctacacagaaatacataacagcatgaactgaagttctaggaaacaacttaaacttacgtaccagttgggcaattcttaccctacatacatagacaaattaaaatatcatggcttaagatctaaccaccgggtgaagtgactgttccggctgcctactttagaaatttcggactggaactaggcgacgccgtcgacacgttgtccaggttggtgttcgtgttgtcgaagcactcgtgttgtggctccggttccgtgggcggcagcggtttgttcagcagcacagtcatgttcttcacgttgctgggcttctcctcgtcctggttgatgttgagcatggcgtcgttcatgcggtggtagtgcggcttctgcgaggtgctgggtcgtgagtagtccaggtgatcgtattcatctagcgtatagaattcagacaattagatcgttgttatcttaaattggtcataaaaacattggacatgtgtgaggacgaacagagcactacacggaatggttctttaacactggcttaccctcgggaaacaaaatcttgctatatattttcactgattcatgccgtaatgtgtgcaaatgtagagtacatagttaattgtgaagttactaagcctgcctgtgtaaaagtctaatgacataccgggatccttgtagccctccttgtgcttgatctcgtcgtagacatgctcctctttgagggattcgttgtacacaatcggattggtccggtccgcgttcaagttcttcgttagcaggtcgtggttgtagttgatcgaatagctacccactgtggaggcaatgtactatgagacactgacccaaaatattgtgctctaaacatcttacccctgccactggcattgcagtcatcgccgtagtccgtgctcatcgtgctcctctggtcaaagttgttcatcttggaacgcatattgttgggcaggagacgcgtttccgcctgcatgccgtacacgggattgtcgaagttgtggttgggcggccagctcgggggattcgtatcatgggtgtagtgtacatgggcgatttcggtttttagattggacacacgtcggcggtagtaaatgaacactgcgaagattatgcacgcaaacagggtcatcaggactaaggtcagagctacactcgcccggctcgctgcaattcaaaatggatgaaatgaattagtaatgttgaggaatatattctgatcaatgaattatcttacaattttcgctttggtctgcaatacgttgagaggcgattagctcgtcgcagttatcgccggtgtagccactcctgcacacacaaccgtgggccgcatggcactggaaattggccgacggacaggcacaggtattcatgcagtgctcgccgtagaatccctccggacagacctcatcgcaccgggtgcccgaccagccggtttcgcagatgcacataccgtcggccttgcggcaaaccttgtggtgcacgcagcggcaccgctgggcgcatccttgtccgtaggtgtctgtgggacaggactcgttgcagttggaacctgtccaccctggcaggcactggcactggcctgtaacgtggttgcactcgccgccgtgctcgcaattgcacttgagcttgcagccgggtccgtagagtccagcaggacatgggtgctcgcaggtgagacctatgtaacccgtgcggcagagaatttcacctgtgatgtgatcgcagctcttgttgcctgaaaaatatgtgagtattagggggtgttttgctttcgccttgtaatcttatccaatatagcttaccatggaggatctccgggcaccgttccttgcattccatgccgtagaatccaggtgggcagggttccgcacagtcggcgccagtccaaccggctgagcagatgcagttaccggaatcggggtcgcaggaggagttattcaggcatctgcaaactttatcacaattttcaccatagtaaccgctccgacagttggtctcgcaatgaacgccttgggttgttcgatcgttgggtatcagacaaggccaacaaaaaccagaaacacaaaggtgcagaaacagaaaagcaaattaaattaaggaaatgaaacgtggccatgcaaaataggtgcgatagatgcaaaaatgaaagtaagtgaaatgagttcagtgcgcactaataaggatataagatggaactgattaacatgttataggtagaaaatcattcatcagatttacactttgtcttacaaaattgtaaatatttaatagaaaactgccttcttaatatcaacagtttggtttaaaaaaataaacaaattttaaggggttccttaattactgttaaaagaaaatcatgcaagctctacaatttggatattttatctaaattattcaagaatacacgtaacccctttcttattgaactatcaattgatggaaatcacgccttttttctatgattttagatcggggcaacctataaatctcgctaatgtcaacagtgatctatgaacttgatgagctgaattcaatgaggtatatagaaatcccgctagtacctccccaatcctgcttgcacacgcatcttccattggtggcatcgcaggccaggctgttgttgaagtcgcactggcacttctgggcgcagtcgtgtccgaatttgccggtatcgcacttcctttcgcaccgctcgcccgtccagccggcggcacaggtgcagcttccgttctgcggattgcaggcggcgttattgtggcagtcgcacaccttggcgcagtcctgtccgaagtggttcagatcacacggccggtcgcacttgatgtttttccatccggccgtgcacaagcactggcccgtctccggctcgcacttggctccgttctggcagtcgcagcgcagggcgcagtcctgaccaaaggtgcccggctcgcaactctcctcgcaggtgggtccgcgccagcccggcgcacataggcacgtaccattgaccggcgagcacttggctccgttcttgcagttgcaggtcagctcgcaattcgggccgtagcgcaggaaggtgcagggtctggtgcactgagcactgctccatccgatgctgcactggcaattccccgtctccgggtgacacagatccgtgtgctccatgtcgcactcgcaggtgcggttacagtccagcccgtacttgttcgcctcgcagatccgctcggcgcacttggcacccgtccagccgggattgcagatgcacgttccgttcgcccgatcgcacatggcatcgttcgcgcagtcgcaggtcatgctgcagttgaatccgtacgtgttcagctgacactcgtcgaagcagcgttctccgcgatatccgggcggacactcgcactggccggtgatgtggtggcagggcgctcccttgtagcactcgcagctctcttggcatccagggccgtagctgcccaccggacacttgtttgcacacacgtcgcccgtccagcctggattgcacatgcaggccccggtctctggctgacactttccgtcgttctggcagggacagtcctgctggcactgggcgccatgctttccatccggacagcgcatatcacatctagttggagcggagtattagtatgggttttgcgttggagcaggagcaaaatgaaacgtagaatgcaacggcctaaaatcccagccacgaaaaataattgattgcattctgcctttcattttgcctgatcctcggccagaagtttgtgccgccaaagaggccccttcgtccacttacaggggacccgtgaaaccgggagcacactggcattcgccggacacgtggtgacacttgccgccgttctcgcatcggcacttctccgagcagttggccccgaaaaagccctccggacagatgtccgcgcagcgtgctccggtgtagcccttggcgcactcgcagtcgcctgaaaagggctcacataccgcgttgttcaggcagtcgcactgcatcgagcagttccggccataccagccgggtgggcaatctaccgaagagtgacacaaacatggttagctgcggttacggatcacaaggtacgggttcgacagttagttgcttttttcttgcttttgcctttcgcttgctagccacgggaaacccaggagccggaagaagttccgctcccggaagctcccgttttggtggtggggattagtgaccgatagcctgcttgcacctgtataactgagccggagtgaactgcatgggtgcatgagagagagagagtggagtgtaggttgtgggtggtcggagttagatttcgggttaagatggcataaacaaaaaaaaaaacaaacaaaagctacaaagcaacatataacatatagcagaaatatagctacaaagacactacgtgcagatctttggtagtccaaagacggaatgcccttgcagaggctataaactatatacatttaaaccttaataataatcttgttttttgatattattattttgactagaatagcatatggttttcagacaaatttgatcatttccttcttgctgattgtaaaaacattcaattttgatgaaaattaaaaagtcagcgagcagattagtaatccattcgcctttctttcatgaagtaggagtgcctgtttctcgtccccggcagaaaaacgtgagctcggaactcgtctatgttgaattcgttgggtttgtagacaaaaggttccttgatcaccgacactgaactgacttttttcactagctcttcgaccggaggtgcgtccttggtcactttttttgtgatgccaagcatctgccaaatatcgtactccgactcctccgctactagtgactgtgccgcgaggctttggacacttggcgatggggtcgggcagaacggcaagcactccttcttcctcgccatgtcgttctctaccttttgcaccatcggatgcttcagcgtcttggcaaactccaaaacatcgccaatgctggggaagcgctgtgtatcggtgacaaagccgttttcgcccaagaaaatgtttcgcctgactgccacgttcgcctcgaactcttcttgctcgtccaagtcgcagtcgcgacagtcaaaatgggtgaccttcatgttggcggtgagggcgcatataagtcttgtacctagcttagcacctaaaggaatggccaccattatcagccgacgaagtggatcgtgatgacgcagaagatcgcctagttggtccacaattgtccgaggattcgcctcgatgccggacacattaagctcctccacgtgctcggtgcccttgataccgttgcacaaaatggacagggagtcgccgctcaacttattgtgggccaatcccagatactccagtctggagaggttcggtcgctgcagtgcctctccgatagccgacattgcccgcgtgtccagtcggttgtactccagctcaaggatctttagcatttgcggccgctccagcagaattcccaactcggggccacagtcgtcagtcatctggttgtacccaaagtccactacctccagcaaaggcaataggcgcagagcccggcacacggtgtatagcttaaagctattaagtctgctgtttcgaagccggaagatctgcagctgctgcagtgccactaaacctctagccaggcgaaccatgtccttgatcgaaaagagcacgttccgcttgtggtactttctacccaaagccggacccagaaactccaggttcagcgataccagattgacaaagtggcgcacaaagctaagatcgatgtgaacgcagtcgtcctccggatattttaattgttgtagatgcgtcagatatctttgcttgttgcgtttgtccaaaaccttgtcatcgccatcgtctggttcaggctccacgcggatatcaaaggtgccctttatacgctgccttcgcttctttttctttcgtggctctggttccttgggcttccgcatctcggaccgtcgtcgcctgcgctcctcatgctccgcctccctggcagccttcagatcacgcaatcgttggcgggcgacgttgcgttcatgtcgacgtttgcgacgctcgttgccggagtcatcttcatcgtcggaagcattcagcgtaaattttgtattgaatccaattgcccttttctggtcagaggcgattgaacccgccccctcctcttcttcctccccctcctcatcgacgtcttctggtgtcattggctcatcactggagatttccatgccaccagactcctcggatgttatttccggttccgagtcgtcttcctcacgttttgttttccgaaaggcatactccgacagcggctgcaggtgccgaatgtccatgcagcgaacatgatcctttattagctcggctagttcggtcatctctttctctggccaaagggcggccggacaggcctccaccagctccatgtacttcaggctcagtcccttgccgcgccagtcgtaatcctgcaaccccttcagtgcaaggcatgtctcggaactcttagctaggaccacccgcctccagtagctcgcatcctctacgcagtagcactcacgcagtggcagatccacatcgagtgaatcgtagtggatgcgcatctttcgcggatcttgaagcacctcgtcgggcacgttggcatttccacgtttagccatctgtcggacgcagagatccgccaaagtgggcacttggtcggcatcgttaaacgcctctgcgaagaattcccgattacgctccgagagtaaattccgattggcggtcaggggcggcttgtaaagctcgtacacggccagcatgaccggatcattcggaatactcaagctattggtgttcggcagcggcaagtaatctgagtcctcatcctccatcctatacgttccaagatgtgtgtggtgtagagctatttatggtattttttattttttcctattttttttttttgtttgtatgctttttgtttgaggagtatttgtttgactttaatgtgttgtcatattggaagattattttcctctggctttagtgggatcattgataactgaatacatttcaggtgtcttttttgggtctgagaatcgactaattcggttctgtagtatgtacaaaatattttagctttgcgttgtctgatactttatatacttaaaagaacataatctacagtcgagcagcagaacaattaaacgtacagttaatttctaatctttgcaagggcatttagaactacagagcttcaaagctgcttaagtgattatacaagctcttatctacggggctcggctcatcgcaggcaatccggggatatcgtgaacttgaagtttcaaaattgaaaaaccgccgtttctgggataagccgcacccttggaacacccaaggcgattcattaggggcaaattacgattagcttaaaggatcaacgaacttatatcgcaggcgggtcctccgtaaccatgatcacacttgcacttctccggggagatgcatctaccgtgctggcagggttccgaacaatgcggcacgcattctcctgcgctcgcgatgtagccatctaaaagcggttaaaaatggtaatatgtaaagtaaagtcaaacatccagactcatccaactcaccacaacagtccctcacaatacggttctttgcaatcgtcttggttttgttgaccactcggtgtttaatgcgataggtggagcacctcggcgggaatgtgacgcaccaggtggagccccgttcctggaacgattgcagttctgtgtagacaacgtctacgttatatctaaaggtaaaagtattcattaatttagttcatttgtcgtgataggggataagcttacagttctcttcttttgcagatattgggtccatccagatctttaagatccgcctgagccagtaccagctgggccaggcaggctatgaggattaccggcaacatggtggcagtggattccaggtcctggaatgagttactcgttctgatgcagcttcactggcggatcacattgaactgataaacacagtcagtataaactaaaggatgactcaagccgagattaaaccggattcaactgcaagaacaaagagagaatgagtttcaataaaaaaaaactttctccgtatgattttacatactacatattatatgtataatatatatggggtatagattaataaatacatatttttgaaaagagctagatttaattgttagaaaacatccatagtatttcccgtcggatgagtttatgacgtaaagctttttccgggtcgtagccaccggtccagggtagtccagtctaaaagtagaaaatttccaacacagtcagaaattgaaagctgcttaatatccccagaggtgccaggaattcgattcttctataaatcaagagcgcagcagtagaggatgcacaaccaacgttcacccttcaatggaggcccgggaggattcggagccagtgccttcaacttcaatgcaccacagttcggcgacggcgctgcgttctccgagggtctcaacgggatgccctttctgggcaagatgcccaccgaaccgatgatgcgctccattagccgccaacgctcgctggttgatggggctgggctacccaagatgccggcacctcttcccgcgatggcccagcaaatcttgagcggcgccggagtgggacgtagtcaacgcttcccagtgccacctatctccacttactatgggcactacgagggcgacttttcgatgtcttcaatgtcaaagctaaaggacactgcctcacccccacagacccaatggcaggagcataaaacaccgcgtctagccgcactttcagaaaccgactccgagagcgacatatgcagtcagcagaacagagcgaaattgcctgaatcccgttggcgtcgtgccattaactacgtaacggccgctctgccggagcaacagcgccaacgcatggaggtgatggtcaagcgctgtggccagtcggctatcgccaagcatcttctgttggtgctgcatctgatcgccctggtggtggttgtgtgtttccgccaggtcgcgcgacttggatggctctgcggcgacattcgctctcgcctaggacgcgtcaagtaccagtcgcgcagctacctgcgccacatgctgtggcggctggccattgccaagagtaacgacacctttctctttctcatcgtggtgctggtgacgccctggctattccttctcagccttgtcggcttcgccatatccttcgtcttctccatgaggaccacgttggcagagggagtccgtcagctgcgccgtcgcgtattttagaccataagtggagggaaatggctttaggagcagcacccacaagctccatcgcccccaagttatcacacaaggacactaaagcagcgcattccacaaaataacacatgacatacagcaagatgaaaccactcgaattttaactatattttgtgttgcagcaacgaaatagaactcaagtaacgtttgtgtttccatggattcaggcttgggtttatattccgtagagcaatattgcatcattccccatttcgaatgttgttttgattttggaaaattgcgatctgctcaaaggtgttaaatatctggccatcagcttatgtgtgatctgatcaataaatcgcaatcgtatttatttgtttacagcttaatccgctcgctggccacttgttcgccactcatcaaacccatttattgtgtgtattatttttgccatttattctgctcgataaatatgaatgcgaacaaatcaaaacgaaaacatttccgccgctcatggggcagaaccacagattgtgggcctttgttgttcatgctctccgtaatttcactttcaattgcatcccaccagcaaaaagccccatttgtagtatattatatgattcactggctaccgacagtcacatctgcgttccacggcatatgaaaagcgttcagtgactcgggaaaacccaggagaacctcctccagtttccattcagtgccccagggcccacttcacaaatattcagaggtcacatctgggatttctcaaatttcaactcaacatggggctaagagatattgagaacttgccattaattatgtcaagtctacgtgtgaactgggccaagtaatatccgaatgtggtttacaattaccagtgacccatcaagaatggattgcataaacgtggatcgctatctgtaaaattatccaggccgaaccatttgcaattgatgccagcacggtttttcaggaaataaagatccacttttaataccaaacattaggtataatatatatgacaatcgcgaacaaaagagagctgtttctttcagtacttggttatttggaactgacatgaagcacgggccagccatgtctggtcagttggaaagtacgtacaattaactgggggattgtcgtgatccacaatctatatttatattgcaaagataattgttggtttcatttcttgccagcgagaaatctgattcacttaatcgcacggcaggtgctcccttaactcatcagaaagtggtgtttgtcaaggccgtcattagcaagaaatcgcgtgatgaactgccaacggcgccaaataaattttaaacgagaaattgttcgaaacccagtgttaatagaacgttcacgttttagagcagatcgtgaatgtgttcgccctcttagatacatattacaatccttaagatagccgaaacgataatatacaactggggcaatataacctaaagtagaaagagataaccatttggcatacccctcgactttgctcaagattttacaagtgataagggtggatgataagaccgccgcagtcattctcatccattacaacagcgatgaggttcactgatatttgttctgttgtaggtgactaattcagtctctctatatataagcagatccacggaacggaaggtgcgtaatccggtcatggacaaagactaatagaataataccaaatcatcccgtaacatcatacaaatttacgatggacaacgaaatcgtgtgaaccaaacaatccggtctaatttaatttgcaatttgaatgctaaatctttcattttaacgattagcagagtccacgtttttcaaacaaagtataaacctttggaatcaaaaatattaaccataaactagggtgttactctaacccattgccattaagtttcattttgccactcaatcttcccttccgcatatgtagatcatattaaaatgcgaacttgcacgagacaacgagcttacatttgcaatttacttatttgtttacatgcctgattggtgttttaatgagctaaatgaatatgtcgtggatgagtcaccttaggttaaacaatgctagactatagtctataaactatacggatctgttagttgtatgtataataggcgagtgtgcgagatttttcaatggaaaacgtgttcggcacagtttgttttatcgagtatcgaatccatgcaccattcatcgataccgcatacccagcatctgttccaatgctgagtcactcggatttcattcacaaaagtctggctaaggctcgaacttcgggtcaatctaccgctcaattcgcaggtttgtatttcagacctttcccaatatgtgtgtacttttggcacacctcatatttatcatacctcgcccttatctgcgcccagtattggacaagcagaaacaacacgatgaggcacactgatagtggttcttaatcggaaggggtcaacgaaaagttgagggagaaccataaaatgttagcaaaggtaatagaagattgattagaagtaagttgcgagtccgtttccgctggcaatctgtctataatgtatacatatgtaggtacttatatatgactaatttcctgattttcgatgaaagctttcgaaagaaaaaaacaaaacaaaaacaaaccaaagaaaatctgcgaaatactttcggactaaggagaaagctttgttgttaaaaaaactcaatggcattcgtctatttcattcaattagaatgatatgtattttataaagtataagcattgcctattttcgttccaattaaacctccatcagagctaagagtaggtcttatattcttcaagttgtgtgtatatattttgtgatgtattttcaattgattcagcacagtgcatatgtaaacatctggatttgacttggattactataatcttaagcatagggggaaaatgagccagctattcccccaacttcaagtactgcgcacttgataaaggctaaacaaagattgtcgcttcccgctttatataaacagaattattctacaaaggaggagccctcacttgagctgtactttggatagcgaaatcaaagtcgagtttactgaatccacaatacacatctccaataaccgcaacgcatatgtttggcgttcagtgggcaatttaacgccttggcgaggcgacaaagcacatttggcaaaaacgattattaagaataataaacgatttcaatggcaagaaatagatttggtataaaaacaagttgttctggcccaggaaatgaaattattgaaagaatatcagtttgcacgaggtctagggtcttacatttgtgaactacgtaaatgctaggccaatcaaaactttcagtgaacagtttaattaaagcaaagaggcaaagggttctcaaacgttattattttgggatggatgttagctgccattatgaagtatcagtgagaaacagtgatttcagctgtttcgtattcatttcacaagtgagccaaacactcaacacctcagtttgtattggccaattagcgggcgaagctcggatttctagcccgaatttggatagagctagaagctttctcgattgattcagcgaagagaaccgatttcagctgaaaaccaagaaaacatgtgtatattattctagtggaaaggcacccacacattgcaatgcagacagacgaacaagaattaagcataatcatcagcaaaagcgaaatgcacttgcaacaatacggagaaagcaaagaaaaatgttggataatgcaaacccaaagcgaaaagatagagaacagagaatgtcgtaatcataaggggaaaactaacatcccgactcatgggttgctctctaaccaccgccacattggacaagaaatcccaggaggtttcatcccagccactccctgccactcctccacccagcattatcaataaagctgagtaatcatggcgacgacaaagcccggctccataaaggaacctaaacagacattgtgacatgtacggcatggtatgatatgatatgataccgagggtggggagagtgcacctctgagtgccatttcagtttttaattttgcaatggcttgtgggacttttcgctgtgcattgcatttcgaagctcgtgtcctaagcaggcgtcattgttcattaaatcacgtatgataataaaaatcaagttccattgccagtgtcagaaatataaggttaagcttaaaatcgcttggttaaggaaactgtgtgaaaaataaaaatgctttgtatgggaaatatgatcgcagtttattccatacttatttaatgaattctataaaaaataagaacggtttctacatatatcttaatttgtgtgcacccccatattcagaagtaatatgaaatatcgctgaactgataccttaatcagtactcataaagaattaaacgcaaaaaaattttttgcgacttgatctaaattataaacggctattattgttatttattttcgtgacgatgcatcgactgtattttaatgtgtgcgttagttaggcaatttcgatgtgtgtgagtttatgctggctgggttttcatttgatccgttggcgttgttgttgttgcggctgtgacagctggaagcttcagcagcaatctggaaactggaaagaatccacaagatgcgggtttccagggagcgaggtgctggtcgcagggggtcgatgaaagagaagtttgccgatttgctgccaattccccgaatgacagatataaagatacatgcatgagatacaaagaagaagaagtcgacgaaagcgcaaaactaaagccaaagaaaggccattaaattgtgcgaaagagaaaccagaacaggtttaactgttcttggtgtgcgcccgataaaagcgctaattgacacgcacacaagtgcactactgcggtcataaacaaaccgctcgttgggaaagaagaaaggtggaagggaaagagagctgacaaagctaaccaggcgaaattgcacatttaacagaagaaaacttatttttaacaacataacaatgactaaaattaacgttaaactgccacgattggggttaaaactcaccttggcaagaagcacggtgtaaactggttttcggttctcactcaaaacaaaccaagaatgcactcgcaatcgaattccactcaatttacacgtttacgaaactttggccattaaaacctcgagaggatttgtatttttaaatgcttacagcaccttaccacatatatatatagctatatatataaatttgctattgtttttactttctcaccatccacaaaaacttgttttcgttgtcgctactctctattttggcactctactcgcaactgagctgatttagcaattaaaatgcaacctctttaaataaaaacaattacttttcgtgcactccactaacgacaacaataaggacaaacgggcgcgacgcacaacaacgcaattctttaatgcacttaagtattttcgtcggtcaattggagctcgtttggttttcgcaagcaccgcaattactatttactttattttatatttgcgtacgcacaccaccgcacgaagcagaaatttatttaacttatttaaaattcagcaagaaacggacaaccgacttacttagctgcactcgccagtgtgaccgctttgcgagtgttggatgagctagtagtgtggccctagcgcactccccaggaaatactcactgtgaacagtcactctttccacttataacacttttcacttgaaaataaatttgaattctatcttaaaactacattgtttatttgcggagtagatacgcctgtaccacctgggataagcagaatgaaaaacagctggagtaattaaaacactagtccccgctcatttcagatctccaccgtcatggacacgatcaaactgtggcacagtgggcaagttcggtgcctggagatctcggtgggagctgcgcagtggtggcaggtggtacagatccatatgttgttcgtcggctgggtgatgggtttcccggaggagatgcacgccgggaagcgagcattgcactcggggcaggagggggagctgaaaggatcggcattccatgagtatcatcattataatccagcttctgacgtcgacccttcacttacctatctggcacgggcactccgcaggaatagcaatccaccctatcgccagtggtgtcctccggatcgtacttggcgaagatcccagccgccaactcctcgtaccgttgaagggtagcctcgggaagatgagcctgttgctccaacttcatgaaagccttggagcaggttccgaaggcccgatccgcacagctggccagtgccaacaggctgtagatgtgctctggaggcaggacgtcctcgtagtcgcgcagcctcaccgcagtgaccaccgcactgtggacgatcccgaagcgaagctgcctctgggctaggagcatgaagtggtaggcctcggcgcagtgccaaagcctctcgatggcggccgcatcctccagggcaatggagtccagtagggtgttcctgccgctggcgtagtcgatctccgtcgtggccacagccttgaggtgctcctcggccagcagagcagccagcacgtacagcttcttgattctcagcagcggagcac

SEQ ID NO: 3293 - DNA, 3171 bp, DROSOPHILA
ctggcgagtgcagctaagtaagtcggttgtccgtttcttgctgaattttaaataagttaaataaatttctgcttcgtgcggtggtgtgcgtacgcaaatataaaataaagtaaatagtaattgcggtgcttgcgaaaaccaaacgagctccaattgaccgacgaaaatacttaagtgcattaaagaattgcgttgttgtgcgtcgcgcccgtttgtccttattgttgtcgttagtggagtgcacgaaaagtaattgtttttatttaaagaggttgcattttaattgctaaatcagctcagttgcgagtagagtgccaaaatagagagtagcgacaacgaaaacaagtttttgtggatggtgagaaagtaaaaacaatagcaaatttatatatatagctatatatatatgtggtaaggtgctgtaagcatttaaaaatacaaatcctctcgaggttttaatggccaaagtttcgtaaacgtgtaaattgagtggaattcgattgcgagtgcattcttggtttgttttgagtgagaaccgaaaaccagtttacaccgtgcttcttgccaagttgaatccggtttaatctcggcttgagtcatcctttagtttatactgactgtgtttatcagttcaatgtgatccgccagtgaagctgcatcagaacgagtaactcattccaggacctggaatccactgccaccatgttgccggtaatcctcatagcctgcctggcccagctggtactggctcaggcggatcttaaagatctggatggacccaatatctgcaaaagaagagaactatataacgtagacgttgtctacacagaactgcaatcgttccaggaacggggctccacctggtgcgtcacattcccgccgaggtgctccacctatcgcattaaacaccgagtggtcaacaaaaccaagacgattgcaaagaaccgtattgtgagggactgttgtgatggctacatcgcgagcgcaggagaatgcgtgccgcattgttcggaaccctgccagcacggtagatgcatctccccggagaagtgcaagtgtgatcatggttacggaggacccgcctgcgatataatttgcagatgcctgaataactcctcctgcgaccccgattccggtaactgcatctgctcagccggttggactggcgccgactgtgcggaaccctgcccacctggattctacggcatggaatgcaaggaacggtgcccggagatcctccatggcaacaagagctgcgatcacatcacaggtgaaattctctgccgcacgggttacataggtctcacctgcgagcacccatgtcctgctggactctacggacccggctgcaagctcaagtgcaattgcgagcacggcggcgagtgcaaccacgttacaggccagtgccagtgcctgccagggtggacaggttccaactgcaacgagtcctgtcccacagacacctacggacaaggatgcgcccagcggtgccgctgcgtgcaccacaaggtttgccgcaaggccgacggtatgtgcatctgcgaaaccggctggtcgggcacccggtgcgatgaggtctgtccggagggattctacggcgagcactgcatgaatacctgtgcctgtccgtcggccaatttccagtgccatgcggcccacggttgtgtgtgcaggagtggctacaccggcgataactgcgacgagctaatcgcctctcaacgtattgcagaccaaagcgaaaattcgagccgggcgagtgtagctctgaccttagtcctgatgaccctgtttgcgtgcataatcttcgcagtgttcatttactaccgccgacgtgtgtccaatctaaaaaccgaaatcgcccatgtacactacacccatgatacgaatcccccgagctggccgcccaaccacaacttcgacaatcccgtgtacggcatgcaggcggaaacgcgtctcctgcccaacaatatgcgttccaagatgaacaactttgaccagaggagcacgatgagcacggactacggcgatgactgcaatgccagtggcagggtgggtagctattcgatcaactacaaccacgacctgctaacgaagaacttgaacgcggaccggaccaatccgattgtgtacaacgaatccctcaaagaggagcatgtctacgacgagatcaagcacaaggagggctacaaggatcccgtgaaaatatatagcaagattttgtttcccgaggatgaatacgatcacctggactactcacgacccagcacctcgcagaagccgcactaccaccgcatgaacgacgccatgctcaacatcaaccaggacgaggagaagcccagcaacgtgaagaacatgactgtgctgctgaacaaaccgctgccgcccacggaaccggagccacaacacgagtgcttcgacaacacgaacaccaacctggacaacgtgtcgacggcgtcgcctagttccagtccgaaatttctaaagtaggcagccggaacagtcacttcacccggtggttagatcttaagccatgatattttaatttgtctatgtatgtagggtaagaattgcccaactggtacgtaagtttaagttgtttcctagaacttcagttcatgctgttatgtatttctgtgtagcgtagcatttgtcttgcattcgatatgtaattgtagttttcttgtagttcttgctcaacaaagccatgtcagctcaaccaattgtaaattattatttaggggccctttacaacccagcaacggtcctcacttttgtaaatgtctccttcattcgacccaaattgtgctaacatttatgctcatataggcgactaactccctaagtgaaatcatattaaattaagtacctacaacacctcttcctggtaaaattgcagagtgcctgtgagacaaactcggatcggaggttgcaataattttaaatcgaacccatgcatatacagattgaaatcaatagcttaagtatatggtatttatatttttaataagaaacttatttttagagtgcataaacaatacatttatagagatcattaaaaaaaaataaaaaattagttcaaatattggaacgttaacccatttataactaccctgaaaatcgttatgttatcttcatatacacatatcaattctgagtgaaacgtgtataata

SEQ ID NO: 3294 - protein, 594 aa, DROSOPHILA
MLPVILIACLAQLVLAQADLKDLDGPNICKRRELYNVDVVYTELQSFQERGSTWCVTFPPRCSTYRIKHRVVNKTKTIAKNRIVRDCCDGYIASAGECVPHCSEPCQHGRCISPEKCKCDHGYGGPACDIICRCLNNSSCDPDSGNCICSAGWTGADCAEPCPPGFYGMECKERCPEILHGNKSCDHITGEILCRTGYIGLTCEHPCPAGLYGPGCKLKCNCEHGGECNHVTGQCQCLPGWTGSNCNESCPTDTYGQGCAQRCRCVHHKVCRKADGMCICETGWSGTRCDEVCPEGFYGEHCMNTCACPSANFQCHAAHGCVCRSGYTGDNCDELIASQRIADQSENSSRASVALTLVLMTLFACIIFAVFIYYRRRVSNLKTEIAHVHYTHDTNPPSWPPNHNFDNPVYGMQAETRLLPNNMRSKMNNFDQRSTMSTDYGDDCNASGRVGSYSINYNHDLLTKNLNADRTNPIVYNESLKEEHVYDEIKHKEGYKDPVKIYSKILFPEDEYDHLDYSRPSTSQKPHYHRMNDAMLNINQDEEKPSNVKNMTVLLNKPLPPTEPEPQHECFDNTNTNLDNVSTASPSSSPKFLK

SEQ ID NO: 3295 - DNA, 5557 bp, DROSOPHILA
aaaaactcaaaatagtcaataacaatgtggaaactgagaaaccaaacgtaaaccaattaactaaactaatatttcctcctttgtcgtatgaaataaaaaactaactaaagtgttcatcagtggaattttcgaaataatcgctcgtcttcgatgacagagcttagacttcgatagcgatagaaccacaacaacaagaacaacaacaacaactgcactgcctgtgtcgggttctattttacatttacatctacatttacagaatcataagaattcacacactctaataagcgccagtcggaggaattcagaattgaaaactcagaatgccgaaagctaaacaacatcccaagcaaacattttgaaactaataaaggtaatttgcacaatactgtgattcctagcaagaaacaatgagacacgatgaacaattaacgataaacgctattaattatcgacttttgtgtgtttgtgtggtttggaaatcgatgtgtttgtattgtacgtatatttttcacagcatgctgaaaaatgtttgcaacaagaactatttatctaaccactcagtaatatccaacttgatcaatttacttgcatatgattattacgattattattgctaaccaaaggcccaaacaataacttaaatataacgcagaatgaaatcgaaaacaaatgataaaacaacaagaatacaaagtacttttttaaaatgagtttttagcgaatcaaatataaacttaagatttaaaaaaaaattcgtatacaacaaacaagcataaatgatagcagcgtctacaaaatccacaaccagatcagaaaaagcaggagaataatcaaaacgagaaaatggagaaaaggttatccagaaaaatgatcagaaaacgtgtaagctgtaaaacctataatgagaaataaactatagaaactatatgaaaagaacaagtcttaggcatttcattcccccccacagtaagtattttaaatgatgtacgattttcttaaagatttatggtacacactttatttgaaatgaattcatcttaaacatatgattatgatataagtaagctacgcacaactgatgctctaaacattcggttttttcgatttagaaagaactttggcaaccaactgctatggtatcttaaacaatcacatacatatatttaaataacagttgctcgttgcgccaattccctgggctctcctcctccccctccttctcctcctcctccagcggctgtgtggccttgtcagcttctcgctccgcgtcgccaggacaaaaagcacctagtccattacctggaagtcaggctaaatgccccgcctgactggtttgggtgcgaacagcacctttgccggcttgcagagctccagttcgctgccgggacgcacggccaggcacagttggatctccaccagcgacgactccgtccaaacgctgtgcgacagcaggattgtggtgcgcaggcgcacattggtcttgtgctcgccctgctccgtcataatgggcttgaagtcactctgcttcggcaccacggtgtgcatgtgctggtccggatacttgatcttgatccgcatgtccgccttctgggactccagcagattgtcgatttccgcaacaaaaggaacggctgctatcaggccagccgtgaccttaattacattatcctgcgattgcagcggacacggctcaaggatgttggccacacagcggcgtattttgtcattggcgggtggcaatgcaagcggaggagcctgctggaccagcggcagaatttcgcgaaagacgcgacccggcttgggatccgatatgccatccagtttgattagcagctggcgggtgaagctatccggctgggcatccctactgaccgactctttcatgggcatatcggtctctaccaccggtggcttctcctcctcatccttcgtattcgccttgatgaactcacttatatcgccggcggtttgcaaaagcatctggcacgggcccaatgcactctgtgagcgatccctgaccacgaggaccaagtgaagcgcgcaagccctcaggcgcagctgcttcacctgcaagatatcgccgtaattgaggccggagaaagtgtgctgcagcttgagacagtttcggatgagtgctgccagtgattccttcaagggcaccctgcttcgttgcgtgctggcgcaacgctgcatctgttcgatctggatctgggccgccaagaaggtctctagaaagtttgaggtgccgtacatgcccgcatcaatggatcccaggcgctaaagtttattaaaaaaaaaacatagtaaacattagtgttcatttatattgtagtaagcccagcgggcatacaaacctgcagattagattgggcagtctggagcagctccaagcgctcgtcagtcatggtgaagatctcttcgatgtgactgagaatcatctgcaggtactccgccgaactgcccgcttggtgcatagccgaatcgatcctgtgcgtcgcactcgccgaggacgcaccctcaatgggcaactggggcaccagattcggcatcgagtctctcagataggcgtaatggcgatgggtggccgtgggcagcaaactgataatgggcaccaaatgttctgcagcattgaagacaagtatcagaacgcacagatacgctggatcctcgacatcgcgttcgggcgtctcgaaaaagggatgcacgtaaagcaggtgaacggcgacagccatcaccaaatgtggatgcttctggccaatcttgcgcatgcaggcataggtggagttacgatcctgtggatacttggccagcacatctagcagcttctgcaccaccattagcaggcacgtttgtgtggacactctacaggcgcccagcatgagatgtagtccctcacgcacgtccacggagtaatcctcaagcgatccaagcattatctccagctgatcctcgcgcagcactatgtgcttggcaatggccgttaaactatagatggccttcagccgcacatcctcgatctcatcgttgaacatgtccacaaggaaatctaggctggtcaccgcgaaatccggtcgagagagggccagcttgcacatggaggccactgccgcagtacgcacctcgaggaactcatcctctaggccatgtataagggcgccacaggcgccgctggctataattgagatgctctgagcatcgaggtgctcttgcggcgcatcgtccgcccaccgtttacccgatgaccactcaccgctggccaccaggcgagcacctctctcgtgcgccgttcgcttccggcgcagattgctcatcagctttttgtcgagtgtctggtgtaggaactccctgcttacggcggtcatcccaccgagcaattccgctgcgagcacgcgaatttgcagcgatagatcgcacagggcttcgcagaccttgctgaacgcagcgtctatcatgcgcagctcctcctgctggcggtccgagggtaaaatgtagtccggatgccgattgcccagcatgaagaccagctgtagagcttccttgcgcacacactcgtagtcatccttcatggcctcgacggcacgcttatagagcaccgccggcagttgggatccccgttcgccgagggtcagcagggcgtgcagagcctgggcacgaacgctcgagtcctgcgagtcgatgtagaaggctaacttccatacgtaatgacgctcaccctccattttggtggcaaaacgaccgattaccagcatggcgttcttctgcgtatgcgccgaaccggagcgcagctgctccttggctaggtgggccacctgggttttgtacgatatgggcaacatgtgcttcctgcgctccccgattcgaaacaggcacatcatgccctgggcgagcaccttttgggacacctccttcctcaacaagaagataaagtagtcgatgatcatggtaagcgcctgctcggtggcacactcgcaacccaatccggacagcagctcgagcagcttcacccggatggaggtgtcgctatcgcgttcctgcagctgatacagttggaagatcttgctggccacctccttaagctcgcccatttccacgtcctcataggatatctcatcggttatcttgaccaagagctccagcagttccctgctattcgcggccgtcattgggggagctccagtcgccgcagccggcggatttccgatgacacctgttgacggggctcccgtcgaagcaactggtgtcccagtgggcaggaccaacgcaccggcgggcaggttgcccacataggcgtccaattggttgagcgccgtcagcttgcgctccacattgcccacttttccggatttcccgcccttggcatcagcggccagcgtttgcagacgcagcttcttcaccggcggcgacccgtccaccgtttccacgtaggtgcctacgcgcttcttaatggccagcgccatggtttccttttcctttgcgcgattcaaccaatgcagactagagttgcactcttccacctggtttaggtaaaccgcaaattagagatggcacaccactgatgccaaccacccgccactagcgatggcatcgtgaccgcgcaagaggttcttgctggtggataacccataactaaataaattgctttcacaagagtgataatgctaatatcaccaggcatttaataattatattattttaaaaaaatgtgtcatttagtaatcatataaagaaaacgaggcatattttttggacatttcactttgaaggcgtgaaacatcgatagtatagtgaaaaatcgatgttttcttttcgtcttttgttttgctctcgctcttctccatgaagtgataacttctcaacaaagtgatgatgatccatcaaccactatttgggtattcatcctcaattcggattgattcgcccgtaaatcattacttatatttaaatccttgtttctactatgtcatctcacatgggcacagttatgatttctccacgctcaaaacggacaaggggtcatcatctaccttgcccttctttttggctgcgcaattcttaacgcatctcatggctttgaataagactttttccgagggtagcgtcggttccacctgaccgatggcgtctgtagttggggataattattgaatggatcactaaaagttggatgtcgagcactaaacttactcataagcgaacgaaacagatgttcgtgatcttttagtcttttctttttctgattcccatcaatattgtagttcagaaggatgtcctcggagaaaatgagtcttatggtgcggcttaatcttccctggcgcaggaatttccgcatggaattcgtctgatcagggatcatataagtacaactatataatattctattgatggaaaagcatgaggaaggagaaacttacatagatccccctggagtcctggcttatcttgtgattcacttcgaccagatcctcctcatacataattggaaaatcatcgtccggatttcccttcgccttcggcttggtcgttttcatcgactgcttaacgaattccgtaagtg

SEQ ID NO: 3296 - DNA, 3480 bp, DROSOPHILA
agtggtgtgccatctctaatttgcggtttacctaaaccaggtggaagagtgcaactctagtctgcattggttgaatcgcgcaaaggaaaaggaaaccatggcgctggccattaagaagcgcgtaggcacctacgtggaaacggtggacgggtcgccgccggtgaagaagctgcgtctgcaaacgctggccgctgatgccaagggcgggaaatccggaaaagtgggcaatgtggagcgcaagctgacggcgctcaaccaattggacgcctatgtgggcaacctgcccgccggtgcgttggtcctgcccactgggacaccagttgcttcgacgggagccccgtcaacaggtgtcatcggaaatccgccggctgcggcgactggagctcccccaatgacggccgcgaatagcagggaactgctggagctcttggtcaagataaccgatgagatatcctatgaggacgtggaaatgggcgagcttaaggaggtggccagcaagatcttccaactgtatcagctgcaggaacgcgatagcgacacctccatccgggtgaagctgctcgagctgctgtccggattgggttgcgagtgtgccaccgagcaggcgcttaccatgatcatcgactactttatcttcttgttgaggaaggaggtgtcccaaaaggtgctcgcccagggcatgatgtgcctgtttcgaatcggggagcgcaggaagcacatgttgcccatatcgtacaaaacccaggtggcccacctagccaaggagcagctgcgctccggttcggcgcatacgcagaagaacgccatgctggtaatcggtcgttttgccaccaaaatggagggtgagcgtcattacgtatggaagttagccttctacatcgactcgcaggactcgagcgttcgtgcccaggctctgcacgccctgctgaccctcggcgaacggggatcccaactgccggcggtgctctataagcgtgccgtcgaggccatgaaggatgactacgagtgtgtgcgcaaggaagctctacagctggtcttcatgctgggcaatcggcatccggactacattttaccctcggaccgccagcaggaggagctgcgcatgatagacgctgcgttcagcaaggtctgcgaagccctgtgcgatctatcgctgcaaattcgcgtgctcgcagcggaattgctcggtgggatgaccgccgtaagcagggagttcctacaccagacactcgacaaaaagctgatgagcaatctgcgccggaagcgaacggcgcacgagagaggtgctcgcctggtggccagcggtgagtggtcatcgggtaaacggtgggcggacgatgcgccgcaagagcacctcgatgctcagagcatctcaattatagccagcggcgcctgtggcgcccttatacatggcctagaggatgagttcctcgaggtgcgtactgcggcagtggcctccatgtgcaagctggccctctctcgaccggatttcgcggtgaccagcctagatttccttgtggacatgttcaacgatgagatcgaggatgtgcggctgaaggccatctatagtttaacggccattgccaagcacatagtgctgcgcgaggatcagctggagataatgcttggatcgcttgaggattactccgtggacgtgcgtgagggactacatctcatgctgggcgcctgtagagtgtccacacaaacgtgcctgctaatggtggtgcagaagctgctagatgtgctggccaagtatccacaggatcgtaactccacctatgcctgcatgcgcaagattggccagaagcatccacatttggtgatggctgtcgccgttcacctgctttacgtgcatccctttttcgagacgcccgaacgcgatgtcgaggatccagcgtatctgtgcgttctgatacttgtcttcaatgctgcagaacatttggtgcccattatcagtttgctgcccacggccacccatcgccattacgcctatctgagagactcgatgccgaatctggtgccccagttgcccattgagggtgcgtcctcggcgagtgcgacgcacaggatcgattcggctatgcaccaagcgggcagttcggcggagtacctgcagatgattctcagtcacatcgaagagatcttcaccatgactgacgagcgcttggagctgctccagactgcccaatctaatctgcagcgcctgggatccattgatgcgggcatgtacggcacctcaaactttctagagaccttcttggcggcccagatccagatcgaacagatgcagcgttgcgccagcacgcaacgaagcagggtgcccttgaaggaatcactggcagcactcatccgaaactgtctcaagctgcagcacactttctccggcctcaattacggcgatatcttgcaggtgaagcagctgcgcctgagggcttgcgcgcttcacttggtcctcgtggtcagggatcgctcacagagtgcattgggcccgtgccagatgcttttgcaaaccgccggcgatataagtgagttcatcaaggcgaatacgaaggatgaggaggagaagccaccggtggtagagaccgatatgcccatgaaagagtcggtcagtagggatgcccagccggatagcttcacccgccagctgctaatcaaactggatggcatatcggatcccaagccgggtcgcgtctttcgcgaaattctgccgctggtccagcaggctcctccgcttgcattgccacccgccaatgacaaaatacgccgctgtgtggccaacatccttgagccgtgtccgctgcaatcgcaggataatgtaattaaggtcacggctggcctgatagcagccgttccttttgttgcggaaatcgacaatctgctggagtcccagaaggcggacatgcggatcaagatcaagtatccggaccagcacatgcacaccgtggtgccgaagcagagtgacttcaagcccattatgacggagcagggcgagcacaagaccaatgtgcgcctgcgcaccacaatcctgctgtcgcacagcgtttggacggagtcgtcgctggtggagatccaactgtgcctggccgtgcgtcccggcagcgaactggagctctgcaagccggcaaaggtgctgttcgcacccaaaccagtcaggcggggcatttagcctgacttccaggtaatggactaggtgctttttgtcctggcgacgcggagcgagaagctgacaaggccacacagccgctggaggaggaggagaaggagggggaggaggagagcccagggaattggcgcaacgagcaactgttatttaaatatatgtatgtgattgtttaagataccatagcagttggttgccaaagttctttctaaatcgaaaaaaccgaatgtttagagcatcagttgtgcgtagcttacttatatcataatcatatgtttaagatgaattcatttcaaataaagtgtgtaccataaatcttt

SEQ ID NO: 3297 - protein, 1022 aa, DROSOPHILA
MALAIKKRVGTYVETVDGSPPVKKLRLQTLAADAKGGKSGKVGNVERKLTALNQLDAYVGNLPAGALVLPTGTPVASTGAPSTGVIGNPPAAATGAPPMTAANSRELLELLVKITDEISYEDVEMGELKEVASKIFQLYQLQERDSDTSIRVKLLELLSGLGCECATEQALTMIIDYFIFLLRKEVSQKVLAQGMMCLFRIGERRKHMLPISYKTQVAHLAKEQLRSGSAHTQKNAMLVIGRFATKMEGERHYVWKLAFYIDSQDSSVRAQALHALLTLGERGSQLPAVLYKRAVEAMKDDYECVRKEALQLVFMLGNRHPDYILPSDRQQEELRMIDAAFSKVCEALCDLSLQIRVLAAELLGGMTAVSREFLHQTLDKKLMSNLRRKRTAHERGARLVASGEWSSGKRWADDAPQEHLDAQSISIIASGACGALIHGLEDEFLEVRTAAVASMCKLALSRPDFAVTSLDFLVDMFNDEIEDVRLKAIYSLTAIAKHIVLREDQLEIMLGSLEDYSVDVREGLHLMLGACRVSTQTCLLMVVQKLLDVLAKYPQDRNSTYACMRKIGQKHPHLVMAVAVHLLYVHPFFETPERDVEDPAYLCVLILVFNAAEHLVPIISLLPTATHRHYAYLRDSMPNLVPQLPIEGASSASATHRIDSAMHQAGSSAEYLQMILSHIEEIFTMTDERLELLQTAQSNLQRLGSIDAGMYGTSNFLETFLAAQIQIEQMQRCASTQRSRVPLKESLAALIRNCLKLQHTFSGLNYGDILQVKQLRLRACALHLVLVVRDRSQSALGPCQMLLQTAGDISEFIKANTKDEEEKPPVVETDMPMKESVSRDAQPDSFTRQLLIKLDGISDPKPGRVFREILPLVQQAPPLALPPANDKIRRCVANILEPCPLQSQDNVIKVTAGLIAAVPFVAEIDNLLESQKADMRIKIKYPDQHMHTVVPKQSDFKPIMTEQGEHKTNVRLRTTILLSHSVWTESSLVEIQLCLAVRPGSELELCKPAKVLFAPKPVRRGI

SEQ ID NO: 3298 - DNA, 5347 bp, DROSOPHILA
aaaaaaaaaaaataagagtcaactattttgggtgatttttgagataatggcattacaccgtttgttcctatggcagctatatgatctatcatacaaaaacgtataggaataacaattcgaataaccgatttatatggcatcaaaaccttgagaagacggacggataaacggaaacaagtacaattgcagtgtatttaaaatctagttcctttaaatatacaaaaacacatatatttagcataaatcgcatacacattttgtaaattttcgttacgtccatgattcgattgagtttcatttttctcttgctttaatttaacactacattttaagtaagagccgggggaatttttcgagtgcgatcatcaagtggcgggcagtgcttgctaaaaatgtaacagtttcacaattaacaatacaatcacagattacgaatttaacataattaacgaaaaacaattacaaaaaaaaaaaaaattgaacgattcgaatggtatttgtttttggcttggcaaagggaaggacaaattctgggatttagagattcgacgcacttccttccctcgatttccagccaggaatttctttctttttgtagaactgtaaggcactcggcagtctcttctttttcacttatactcaaaatgtatgaaattatgtaaaaagttactggcacgttactgttttcaattttgttttttaaatttttttgaacatacatttacatttgttatcgcaacacttaaaatgtatcgcgaaaagcacacaagcttattcatctggcgtcgtccaataacgaaatagtcatgaatttgactactgggaaaatccaaattaacatgtcaacaagttgtgttgaattaaattgaaaacagcaacagttctgggacaaataaaaactaggactatctcctcccgatccaccccaaaaccccactgcacccagttcgatgccaggatctctggatccttgctatcggatctgaaatccttaaatattttacactcgcttcggtttgctgaccattgtgtagttgaggccattatagctgcgatgatcgatggctgccgcctcgagattgccgcctttgttggccgttgcagttgtgatggtgctactaccgccgctgatattgctattggagattcctagattattattgttcgtagtggtgctagcctttcgcagcaccccgtaaccgcgatgactgtcatcggctttacggaagctttccgtatcgggactagcgatcaattcgtattcattgggtggcggtggactgcatcgtatgcgattaccgggtgtgacattcacaatggtcttatagccactcgatgtcttattgttcggcgatagaaagtctaaacgatcgtaattcgattcactaatggatgtggcgctagtgcaaccctcaccgatatcgatgtctatgatcttgggtgtattttggctgccacaggtggatttcgatactgatcgctggcgtacaaattctgaggtatcgcagagtatgggcatacgttcactgtgcctaacatcgcccacgccccttgtgcgccacgcctctgtgatattttcgatgcactcgtaatcccgctccggaggcggtgctttcgaggcgctctcatttcgcagcggcaagtcgggcggtaaatcggctgctgtttccggcagggatatcgattcgccttccaggggtttcagtatcactgaactgttcacatcggaattggcggatggcgaagatatcgtagttatggccacaggttcatatttcacaatattcctgtatttatcacaatgggttgtcgggcttttgcgtggcggtttgttgggaatgtgtttgctgctgctgctgttgctattgctatttgcgggcacggatagcgtgattcctccggtacttcctaaaacgcctccacccgttgctgtggcgccacttgctccacctccacccgccgagaagttattaagagaatcgttagagctaatgaagcccctcagggatatgcagctttgcgttgagttgatctcgaactcgccaccgtggggattactcgacggtgatggtggcagtgggcttcgcgaaccgggctccatgccagctgccgcactaaactgattctcaccgcactccaaggtgctcagactatcgccgctaatcagtttcttcatcgacttcatcttggcggacatgcagcggaatacctcctgtggattggtgtgatccagggtgaaaacgccttcgccggtggtgcattttctgcccgcctcaaaggtgaacttgccatcgcgatagccgtacttcctaatgaaacgatatggccacatggcgattgtggcgcccaaatcctccgatttcaactgaagttcagtgggcgtcatttggagcatatatgtcttaggttcaatgcagcaacgaatggaggcctcggatggaatcaacgtgataatgaacaagccatcctgcaaatttataaaaggtgtggattattatggattttttatgcggttcggttttttttatattcttattttaaacgtgccaattattgtcagagactaaaaatggaattggaggtgcattttcacgttagtttcttaagaacgctttagattcatcgtataccccttttgacaactataagattacgcaaatataacgaaataccccagaaagttttcgcttatacagagatgatcactcacaaaggagctgcagtagaggtcgttgtcctcctcgatggccccgattccccccgatggtgaggtgtcacagaaggccaccgtttgcagggcggtgatccaatccttgagctcctcctcgctacttgtgctcagtgttagggtagcctgccgcttgacaatgtgaatgaggcgttcgggaggcggctcctgagtgatcttcacacagttttcgagggtgaagattttggggttccggtcctccttgctttcgcacatctccaggcgggcaatcccatgccgactggccttgaatagcaaacagtagcgactgcatgctttctgcaaaaaaaaaaagaaaaaattgggattcgattaaatcggtttggatgtcttaaaacgattatatcttagtaacgtactgaagaagatgtattgtatatgtatatgtatatgcatatgaaactgcagtgtataaataaccagaatcaattcaaatttgtcttaagattttgtagtatcctgcattggataatgctaaaaaaaaatataaaaatagagtatgagcataatgggctaaaccgtgaagtacttattcgccctcactctgccccttctctgcgatcccctgcaccaccaccctttttccccagttttctgctggctcaagaatttcctgtcgcgcataaacacaaataccacgaagtagcatgaatcgccagctgtgtgtgccatctgaaactccaacagtgggggtaaagttattaggatcaatgcatagcatgttattcgaattttaatttaacttaaaagcatcatattattactgcctgatatattgtttttaaatacggtttcacttaattcattaaagggtttgtgttggtcttggaatattaatattattaaaaatgatatgctaatattatggccttaactgtatgaagtcggcccctctctcgctcactccctctaccgcgtatcgctgtctcactcccactcgcacagtgggcctcatttgtatgcaacaagtatgcagacagaaacacatgcacataacacactcacattaacacataggtcctgtttgatttatcgaaaactacgcacttgtaggataattgcaaacagaaagtaactttttaaaccctgataaatggggaaatatttatatagaagggcggaaatacggcgattttccatacctttttcgagatgcgatttagcgaaaatccagtttgggtcggcacattaagatatccagccaaaacaggtatttcaacatccattctgtgcaccactcctccacctctcctctccttcttcccactctccttcgtctcctgctctctttccctctccttcgccgatctagctcacacaatgcgcctccgattccgaattgttgttgttgttgttgttgctggagttgggctatgcgatttctggagttttccttcaattcatccgtttttctgtgctttacgatagcttcgcggtcgcatttagttgatcacttcatagtaaacatcacatcatatcgcacagcgaatacggagattcgaatttcgaaaagcgcagccgcagcacaaaaaaaaatcaccaaaaagcgagcacagaggcaagtcgactttatttatttatgcgctgcacggttgcatgcagctgctgcaatcgtcatcgataactaatggcgatcgataacttatggttttttggtaacaaagcggttgaattatttcttaggtctaaaataataaattaatatcatatttttataatcttggtatgttttcctctcctagcgcgcaattttaatttctcataattgcgttgttggagttatcaacatttcgatcaatacgaaaaacttgttatattatttttttgatattttatattattttgaatgcaaatatatatatatatatatctatgtgaaatattaagttacaaatttatggtgaaaatattttctgtgagcaaatattttaatcgcgtgtgtttaaaaaaatagctatgaataaaaataaatcaaacagtctggcagcaaagtggcgtgcgatatttcagcgttgccatcttcgaatgccaagtgccatcactattatcaaatagcattgtttcacccatctggtaacatcgcaaatcgtattgtgcaaaaaggaaatataatttagccaaaacaaaagccaaataaggaacatggcccacgaccgcgaggtgctgcgaatgatctgggagggccagataggcatatgcttccaggcggatcgggacgagatcgtgggcattaagccggagcctttctatctgatgatatcgcgactcagctacttgcctttggtgactgacaaggtaaacaaaggcttcaaatggaaatggccataccaattataagatcccaatgactgtcgtacatatcctggcaggttcgcaagtacttctcacgctatataagcgccgaacaccaggatggagctgtgtggttcgacttcaatggaacgcccctgcgacttcactatccaattggtggggtttacattaacgagatgatgatatcatagcatgcccatttgatactaatgatggtactgtcttgaatcctggttaggtgtcctatacgatctgctgcatccggaggaggacagcacgccctgg

SEQ ID NO: 3299 - DNA, 2241 bp, DROSOPHILA
atgcaaccgtgcagcgcataaataaataaagtcgacttgcctctgtgctcgctttttggtgatttttttttgtgctgcggctgcgcttttcgaaattcgaatctccgtattcgctgtgcgatatgatgtgatgtttactatgaagtgatcaactaaatgcgaccgcgaagctatcgtaaagcacagaaaaacggatgaattgaaggaaaactccagaaatcgcatagcccaactccagcaacaacaacaacaacaacaattcggaatcggaggcgcattgtgtgagctagatcggcgaaggagagggaaagagagcaggagacgaaggagagtgggaagaaggagaggagaggtggaggagtggtgcacagaatggatgttgaaatacctgttttggctggatatcttaatgtgccgacccaaactggattttcgctaaatcgcatctcgaaaaagaaagcatgcagtcgctactgtttgctattcaaggccagtcggcatgggattgcccgcctggagatgtgcgaaagcaaggaggaccggaaccccaaaatcttcaccctcgaaaactgtgtgaagatcactcaggagccgcctcccgaacgcctcattcacattgtcaagcggcaggctaccctaacactgagcacaagtagcgaggaggagctcaaggattggatcaccgccctgcaaacggtggccttctgtgacacctcaccatcggggggaatcggggccatcgaggaggacaacgacctctactgcagctcctttgatggcttgttcattatcacgttgattccatccgaggcctccattcgttgctgcattgaacctaagacatatatgctccaaatgacgcccactgaacttcagttgaaatcggaggatttgggcgccacaatcgccatgtggccatatcgtttcattaggaagtacggctatcgcgatggcaagttcacctttgaggcgggcagaaaatgcaccaccggcgaaggcgttttcaccctggatcacaccaatccacaggaggtattccgctgcatgtccgccaagatgaagtcgatgaagaaactgattagcggcgatagtctgagcaccttggagtgcggtgagaatcagtttagtgcggcagctggcatggagcccggttcgcgaagcccactgccaccatcaccgtcgagtaatccccacggtggcgagttcgagatcaactcaacgcaaagctgcatatccctgaggggcttcattagctctaacgattctcttaataacttctcggcgggtggaggtggagcaagtggcgccacagcaacgggtggaggcgttttaggaagtaccggaggaatcacgctatccgtgcccgcaaatagcaatagcaacagcagcagcagcaaacacattcccaacaaaccgccacgcaaaagcccgacaacccattgtgataaatacaggaatattgtgaaatatgaacctgtggccataactacgatatcttcgccatccgccaattccgatgtgaacagttcagtgatactgaaacccctggaaggcgaatcgatatccctgccggaaacagcagccgatttaccgcccgacttgccgctgcgaaatgagagcgcctcgaaagcaccgcctccggagcgggattacgagtgcatcgaaaatatcacagaggcgtggcgcacaaggggcgtgggcgatgttaggcacagtgaacgtatgcccatactctgcgatacctcagaatttgtacgccagcgatcagtatcgaaatccacctgtggcagccaaaatacacccaagatcatagacatcgatatcggtgagggttgcactagcgccacatccattagtgaatcgaattacgatcgtttagactttctatcgccgaacaataagacatcgagtggctataagaccattgtgaatgtcacacccggtaatcgcatacgatgcagtccaccgccacccaatgaatacgaattgatcgctagtcccgatacggaaagcttccgtaaagccgatgacagtcatcgcggttacggggtgctgcgaaaggctagcaccactacgaacaataataatctaggaatctccaatagcaatatcagcggcggtagtagcaccatcacaactgcaacggccaacaaaggcggcaatctcgaggcggcagccatcgatcatcgcagctataatggcctcaactacacaatggtcagcaaaccgaagcgagtgtaa

SEQ ID NO: 3300 - protein, 622 aa, DROSOPHILA
MDVEIPVLAGYLNVPTQTGFSLNRISKKKACSRYCLLFKASRHGIARLEMCESKEDRNPKIFTLENCVKITQEPPPERLIHIVKRQATLTLSTSSEEELKDWITALQTVAFCDTSPSGGIGAIEEDNDLYCSSFDGLFIITLIPSEASIRCCIEPKTYMLQMTPTELQLKSEDLGATIAMWPYRFIRKYGYRDGKFTFEAGRKCTTGEGVFTLDHTNPQEVFRCMSAKMKSMKKLISGDSLSTLECGENQFSAAAGMEPGSRSPLPPSPSSNPHGGEFEINSTQSCISLRGFISSNDSLNNFSAGGGGASGATATGGGVLGSTGGITLSVPANSNSNSSSSKHIPNKPPRKSPTTHCDKYRNIVKYEPVAITTISSPSANSDVNSSVILKPLEGESISLPETAADLPPDLPLRNESASKAPPPERDYECIENITEAWRTRGVGDVRHSERMPILCDTSEFVRQRSVSKSTCGSQNTPKIIDIDIGEGCTSATSISESNYDRLDFLSPNNKTSSGYKTIVNVTPGNRIRCSPPPPNEYELIASPDTESFRKADDSHRGYGVLRKASTTTNNNNLGISNSNISGGSSTITTATANKGGNLEAAAIDHRSYNGLNYTMVSKPKRV

SEQ ID NO: 3301 - DNA, 8497 bp, DROSOPHILA
actatgctatgctaaagtttttacataattcggtcaaaattgatttttaatagtattatgccattgtcttaatcagattggaagcttatcgttgacaaaaataagattatttaataacaatttcctggaaagaaacgaatcggatcgatctacttttagctagatatttattgcattatcttgaacacggcaatgcgtcacacacgttccttttttgtatgacaacagcttactaacaagtaaatctattgtttttataaatgatcaataactaagtgccattttagcactaagaattacacgttgaaaattgtcatgttgtctggcttctaaaataagtcaatttgaatagagatttcttaattatattagtgtatgcgcagctctcagaaactgctcacaaaaattgcatggcacacttttatatatagacaactgatccgcatttcccaaaaaccgcgaagttcgttcaaattgttacgtacatatatacagttacggtttgaaagaaattatatggtcaacggatccattgtcagtagatacaaaaataactttcaatttagtacgcaatttaagactagtgcgatttatatattgtatgttgacaaacaaattcactaaagcaaagaatccgtgaaatgagaccacagttatattttcttttgccttcgtgttctactaaatccacattattttcattaccttttatcacacataaaaatttggcgcctaccgcgatcgtcggtgtctcggcagagcgttttaccgtttgtcttggttatctagcggtgtagtgctctcgactttttaataaattcaaatttcagatactcgaaagcaaaaaatatatacatacataaatggtccatttgcatatcttcctattactcccttgcgcgttaactagagaaaatattcgttgggaagtacttttaaaaataaagaaattatctgcgctatctagatgttaggcttctgttgaatttatacatttttaaatacagataagaccataacaaatggccactatagatggaagaccggcgcaatatggaatttcacttaaacaactgcgcgagctcatggagcatcgtggtcgtgagggtgtaatgaagatagctgaaaatggtggcattcacgaactatgtaaaaagttatacacatctcccaatgaaggtaagtttttctctatttacaatattaatgtatttaatttatattgagtttacttttacaatactttaattgaattaccataaggcctaagtggatcgaaagctgacgaagagcatagacgtgaaacattcggttccaatgttataccaccgaagccaccaaagacctttttgactctagtctgggaggctcttcaagatgtgacccttattatattagaggtagctgcattagtatcgcttggtctatcattttataaacccgccgacgaggatgcgcgtaagtagttcagttttgtggtccgtaataaaatattgtcttttaatattgtttttttttacagctgtgttgcaggaggaggaagaacaccatggttggattgaaggattggccattcttatttctgttattgtcgtagttatagtgacagcatttaatgattactctaaagaaagacaatttcgaggtctgcaaaatcgtatagagggcgagcacaagttttcagttattcgaggaggagaggtgtgccaaatatcagttggtgatattcttgttggcgatattgctcaagttaaatatggagacttattgccggctgatgggtgtcttattcaaagtaacgacttaaaggtaagttaagaaaaaacgtagatatagactattttatcagtaaagtatttgtgaaacaatttgtaatataaagcgcgtgtctcatttatattgacggtgataatttttcattctgtaggtggacgaatcttctctgactggagagtctgatcacgtcaaaaaggggccagatgttgatcccatggttttatccggcacgcatgttatggaaggaagcggcaaaatggttgttacagccgtaggggtaaactcacaagctggtataatttttacgctccttggtgcggcagttgacgaacaagaagcagaaattaagaagatgaaaaagggttagtacaattgaaataacataaaataaaattttttatgatttttaaccacgtaaataaccacgactctataaataagatcctacctatgttgttttgatacatatatttgtcgttaggatgtaatttatatatttattttttattttcttttttgttggtattttttcatattccaattgttcacatattccatatgtgaattccatgacgtgaatcgattgacccatcatcttccatcaacccaatcaaccaaccaacctgtcaaccaaccaatcaaatataacctgcaacctaccacaacacaaccaaccaatgtcttcaacaaataaaaccataaaatatatggtttcaaaatgttgtcgatcccagaagcgaaaagggccaacaagcaaaagaatctgacaggtgaatttttgcataatacttatttttattatttcgcaaagcaacaaacacatatttttcgagcagaatagtatactgacgaaaatacaataggcacttctactcaccacgttttgttatcaataatgatgtttaagagcactataattacgtttctattttgatatatttttaatgattgctttgtatcttttttcgatgatctttcaaagagaattacaattattacttttataacagtattattataaaaaccagttttaacggttttttcgaaattgttttatataaaaatccattcttgccaaaacgatcggcttaaatcaatacagactattgttacagctaacttttgttagccggcgggcctgaaaggggtcaccaaggtgacaaaggggttttcagctactccgtatgccttaaaaaaatacactctattgcaatattaacgctgaagtgactttagtaactggttttaaatgatcctttatatacattctcgttgccccaaataaaacagctgactataatttcttcttaaaattccgcataattccgtataatagtaggaatggcttttctcaaatagtgttagcaacttctcagtcataagtgcagaggaataattttcggtttttaagcttagtacaaaactctcttcatataacggttgcctttaaatttaaatatttatttcattgacaaaaaaaaattgtaactcaaattaaattccatacccgttcatcttgttaaaacaagattttgaaggccatttaaaattaaatttttttcagactatctgtctgcaatacaaagttattttactgactttacatattattaaataaaaatacaatctaaaattttatgaaatctttttattcttttatcttcttagaaatctttttgatcaccactagattttgtgatgtctgcgtaaacatcgagatttccgtatccgaaaaagctagaaagttaagattacattcaacttctaatggcggttaaataagttgtgcaagtttgtttcaaaacattgtcacgcccacaaaccaacaaatgttgccacgcttccctctgaaacttggaaagttatattatttatttcttattttaattatttaccaattatttttgggcaaatgtatagaaacaggcaagaaaaaaaaggtttcaatagtgtaggagtttttgtcaggaaatacaccttcttcaaaggaataaaaatgtattatggggcaaatctaaataaggtactcaaacacaacgtatcttattttattttgtttaaataaattcagcctgtaatcttgtatgtgttcattgttttaaatatttcttgtcttacgtaggtgaaaacgatggtcgatcgcaaataaaggggtcccaagcgccatctcaacgcgaaacagtcacgagtgagataaccaaatctgagtctgaaggaaatcatttgccgcaatcatcgtcatcaggagcggctgaaacaggacataaaaaagaaaaatctgtgcttcaagctaaactaacaaaattagctatacagattggatatgctgggtcgaccattgccgtacttacagttataattctgatcattcagttttgtattaaaacgttcgttattgacgagaagccatggaaaaacacgtatgccaataacttggtgaagcatttgataattggtgttacagtattagtagtggccgtacctgaggggcttccattggcagtaaccctatccctagcatactcagtcaaggttggtttaatttatgtaaatggaaccatgtgattaattccgtctttttaatagaaaatgatgaaggacaataatttggttcgtcatttggatgcatgtgaaaccatgggtaatgccactgccatatgctctgataagactggcacacttacgaccaatcgtatgactgttgtacaatcctacatatgtgaaaaattgtgcaaggttttaccaacccttagcgatataccacaacatgttggaaatttaattacaatgggaatatctgttaactcggcttacacctcaaatataatggtaaattagattttatttctagcctatttagctataaatattttctcctttttaaggctggacacaacccaggagacttaccaattcaagttggcaataaaacggagtgtgctcttttgggatttgtccaagggttaggtgtgaagtatcaatctattcgagatgaaattacagaggataaatttacacgcgtatatacatttaattcagttcgcaagagcatgggtactgtgataccccgtcctaacggaggatatcgactgtatactaaaggagcttctgaaattattatgaaaaagttcgtattattagaaacagtgaaacagtgacttaagctacggaaggtataaaaacccatttgcctttcgttcacttagctccagcgcgtgagccaatttaaatttttctttcggctctttagcagtaatgagtcattgggacttatatgcagactacgtttttaaaaaggttcatcaatgacgcttttgatgaaggtcgcttttttctaactgcagcttaacgcaagctaagtaaacgaaactcaaattggtttcaattagatgaatgaatgctttccgcccctgaagaccaaattgggtttactttttagtttcctaaaaatcctgcagtgtactcacaaaggcaacaattggaatgctttaaaatcattgcaggtgtgcttttatctatggacatgagggcactttggagaagtttacgagagatatgcaagagcgtttaatacgtgaagttattgaaccaatggcatgtgacggtttgcggactatatctgtagcatatcgcgattttgtgcctggtaaagccgcaattaacgaagtgcatatcgatggggaacctaactgggatgatgaggaaaacattatgacaaatcttacatgcctctgtgtggttggtatagaagatcctgttcgtcccgaagtaccagacgcaattcgaaaatgtcaacgcgctggtataactgttcggatggtcaccggagacaatattaatacagcacgctcaattgccagcaaatgcggcattttgcgtcccaatgatgactttcttattctggaaggcaaagaatttaataggcgtattcgtgatagcaatggagatgtatgttttaagagtacacatatttgacacatttcctaacattctgtatcttaacattttgtatttatgaacagattcaacaacaccttatcgataaagtatggccaaaactgcgggttttagcacgctcatctccaactgacaagtatactttagtaaaaggtttgtaataatttctttttaatagaacttggtgttctgcattcacatagaaaagaaatcagaatattttatatgtgtatgcggtaaaaaaaagttgtttagggtatcgtaaaaaacgaacgaactcatttgcaacaaataacgtcttaaattttaattatttggtaacaattaaaacctattgaataagtcataggaacttttcgtgcgtttaaaaattgaaagatggacttgaaagtgaaagctatataattttttaaagtcctgtcagagtgtgttttaggtgtttgaactattagataaccgttactcggattatggaaattcgaacgcaaaatttcgtcatatttcagggatatcgattgatattggggaataaagcctacttttcaacgaatacctgataatctactagtaacaggtatgaaagtgggattaggagatgtaaatgtatactttcatgtaaggttttgtaaaaatctttctttaatttagttacccgcgctaaacgatatgaaacttttactttacttttaatacaaaatgcacgtatttataggtatcattgacagcaccgtaagtgaaaaccgagaagttgttgctgtaactggagacggcacaaatgatggtccagctttaaaaaaagccgatgtaggatttgctatgggtatagccggaacagatgttgccaaagaagcttccgatataatattaactgacgataattttagcagcattgttaaagctgtaatgtggggacgcaacgtatatgactctattgctaagtttttacagtttcagttaacagtaaatgtagtcgctgtaattgttgcatttattggtgcgtgtgctgtgcaagattcaccgcttaaagtaagttactaaaagaaaaaagaaaaaatctaataacagcaaaatttcaggcagtgcaaatgttgtgggtgaacttaataatggatacattggcatcacttgcattagcaactgagtttcctacaccagatctattgctccgcaaaccctatggccgtacaaaacctttaatttcccgcacaatgatgaagaacatattgggtcaggcgctgtatcagttaataataatattcggattgttatttgtcggtaagttatattcataatcaatgctttctttgtaataaaaaattgttatgcttaaggcgatgttatactcgatattgaatctggacgtggacaagaactaaacgcgggaccaacacagcactttactattatctttaatacttttgtcatgatgactttgtttaatgaaataaacgctagaaaaatccatgggcagcgcaatgtcattgaaggcctacttacaaatcccatattttacaccatatggatattcactatgatatcacaggtatgctatataatgttattcatatgcacatatatatacatttaaaatattttcacaacatttaaggtgctaatcatccaatatggtaaaatggctttctcgacgaaggctttaacattggatcagtggctatggtgtatattttttggaattggtacacttgtctggggacaactgattacctcagtacctacaagaaaattacctaagatattatcgtgagtaaatgtttaacgttattacgattatatataccagcttatgtatgttcattggcttaagatctttcaatttcgattgcataagttttttgacgttagtatttgtaaaatgaataactaattaatggtttaccacattaagatctagtgtctggctaagttaaatttcaatatgtctttaacaacttcggattgctatagacttaacacttattaacttttataaaaaatgcatgtatattttttaaataaaccaacgtttataagtttttctttttcgaatttacaaatatatgcatattattaggtcgcccttaaatataaaaaaaaaactaattaaaattgttaaagggtaagatacaataagttacctttaagttaatctccagtggaagtgatgttacgtatttaaaaaaggttcctatgtacataatttaaaaatgtttattttggttaattaattaatttagtaaatattagttaatgggaatttgttttgactacgagaaattttgaatatagacgccgacagggtcagaagcttttttatttatctgccgaacaaatatactcttgaaatattgctttttgataattggttttggtgcttaattaataattttctaattgtggtttttattaggatagattttattggtaaacgctaatattaagtttattacatatgtctattattccagttttaagctcgtgaataagggagtataaggctattttattataatctttagaaaagccaatggttatatgaaaatgctttgataatgctttgtcggcgtgtcgatgtgggaatttaagaatttttgaagtatcccaggatttggagtttaaaggtgctggataatatagcaggatgatatacatgtgtagtggagcctgtataagcaagttttcatcctaattttttttcggcaaattgcttgcaaatttatatttatatgcaacaaaatatctatctgccactataactacgccctct

SEQ ID NO: 3302 - DNA, 3021 bp, DROSOPHILA
aatacagataagaccataacaaatggccactatagatggaagaccggcgcaatatggaatttcacttaaacaactgcgcgagctcatggagcatcgtggtcgtgagggtgtaatgaagatagctgaaaatggtggcattcacgaactatgtaaaaagttatacacatctcccaatgaaggcctaagtggatcgaaagctgacgaagagcatagacgtgaaacattcggttccaatgttataccaccgaagccaccaaagacctttttgactctagtctgggaggctcttcaagatgtgacccttattatattagaggtagctgcattagtatcgcttggtctatcattttataaacccgccgacgaggatgcgcctgtgttgcaggaggaggaagaacaccatggttggattgaaggattggccattcttatttctgttattgtcgtagttatagtgacagcatttaatgattactctaaagaaagacaatttcgaggtctgcaaaatcgtatagagggcgagcacaagttttcagttattcgaggaggagaggtgtgccaaatatcagttggtgatattcttgttggcgatattgctcaagttaaatatggagacttattgccggctgatgggtgtcttattcaaagtaacgacttaaaggtggacgaatcttctctgactggagagtctgatcacgtcaaaaaggggccagatgttgatcccatggttttatccggcacgcatgttatggaaggaagcggcaaaatggttgttacagccgtaggggtaaactcacaagctggtataatttttacgctccttggtgcggcagttgacgaacaagaagcagaaattaagaagatgaaaaagggtgaaaacgatggtcgatcgcaaataaaggggtcccaagcgccatctcaacgcgaaacagtcacgagtgagataaccaaatctgagtctgaaggaaatcatttgccgcaatcatcgtcatcaggagcggctgaaacaggacataaaaaagaaaaatctgtgcttcaagctaaactaacaaaattagctatacagattggatatgctgggtcgaccattgccgtacttacagttataattctgatcattcagttttgtattaaaacgttcgttattgacgagaagccatggaaaaacacgtatgccaataacttggtgaagcatttgataattggtgttacagtattagtagtggccgtacctgaggggcttccattggcagtaaccctatccctagcatactcagtcaagaaaatgatgaaggacaataatttggttcgtcatttggatgcatgtgaaaccatgggtaatgccactgccatatgctctgataagactggcacacttacgaccaatcgtatgactgttgtacaatcctacatatgtgaaaaattgtgcaaggctggacacaacccaggagacttaccaattcaagttggcaataaaacggagtgtgctcttttgggatttgtccaagggttaggtgtgaagtatcaatctattcgagatgaaattacagaggataaatttacacgcgtatatacatttaattcagttcgcaagagcatgggtactgtgataccccgtcctaacggaggatatcgactgtatactaaaggagcttctgaaattattatgaaaaagtgtgcttttatctatggacatgagggcactttggagaagtttacgagagatatgcaagagcgtttaatacgtgaagttattgaaccaatggcatgtgacggtttgcggactatatctgtagcatatcgcgattttgtgcctggtaaagccgcaattaacgaagtgcatatcgatggggaacctaactgggatgatgaggaaaacattatgacaaatcttacatgcctctgtgtggttggtatagaagatcctgttcgtcccgaagtaccagacgcaattcgaaaatgtcaacgcgctggtataactgttcggatggtcaccggagacaatattaatacagcacgctcaattgccagcaaatgcggcattttgcgtcccaatgatgactttcttattctggaaggcaaagaatttaataggcgtattcgtgatagcaatggagatattcaacaacaccttatcgataaagtatggccaaaactgcgggttttagcacgctcatctccaactgacaagtatactttagtaaaaggtatcattgacagcaccgtaagtgaaaaccgagaagttgttgctgtaactggagacggcacaaatgatggtccagctttaaaaaaagccgatgtaggatttgctatgggtatagccggaacagatgttgccaaagaagcttccgatataatattaactgacgataattttagcagcattgttaaagctgtaatgtggggacgcaacgtatatgactctattgctaagtttttacagtttcagttaacagtaaatgtagtcgctgtaattgttgcatttattggtgcgtgtgctgtgcaagattcaccgcttaaagcagtgcaaatgttgtgggtgaacttaataatggatacattggcatcacttgcattagcaactgagtttcctacaccagatctattgctccgcaaaccctatggccgtacaaaacctttaatttcccgcacaatgatgaagaacatattgggtcaggcgctgtatcagttaataataatattcggattgttatttgtcggcgatgttatactcgatattgaatctggacgtggacaagaactaaacgcgggaccaacacagcactttactattatctttaatacttttgtcatgatgactttgtttaatgaaataaacgctagaaaaatccatgggcagcgcaatgtgctaatcatccaatatggtaaaatggctttctcgacgaaggctttaacattggatcagtggctatggtgtatattttttggaattggtacacttgtctggggacaactgattacctcagtacctacaagaaaattacctaagatattatcgtg

SEQ ID NO: 3303 - protein, 999 aa, DROSOPHILA
MATIDGRPAQYGISLKQLRELMEHRGREGVMKIAENGGIHELCKKLYTSPNEGLSGSKADEEHRRETFGSNVIPPKPPKTFLTLVWEALQDVTLIILEVAALVSLGLSFYKPADEDAPVLQEEEEHHGWIEGLAILISVIVVVIVTAFNDYSKERQFRGLQNRIEGEHKFSVIRGGEVCQISVGDILVGDIAQVKYGDLLPADGCLIQSNDLKVDESSLTGESDHVKKGPDVDPMVLSGTHVMEGSGKMVVTAVGVNSQAGIIFTLLGAAVDEQEAEIKKMKKGENDGRSQIKGSQAPSQRETVTSEITKSESEGNHLPQSSSSGAAETGHKKEKSVLQAKLTKLAIQIGYAGSTIAVLTVIILIIQFCIKTFVIDEKPWKNTYANNLVKHLIIGVTVLVVAVPEGLPLAVTLSLAYSVKKMMKDNNLVRHLDACETMGNATAICSDKTGTLTTNRMTVVQSYICEKLCKAGHNPGDLPIQVGNKTECALLGFVQGLGVKYQSIRDEITEDKFTRVYTFNSVRKSMGTVIPRPNGGYRLYTKGASEIIMKKCAFIYGHEGTLEKFTRDMQERLIREVIEPMACDGLRTISVAYRDFVPGKAAINEVHIDGEPNWDDEENIMTNLTCLCVVGIEDPVRPEVPDAIRKCQRAGITVRMVTGDNINTARSIASKCGILRPNDDFLILEGKEFNRRIRDSNGDIQQHLIDKVWPKLRVLARSSPTDKYTLVKGIIDSTVSENREVVAVTGDGTNDGPALKKADVGFAMGIAGTDVAKEASDIILTDDNFSSIVKAVMWGRNVYDSIAKFLQFQLTVNVVAVIVAFIGACAVQDSPLKAVQMLWVNLIMDTLASLALATEFPTPDLLLRKPYGRTKPLISRTMMKNILGQALYQLIIIFGLLFVGDVILDIESGRGQELNAGPTQHFTIIFNTFVMMTLFNEINARKIHGQRNVLIIQYGKMAFSTKALTLDQWLWCIFFGIGTLVWGQLITSVPTRKLPKILS

SEQ ID NO: 3304 - DNA, 3635 bp, DROSOPHILA
aatcaggaatacgaataaaacatttaattttgaatgcatcctcaaccagagtctttaccacagttgtaacatatagtggaaaaaatgttgcactcgataaatttatagccggattcgccgcccctgcagcttcaacgtattataaatatttacgagccgcccgctcgggtggattccgtggaggatacgcacatcttagtcgatgacgacgacacatccgggggagcaaaatggccagagtccattcccgcaggacacacgccatcagctcctttgccgatcgtttctcctcccgggggacagagcgacgcagtgcatccggaggcatattaatgatgtctttatggcggccacatgggcgttggcaaattccccggcggaactggctcacccgcacaatttacgagcgtagtgcatccatctagtaattaaaaaatagaaaacactttactcgtaaatgctgatttatgtggggatgcaacattgctgcacaaaatttagcctcaaaaaaagagaaaatttccatacctcctttttgcagggtttattagtacttagagagttatagtaagagtttttcttaatcatttttaagtatttaataaactacactttctatcatcaaagttgtaacacatttacaggccctttagaaaaagcaaacattccccagtgattatccttttttgagtgcccccttaaagttttcgttcacatacgcattacttatttggttgccaatctgtcaactgttttacggctgacttcctgtggaacgtgccactggaaacttgaaataaatcctagaaccacgtaccccccccccccaactaccccttcgcgtaagtaccaaaagagctctacaaggtagcagccacaagaaacttcgttaagctcctctgccggcaaactcccaatgcacatgacactcctcctaattgagccataaataagagcgaggctttatttcagtattccaaagggccagtaggtagtgtgtttagctgggagtatccggctgtgcctcgaccacaaagttgtagataccatcctcggtttgcatcggagcctgctgggtgatttggaagcgctctggttttttgacgtctttaaatatttgcaccacctgctgacgcagaggctccagggaatcgacgccatcttttaatttccggcccagcgatggctggatgttgtccaccatgtgggtaaccagatcagcgataatcgtctccaaattggagctgttctcgcgccccagctttccattgagatacagtatggtgtgaaggttgcggacgaactcctgcgtgcgatccgattctatcttcaggaatttctcatccgcggcagtcttgaggtcctgttccgcctgcatgcgacacttctgatagacttcgctggcgggacgacctcttttggactcctcctcctcgtcctgcttctgatactcgaccaggtagtcgtgcaggatgcgcagcggttcaaggatatcagcgttcactcggtgcagcgttatcatgctggccgaatagcgacgctggagattctcacgctgaggtgtgaccttggcatcgcgacgactacttgaagaaccaatctccttgaatgtctcgaaatcctcattcattcgggccaagtccatgaggatcttgtgcttgacatcctgtagtttaccaacccttagcactgattccagaagttccttggtgtacctcttgtttccgaacttctcggtcttggcgctctccgaaataaccgaggacgatttgttgccgcgcataataattgacaagggaaccgccgcggtttcctcgtcggaatagagctgtgaatccggaagactgagcacgactgcattgtcgtttctattgaatcgaaccagataggtgtagtcctgcggatcgtagcccatgacagtgccattgacgatgccctcaaaggagtttccgtgcagaaaactgctgaccgtggcatccttggccagtggcaggggcacacgcttgggtatctggtccaagtagcccacgttctccttgggattgaacttatgctgctgcaactggcgcacaatgcggcgctggcactccaattcttcgcgttccagctcgatgaaggcggccgaaaatcgacgcgccttccccatattccgacgtaccaattgccatcctctgcggggcatgaagcaagagtgcaggagcggacagtactccgctatgaagcgcttcatatcgtagcccatggtcagggtcggcttgtccaggaaggagtcgacgaactcacaccaaatccaacggtgagagctgagatacttcaggaaattgtacaatctaaaggagaatgaacaattaagcacttaaagggatctctagggaatctttcccattacgaacctcttgccaagtataaagtcattggagtagggatcctgctccttttccttttccttcgctttctcgtcctccgaaacatctacagatatattggacggcttctttgtaaagttctcagtccttttggacgccacgcctggtttaattcttccctggatctctggcttttcggaaatcctaatacgcggggcgaaatttgggcgtttaataaataattcatcgttttgccatgccgccaccatctttctgggtttcttcaattgatgacgcgacattctacggatggtagcacagttatagttctattttaatatttgatagaaaaggagaaaatattacgttgtcgtagatagtaatcctatatttgccagaaactcgttttcttcgcagatctcagattggattgtgaaattatcgattgatagtggatcaactgacatgctgaaatggtctactaagtttttctttagtaatttaagcgaagtttttctgaaccaaatgttttttttgttaaaagtctcacgccatttgacatatggcctccaaacttgggttgccaacatatttcaattctgtcaagggttgccatattttctaaggtactaactaaagtcattattaaagtaacagttctgataaattaaattaaaacaactaaagtcttacatggattttaataaacagtatcaatattttttatgaacagcaggctcaatcgaattatgtaattttttttttttaattcattgattttgttttttgttatatgccgctttccagggttgttgattttccgagtgaaatctgttgaatttttaatttgaaaaacttttgcgtgattttcatagctggtgccaattgcgcaacacaacaatgggtggccgaaactcagcctagcaaaatagtaaacagccaaagtttcgccggactgcaagaatggcttcatggtcaatagtagatggtcgatatggtggtaatggtcatcggggcgcgtaattaataaagtttgcatacgactgttgtcgtggctaaaacgccgccagcggatttcgaattacgtaaatggatttcagcattattgcctgcgcacttttggcctaatttccatgtctgtgatgtggtaagtacgcctgtgcactgcaaaaaaaaagggtacaaagacaagagaattgctaatgaaattccgagagtatttagttagaaacgctgaaacacacacttgttttaacatccaaattccat

SEQ ID NO: 3305 - DNA, 1572 bp, DROSOPHILA
atggtggcggcatggcaaaacgatgaattatttattaaacgcccaaatttcgccccgcgtattaggatttccgaaaagccagagatccagggaagaattaaaccaggcgtggcgtccaaaaggactgagaactttacaaagaagccgtccaatatatctgtagatgtttcggaggacgagaaagcgaaggaaaaggaaaaggagcaggatccctactccaatgactttatacttggcaagagattgtacaatttcctgaagtatctcagctctcaccgttggatttggtgtgagttcgtcgactccttcctggacaagccgaccctgaccatgggctacgatatgaagcgcttcatagcggagtactgtccgctcctgcactcttgcttcatgccccgcagaggatggcaattggtacgtcggaatatggggaaggcgcgtcgattttcggccgccttcatcgagctggaacgcgaagaattggagtgccagcgccgcattgtgcgccagttgcagcagcataagttcaatcccaaggagaacgtgggctacttggaccagatacccaagcgtgtgcccctgccactggccaaggatgccacggtcagcagttttctgcacggaaactcctttgagggcatcgtcaatggcactgtcatgggctacgatccgcaggactacacctatctggttcgattcaatagaaacgacaatgcagtcgtgctcagtcttccggattcacagctctattccgacgaggaaaccgcggcggttcccttgtcaattattatgcgcggcaacaaatcgtcctcggttatttcggagagcgccaagaccgagaagttcggaaacaagaggtacaccaaggaacttctggaatcagtgctaagggttggtaaactacaggatgtcaagcacaagatcctcatggacttggcccgaatgaatgaggatttcgagacattcaaggagattggttcttcaagtagtcgtcgcgatgccaaggtcacacctcagcgtgagaatctccagcgtcgctattcggccagcatgataacgctgcaccgagtgaacgctgatatccttgaaccgctgcgcatcctgcacgactacctggtcgagtatcagaagcaggacgaggaggaggagtccaaaagaggtcgtcccgccagcgaagtctatcagaagtgtcgcatgcaggcggaacaggacctcaagactgccgcggatgagaaattcctgaagatagaatcggatcgcacgcaggagttcgtccgcaaccttcacaccatactgtatctcaatggaaagctggggcgcgagaacagctccaatttggagacgattatcgctgatctggttacccacatggtggacaacatccagccatcgctgggccggaaattaaaagatggcgtcgattccctggagcctctgcgtcagcaggtggtgcaaatatttaaagacgtcaaaaaaccagagcgcttccaaatcacccagcaggctccgatgcaaaccgaggatggtatctacaactttgtggtcgaggcacagccggatactcccagctaa

SEQ ID NO: 3306 - protein, 523 aa, DROSOPHILA
MVAAWQNDELFIKRPNFAPRIRISEKPEIQGRIKPGVASKRTENFTKKPSNISVDVSEDEKAKEKEKEQDPYSNDFILGKRLYNFLKYLSSHRWIWCEFVDSFLDKPTLTMGYDMKRFIAEYCPLLHSCFMPRRGWQLVRRNMGKARRFSAAFIELEREELECQRRIVRQLQQHKFNPKENVGYLDQIPKRVPLPLAKDATVSSFLHGNSFEGIVNGTVMGYDPQDYTYLVRFNRNDNAVVLSLPDSQLYSDEETAAVPLSIIMRGNKSSSVISESAKTEKFGNKRYTKELLESVLRVGKLQDVKHKILMDLARMNEDFETFKEIGSSSSRRDAKVTPQRENLQRRYSASMITLHRVNADILEPLRILHDYLVEYQKQDEEEESKRGRPASEVYQKCRMQAEQDLKTAADEKFLKIESDRTQEFVRNLHTILYLNGKLGRENSSNLETIIADLVTHMVDNIQPSLGRKLKDGVDSLEPLRQQVVQIFKDVKKPERFQITQQAPMQTEDGIYNFVVEAQPDTPS

SEQ ID NO: 3307 - DNA, 2926 bp, DROSOPHILA
tgtcttggatatgtctgctgatcttcatactcgccttgtgtgtcgtcatacccttggtctacgtcatctacctagcagagcatccacatcacaaccatagtgcccagtagttgggtaatgtctgcacccgaagtggtcatcattccaaacggcaccccctcacccggcaccctgtcaatctctcagatgagcctggcgcatttcaaatgcaaccccaggcgacggaatttatttttatacctatgcgcgtaactttgtattgactcttgataaaaaaaataaggtctttgtcgacagaacttttaaattaccacgatttgggtgcttcccagatgcataggcttgtctatgcgccacataacttctggcagcaccaattgcaggattctaagatccgattgtgctgtgaatataaatcgtaaccccgccgttttgcttttctatatgttttattgagtacaattatgtaacatttaaactacaatagtacgggtaaggtgtaacattattcagctgaagttgggatagtttctcttacgccaaaaaagtacgtaatacatatcttagagctaaataaatagtatccatggatataagaattatgtaatactaaatacgaactacaattaacaatggcgcatgctaacggccaactgaacttaagtactttttttccgtgatgtttcgactgggaaatggaggccatggcacatggtatttggcgaagatttggtttggattatggccggattggtgctttgccattgtcgtaaattttcccctccgggaagatcaactaagggtcgcacccaacaagactgtattcgcatattcacttgaactttaaattctcaaagaaagcaatattgctccggaggaatccgtggcgcacgggcacaggactcgccggtgaggctataggtggagtggcctccgaatgtatagaaggatccctgaaatgagatgaaatgtagaatagtaatagctcgaccaaggttctctaaagagctaacgtttcgagtgatgataagtccgaggcgatcgtagactcatcggctacttctgccatggagacggcgtgctccagtttgtgccgcttggccagtgacgtgttcggcttatctggagtgtctggcggggctgctattctaacctattaaggaaatcatacttgattgaactacttgttaatgggtgaggttcactttattttccttaccttggcccgccatcttcgttggggttgtgtgtgcttgctggtcaggaggaatgcctgcgccagagccttaacagatggcatggaatgggccacctcatcttcgatgacgggcttctcagccgcaggagttgtgggttcaggctaacaatagtgtgcattagcatacattaccaagttaaccgagttactcttaccacatcatcctcgtcgacggatagcacctgactgggatcgataaggcgacgtttgggctgcaggaatctaaaagcaggaggagtggatccccgcgtgggcgtactagcaggcgatcctattgttggcaccgaatcgcctgggccgaactgaagaaccacagggcgctcccgcttctgggacactgatgagtcgatggatgatgaaaccgatggtggagcaccctgggcggactccatggatgaagtggtggactcgctgggctgctgctccgctggagcagccctgataaccgtcgtttcctgcttgttaaagtcgtaaatgcgaaccgtatcggattcatcgcttgtgtttgtggtcgtggtttgcagggagtacagcgagggattcgattgcgaatccagggactcatccaggacttggacgggcgtggctttgtataccgatatcgattcctgcggcggattctgttcagtggcagtttggcttgcctttcgagccttttggtaaaacattatcggtttgatagttgacagtggttttgttgggtgcgtgttggtttgtttgttgattagtgtacgtggttaggattcgatggaaataagaagtgtgggcgttttagtattcaatattagtgtaggcgtggattggatctagagtctagcagatgtggtggacttttgtgggtggacttttgaacgctagggcagcagcatgcaggtaagatttatcatttacaagtagttacaatcacttgacttcgaaacaaatgctgttagtcagatctaaatggctatttcggctaattatcggctttgtactcaccaattcgttaggattatttggatatggattcggatacggatactaaaaacatttgtttcagtggttcagtattggctttgtttgttggttggtttattgtttggctttatttggaattactgcattatagatttctagatttctagatatcgctaggcatatgtgtatggtgtttcgttggaaagagcgttagcggtgtgcatacagatacggtacaggatttatcatattatttcataaaattaacagcaagtataatgattaaaaacaaacgttgcatactctagggcattagcattacgtaagtggtattaactaaagctacgatcagaacactagctcgatcctctcattcgcgtggcgtggttggtgcaacaggtgctggtgcagtggaaaggtcggaatcgtttgcccctccagtgcgggagattctgtgcctgcctcataatttcccgtgtttcaatattgttgtaatttcgtaatttctattcccgccgatgcccatcctatttgctatgtacagagaaattgggtttgctatactgactagtgtttaacatctgtttgtttgactaagctatgcgtaatttggcaaatatcgtggggcctaagaccaaaatgatccccagagctcctagaatagcagactattgttgctgtacttggcgtccgcaccgctgaagccgttca

SEQ ID NO: 3308 - DNA, 807 bp, DROSOPHILA
atgttttaccaaaaggctcgaaaggcaagccaaactgccactgaacagaatccgccgcaggaatcgatatcggtatacaaagccacgcccgtccaagtcctggatgagtccctggattcgcaatcgaatccctcgctgtactccctgcaaaccacgaccacaaacacaagcgatgaatccgatacggttcgcatttacgactttaacaagcaggaaacgacggttatcagggctgctccagcggagcagcagcccagcgagtccaccacttcatccatggagtccgcccagggtgctccaccatcggtttcatcatccatcgactcatcagtgtcccagaagcgggagcgccctgtggttcttcagttcggcccaggcgattcggtgccaacaataggatcgcctgctagtacgcccacgcggggatccactcctcctgcttttagattcctgcagcccaaacgtcgccttatcgatcccagtcaggtgctatccgtcgacgaggatgatgtgcctgaacccacaactcctgcggctgagaagcccgtcatcgaagatgaggtggcccattccatgccatctgttaaggctctggcgcaggcattcctcctgaccagcaagcacacacaaccccaacgaagatggcgggccaaggttagaatagcagccccgccagacactccagataagccgaacacgtcactggccaagcggcacaaactggagcacgccgtctccatggcagaagtagccgatgagtctacgatcgcctcggacttatcatcactcgaaacgttagctctttag

SEQ ID NO: 3309 - protein, 268 aa, DROSOPHILA
MFYQKARKASQTATEQNPPQESISVYKATPVQVLDESLDSQSNPSLYSLQTTTTNTSDESDTVRIYDFNKQETTVIRAAPAEQQPSESTTSSMESAQGAPPSVSSSIDSSVSQKRERPVVLQFGPGDSVPTIGSPASTPTRGSTPPAFRFLQPKRRLIDPSQVLSVDEDDVPEPTTPAAEKPVIEDEVAHSMPSVKALAQAFLLTSKHTQPQRRWRAKVRIAAPPDTPDKPNTSLAKRHKLEHAVSMAEVADESTIASDLSSLETLAL

SEQ ID NO: 3310 - DNA, 6774 bp, DROSOPHILA
acattaataactaatgatggggcttatccgagtaaatcaacattaaataaattaacaacggaattcaaacaaaagcaggtaacttcaacttcaacttgtgtgcaaggcatcaacttttactgttaattgttgctggcaatgcaaaacgcaacgccgaccgaaaaacgaaaactacaaaaataaaccatgaaaaagcaaaacaaatatatttaaaatacatttgaacgccttcagcgttttattcatcaagcaaagcaagaaatgttgaatcgaaagaaaaagtcaaacaaagccataaaagcgataaatcaatttgtgtcacctgtgtagtaagtatatctcagtatttgtaactgaaaatgaaaagcgttgaggtgcaggcatcaaccacacaaagaacaaacaaaatcaaatgaaaataaactgaatttacaagtgctctctgactattatttacgagagtgtggtccttggttggcatgttcatttccccacattatcgtctcaaatcagttgatttcggggaagcaatatttctcggtaaaatgagtaagtatgtcttggacaggtcgaaatgtaaaatattcctttttgaggcaccattaaaggtaccattctctgcataactgaaaggagttagattgcctacatcagccggtcgaataggagagtgcgtttttactcactttactactcttcttgcttttgcactagcaagaaatcattatcaattatgcttatgaataattaggaatcctacggcaagaaccaacgttcctaaattatatttaaccaaccggaaattaagtcaaccactcttagagcgccatctggtgaatgcttttggaacctattaaagtgtggcccgcgcaccaaaaataccgcaaccgataactggccccgataaagtaccaaacctcgccgatgactggccacccgaaaagctgtgactcgccaagcttttgcccatcgatcgccacgagcttatcggaatcgcgatctgatctgaaaagtgggaacgcagcgcagataaattaattagcaattagccagtgcaaacagagtgttgtcagccgactagaaaaagcagctgagctgatagttccgcctgtggcccccgcgctttcgccctgcatcggaacgaaaccaaaataaacaagcgagtgaaaggcggtggagaaagagcgcgggagagtgagcgcgaagagtagtccgttggggaggaggcggaggaggagcggacaacgaggcagaaacaaaagcacaaacggcggacagaaccagtcgaaacaaaacaacaaaccggagcggacgcactcgaaaaaagcgaaacgaatttatttctgtgcttagggcgacactgtgtgcgtgcgccactgattgtgagtgtgtgtgttgtgtatatttaaacaatattcaaaaaatcatacgccagacgaataaaaaacgcgacgaaaacgaaggcgaagatctccatctcctctcgcagcggagcagacagataaataaaaacagaatccgagacagcaacaacaacgcgactgtgacgcggcaaggtgctggaggtcactcggtccatttcgcaccgcactgaagtatagaagtttagcagtaaagcaccacccccttctaaccagtttcagcttcatccgcccgcaaaaaacaaaaaaaaaacaagcacgcgcgatcggaaaactcgaaaaaatctacagagcagcacaactcacgcgcttcatcgttttattgctcgccgccctctcgactgataaacgtcagttgataaatatatatcgcatcacatcgcatccacactaaaacaaatacgccagcaaacaaacaccaattattccaataaagccagcgccaagtgcgaatgcgccctcgatttgtatgccatcagcagcactcggtggcccattcccactaccagccccactcccacttccatcaccatacccaccgccatcccaatccgccccatcaccatcacatttacggcgccactgacgtcagttatcggcgttatcgcaccgctggcatggtggtggccgagggagttatggactccgggtcgggatcgggcacgggaacgggcttggggcacttcaacgagaccccattatccgcactgggcatcgagacccgcacccagctgtcccgcatgctgaaccgcaagaaggtgctgcgatccgaggagggctaccagcgggactggcgcggcatctcggagctggccaagcagaagggattcgtcgacgagaacgccaacaatcccatggatctggtgctgatcagctggagccagcggagtccccagaccgccaaggtgggccatctggaacacttcctgggcattatcgatcggtgggacgtctgcgacgatatccaggagaatctgggtaggcattaactattttttacttatggtagtcgctatctatctataactaaactatgtcacttgagttttgagtatcatttgttttagattagcttttaaatgatggtctgacgattcgacttttacttcaaaatgccatcgtgacagtgaaaatttagttaaacgtctagactaactatgtatgtttgactgttctcgagtttgcgaagttgaagaggaattttaaataatgtacttatcaaatgatatgtacacaaatgttggaaatcggaaaatgaaccattaaattttactttaatggcgagccacacttatcaattatttttggctgatccatttttggttttatgaccggaaaagccgtttcgagtttataaaaatggacgtggtaatctatataatatagggagtatatgcagaaagcgtacatatttaacttatctatcgcacatttatctaagtcaaacaaagcttatcgtcggatacataaaactattgagttatgatgagtagatacgtaatgacagaaataaaagtcacccactttcccatgattaatttgtgtttatttctatttattgtcaaataaaacgcttcgacttacaagatttttattaccacatcccgacaaattgaaaaacacacagccataaagaaaaaattcaaaacaataatttctaaaagccgcaaacaacagaacttaaactatagaaaatgccaatcagttaagaacgaaattttcttatttatttgcacaatggggattcacccagcaaaaactgttgtcattaataaaaaacctcgaacagtcaattttgtttaggagcagatgttgtatagatatattcgttgtgaccaaaatggttcgatttaaaaacaaatgaacgcactcggaagttgaatgcttaaggtataaaaaagcacacataattaaaatcgtattaggaatttttcaaaggaaatgtttgaattccttttctaatgatctttcattgggtgttttagaaatattccaataaaactaaaaataactaaaaaagtaaattttttataaatgtgtcgttgatgataactgcttgaatctagaattcactacctcttactagaatgatcttttctgctgacaatatatttggaataaaaagatggggagacaatggcagacatctgaatggatatatgcatacacttatctattcatacataatattgagttacaaatcataaatactaccaatttgttatgaaagcttcatatattagcgactgtgtgcagaaactcagataaacttcactatgccattcctttaagctcattatatatcaacaaagggttatatttattatttaataaacataatttaagtaatttgattttgacattaacatgtataaattgtgttgtttactttacgaatgatgtgttaagaaaactttttgtgcggccttgtagtttttagcaatcataatccctttagtaaaactgttttaattttgctctcctcaaaagccaaggacacccagcgcttcatcatgaaacaggagcagcgacagactgctctcgtggaggcgtgtccgccgccccccagcgactgcttcgagaccaacaacaactacagcagcagcaacaacatcacagtgggccaaagtgtgcagatcctcagcgacgaggaccagagatgtgtacagatgggccaaccgctgcccagatacaacgcatgtgttctgtacgcggaggcagacatcgatcatgccaccgagatcatgaataatctagagtctgagcgatacaatctcagggtgagtgggatgcgctcggttgctgtgtgttgtattaaataaccatgggatcgttctattgcagctattcctgcgccaccgcgacatgctaatgggcgttccgttcgagcatgtccagctatcccatttcatggccacccgctgcaatcacctgatcgtcgtgctcacagaggagtttcttcggagtccggagaacacgtacctcgtgaacttcacccaaaagatccagattggtgagtagctgatacgcatttgtatcgcagagccagagtcgcattacaagttcaacgatctgactttccccagagaatcacactcgcaagatcataccgattctgtacaaaacggacatgcacataccccagaccctgggcatttacacgcacatcaagtacgccggggactccaagttgttcaacttctgggacaagttggctcgttccctacacgatctggatgccttttcgatctactccacgcgccaggtgcagacgtaagtgttgctacttcctgcgatatatgtatatgtatgtgttccaaaaatacttgatacatttttaggggtataaaatctcaagataatgtagattgctagccaacagataaatgaggtttgcaaactgaatacgaatacatgaagtagtctagtcatcccaatttaagaagctgttttagaatacattttattagcttaagtttttgattttactgttcaattattgctactgctggttgtaggggctgcgaaatcgtttcacaacattcacataaaatgtgcaaatgtataccaactgcttgtaaacaaaatatataagcaaatatcacatggcgtacgagcgatcaaccttagaacagcctagcaggtatttttatttagttttgctaaattcaaagaagatacgtttgtttcagaaagatgaactcatacgacttttaaagtgcccaggaagtaatacactgcatatgagtaatcaaatttgaaacaaatttataaacaggaaataaatgtattatatatctgggcgtaagattatattgaagcgaaattagttttgctgttaattgtaaaacatgttggaattttatcactcatatcataaatttggcattctctaaaatttctttatgcagtccctcgccggtggaggaatcggctccccgggtgaccactcccagcattcggattcagatcaacgacaaggatgtcactgatatgccaaactacaacagctgcaaagtgccggaggcggagaccacaatcgtttcggtttccggtgacaccggctcacccctgccggagcacaagccgaagaaaaaggatcgcttcctgcgcagaatcacgcacagctttggaaagacggcgcggagcgatggggccagcggcaagactctgcgtcatgcccactccgtcagcaccataaatgtcacggaacgcgagaggacactcagtgccagcagctccaacatctccaccacgtcggagagcaagaagagcttcatcaagtggcagccgaacatcctgaagaaggccctattctcgcgatccagcagcaagctgcagacgccgggctgagatcatagtgttaggatagccattcattcgatttctcgattctttgattccttgtcgtgtgcccagtctagttgtggccgcccagtcaccaatgtcgtcaccctccatgcctagtgataatctttagcctaatccttatcaagtcaactaacttaatatacttagacgcacttgttaacttatataagacaacaacgaataaagacaataccacatatccgcacaaatgtatcacaaaagcacacagactaccaaatacgacacgatattgctatatgctctatgtatatgactctggacttgataaacagacaaattggcaattgcgttgagtgaggttaaatacgcgacactgctaatcgaagtgctcaattaactgttagtcacgcgttcgataagtgacttacttaatttaattatctcgcgcgccgttctcgcaactcagaccccatctgagaatgagtaatgagcatatataacgcatacgtacatatggctgcattgtgcgagcagtgctttatcattttgtaaactgctcaagccgttttagacgattgctagcaataagtaaactgtttgttctcggtaccgccatcggctggttgcctcatgtgattagctctagcctagctgttaccgattgttactgattgctgtgaatgcgtgcccatatgcctgatgtgcacctaagcacactcacttgttataaagcaaagactatcaatacgtcatccatcatcacatcgtctctttcaatgtatctagagtctatatagtattatatgtatctccggacagtgcgtttcaaaaccatatagagtcgatcgacaaccatatattatgtccaacttttgtcaagcgacaacgaatgtggataaaacgcaatatacatatgttcctcaatgtcgggcatcgaacgctcgaacttcgaccttcgcgacacgtggcacttggcggtcatggttatgaaacgcactgtatccatatcggaaataagcta

SEQ ID NO: 3311 - DNA, 2487 bp, DROSOPHILA
ctgatctgaaaagtgggaacgcagcgcagataaattaattagcaattagccagtgcaaacagagtgttgtcagccgactagaaaaagcagctgagctgatagttccgcctgtggcccccgcgctttcgccctgcatcggaacgaaaccaaaataaacaagcgagtgaaaggcggtggagaaagagcgcgggagagtgagcgcgaagagtagtccgttggggaggaggcggaggaggagcggacaacgaggcagaaacaaaagcacaaacggcggacagaaccagtcgaaacaaaacaacaaaccggagcggacgcactcgaaaaaagcgaaacgaatttatttctgtgcttagggcgacactgtgtgcgtgcgccactgattgtgagtgtgtgtgttgtgtatatttaaacaatattcaaaaaatcatacgccagacgaataaaaaacgcgacgaaaacgaaggcgaagatctccatctcctctcgcagcggagcagacagataaataaaaacagaatccgagacagcaacaacaacgcgactgtgacgcggcaaggtgctggaggtcactcggtccatttcgcaccgcactgaagtatagaagtttagcagtaaagcaccacccccttctaaccagtttcagcttcatccgcccgcaaaaaacaaaaaaaaaacaagcacgcgcgatcggaaaactcgaaaaaatctacagagcagcacaactcacgcgcttcatcgttttattgctcgccgccctctcgactgataaacgtcagttgataaatatatatcgcatcacatcgcatccacactaaaacaaatacgccagcaaacaaacaccaattattccaataaagccagcgccaagtgcgaatgcgccctcgatttgtatgccatcagcagcactcggtggcccattcccactaccagccccactcccacttccatcaccatacccaccgccatcccaatccgccccatcaccatcacatttacggcgccactgacgtcagttatcggcgttatcgcaccgctggcatggtggtggccgagggagttatggactccgggtcgggatcgggcacgggaacgggcttggggcacttcaacgagaccccattatccgcactgggcatcgagacccgcacccagctgtcccgcatgctgaaccgcaagaaggtgctgcgatccgaggagggctaccagcgggactggcgcggcatctcggagctggccaagcagaagggattcgtcgacgagaacgccaacaatcccatggatctggtgctgatcagctggagccagcggagtccccagaccgccaaggtgggccatctggaacacttcctgggcattatcgatcggtgggacgtctgcgacgatatccaggagaatctggccaaggacacccagcgcttcatcatgaaacaggagcagcgacagactgctctcgtggaggcgtgtccgccgccccccagcgactgcttcgagaccaacaacaactacagcagcagcaacaacatcacagtgggccaaagtgtgcagatcctcagcgacgaggaccagagatgtgtacagatgggccaaccgctgcccagatacaacgcatgtgttctgtacgcggaggcagacatcgatcatgccaccgagatcatgaataatctagagtctgagcgatacaatctcaggctattcctgcgccaccgcgacatgctaatgggcgttccgttcgagcatgtccagctatcccatttcatggccacccgctgcaatcacctgatcgtcgtgctcacagaggagtttcttcggagtccggagaacacgtacctcgtgaacttcacccaaaagatccagattgagaatcacactcgcaagatcataccgattctgtacaaaacggacatgcacataccccagaccctgggcatttacacgcacatcaagtacgccggggactccaagttgttcaacttctgggacaagttggctcgttccctacacgatctggatgccttttcgatctactccacgcgccaggtgcagactccctcgccggtggaggaatcggctccccgggtgaccactcccagcattcggattcagatcaacgacaaggatgtcactgatatgccaaactacaacagctgcaaagtgccggaggcggagaccacaatcgtttcggtttccggtgacaccggctcacccctgccggagcacaagccgaagaaaaaggatcgcttcctgcgcagaatcacgcacagctttggaaagacggcgcggagcgatggggccagcggcaagactctgcgtcatgcccactccgtcagcaccataaatgtcacggaacgcgagaggacactcagtgccagcagctccaacatctccaccacgtcggagagcaagaagagcttcatcaagtggcagccgaacatcctgaagaaggccctattctcgcgatccagcagcaagctgcagacgccgggctga

SEQ ID NO: 3312 - protein, 537 aa, DROSOPHILA
MRPRFVCHQQHSVAHSHYQPHSHFHHHTHRHPNPPHHHHIYGATDVSYRRYRTAGMVVAEGVMDSGSGSGTGTGLGHFNETPLSALGIETRTQLSRMLNRKKVLRSEEGYQRDWRGISELAKQKGFVDENANNPMDLVLISWSQRSPQTAKVGHLEHFLGIIDRWDVCDDIQENLAKDTQRFIMKQEQRQTALVEACPPPPSDCFETNNNYSSSNNITVGQSVQILSDEDQRCVQMGQPLPRYNACVLYAEADIDHATEIMNNLESERYNLRLFLRHRDMLMGVPFEHVQLSHFMATRCNHLIVVLTEEFLRSPENTYLVNFTQKIQIENHTRKIIPILYKTDMHIPQTLGIYTHIKYAGDSKLFNFWDKLARSLHDLDAFSIYSTRQVQTPSPVEESAPRVTTPSIRIQINDKDVTDMPNYNSCKVPEAETTIVSVSGDTGSPLPEHKPKKKDRFLRRITHSFGKTARSDGASGKTLRHAHSVSTINVTERERTLSASSSNISTTSESKKSFIKWQPNILKKALFSRSSSKLQTPG

SEQ ID NO: 3313 - DNA, 4155 bp, DROSOPHILA
tcctttatatgacaaatatatactttaatgcatagtttcctcattcatatcgatcaatgacacgttataatcaattgtattgatatacgcatatgcatatagttttaagcctaaacaaaaagctgactcaactttaagtcccaagaaagccaacatagtaaagttacaaaaaaatccatagaaaatacaaagcccactcgacatgagcttcacattatttccacattcactcacaaagaacagctgaaaacacacaaatagacgaatataaatagacaatatttacaaattgtgacattcaataacttagaaacatgctgaactgacacctatcgctgtcccgccaaaaggaccaagaaaaaaaaggacaataggatgcgaaaacacactttgcgacgccactaagtatggccacacgttttgtgacccatatatattatatgtggctccagaaaatgtctggcgacgaaaagcgttttaaacacgccagagggggcgtgtccatggcagccatttcgactgccagcttaaaagaggtacacttgaaaaaaaaatatcaatcaaattatatttcaaacattgttttattcctaattataaataataagttgaaaatcatttgtatggtaacgtttttaataattgtttaaatgtataaaacttgtgaggcagctattcttttcccatatacttcagtgcagatagtgacaagtggatttttcgagtgatgaggagcagcagcccagaccacatctgtcgaccacgatgacgacgacgatggcgatggcgatgaagtgtcgaacccgccgtggatatattcagttcagcatttgggactgcaagtgttcgacttttgacaagggaccgaaatacccgacaaagtagaggaaaaggaccagatttgtgggtgacattgaagacaggccgtagcaggcggcctttgtggtattgattttatgcaaaattttttgccaataataatttacaatttgtatgcggtctagcagaggaactccagcatgtggccgaggctgggaaggtaggtatctggcaccaggatcttcttcttggggtcaccctcctcgatgatctgctgcacttccttcggggtgttcacaccactgccgaccatcagggattggaaaccacagttggaagcgaagtgcatatccgtctgcagtctaagagggaatatttttaagaggatatgaagatttacaaacaatatatattataaacccttacgtatcgcccaccattagtgtggtttccggctttatggccccggactgcatgagtgtagacgccatccagggattgggttttcccagcaccagcggcgaccttccggtataggctttcatggccgccaaggtggcaccggcgcccaccatcacccggttatttccgatgggataggcggcatctaaacaggtgccgagaaaaatgacatcgggattcagcagatagctgccggttcgaaccagcttggccatgttgaaaccctcatcccggcccacaattactgctcccacatcgggatccagttccaactcagtgacgaactcgtgcatgggcttctccagcttttcggacattttcagggagcagatgccaaatttttccagctcaaaatgaactcctttctcgcccatgacgaaaaccttcttctgaaagtttttgacagccaggaaattggcacacgaaaaggacgaagtcagtacattatcctccttgatctctatgccaaaacctttcgccttatcggccatctcctgccttgaaatctcggaattgttagagattatgaaaatctttcggccggtggtgttcatgtaattgaaagtatccacagctccgtcaattgccttcgagaagtgccaaaggactccatcggcatcaaggatcacggattcgaatgtggatagccattggcgaacccgttgtttcggcaacttggtcaaatctgtgaaagtatgcttgaacatagcttcccgatcggatcggagagtttctctactctgtgtgttgagtaaaaacaagcagaagctttgatttagttccagtaatatttttagatcaaaatgatgaccgaactattgattttattggaaatccatacaaattatctatttcgagaagataaaaatggcaacagattggaaagttttggcatatatagatcaggaacttgctgatatagtaatggagccttagatccctgagcctcaatggcatcctgatagctgttaaccccggtgcccaccaaaagcgtttggaaaccacacttgtagcccaaaaggatatctgtgcacatgctgtgaagtggcaatccaaatattaatcacatattttgaaattaacccttttttaattttcactcacgtgtctcctataatcaaagtcctgtccggctgaataactcccttttgcatcaagtcgatgcacatgtacggattgggttttccacaagtgaagggcatacgttgactggccgcctgaatggcagccaccatcactccggcggaaggaaccattcgtcctggagccgccggaagtgccgcatcgcgacttgtggccacaaacattacctcgctgtctctgagatagcaacacgcctttgtcagcttgattgtattaaaatccttgtcagatcccacgaccacagcacccacattgggatccaagtagatactgtggatgtgatctggcatagagaagccctgcagagaggaatgatccaagggcagggactcgattcctaccaactttaattcgtcgacgattccctggccgcccactacgtagcactttttcttaaactttttctccttcataaatttggctaaagtttggaccgaggaaaggatctcattcttggccaccaagaaacccatttcctgggcatacttgcagatgccctcgaccgaagtcactgagttattggtgcaaataaaggccttctttcccatggcacgaagtgcgttaaacgtctcggctgcattttcaaggaccttgccgtggctccacaggacaccgtttccatcgaatatgatcgtgtcgattgtcttcagccactgctgtataccgtacttgttgaggccaagaatttgacatccacgcttctggaaagtcttatttagggccaaattcatgtttaattcaagtgggggtattacgtttttgagtggaaaactttgaaggaaattgattatgtaaacaaagcatccacttctactgagttagttagttcactaatatataccataacagagagactaaaattagacatgctatttaggattaaatcttcctctttgagaagtcaaccttgaccttttgcccccaaacttatggcctgtaacttgcagcaaagaaccacaagcgaaacgctttcgggcccagaactagattagttttaagcagttttggctacgaggctgtcggaatcaattgaaagtttccttcgggtgtctggctgtcttggtgtcttggtgccggctttttagcttttcagctgtcggcaacgactccccgggaaaatgtcatcggcgacgcatttaattcactaaacttttgcacatttgttatttggaatgtaggagactggattggtcgaggacaaagttgtggttgcgtggcgtggcaaacgtcgcggataacttttaattgtgcgcaatgagcgaaggccaagtcaggcggtgaatgctacggcagttccttggggcaaccacccagtggcgccacccacttttcctctcagaggagccacttccgttggtctcgacgaattttcagcttttcggacagcacggacacgaaataaaataatttattaccttgagatcagaacttttctttaacacctatatttctgggcaaacattctgctgaagctatctcattcctaaaaaatttaacacaattgtctagcacagatacgaaatgtatttatagatggatatttttctcagtgcttgccaccggctgtcatttggcttgtccccctgcgccaattaaaatggcattcagctccattgttgataacgctgtcgctttgaaggagcgcctttccatcggccccccaaatccgacacttgtccggctccaaagccaaagctgaagccaaagagccgtagccggagcgagaatccc

SEQ ID NO: 3314 - DNA, 1779 bp, DROSOPHILA
atgaatttggccctaaataagactttccagaagcgtggatgtcaaattcttggcctcaacaagtacggtatacagcagtggctgaagacaatcgacacgatcatattcgatggaaacggtgtcctgtggagccacggcaaggtccttgaaaatgcagccgagacgtttaacgcacttcgtgccatgggaaagaaggcctttatttgcaccaataactcagtgacttcggtcgagggcatctgcaagtatgcccaggaaatgggtttcttggtggccaagaatgagatcctttcctcggtccaaactttagccaaatttatgaaggagaaaaagtttaagaaaaagtgctacgtagtgggcggccagggaatcgtcgacgaattaaagttggtaggaatcgagtccctgcccttggatcattcctctctgcagggcttctctatgccagatcacatccacagtatctacttggatcccaatgtgggtgctgtggtcgtgggatctgacaaggattttaatacaatcaagctgacaaaggcgtgttgctatctcagagacagcgaggtaatgtttgtggccacaagtcgcgatgcggcacttccggcggctccaggacgaatggttccttccgccggagtgatggtggctgccattcaggcggccagtcaacgtatgcccttcacttgtggaaaacccaatccgtacatgtgcatcgacttgatgcaaaagggagttattcagccggacaggactttgattataggagacaccatgtgcacagatatccttttgggctacaagtgtggtttccaaacgcttttgagtagagaaactctccgatccgatcgggaagctatgttcaagcatactttcacagatttgaccaagttgccgaaacaacgggttcgccaatggctatccacattcgaatccgtgatccttgatgccgatggagtcctttggcacttctcgaaggcaattgacggagctgtggatactttcaattacatgaacaccaccggccgaaagattttcataatctctaacaattccgagatttcaaggcaggagatggccgataaggcgaaaggttttggcatagagatcaaggaggataatgtactgacttcgtccttttcgtgtgccaatttcctggctgtcaaaaactttcagaagaaggttttcgtcatgggcgagaaaggagttcattttgagctggaaaaatttggcatctgctccctgaaaatgtccgaaaagctggagaagcccatgcacgagttcgtcactgagttggaactggatcccgatgtgggagcagtaattgtgggccgggatgagggtttcaacatggccaagctggttcgaaccggcagctatctgctgaatcccgatgtcatttttctcggcacctgtttagatgccgcctatcccatcggaaataaccgggtgatggtgggcgccggtgccaccttggcggccatgaaagcctataccggaaggtcgccgctggtgctgggaaaacccaatccctggatggcgtctacactcatgcagtccggggccataaagccggaaaccacactaatggtgggcgatacactgcagacggatatgcacttcgcttccaactgtggtttccaatccctgatggtcggcagtggtgtgaacaccccgaaggaagtgcagcagatcatcgaggagggtgaccccaagaagaagatcctggtgccagatacctaccttcccagcctcggccacatgctggagttcctctgctag

SEQ ID NO: 3315 - protein, 592 aa, DROSOPHILA
MNLALNKTFQKRGCQILGLNKYGIQQWLKTIDTIIFDGNGVLWSHGKVLENAAETFNALRAMGKKAFICTNNSVTSVEGICKYAQEMGFLVAKNEILSSVQTLAKFMKEKKFKKKCYVVGGQGIVDELKLVGIESLPLDHSSLQGFSMPDHIHSIYLDPNVGAVVVGSDKDFNTIKLTKACCYLRDSEVMFVATSRDAALPAAPGRMVPSAGVMVAAIQAASQRMPFTCGKPNPYMCIDLMQKGVIQPDRTLIIGDTMCTDILLGYKCGFQTLLSRETLRSDREAMFKHTFTDLTKLPKQRVRQWLSTFESVILDADGVLWHFSKAIDGAVDTFNYMNTTGRKIFIISNNSEISRQEMADKAKGFGIEIKEDNVLTSSFSCANFLAVKNFQKKVFVMGEKGVHFELEKFGICSLKMSEKLEKPMHEFVTELELDPDVGAVIVGRDEGFNMAKLVRTGSYLLNPDVIFLGTCLDAAYPIGNNRVMVGAGATLAAMKAYTGRSPLVLGKPNPWMASTLMQSGAIKPETTLMVGDTLQTDMHFASNCGFQSLMVGSGVNTPKEVQQIIEEGDPKKKILVPDTYLPSLGHMLEFLC

SEQ ID NO: 3316 - DNA, 2932 bp, DROSOPHILA
aattttgtagcactacaaattggtcttgcataaaaatatttatttctttctctcagtttagtcattgatgttttagtctttttcagtttattgagtaaaaggttttatttatatcgacaattgaagagaaactagagttagtttatacgttgtaaagcaattcaattggttgcttaacgtaacataaaattatattatattaaatggtgtattgtgtcgatttgggaactgtttttggatgattcaccaccaatcgatgccccagtgcccgactgtctgcataatggacttggtggcattggatgatcatgatcgtccggcgcgaaccaaaacatcgaaacgtaaacaattctttgcatctcaactcaaatgtttatacaattttatacatcaacggtcaagagaatgggtacaaccaattcaaaatcagaagcaaacaattactgagacagtcgacttaaatacaatttttaataaaatctgcattttctagcagtaaatcgatgtattctattaatttctgcatacattttgctctatttgtgatataattatcattattattaattgaattatgccaatgaaagtactttctatatttgtggattcaatcatgcgaatataggtatatattattatgctgattaggcaggtcagacggacttatatacaatacacaaaatatggatcgatatttgtttctttttgcatattgctattaatcgttttccttccattttattttgtagcgcgataagcagagcatcgtaagttgcgttccgaaactgtcaatccaataattaacagaaattcacttagtaatataaactgaaagttgatggctttataaggcgtaagagtctgaagatgtaaatgatgttgctcatcaactgaaaatatagctaaatttgtatgattgaatctatttttggcaaagcaagggaatttttcaacggtattgagatctatttcaatatcataaacatttgttttaacacctatgaaacgcactgttcgcaggctcgtacgcataaacattcaacagatccgagtaaaatttgttaaatttattgtagagaaagcgcgcaaatgtcgtaagtgtgtgattccatacaaataaacaatgtactctaggttttttaatataaaaatgaacgaagattaaccgaacggacttcagttgtgcgctaaactttgcaaacgtcgggccaaattctgtccgccgatctcagttctttcgaatagcaaattttcacaaatggagtcaattagcagcatgatttatttagtggccatgatgtcattgatcatcggtggcagccaagcgattccttatcgacgtacgatttttccaaataacacatatattttccagtaatatacgttgattttccctttcaccctatagcctcggcgtatctgtacaatcagcagtactgtatggatacattgacgggtcggcagctttatatcggtgaagtcttcacgcgagaggatcagtgcgtccgcatccaatgcctggaaacgctgcaactctgggaggataggtaagcgtgccgtactagtatgccatagcatcgggtaacagatcatcgtactcatccatggtccagctgccaggtgccgaaactgacgcagggcaattgcacgccagttccatcgacgaacccgcatgccgaatatccccgatgctgcccactgtatgagtgcaagagctacgagtcgaattcggggggaactctggagcagaccaacatatatgaccactatggtactctgcgatcatcccatctcactgagatgatagtgatcgacgggcggacaccccctcgtggcgagattcacacggcgtcggcgaggaagtatcaggtgtgagaagtgaactggtactctgttcctaggactacttagtctttagtgcagatctaatgtgtacaaatacaaatggagtttattgcggaatacttgaatatgttaaataaatttaaatttcacattttttttgtctaaagaagtgtattttttccactgtactcgctattcaaacttggcgccctatcgatagcattgcttagcttatcaaataaattatctcagacaacgggctacgatttgaattccttacttcaggatcgttgagtttatatttctatttattttctcgggattttcaatattatattttagcataatatcgatattagcggtatttgtggccgtctgcgataggcatttagttatcacgtagccagacatcgaataacgattgcaccacttatcgataataaagcacaagagacagtaaaatatttaacaatttctacgaatcaacaaattataaagccgcagtgagcaattaaaatcagttggaagaaacgctagtgccccacataggaatccgaatcaagcagcacttaccgaaggacaaccaattgccctctaaccgaatttcaccacaacaacacaatgttgctgcgtctagcactttccaccgcccgtccagccggggctatcaagatcctggcccagtctccggcccagctgttccgggccaatgccaatcccaatctgaatctctccacggtgcgcacctacgcccgcagggtggttcgcacccgtgagcccgtcgaagagatgcgtgctccctcgctgaaggagaaactgatgggtccgccaagtgccaatggtaagtctcttgtgtaatcccccatctatgtatatcggtcgtctaattgtactcttctggcgtgcagcatactccatgggcaagggcgctgccgccggagcagccgccgtgggattgggcgccctgtgctactacggcgtgggattgggaaaacaaaccagcatcgcggataatgccatgtgagtgatagcacgagtctctcacttgcgaaatacagggactttaataactgagattatattttcc

SEQ ID NO: 3317 - DNA, 712 bp, DROSOPHILA
atgaaacgcactgttcgcaggctcgtacgcataaacattcaacagatccgagtaaaatttgttaaatttattgtagagaaagcgcgcaaatgtcttgtgcgctaaactttgcaaacgtcgggccaaattctgtccgccgatctcagttctttcgaatagcaaattttcacaaatggagtcaattagcagcatgatttatttagtggccatgatgtcattgatcatcggtggcagccaagcgattccttatcgaccctcggcgtatctgtacaatcagcagtactgtatggatacattgacgggtcggcagctttatatcggtgaagtcttcacgcgagaggatcagtgcgtccgcatccaatgcctggaaacgctgcaactctgggaggatagctgccaggtgccgaaactgacgcagggcaattgcacgccagttccatcgacgaacccgcatgccgaatatccccgatgctgcccactgtatgagtgcaagagctacgagtcgaattcggggggaactctggagcagaccaacatatatgaccactatggtactctgcgatcatcccatctcactgagatgatagtgatcgacgggcggacaccccctcgtggcgagattcacacggcgtcggcgaggaagtatcaggtgtgagaagtgaactggtactctgttcctaggactacttagtctttagtgcagatctaatgt

SEQ ID NO: 3318 - protein, 160 aa, DROSOPHILA
MESISSMIYLVAMMSLIIGGSQAIPYRPSAYLYNQQYCMDTLTGRQLYIGEVFTREDQCVRIQCLETLQLWEDSCQVPKLTQGNCTPVPSTNPHAEYPRCCPLYECKSYESNSGGTLEQTNIYDHYGTLRSSHLTEMIVIDGRTPPRGEIHTASARKYQV

SEQ ID NO: 3319 - DNA, 15913 bp, DROSOPHILA
actgggtgagcacgccggcggagggcccacctgccgctggacgtctcttggacacggacgagccaaaggacaccccgctaccattgctgtgcaggcttagcgaggactgcgtgtgtcgcttgggcagtgaactgtagctgctccgccaggagcgctgcgatctcaggtcaaagtcgtcgtcgtcacccaaacccagactcgattcgcggtaatgggacgccgaggtcgaaggtcgctcgaggggcaccgatctctcgtagcccagcgagggggagggggagtggaaggggcggctgttaatgaactttagtgagctactgcgtcgcactggcgtggatagggtccaatgagagaggtcggcagcggtgctctgagcgccacttgaaatgcggccatgcggtggatgtggttctggttcttgatttacctcgttgatcacgatgtcctccacatcctcgcctgcgctggttgtggcggcctttccaccccccgtgctgtcagtggatgtgggagcattgttgatgtagtagtcgcggctatagctaaagattagagattcacaaaagttacttagacctagcacacgctggtaggtgtctctctcccaaactcaccgcttataatccgctttgggcgctggcggatccggattttccgtcagcgccgaagccagtgccttttgctcagcactcggactgatgttgggcacatccatgtagcgctcctgggtgccgctgatgcgctgcttcagggcctccggggagtacggattatttggcatttcaacggcgttgtaccacttcttcacctcgcgttccgcaatggaacctggaaatggttaggatcaagttcgtttacgaattaatggagtctgagcttggcggggaaaatcggagtgaccggaaagtaattaacaaacttgcgctaagctattctctcttaaaagttgttgatcttcccagttgcaaatgaaaaactttaattttctccagtaaaactctttttgtttgatttcgattgaaattcgtaattaacttctttattacaaattttaaaaggagtaaatatttaatattactaggcactattatgattacaaggaagtgtgaattggaatggctaagtctttgaaatcaaacaaaaacttgttaatacaataaggcatatttccaaaacctattcatattttcatagcacgaaattaccggcttttcatttgttattcaaatcaaaagagactttcatagatagctagtaattactttcagttccccttgtttcatggttaaataggtcggctgatccgaatgccaaggatcagccgtcgacgggtcacaacacacaaaggacagtagagcctggctaacataaacacgtatttaagcagtcgtagggggaggacaacaaacaccgagagatgacagttatggccacaaccgagtgttacctggcacaaagcgccgcaacagtacaacatcgtcatcgtcgacgacaacgtcgtctggttgggcacccgatgatccaccgtttgggagctcggtggcatagctacccgaccatcgaagggaaccatttgttagttttccattggtgcgtctgcttcccgcgctcgggttgttagtttgggttagaggaagatgcaggtgtgtgtgcacattgttgttagagcttgtgttagtactaagggatcgctgatcgtctaggactaagaccctctggctaacaaactcctgatcagagtcaccatctgcgttgaatgtctcgcaggcagtggagggctcactctcatcgctttgaatggactcagaacctaattgatctgagaagagaatttcattgataaagttatatgtgatatcgctcaaactaaaggcaatggtggagtcagcttctacttctagttcatcggccatatcgcaggaggtttggctggccatatctagtcttaagataacattatcacccacagtgacatcgacttctaaatgctttaaatgatcttcagggttatctgatgcgtcaatctctaaacaagcatcattcgcggtatctgttctactttggaagtccagcgactcaactcggttttttgcactaacaatgcacggagatgtcagtgtatctaaactctccaaattgtcagattcaattttggtctctaaatcacacttaggcatatttttcatgttaactatacattcggacttatccgtatctacgctaagatcatctaccatatcagtttcagtcttatccgtctcaaatgcaaagcaattgtctactaagccaatggggtcaacttcagagactggagttgctgctctgcccgttgggggttgaatgtccttggaggaatgtaagctaacttcgtttagttcctcaaataggctagtatgggaatcatacgcaacttcgtctatgctgtcatccagggaatcgaaggagctgaggtacttgtgcatgatcaaggagcggcggcgccttcgttcgattgtggccagcagtcgcttgtcttttatgtaaaacttgcaaatggtcccgaagaggttgaccggctcggatcttttgggtgagtctgcatcgctcggtggtgtgtctcggatgttcggctgccttcgcagatacttgtgagtggtggctttccctaaggcgaagcaatcgccatagctggagtctaccgatgtatttttgtgtataccttctgttgccggatcctttaattcttggtctatactggctagttgggcatcgcttgataaatcggcattcgcagttactgtttctaatattgcatcatcgttctttaaaatatcttcaccaaagtgcggttcttcactagcgttactctccttttgctccacgctgtccacactcgctggaatagatactgtatcgaaaggagcttcaaccggtgcggatgaagtttcattctccaccggaattttatttcctaatgatagaggttgttcttcttgaacaatttccactgagattctagctggttctgcatccatttttgccgtctcatttttggtttcctctgtgagatgttctgtttccggaacaacctccactggtattgcttgtgctgcaggtacggactctttagtgtccaatgctacagcttctaaatctggagtactttcaacagccataggcgatggggcttccgtttctggtttcataatagtttccacttccacaggaactatggcgtttgtatccgcagattgagaagtgatttccacaggagatggttcaaaattatgggcgtgtacatcaggaacaattggcacgcccggtaggttttccaaagcgacaggatcttcttgtataagaacttgtgctggttctagtaagtcctcagagcttgaaactgtttctggaatggggttctcaaaagcatgcggctcctctggttcgggttgtattctcagctcggttggtacagacaaaggaactgagtctagttgaggaaccaagttagcatatattttggaatctgcacaggtagattccgtttcggaactaggctccatagtgactaactcagtagcttctaaaggttcccacttggagctttccaatttcaaaaccatttcccctgtttcctgcgacttatctactgttgaatcccccatgtcaactggtttcaccatttctgcatccacagtttccgtttgcagaataagttccatagatggttgagtctccaagtccgtaggttgtgtttgtatggttaaattagttggtaacgatgcaggaactgattgtccttgaggtacaaggttctctggtagttcatgatccagatttgtagattccgcttggcaaatcaacactaagggctccaaaacagccgatggttgttcatcgatggtcgtcgatactaccaacaactccttctccaactcggatgttcctatttctggtcctgcattctctgcaggagtgtctacagattccgcctctgccaccaaatctgtgtttcctaaagaatctaaggttcgctccacagaatccgaaatttccttaggagccggttgaataacttcaatcacttcttcctcgacaggaacagatggttccactgcgacagggtctgtttcaggaacttcctcaggggccgattgatccatttcaacaggtcctacgtctaacacattctgtgcacttcctggtggttccccttgggaatcttcgctttgcttgacaggactagatggttccactactatagaatcagtctctgaaacttgcgtaaggattgcctgatccactgaatcactttcgacctgtgccgtatcttttggtgattcttgtagatcgctagcttcgatttgagaaacgagttcgacatgaacaggttgtatcttttgatcaacttggatgggggccgctgatgcgacttcggtatctgttgaattcactgcactacattgagtcacttcctccggcgttgaatcttcaatagttggcgattgagctactgaaactggttcaaccactgtattgatggattcagaagctattacttcaactgcggttgattcagtagaagttattggatcctcaacgcggaaattctgctcagaaaccgcatctgcaggcgtaataggatccattgaaattatttctcccctttctcctatactaacttttagtgaatcctcttcgacggatttgttctctgaaacttgttgctgtgctgattcaactttatcttggacttctgcagaaactgatggttccaatagcgctgtatgatcaattgcttcagggtcactctccactacgattgtctctggttttaccacgggtaccggttgctcaattacgatggattctggttctagaataatatcaaaaggagcaatgtttcctattgccattgcttgtgtatctgggctaagttccacaagcgatggggggtctaaggtaattatgtctggagcaacttcttctgcaacctgtgggggatccactttttcctcggatttcgtattatcttcatgtaaagccactgcatcagaacttttttgggaatctttttcaaaggagtctgtatgtatttcctcatgcgggttccttggttctacatccaccaattctgacacttcctctggtggattttcacctgaagttaaattatttgtcgcaggcgttgcttcttctggctctgatactcctaattcgacacctgcacattggggaacgacttctacaggtactgcaacatctactgcgatgggttccatcagagtttcatcttctttagattctcgaacatctacagcaacttctacacatcctttagattccatgttgttaaggtttgcctggaacgtaacatctattgatgctgtctgttctgaggcttcaagattcccatcttgagaaacaatttcttcaggaagtgtggtatcagcagagaccgatagcgtctctacagtttcgttctgttcaatttcttcagctgctggaggtgcagtctcacaataaattttaggaggttcaggcatttcggttgatgctccatctgatgtagtcacagctgtcgtagacgtaggaattacttcaaccgacgtggttattacgtcagccacatttggtgagtccagacccacttccactgactctggtgtttccttttccgaatgttgagaatgttctccttcaataggtgatatctgtggtgacttatctatagcagctgttgaatcttctatgggtttcacttcttctactgctgaaacgggacgagcggtctccactacggattcagcttggtgtaaatcttctgttgtggtaggaacaatctccacggatgttggggataccatttcctcaatttcaatttcagttgcattttccatgggctccggtttttccggtaatgcaatagcagatggagaaactacttcagtaggttcagatggtgacagcaattctgcagatcctaggggtaccacttcgatcacttccgctggtggtgccaatggtaatggttctattgcgcgagagtccgtttcagggagatctcctccagaactatggaattgcagtacttcgcttataagacctgcttctccaggctctgagtgatcagcattaacagcttcagtggtggctatcaaatcaactgtgttacatggtacttcttgtacaatttcaattggctgtatagtatccattgggactgtcggttgtggttctattgatatgttttgctgttccatatgatttgacgaattaatttggtttttcacatcgatggactctactgcagctaagctatcgataggtgtcagattttctattgtgctagattctggatcaggtttaatttccataggatcaaggttttctatttcccttgtttctggatcagtttccacaatcgatgggggttccacaggaactacgtctggaacaacttctgtaaccggtaagggatccacagcaacgggctgtacttcttggggatccactgaactagattccaatgtttgaggtaattcgtcttgaatttccatggacgggctattttcgagtggaactatttccatagatggtatattcacattcgcttcaggaaccgattcacagtgctcagatgggttaacattgtgtatttccggagcaatatccacggtctctgattgttcaactgaggcaggttctgtagctcctggagactctaaagtttccacgtcaatggactttactggaactgcaacttcagttgaaaatggtggacttatcgtttcaattgacgatacggcttcttctgaaatttcttgcgattctggaacattgacaactagtgccactgtttgattttctgaatctatttccacagaagctgatggcttaacagtttcttcagcttgtggctgggttactacgatagagtcagttcctaaactgacacctagagtttcagagccattcacatcgacagattcgacgtctttaagcattcctactgagactagactttccacggccgttggtagttccgtgtctacagattgtggtgaatccaatgtagcaacttctataggagttgattccacgggctctgcggcttctaaaggtagcgatgaatcggctgcaatatttgcaggctctgaacatattggccctggtaaaggtggaatctctacattatccagcgactctagtaagttcacaggatcagattgagttagggcatcagcttccacaggcacttgaggttccactatagaaacgctttccattgggactgatgtagtatgtgaatcatcttcaatagttcctagttcatccaattgtgtaccattgtccactgggacaggtatgggactaggctcagggagtgccgctgctgtggggtctgcaatcatttccggaattcgttctgataaacttgctgtgggatcacctggaaccaagttggctacgtggccttgatccagttttatagtttcaggatcgtagtccaaaggcattggcgtttccatgtccagcgaaacgaaatttataacttctggtggatccacgggatctgggacgatttcaaagggcactggtatttccggaccagattccacaggcaatggcacatggacaacttctgctgttgatgctacttgaattgattccacgttagattggtcttctggtacaatatccgtaggaggtgttatttctggcacaatctgcacggactctagaggagtaacatcatcagctttcatctgcgaaacaatttccacaggcgcattctgtcctggaatctctaattcaggaacaattgctgcagtatactgaggttccatacaattgatatcttggtccatttctataggcggcggcggttcagtctcatatataagctttaattgtggaggaggtggaagcacatccgtttggtcagtagttgcaagctcttcgagcggtgaatgtgggacgaagtcaaggtgctgctctgggccagtttctgaaggctccgtgttctcctcttcaattatgtccagtgagtgggcgtgcaccaggtccacggtgcgagcattgatctcggcgagtgccaagtcactcagttccttgagggtgtgcatctcactgggtgtcatggcaccgggctgttcagatgccggaacagctagcatgggtcccagggccatggctgccaagatctcgatcaccgatggcacagtatcgtgcatctggccctcatcgatgtactcgactgtgctaaagccagtgcagccatcgaggctggacagctcctcggattcgccttgggctgtaacacaaacgactgctaaatgccggtgctcaaagatcacgcacaagtggactgagttactaaaggatgggttccgggcagtctacacctctaagaagctatcaacgatctagcaagctaataatctgggtaaggcgggttagttaagtcatagcaatagtaacagtaattctatagatggaggtacataagataagttcatggaagttacctgcgatgggagtgtggtctggttcctcgttcaacaagtcatcctggaatatcattggtggcggaggtggcgtcggagaaggcgcctttatatcagaaggcatggccatcggggataccacaaactcattggttgtctctgtgaatgcgggctcattctcctccggcaatgtgtgggacgtgagactggtgcgatctacgagctcgtcgaggaccatcttggtgttttgcccaccaataaggtgcttgctgagcagacgatcgttgagatcattgcatcgcagcagatccagagagctctcctcgatgtccgaaccaatctcggagagatcgctcacctcgtcggtggtcttatccccaatctgggcacgtacattctcccttggtgccggcaccagcatgccaatgctgctcggagtggccgagctgcgtttcttcttgaacagccagttgtcctcccagtttccatctccgatcatgcccgaggagatggatccaatatctagaagggaagtgaaggcacctttgtatatctgacacctttgtatatcattggtaggcacttaccatcctcggattcggtgacggatgctgaaaagtccggcagtggcaccatgtgtgcggctatatagtcactaagcacggattccctttccaagtccgtttgcagggattgggatttgccattctgcaatcaaatgtgaagactttaccaggtgtttaagctacatgtgattaatcccttacatccagtccgatttcatgatcggtgaggctgcaatcactccgtggttcaatggagcttccggacgtggtgctcagcgcttcggcattgaaattctcgtcaatgtggcgaccactcaagtccggcgtactctccgccgccagccttgtattcccttccttatccacaatctggcaaagaaaccgcaaaattttaacccattgagaccttggcattgtgcaatagcaatagtagtgttgttgaaccccagagcacccctgatttcccgatttctcgattttccgatttgttgtgggtcaacttgcttgtaaggaaaaaagcccttaagctgattatacccggcaatatttaactactaagacacttgacgaccattccctcgtttcgtcatcgttaaccagaccaatattgattgagtgtcgtgacgaagtcaattattactggccacgttgcagaagaagaattcgataaggcaattgggcagtttaatgctgactggattagttacgcagtgataagatggaagtaccagtgctgatatcgttcgctgaatccagctacgccagctacccgagtttattacttcagcaatcattcatatttacttgatcgcctggatcagccatgatcctgattgggctgatgaaacttatgcgaatttccaaattccaaattgatttatccaattagctttggaattgattcagctattcttccgctatgtacaccagttggtggcctaaaacgtctgcacgggcaagacaatggactacaactaattagcctggtccgtttgggcgatgggccaactggaatattgaagccgccaaagtgctggtcgaatgaaagcgaaaactggccggaatgggccagttaaaatggcggaaatggtccggctcacaacggggatggggcatggaacactagggtagtatcacaactggtgagttgatagatagatagcttaccttatttagcaccgctgtggccaacagatcctggtagatcttcggctcgaagtagtgctcggtgcgatggcgccgcttcagcccgtttccattggccagatcggagacgtgagacctggtgtccaggctgatctccgagacggctccgctggcgctgagggtggagctccgcagggtctccgctatgatggtctcgatgagactgcgcagtcgggtctgcgagaggtcggccagctcggagtccgcatggttgttgttattattattattactattgttggtatggccatttacgatggccggcagatctgaaagcaagtatcgagcattgtgagcagaatttacaagacccagaatgccagccaaaaaccacacaatacgacaagatatgcttggttagcagaagagatcgatacaaaaatacaataaaagtgaaaactcggttacttctagactagtgattatgggcgtgtgaaaggcgatgaagaaagtaagtgattgagtgagtgtgagtggttgtgttttagccatacctaatttcacctcaatgacgtaaaccacgtaaaagacaattacggccaaaacggcatacatgccagtgactaggcccaaagtaaagtccatgctgcatgcatatatgtatatgtagatacactcgcaaatatcgtctacgtctgatacggatacggctgaatcgtgaatatctcgcctatttgtttatttacgtttacgtttgtgtttcggttttgtttggagcattcattgatataacggtcggctgggctgctaattatattgagcacatatttgagtttggttttttttttttgttagctttgttcccctaattgagctgaaaacataaatttgatatgtcaccgcctcctctaaacgcttgaacagccggagctccagtggggctgaaaatcgcgactatggttcgcatatttatcattctcctttgacttttttaagtctattaacgtattgcggtaaataccacatcgcataatgaataaccccgagttatctattttgcgttacaatgccgcccatatttctttatctagtgatgtctagctgctcgaacagccagctagtccaccgttagtcattcaggtgtgcaaaaggtgtcacagacgcacactttcgtatccagaacgagtcaccaatagaaatagacccacaaactggcccctaggacggacggacggacggacagaaccaaccggatcggatcagatcacttctctatctccgggtctattgtccgactccaaagttcagggttcaggcaaaatcactcgggcaattatcactcgccgttttccactttattttcatttttaatttcaccgccatgcctgcgtgcctgccagtgggttcatgtgctcgataaaggcccttccgactgctccgacttcgatcgtttaactggccagctataagttaggtgcacaaggggccaactcggcccagagctttactttacttaactttagttaaggtcaatgataaaatgcagagcgatttgggttacggaagcgtgttgaaagtcagcgatcatcttttcacgatcataattcgctgttaatctcgggattacacattgggagctccagctgcaagcgggtatatcgtggatgaagggggatcattaatatttattagcgttgattagggtctcttcctcatctgccgctttgttttacctcacgattattgatttcaattttgctcattatatgtatgtatgttttttgccaacttagtgtggggtcaaggttgctgatagctcgtcacttaatgcgttgctcttggtctatttgacttaaggtcttatctggcagatggaaaagttcctctatctgctgaccgaaattcttgttctatgcacgactacgcgaggtatgttgttggcttattccatgttatcacacacgtttcggacggactttttgggccggagcggaattggcgttacgatcgcgacgcgtcgcatctggcaactgaagttacgttccgtgcgattgccgagcggtaagcggcgagcgtctaaacgctcactcactcacacactcaagttcatattttgtatgggtacagtgggcctggttgcgagatttcgtcgaggggcgcagtttggctttgcaatttaccaatttacaggcgttttgccgcccaaatcgcccaaatcgccgaactaagctgggagcgtgaccaaatcaatcgactgttcagacacagcatcttgagtggtcttgtaagtaagacatttacgccaattttccaatcaccaaacctgttggtgagcaacagccgccaacggtgcgtatgattaatgcctatcgctgtctgtcatctgagctgaggctgggacaatgggcagcgcagcactcgaaaaagtacctggcaggcgctgtatcataatgctctcgctgtcatcggcacttcaatagctaaaaaaaccttatcaaagctttaaggccttatcaccgacaaactgactctttgccgcttcttatcaaccaccattgaccgcgatttcagtgagttgaaaagagaggcagagactgcaaggagcgagagcgctgcaggttgttgattttgccattttaattggactccttggttatgacccactgataggagatagctttactacagccgcaatcattgattcatagatttgttttagggtctttggtggagtgcctcaacatacaaacagcagtttttatcaagggcaagaaatacacattacttggttacgattaatatatatactcttttttaaacaaaaactacatgatgagttaaatacttagtacttcgttactgaaaaaggtgtatatttaatagattttatatttaagatatgtcttagctcaaaattgtataaatggtcgaggtcaaagttggtaaaagcaatttttaatcattactaatactttttttattttatcaaataaatcaatgatatatttaaagaattgtgtcctaaaaagcattatttaaaaaatattttgaatgctcccaacttaaccttatgtaaaaaacttgataataattagtttttcaaatattatattgttggaaatagaatatcgaccattgatataataaaagatatatatgttcctatattaataagtaaacaggaagcttaaattcaaacacagttttgaaaatactgcctacaacaaatagtaatcgatgttagaagggttagcgtacaaaacagacgattacagcgtgcgtgctcgatcgattagtgattatcgattaccgattacttacctcccctgagcgcacgcgcgcacaaactgttttccacattgataagcaggttactcagcttcgcatggaatttatcaaagagttgcaagtctgattgcatgtgtgtagtgtgtgtgatgtgtgatgtgtgtgtgtgtgtcaaataggggtgcaaatatcggttaatgagcaaacaaaacaaacagcagacagaaagtcttttcagcaagctctcacctgaaagcttgcctaaaagtatgctttgagttatcggttgtcagcccgcaacaaatgttgctaagcccttggcaacataaatgtgtagcaagatttcaaaaaatgttgccgtgccaattgaatttgatttgcacaaattgcataaattgcattcgctctaatcgaatctcaggcaatctgggtacttacagttctcactcttggacagctgccccactttgacgtggtccaaattgccgcccagcatttcggccacaatctcctcgacgtactcgcggatcttggcccgttcgtccatgtgggcgttttgtccaatctggctaacgctctcgaattctgcaagtatagactagatattccaagtactcctttccctgaaccgcacttacgcatgctgctgtcgttgccatcgcccacaatcggtatatacacctcgctcctagccctcatcggatagacaaacttatgctggttgaaggacatttgctcggccacccacgaggaggtgtgggccagcgactccttggagctctggcacagctggcactcccacttggcgtccttgggccgccagtcggcgcatttaggcccgcggcaaaccgatttttcgcaggtgcaacatgtcacgtagctgcaaaaggttttcccagatcattaattgtataatatattcgccagtacctttccaggtcacttaaagagatatttatttatgagcttagagccatttatggaaatttattatttagaatggaaggttttagttctcgtggaatctctcgtaaaaaaagttatttaaatttaactatacttgtttgcataaataaatttggtttctttttagttcggtgaacagagcagtaaatacctcaaccgatgcaggagaaagcaaccaattcttttgcaaattatactttgcaaatgtgtttgttcgaattatttattatatggctatcaagaagccagactgttgttcaaacaaacgaatagatttcggcagaaatgctgatatcagtaagatcaacaatgtcaaacaggtatttcgcaatatttcggagacacgaattctactcactttttggcactgctcagatccaggtccgcacagcagacgttgcaggcgtgatcctcgctgctggactcctccttcctccacttcttattggctagtttgctggaagagacaaggcggaaggaagcgcgcgttatttcgagaatgttggatggtgatggaaacaagacgattagtcaggtcgtttctggcgattagctggggttattcaacggccagaaggtcattggctgaaactcagctcaattagtcggtagccattgatcgtgctacttctggcttttggaccgacgaccaccacttcccccggcaactaaatagtgggcagtccccacccaaacgcaattgcatggggcaattgactttctcccggctgttaaatcccgccaattgcataacaacgcaaacccgttggaccaggcaaacaaaaaggcaatgaggcttcgaaccgagtttaatcaacttaggcgaaatggcctggcttaaagtatacatacatgtagctctatcacaaacaacttacaatctaagaggcagtgcgtctgtctgcctcgatatgcattcggattatgtcagtcacttacagttcttacacaagagagaagaagggaattcctgggtgtcttgtacgtgctcgaaatgagaaatcgccaagcggattgctgctcaacttattcaaatggcaaaattcgcaatttcgcttacaaacaaacaaatataatttaaggaaaaagccaaccgtatacggtcatcgaaaacattacgcttgcgaaagattcaaataacttgcacaggctgtcgaaagcgattgaaaacacaaggtgtgtaggagagatgctcagtcagtatagccgcttaaaaccgatctaattaaaaatatacacttatattctagcctaagtcttctatgtgggcagatgctgctgctgctgttggtgctgttgctgctgtcgctgtcgatggaatcgcatcctcctgcgcgcccagtactcatagttgttctccagattctcatagtagatctgctcctccccatccgggcccccgttctcctcccaatcctcggcgggcggtccgagcaccggatcagtgctggtcaacttgag

SEQ ID NO: 3320 - DNA, 8922 bp, DROSOPHILA
ccagcaaactagccaataagaagtggaggaaggaggagtccagcagcgaggatcacgcctgcaacgtctgctgtgcggacctggatctgagcagtgccaaaaactacgtgacatgttgcacctgcgaaaaatcggtttgccgcgggcctaaatgcgccgactggcggcccaaggacgccaagtgggagtgccagctgtgccagagctccaaggagtcgctggcccacacctcctcgtgggtggccgagcaaatgtccttcaaccagcataagtttgtctatccgatgagggctaggagcgaggtgtatataccgattgtgggcgatggcaacgacagcagcatgcaattcgagagcgttagccagattggacaaaacgcccacatggacgaacgggccaagatccgcgagtacgtcgaggagattgtggccgaaatgctgggcggcaatttggaccacgtcaaagtggggcagctgtccaagagtgagaactacgtagacgatatttgcgagtgtatctacatatacatatatgcatgcagcatggactttactttgggcctagtcactggcatgtatgccgttttggccgtaattgtcttttacgtggtttacgtcattgagacccgactgcgcagtctcatcgagaccatcatagcggagaccctgcggagctccaccctcagcgccagcggagccgtctcggagatcagcctggacaccaggtctcacgtctccgatctggccaatggaaacgggctgaagcggcgccatcgcaccgagcactacttcgagccgaagatctaccaggatctgttggccacagcggtgctaaataagattgtggataaggaagggaatacaaggctggcggcggagagtacgccggacttgagtggtcgccacattgacgagaatttcaatgccgaagcgctgagcaccacgtccggaagctccattgaaccacggagtgattgcagcctcaccgatcatgaaatcggactggataatggcaaatcccaatccctgcaaacggacttggaaagggaatccgtgcttagtgactatatagccgcacacatggtgccactgccggacttttcagcatccgtcaccgaatccgaggatgatattggatccatctcctcgggcatgatcggagatggaaactgggaggacaactggctgttcaagaagaaacgcagctcggccactccgagcagcattggcatgctggtgccggcaccaagggagaatgtacgtgcccagattggggataagaccaccgacgaggtgagcgatctctccgagattggttcggacatcgaggagagctctctggatctgctgcgatgcaatgatctcaacgatcgtctgctcagcaagcaccttattggtgggcaaaacaccaagatggtcctcgacgagctcgtagatcgcaccagtctcacgtcccacacattgccggaggagaatgagcccgcattcacagagacaaccaatgagtttgtggtatccccgatggccatgccttctgatataaaggcgccttctccgacgccacctccgccaccaatgatattccaggatgacttgttgaacgaggaaccagaccacactcccatcgcagcccaaggcgaatccgaggagctgtccagcctcgatggctgcactggctttagcacagtcgagtacatcgatgagggccagatgcacgatactgtgccatcggtgatcgagatcttggcagccatggccctgggacccatgctagctgttccggcatctgaacagcccggtgccatgacacccagtgagatgcacaccctcaaggaactgagtgacttggcactcgccgagatcaatgctcgcaccgtggacctggtgcacgcccactcactggacataattgaagaggagaacacggagccttcagaaactggcccagagcagcaccttgacttcgtcccacattcaccgctcgaagagcttgcaactactgaccaaacggatgtgcttccacctcctccacaattaaagcttatatatgagactgaaccgccgccgcctatagaaatggaccaagatatcaattgtatggaacctcagtatactgcagcaattgttcctgaattagagattccaggacagaatgcgcctgtggaaattgtttcgcagatgaaagctgatgatgttactcctctagagtccgtgcagattgtgccagaaataacacctcctacggatattgtaccagaagaccaatctaacgtggaatcaattcaagtagcatcaacagcagaagttgtccatgtgccattgcctgtggaatctggtccggaaataccagtgccctttgaaatcgtcccagatcccgtggatccaccagaagttataaatttcgtttcgctggacatggaaacgccaatgcctttggactacgatcctgaaactataaaactggatcaaggccacgtagccaacttggttccaggtgatcccacagcaagtttatcagaacgaattccggaaatgattgcagaccccacagcagcggcactccctgagcctagtcccatacctgtcccagtggacaatggtacacaattggatgaactaggaactattgaagatgattcacatactacatcagtcccaatggaaagcgtttctatagtggaacctcaagtgcctgtggaagctgatgccctaactcaatctgatcctgtgaacttactagagtcgctggataatgtagagattccacctttaccagggccaatatgttcagagcctgcaaatattgcagccgattcatcgctacctttagaagccgcagagcccgtggaatcaactcctatagaagttgctacattggattcaccacaatctgtagacacggaactaccaacggccgtggaaagtctagtctcagtaggaatgcttaaagacgtcgaatctgtcgatgtgaatggctctgaaactctaggtgtcagtttaggaactgactctatcgtagtaacccagccacaagctgaagaaactgttaagccatcagcttctgtggaaatagattcagaaaatcaaacagtggcactagttgtcaatgttccagaatcgcaagaaatttcagaagaagccgtatcgtcaattgaaacgataagtccaccattttcaactgaagttgcagttccagtaaagtccattgacgtggaaactttagagtctccaggagctacagaacctgcctcagttgaacaatcagagaccgtggatattgctccggaaatacacaatgttaacccatctgagcactgtgaatcggttcctgaagcgaatgtgaatataccatctatggaaatagttccactcgaaaatagcccgtccatggaaattcaagacgaattacctcaaacattggaatctagttcagtggatccccaagaagtacagcccgttgctgtggatcccttaccggttacagaagttgttccagacgtagttcctgtggaacccccatcgattgtggaaactgatccagaaacaagggaaatagaaaaccttgatcctatggaaattaaacctgatccagaatctagcacaatagaaaatctgacacctatcgatagcttagctgcagtagagtccatcgatgtgaaaaaccaaattaattcgtcaaatcatatggaacagcaaaacatatcaatagaaccacaaccgacagtcccaatggatactatacagccaattgaaattgtacaagaagtaccatgtaacacagttgatttgatagccaccactgaagctgttaatgctgatcactcagagcctggagaagcaggtcttataagcgaagtactgcaattccatagttctggaggagatctccctgaaacggactctcgcgcaatagaaccattaccattggcaccaccagcggaagtgatcgaagtggtacccctaggatctgcagaattgctgtcaccatctgaacctactgaagtagtttctccatctgctattgcattaccggaaaaaccggagcccatggaaaatgcaactgaaattgaaattgaggaaatggtatccccaacatccgtggagattgttcctaccacaacagaagatttacaccaagctgaatccgtagtggagaccgctcgtcccgtttcagcagtagaagaagtgaaacccatagaagattcaacagctgctatagataagtcaccacagatatcacctattgaaggagaacattctcaacattcggaaaaggaaacaccagagtcagtggaagtgggtctggactcaccaaatgtggctgacgtaataaccacgtcggttgaagtaattcctacgtctacgacagctgtgactacatcagatggagcatcaaccgaaatgcctgaacctcctaaaatttattgtgagactgcacctccagcagctgaagaaattgaacagaacgaaactgtagagacgctatcggtctctgctgataccacacttcctgaagaaattgtttctcaagatgggaatcttgaagcctcagaacagacagcatcaatagatgttacgttccaggcaaaccttaacaacatggaatctaaaggatgtgtagaagttgctgtagatgttcgagaatctaaagaagatgaaactctgatggaacccatcgcagtagatgttgcagtacctgtagaagtcgttccccaatgtgcaggtgtcgaattaggagtatcagagccagaagaagcaacgcctgcgacaaataatttaacttcaggtgaaaatccaccagaggaagtgtcagaattggtggatgtagaaccaaggaacccgcatgaggaaatacatacagactcctttgaaaaagattcccaaaaaagttctgatgcagtggctttacatgaagataatacgaaatccgaggaaaaagtggatcccccacaggttgcagaagaagttgctccagacataattaccttagaccccccatcgcttgtggaacttagcccagatacacaagcaatggcaataggaaacattgctccttttgatattattctagaaccagaatccatcgtaattgagcaaccggtacccgtggtaaaaccagagacaatcgtagtggagagtgaccctgaagcaattgatcatacagcgctattggaaccatcagtttctgcagaagtccaagataaagttgaatcagcacagcaacaagtttcagagaacaaatccgtcgaagaggattcactaaaagttagtataggagaaaggggagaaataatttcaatggatcctattacgcctgcagatgcggtttctgagcagaatttccgcgttgaggatccaataacttctactgaatcaaccgcagttgaagtaatagcttctgaatccatcaatacagtggttgaaccagtttcagtagctcaatcgccaactattgaagattcaacgccggaggaagtgactcaatgtagtgcagtgaattcaacagataccgaagtcgcatcagcggcccccatccaagttgatcaaaagatacaacctgttcatgtcgaactcgtttctcaaatcgaagctagcgatctacaagaatcaccaaaagatacggcacaggtcgaaagtgattcagtggatcaggcaatccttacgcaagtttcagagactgattctatagtagtggaaccatctagtcctgtcaagcaaagcgaagattcccaaggggaaccaccaggaagtgcacagaatgtgttagacgtaggacctgttgaaatggatcaatcggcccctgaggaagttcctgaaacagaccctgtcgcagtggaaccatctgttcctgtcgaggaagaagtgattgaagttattcaaccggctcctaaggaaatttcggattctgtggagcgaaccttagattctttaggaaacacagatttggtggcagaggcggaatctgtagacactcctgcagagaatgcaggaccagaaataggaacatccgagttggagaaggagttgttggtagtatcgacgaccatcgatgaacaaccatcggctgttttggagcccttagtgttgatttgccaagcggaatctacaaatctggatcatgaactaccagagaaccttgtacctcaaggacaatcagttcctgcatcgttaccaactaatttaaccatacaaacacaacctacggacttggagactcaaccatctatggaacttattctgcaaacggaaactgtggatgcagaaatggtgaaaccagttgacatgggggattcaacagtagataagtcgcaggaaacaggggaaatggttttgaaattggaaagctccaagtgggaacctttagaagctactgagttagtcactatggagcctagttccgaaacggaatctacctgtgcagattccaaaatatatgctaacttggttcctcaactagactcagttcctttgtctgtaccaaccgagctgagaatacaacccgaaccagaggagccgcatgcttttgagaaccccattccagaaacagtttcaagctctgaggacttactagaaccagcacaagttcttatacaagaagatcctgtcgctttggaaaacctaccgggcgtgccaattgttcctgatgtacacgcccataattttgaaccatctcctgtggaaatcacttctcaatctgcggatacaaacgccatagttcctgtggaagtggaaactattatgaaaccagaaacggaagccccatcgcctatggctgttgaaagtactccagatttagaagctgtagcattggacactaaagagtccgtacctgcagcacaagcaataccagtggaggttgttccggaaacagaacatctcacagaggaaaccaaaaatgagacggcaaaaatggatgcagaaccagctagaatctcagtggaaattgttcaagaagaacaacctctatcattaggaaataaaattccggtggagaatgaaacttcatccgcaccggttgaagctcctttcgatacagtatctattccagcgagtgtggacagcgtggagcaaaaggagagtaacgctagtgaagaaccgcactttggtgaagatattttaaagaacgatgatgcaatattagaaacagtaactgcgaatgccgatttatcaagcgatgcccaactagccagtatagaccaagaattaaaggatccggcaacagaaggtatacacaaaaatacatcggtagactccagctatggcgattgcttcgccttagggaaagccaccactcacaagtatctgcgaaggcagccgaacatccgagacacaccaccgagcgatgcagactcacccaaaagatccgagccggtcaacctcttcgggaccatttgcaagttttacataaaagacaagcgactgctggccacaatcgaacgaaggcgccgccgctccttgatcatgcacaagtacctcagctccttcgattccctggatgacagcatagacgaagttgcgtatgattcccatactagcctatttgaggaactaaacgaagttagcttacattcctccaaggacattcaacccccaacgggcagagcagcaactccagtctctgaagttgaccccattggcttagtagacaattgctttgcatttgagacggataagactgaaactgatatggtagatgatcttagcgtagatacggataagtccgaatgtatagttaacatgaaaaatatgcctaagtgtgatttagagaccaaaattgaatctgacaatttggagagtttagatacactgacatctccgtgcattgttagtgcaaaaaaccgagttgagtcgctggacttccaaagtagaacagataccgcgaatgatgcttgtttagagattgacgcatcagataaccctgaagatcatttaaagcatttagaagtcgatgtcactgtgggtgataatgttatcttaagactagatatggccagccaaacctcctgcgatatggccgatgaactagaagtagaagctgactccaccattgcctttagtttgagcgatatcacatataactttatcaatgaaattctcttctcagatcaattaggttctgagtccattcaaagcgatgagagtgagccctccactgcctgcgagacattcaacgcagatggtgactctgatcaggagtttgttagccagagggtcttagtcctagacgatcagcgatcccttagtactaacacaagctctaacaacaatgtgcacacacacctgcatcttcctctaacccaaactaacaacccgagcgcgggaagcagacgcaccaatggaaaactaacaaatggttcccttcgatggtcgggtagctatgccaccgagctcccaaacggtggatcatcgggtgcccaaccagacgacgttgtcgtcgacgatgacgatgttgtactgttgcggcgctttgtgccaggtaacactcggttgtggccataactgtcatctctcggtgtttgttgtcctccccctacgactgcttaaatacgtgtttatgttagccaggctctactgtcctttgtgtgttgtgacccgtcgacggctgatccttggcattcggatcagccgacctatttaaccatgaaacaaggggaactgaaagtaattactagctatctatgaaagtctcttttgatttgaataacaaatgaaaagccggtaatttcgtgctatgaaaatatgaataggttttggaaatatgccttattgtattaacaagtttttgtttgatttcaaagacttagccattccaattcacacttccttgtaatcataatagtgcctagtaatattaaatatttactccttttaaaatttgtaataaagaagttaattacgaatttcaatcgaaatcaaacaaaaa

SEQ ID NO: 3321 - protein, 2748 aa, DROSOPHILA
MSFNQHKFVYPMRARSEVYIPIVGDGNDSSMQFESVSQIGQNAHMDERAKIREYVEEIVAEMLGGNLDHVKVGQLSKSENYVDDICECIYIYIYACSMDFTLGLVTGMYAVLAVIVFYVVYVIETRLRSLIETIIAETLRSSTLSASGAVSEISLDTRSHVSDLANGNGLKRRHRTEHYFEPKIYQDLLATAVLNKIVDKEGNTRLAAESTPDLSGRHIDENFNAEALSTTSGSSIEPRSDCSLTDHEIGLDNGKSQSLQTDLERESVLSDYIAAHMVPLPDFSASVTESEDDIGSISSGMIGDGNWEDNWLFKKKRSSATPSSIGMLVPAPRENVRAQIGDKTTDEVSDLSEIGSDIEESSLDLLRCNDLNDRLLSKHLIGGQNTKMVLDELVDRTSLTSHTLPEENEPAFTETTNEFVVSPMAMPSDIKAPSPTPPPPPMIFQDDLLNEEPDHTPIAAQGESEELSSLDGCTGFSTVEYIDEGQMHDTVPSVIEILAAMALGPMLAVPASEQPGAMTPSEMHTLKELSDLALAEINARTVDLVHAHSLDIIEEENTEPSETGPEQHLDFVPHSPLEELATTDQTDVLPPPPQLKLIYETEPPPPIEMDQDINCMEPQYTAAIVPELEIPGQNAPVEIVSQMKADDVTPLESVQIVPEITPPTDIVPEDQSNVESIQVASTAEVVHVPLPVESGPEIPVPFEIVPDPVDPPEVINFVSLDMETPMPLDYDPETIKLDQGHVANLVPGDPTASLSERIPEMIADPTAAALPEPSPIPVPVDNGTQLDELGTIEDDSHTTSVPMESVSIVEPQVPVEADALTQSDPVNLLESLDNVEIPPLPGPICSEPANIAADSSLPLEAAEPVESTPIEVATLDSPQSVDTELPTAVESLVSVGMLKDVESVDVNGSETLGVSLGTDSIVVTQPQAEETVKPSASVEIDSENQTVALVVNVPESQEISEEAVSSIETISPPFSTEVAVPVKSIDVETLESPGATEPASVEQSETVDIAPEIHNVNPSEHCESVPEANVNIPSMEIVPLENSPSMEIQDELPQTLESSSVDPQEVQPVAVDPLPVTEVVPDVVPVEPPSIVETDPETREIENLDPMEIKPDPESSTIENLTPIDSLAAVESIDVKNQINSSNHMEQQNISIEPQPTVPMDTIQPIEIVQEVPCNTVDLIATTEAVNADHSEPGEAGLISEVLQFHSSGGDLPETDSRAIEPLPLAPPAEVIEVVPLGSAELLSPSEPTEVVSPSAIALPEKPEPMENATEIEIEEMVSPTSVEIVPTTTEDLHQAESVVETARPVSAVEEVKPIEDSTAAIDKSPQISPIEGEHSQHSEKETPESVEVGLDSPNVADVITTSVEVIPTSTTAVTTSDGASTEMPEPPKIYCETAPPAAEEIEQNETVETLSVSADTTLPEEIVSQDGNLEASEQTASIDVTFQANLNNMESKGCVEVAVDVRESKEDETLMEPIAVDVAVPVEVVPQCAGVELGVSEPEEATPATNNLTSGENPPEEVSELVDVEPRNPHEEIHTDSFEKDSQKSSDAVALHEDNTKSEEKVDPPQVAEEVAPDIITLDPPSLVELSPDTQAMAIGNIAPFDIILEPESIVIEQPVPVVKPETIVVESDPEAIDHTALLEPSVSAEVQDKVESAQQQVSENKSVEEDSLKVSIGERGEIISMDPITPADAVSEQNFRVEDPITSTESTAVEVIASESINTVVEPVSVAQSPTIEDSTPEEVTQCSAVNSTDTEVASAAPIQVDQKIQPVHVELVSQIEASDLQESPKDTAQVESDSVDQAILTQVSETDSIVVEPSSPVKQSEDSQGEPPGSAQNVLDVGPVEMDQSAPEEVPETDPVAVEPSVPVEEEVIEVIQPAPKEISDSVERTLDSLGNTDLVAEAESVDTPAENAGPEIGTSELEKELLVVSTTIDEQPSAVLEPLVLICQAESTNLDHELPENLVPQGQSVPASLPTNLTIQTQPTDLETQPSMELILQTETVDAEMVKPVDMGDSTVDKSQETGEMVLKLESSKWEPLEATELVTMEPSSETESTCADSKIYANLVPQLDSVPLSVPTELRIQPEPEEPHAFENPIPETVSSSEDLLEPAQVLIQEDPVALENLPGVPIVPDVHAHNFEPSPVEITSQSADTNAIVPVEVETIMKPETEAPSPMAVESTPDLEAVALDTKESVPAAQAIPVEVVPETEHLTEETKNETAKMDAEPARISVEIVQEEQPLSLGNKIPVENETSSAPVEAPFDTVSIPASVDSVEQKESNASEEPHFGEDILKNDDAILETVTANADLSSDAQLASIDQELKDPATEGIHKNTSVDSSYGDCFALGKATTHKYLRRQPNIRDTPPSDADSPKRSEPVNLFGTICKFYIKDKRLLATIERRRRRSLIMHKYLSSFDSLDDSIDEVAYDSHTSLFEELNEVSLHSSKDIQPPTGRAATPVSEVDPIGLVDNCFAFETDKTETDMVDDLSVDTDKSECIVNMKNMPKCDLETKIESDNLESLDTLTSPCIVSAKNRVESLDFQSRTDTANDACLEIDASDNPEDHLKHLEVDVTVGDNVILRLDMASQTSCDMADELEVEADSTIAFSLSDITYNFINEILFSDQLGSESIQSDESEPSTACETFNADGDSDQEFVSQRVLVLDDQRSLSTNTSSNNNVHTHLHLPLTQTNNPSAGSRRTNGKLTNGSLRWSGSYATELPNGGSSGAQPDDVVVDDDDVVLLRRFVPGNTRLWP

SEQ ID NO: 3322 - DNA, 3248 bp, DROSOPHILA
ctcggctcctagcgacgccaaagatgcatgcagatccggcatgaagacatcgggattaatagccacttctcgctgagctaaaatctaaagcataagtcgtcaatactactgcatacaatggtaagataagaatgaacttacatcaccgatatcgaaccggtgaggttcgattttcatgatggaaactccagtgctggcatctcccttcatgatggcgtatatgatgggagcagctccccgccatttgggtaacaaactagcgtgaacattgatcatcccataaggaaatccattgatgatactaccaggaatcaggtggccaaaggagaccaccacacccagatcaaattgcggacacacagaaggatctatgggccacttttgcaggggaagcttctccttttccgcgtaggtcctcacacagttggcgggacttttgaaggaggtaacaactcccaaacgatcactaagaaaaatattcttattaatccaatttaacattattgtttaaaacattttacccgcagtttttgtgtagcgcctgtaagctgggcaaggaaaaattgtcggtaccgaaaaagagaatttttggagggtggtaagttcccttgcagcgctgtgcaattgggattacattctgccacacttttctcttatatttgtaaaaattattgactaaactcttgccgcaaaacatcggaaaatttgttggataataatgcagcgtaaacaaaaacagctgttcgcgataccagctggtcactctaccaaataacgtaataggaatgctgagatagagtgaaacctgttgaacctatcgtcttcaaccatgtaaatggtggtctaactttataagatcaagagtcgttatttttgtttaagtaattaaacttagctcaatacattactttacttttatttatctgtcttcagtgactatagactatcggtatagtgtatattatttttttaagttcatcgcacggtcatactaatgagaacgcaataaaaatttggaaaatcaaacatctacaggaaaacgtatatttttgggatcaagtgccaaggaactccaatactgcagaatggaggcatctgctgccaaaatcacgcctatggccagttccatgtccgcttccggatccacaaactccccctccagtgaaaaaatgaactacgcactgcaagtggcgctgcagacgatcaaggagcggtgcatccagctgcagcgccgcgtggccagcatggaggaggagaaccagcagctaagggaggcctccagcaggtcggaaggtgctccaagggcaaacgaaatcggggtcactggggacgtcctctctctgaaagcacaggtctctgagctgcagcgccaaaaggagcagctggaggagcacattggcatggtatccaacgagaacagacggctctggtcccgcctatcgcagatctccaaggatcagcagctgaacgcactgcccagctcaacagactcgcgagcccagcaaaaccagaacctggtgcgctccaagacctttacgcagcactcccccaatcctcaccttcgccaaaagatgctctccgacggcattaaggatctcagtctggaggaaatagccctggatgacttcggtgccagcagtgaggaactaggttacccctacaacctgcaaaaggtggaggaaaccactagtgaaccagatgccaatgtggatgccaaaagatgtttggatggactgcaggagctgaggcgagaggccatgaagcagcagcaggagctcagatcggtaatgactctgctagaaaatcgcataggtaagcaacaaaatggaattcatgctataaaaaaaataacttttaacgcctgttttatgtgcaagcagcactcaagccctgtccggaatgtgcccagaaaaccatcaaaaaaccggagatggccgacaaaagtctggaaacggacgacagcctgaccagcgagctgaagaactatgagagccaacacaatggacacaatggcacgccgcccagccagagaattaacataatacaagagaaaatcaaagcagatgcagccgacgcaatggagaagacctgccctatgtgcggcaagcagtactccagccaagtgtccttcaatgcgttccgcgagcacgtcgagatgcacttcatcgacgatgcactggaactggagtcggagaacagcattgagcgccagtttgagttcgtttcccatgctgtgggtgacttctgacccagtaggcgcatttatttcgccaccgaactctgacctgaccggagaaatccaaggattaaggagcagtttgactgcgcaggagccgcttgttacgtttctattgataagacgttagggcgatcatgtatcaaaactatacaacattgaactttaagaaaaaatatatatatattgtattataattgcggagagtgcatgaatatatagatgtaagtgaccgaatacgaaatacagtttaaatgaaaagcctgaaaacatgttgagcgctctcttcggttggttggaaagtgaaatcgtggaccgtggacaacataaatattatattattagcgctgacaaatattgtaatatcaaagatgacgatcgatgttaccatcgcttgtggtcattatccgatctaattggcagcttttctgtgagtcacacactttgggggaagagtggaacattcgacaaagaagtttggcttgaggccattatgctgtaactggtcagaggatttccctgtttttttggctatgacgtagtcgaaacccgactggcaacgtgtgcctaatcgggctgatccagtcattcaatgcgaatatttgccaaaatattgaccataagatttgccattgatagcaatacaaatgcaaatgctcagagctaactttcttttaatgcatttggagtgggtcgcagcaggaatttagcttaaggaaacattttaatttgcctatgctaataagtttgataaataaatatttttaagacacaggcacgtggcagctcccgtggatactttattacgttactatgaaatgctcagataatgaaacaaattatcaaatctggtgcttatctacaagtcgtataactggtaaccccacccattcaccaaccaatgtgcatagaatttgtaagagttcaagcaacttttgttagatcttttccgcatttccaactaatactgggttttcctagctctcatggtctatatattgcgatccatcca

SEQ ID NO: 3323 - DNA, 1180 bp, DROSOPHILA
acgcaataaaaatttggaaaatcaaacatctacaggaaaacgtatatttttgggatcaagtgccaaggaactccaatactgcagaatggaggcatctgctgccaaaatcacgcctatggccagttccatgtccgcttccggatccacaaactccccctccagtgaaaaaatgaactacgcactgcaagtggcgctgcagacgatcaaggagcggtgcatccagctgcagcgccgcgtggccagcatggaggaggagaaccagcagctaagggaggcctccagcaggtcggaaggtgctccaagggcaaacgaaatcggggtcactggggacgtcctctctctgaaagcacaggtctctgagctgcagcgccaaaaggagcagctggaggagcacattggcatggtatccaacgagaacagacggctctggtcccgcctatcgcagatctccaaggatcagcagctgaacgcactgcccagctcaacagactcgcgagcccagcaaaaccagaacctggtgcgctccaagacctttacgcagcactcccccaatcctcaccttcgccaaaagatgctctccgacggcattaaggatctcagtctggaggaaatagccctggatgacttcggtgccagcagtgaggaactaggttacccctacaacctgcaaaaggtggaggaaaccactagtgaaccagatgccaatgtggatgccaaaagatgtttggatggactgcaggagctgaggcgagaggccatgaagcagcagcaggagctcagatcggtaatgactctgctagaaaatcgcatagcactcaagccctgtccggaatgtgcccagaaaaccatcaaaaaaccggagatggccgacaaaagtctggaaacggacgacagcctgaccagcgagctgaagaactatgagagccaacacaatggacacaatggcacgccgcccagccagagaattaacataatacaagagaaaatcaaagcagatgcagccgacgcaatggagaagacctgccctatgtgcggcaagcagtactccagccaagtgtccttcaatgcgttccgcgagcacgtcgagatgcacttcatcgacgatgcactggaactggagtcggagaacagcattgagcgccagtttgagttcgtttcccatgctgtgggtgacttctga

SEQ ID NO: 3324 - protein, 364 aa, DROSOPHILA
MEASAAKITPMASSMSASGSTNSPSSEKMNYALQVALQTIKERCIQLQRRVASMEEENQQLREASSRSEGAPRANEIGVTGDVLSLKAQVSELQRQKEQLEEHIGMVSNENRRLWSRLSQISKDQQLNALPSSTDSRAQQNQNLVRSKTFTQHSPNPHLRQKMLSDGIKDLSLEEIALDDFGASSEELGYPYNLQKVEETTSEPDANVDAKRCLDGLQELRREAMKQQQELRSVMTLLENRIALKPCPECAQKTIKKPEMADKSLETDDSLTSELKNYESQHNGHNGTPPSQRINIIQEKIKADAADAMEKTCPMCGKQYSSQVSFNAFREHVEMHFIDDALELESENSIERQFEFVSHAVGDF

SEQ ID NO: 3325 - DNA, 3318 bp, DROSOPHILA
atatatatatatatatatttatattcgtatttgtataacaaagattgcaattctactttatatacttatcctagataacgttaacgctaactgtaaacccaacagaatattcgaaaaataaaaagcgggcgtcatcgtttgtaaaacaataaatagagcgactcccatctctcgtctcgtccccacctcctgtacaaaaagaaaaccccccgatcgcctgcttcagaatccctccttggccgcacggaacttgtaatgattgctccgcccgtccagacacggcacctgcaccagattaaagtagatggagcccatcagctgcgaggccgaggtgttggtcatcttcaggcaggagaacagcatgtcgtcgcaaatgcagtgggatctacgcagagtggaaaggcattagattatataacaggcataacagattatctgctgcaaccaatttgtgcactcactttgtgtacagcgaatcgttcatcagttcgtatttgttttgataggctcggattttgatggggcagagatcgtgttgccgacagcatcgatccatggccatttcgctgcccagatcgctgtacgtctctgcaatgtcgccggtgccacaccattttgtgcctgtgagtatggaatttataatgcatacaattgcatcatctcgagcaaacgtgaccacctcacctggtataatgccactcagcagggagaagggactgcgcggaaagatattggtggccagcttaagggccacaccatcattggctccacccgttgtggctgaagcgctgcctccattgctgcgttcaccgccctccagcttggatttgtgacgcgaagcgtagctcagcttatccacgtgctcgcactgatccattagctttagcatctcgtcgaatttgatttccaatgggcgattgtagtgcgacaggccctccagcagcatcttgccctccttatcgttgctaagttttggttgaaattgatcagacaagttatgcgattgcccttctatgcgattctcataccccctagctaagagtacgacactttctcaagagcatataacatttttggcataaaatagttgcacgtttttcaatatttgttatttaacagccgtgcatattgattttctataaacgtgattagtcgtgtgcctgtttaaatattcagggcatatatgcaatggattttctgatcagctgttcacgtaaagcagacaaaaatcacttccgcaaaaccttgacttcatccatataaacaaacactcaatattttgttccgcaatattaattttttcgctaaatataattacttatttgtcttcagtaatgagtatacttactagatttcgatcagttcgcagccgagtaacaatttctggggtcccagctccgttacggctatggtcagatcgtgatagtatatcatgatgagggagtcgttgctcacacgctttccgctgccaaaaaagagagtgcacagaaagaaaattataattttatcaaaaatatgtccattgttttgagtattttcatgctacatttatgtgatgcaaatatatttaatcggtgaaattgttcgacgaagtgttccatctaataataagtaaataaattattttccatctgtgtgggtaaacgatttgagtgatagctcgctccgtgcagcggttatgggcacatggccaggcggccgaccatgcggatacgtgacgtccatggcaatggactctgtggacgacggaaagctaataagtcattcgttgactgactgctaatcaaagacggatggaatggatacccattctcattcagatcttcgtctggcaaacgctgcaatgctagatggtcaatcttcatttcgagagcctttctctgcgcttctcatagttataagctaaacagacgaacctgtggaaaatttcctaaattttcatgcaaatgtatgtattaatttcaatagctgggcaatatttttctgcgcttctcatattagataaacagagagggttagttttgaaaattccctatatttccatacacgcgtatgttattgttggcaatagtttggatatattttcggcttgtttcgactaccactcacctgtacgtcttcatctgacgcgcgctacgctgctcgatgatttgctgggtgaaggactggaacgaaggaaatccttgcagtccttgcggcaaactaaaggacaacgtgggcttggccaccgcctccgaggtcagatagcccaggaggcagcagaaaagcaacgaggccagcagctgaaggcgccgtcgcagccagaggttatagggcatcttggtgtggcgtggtttcttcgatctggaggagctgccactaaggcatcgccggctggactgagccgctacccaaaaacaccggcgccgtatccaaccaactgtttcccagggcgaaagagagggaattcactgttaatttataagccggagaagttcgcgctggtctattagtccgcactaccaataccatctggccaaggatagggtttaagggtcaagagtgtgctgtcttgggctgcgtgtcaaaggttgaaggcgtcgccaaacgtttttgaataattcaagacctctttcaccgcagagaaaaagtacatagcacacgtgtaatatcttccattcgattatagtacataaacaattagcaattcgtgctatgatttaataatttgaacttaatttttcttacgcgaacgaagtccaatatttatgctgcgagtttaaaaacattttcaaacatcagcgaaataaatttgacaaaaactgagaaaaaatattaaaacaaacaaacagtgggtgaaagtaagtttgttgttgaattacaatttttgtgcacgcccttctatgcgcttctcatacttattagctaatctgtgaggtgctcatgcaaaatttcacattttttaaagcctaactattattgtatgtagtgtttttgatatcattattacagatttcattttaatcgcacatgtcattgtattgggtgcctgttatatgttattttgcctgctatatatatatttctcttgtgtaaaactaaagaggtccgttggaggccggttggccaagttcccagcattgcgggcggaactgcagtggcaggtgccaaaacttgcgagtcagctgacctcgttcccagcccacgggaaaataaaaaaaaaagcgagaggatcgggcaatctaacccataacaatggggagtgacgacacgcgcctctctactttatacttagcccagtcaaatttaagtcatgcattgcatcaggccaagacctag

SEQ ID NO: 3326 - DNA, 1151 bp, DROSOPHILA
atgccctataacctctggctgcgacggcgccttcagctgctggcctcgttgcttttctgctgcctcctgggctatctgacctcggaggcggtggccaagcccacgttgtcctttagtttgccgcaaggactgcaaggatttccttcgttccagtccttcacccagcaaatcatcgagcagcgtagcgcgcgtcagatgaagacgtacagggggtatgagaatcgcatagaagggcaatcgcataacttgtctgatcaatttcaaccaaaacttagcaacgataaggagggcaagatgctgctggagggcctgtcgcactacaatcgcccattggaaatcaaattcgacgagatgctaaagctaatggatcagtgcgagcacgtggataagctgagctacgcttcgcgtcacaaatccaagctggagggcggtgaacgcagcaatggaggcagcgcttcagccacaacgggtggagccaatgatggtgtggcccttaagctggccaccaatatctttccgcgcagtcccttctccctgctgagtggcattataccaggtgaggtggtcacgtttgctcgagatgatgcaattgtatgcattataaattccatactcacaggcacaaaatggtgtggcaccggcgacattgcagagacgtacagcgatctgggcagcgaaatggccatggatcgatgctgtcggcaacacgatctctgccccatcaaaatccgagcctatcaaaacaaatacgaactgatgaacgattcgctgtacacaaatcccactgcatttgcgacgacatgctgttctcctgcctgaagatgaccaacacctcggcctcgcagctgatgggctccatctactttaatctggtgcaggtgccgtgtctggacgggcggagcaatcattacaagttccgtgcggccaaggagggattctgaagcaggcgatcggggggttttctttttgtacaggaggtggggacgagacgagagatgggagtcgctctatttattgttttacaaacgatgacgcccgctttttatttttcgaatattctgttgggtttacagttagcgttaacgttatctaggataagtatataaagtagaattgcaatctttgttatacaaatacgaatataaatatat

SEQ ID NO: 3327 - protein, 272 aa, DROSOPHILA
MPYNLWLRRRLQLLASLLFCCLLGYLTSEAVAKPTLSFSLPQGLQGFPSFQSFTQQIIEQRSARQMKTYRGYENRIEGQSHNLSDQFQPKLSNDKEGKMLLEGLSHYNRPLEIKFDEMLKLMDQCEHVDKLSYASRHKSKLEGGERSNGGSASATTGGANDGVALKLATNIFPRSPFSLLSGIIPGEVVTFARDDAIVCIINSILTGTKWCGTGDIAETYSDLGSEMAMDRCCRQHDLCPIKIRAYQNKYELMNDSLYTNPTAFATTCCSPA

SEQ ID NO: 3328 - DNA, 5820 bp, DROSOPHILA
ttagtaatcgcttaaagtttttaaagagtagcaaacccaacaacaacacattgaccatccgaatccgaatggacggaaataagccgaaaactgtatttacactgtgtacttaggattagtcttatgtatgtaaccccaagaagcccacctaagaatctgaaacaatgttcaaacatccatatctaaatcttcaactcgaccgaacttatcacaactgctaaacacgaactataaaacgcaatctatttaatacctccgaatagtaaactgtacctaaacacgtagaaactagaatggaaaaatcccaaatgttactcctctactctgtcacccttcaactttctaaactttctatagtgaacagtctcaaatgttgctattttagtaaataaaagaaaaacagaaaaaatcatatacaaagttcgaacagtctaagttgagaccagctttgcgaaagatgcacacggattatatatactcgtatgtatgtgtaaacaatcaaaaccaaaagcaattcgaaaaccaaagaatattaattgtcatgtaggtgtcatgcgtttttcaaagcgagtattaaaaattgttttatcgcattggctttagcttaacatttagtgaagacatttaagtcgaccaagcactcagataagtagatgcaactacaccgttacacaataaagttaaatgaaaacgcctatgctgagttttaatttgttactaaatatcttacacattttgcatggctgtcaaattatcggatgttttggtgggcccaccttttcactcataattgctggctttattcatttaaatcatgtgcattaagcccactaaataactttcattttattcttaaacgtgactttgaaaacgttgtttttgggcgcttaatattgaaaattcaaaaatagaatagaacgcccatctctacaaaattgtccatcactaatccaaacgatagtttgacaagcctgtggtatttcttgcactgctcaaatggtcactctggtgcttaagtgcttattttaacaacaaatttacgagcagttgctggaaaataatgttgatactgagctaacctgtgtccctttttgacccgtcgcccaccaaccagccaagcacatcttctccttcaacaacgtgtacatggacgccccaccgcccacgaagccccctaggggtgtgaagtacggcaaggatgaggtaaatttcttcaagccctcgctgaaaatggtgttcatctcgcgtcacagtttttccaagcaataaacccatctggaaccgcgcctgcttgtgttttccttcgtagataatagttttttaggggccgtttgcctgtcccaaagttgcgggtccaaagttgatgacgacaccatctggttgttgttgctgccgcacgccctcttttcgcttagcgatattgcttttcttagataaaccatgagtaattcccggtggccggcttacttttgcagtccgcaggatgtggcttcctggtcaacgtcatcaagtccctgggattcagcgagaccaccgaggagcgccagaaggagaagcagaagatcgaggcggaattcaagcgctcggatctgcgcttgaacgagctggtctcgcggcacgaccagcagcttacccaggtgctgcccctgttcagccaggtgtcctcggaggtgacggccagccgggagcggattcatgcagtcaaggagaaccttggtgtctgcaagcggctgctgcagtgccggcgcgatgagctccggaagatgtggatggatgcggtgcagcacaagtacgttctggagatgctggagcaaatgtaggtcacgctgcccttgttgttcattgaaacgcgctaactatatcgttcctttacagccaggagctgcgcaaagtgcctcaaagggtggtgggctacaccgccaaacgacagtatctgcacgccagcaaggccctaactgatgccctgaccaccctcaatggacccttacaggccgtcgagggcttgtcagatttgcgaactgacctgcaaacccgacgccagcagctgtatcagcggctgcacgaggaactggtcacccaggtgtacaccaactcggccaacgaggccctctcttcgttccaacgcaccaactccagtaggctgaattccagttttactcggggaataggtgctcgtcgctctacggatcgcatcgaggccaatgctcgagtgcgcaaagcgctggccgaaatggcgcagagcttcgatttggacaaggcagaggttatcgaagacgcagatctcatttacccggagctgagcatgagctacttcgttgccatcatagtggagtcgttcggaatgctgcacaaggtgcctgactctctggagacactgcgcgtccaaatccaaacagagttgctcaacgtggtgcggcacacaacgcatcaactgtctgtgagtggagcaacggcggacaccaatccgctcctttcacttctggaggtcatattcaagcagttcaaggcaatcgccaaaacgcattccttgttgctgaagaactatttgtcggtgggacagaagtactctgttgttggaccgcaaccatacgatctaaccgatttctgggcccaggctcagtcagtggtaagtgttggactgtcgagctcttctgaatcgcaattcaaatttactaccaccaacttgtctatttaagttgcaactgttgctcaccgactacttggatatacagaatgctgccgcggacgaaagtgcccagacggggttttcagagcccaccagcaacataaattcctattttctgaggcgcaaggtgccgaggcaagttacatggcagttagcggacgcactcttttcaaataattatattattttataactagcaccaagcgatcaatgttcaagttcgataagtcctcgcacgttggcacgagcaacaatagcgacgccttcaaggagcatcgtcgcaacgcctcggatgcctccgtggatgacaaccttgccggccagcttggtggcagtggcaagggctccaccagtggcctctttcctcacgagaaaaagcagcgggaaaaaatacttatttgtacgcccgatcaaagtatcataaccaaagtgtatctacctctaatgggatatatcaaggagatagagaactttatgaaatgcaagccagggtaagaggatacaatagtagctactgcattgcgtgcatggaaataatattatattataatttcaggcaaccctgcagtctacatgactttttagacaactacattaaggacacattcctaaccaaaggccacaaccgcaacctgcagctgaccatagagtcgctgtcgaagaatcaagacgcatggcgcactattataagtcctgaggaaataaaggctcttaatctaagcaggccgttgctgcagtctactgtgatggtcgaacggaggttgatggaaactaagaacctcattcaagacttgccctgctactccgaagacctgcttaaaatggtgtgcgcgttgttgaaggcctatcgggaaatatgtcaggcggcctatcgcggaatcgtgcagccagattcagaggataagagaatttacagcgtggcatggcttaaagatgaagatatcagcaggtttttaaagtaagtataaaggtataaaagctacatgaatttatagtttcttcactatttagaacgcttcccaactggactgatttaaagacctacagtcagaagtcgcgccacaaccgaaaactgcatcgcggaagctttgagccgtcggaggaggagagcccgttgcaggttcagcagcgcaacatccgcgaggctgaaatgctgaccagtaatttaggcgagggtgggatcacccaacaagagattttggtcgagatcagtgtgcttaaggagctggccatactgcaggagagcatggagtggttttcgtgccgagtgtcggaatttgccaacgacttacgccggccgttggtaaacggacttaacgccgttccagctgagtgcggcgccgacattgctgtgaaggatgggacgatcaaagtgatgactaatctggctttggagtttgatgagctggcgaacacctgcctgctggtattgcatctggaggtgcgcgttcaatgcttccactatctgcgctcgaagtcgagtgtaaggaccaacagctatgtgggctccaaggatgatatcttggagcccgaccgccaggtgcaagttctgaccaaacgactgtctgagatggatgaggcgtttagtgccactctacatccgaggaagaccagggtaagttgaatattcgtctccagttgcattttgctcgaacgtattcttctctagtacattttcgagggtctggcgcacttggcatcgcgcattcttatccaggcctccaattatctggagcacatagatcaaataaccgtgcagcgcatgtgcaggaacgcgattgccctgcagcaaacattgagtaacataactgcctccagggaagtggctttggatcaggcgagacacttctatgagctgctttgcatggagccagacgtaagagtgattggcccaagttttgtaattcacctttttacttagaaacactttgcacttacccacaggaaatactcaatgcgttgctggagcggggcactcagttctcggaaatgcagctgctcaatgccttgcagttgtcctgcaagtccttcggcataaccgacgccaatctcctcgcttcctatcagcagaagctgtcggacatactaggcgccaagccctcgaagggagtagttgtgtagttagcgtggcaggcggcgggtaaaaccaattttaatatccatacttttgtttacatcggctgcaggtgtaagtgcaaattgtatgttagtgttaagctcaaaataattgcgaatgttctgaacatgattggcgagcacttagtgttgtagccgtttgtaaagatacatattctaaagatcattaacagtacttcaatggcctatacacaataaatgagaattcaacaacgatgttttgactgtattaatttgctgcatctagtgtatctaattttaacattttttcaactcaaccggttgctaaaccgtttcagcaatgttatttaacagggtttgagtgctcgctaaatggacttacgaaatgagtatggaattttcgtgcagcccagtcatggtcacgctgcctctctgaaaagccgcaagaaaataaaaataaatatatctttctagctattattattgttgttattattaacaaaaatgtcggaaacagttgatagcacagaggtaaagtcgccgtcgtacgacttatccaagttccaactgaagcgaatcctaaccaacaacagcgttaggaaaagtatatccctgcttggcacttttccggatttaggaaccgatgatgccattgttgttttcgagaaaaatggtataaaagcgtaaatgaaagcaactaatgttcgctacagtataatccttactaaccgcagcgtaccgggaaagcgatgtggccacggcgtcatcagaagagtctcccaagaagcctagctattttaccgcggacctgaaagttgacactgagtttatcaacaatatctacggcagttttcaggttgtgccgacccaggatttgtgcagtaaatattagattcataattcatactgataaatcatagatttttatcattcatttcgcaggtgtgaaaagcacagtcatttatcccgccaccgagaagcacatcgagaaatactcagtatctcaaaagtatctcatccgggagactcctgatctc

SEQ ID NO: 3329 - DNA, 2970 bp, DROSOPHILA
tcactctggtgcttaagtgcttattttaacaacaaatttacgagcagttgctggaaaataatgttgatactgagctaacctgtgtccctttttgacccgtcgcccaccaaccagccaagcacatcttctccttcaacaacgtgtacatggacgccccaccgcccacgaagccccctaggggtgtgaagtacggcaaggatgagtccgcaggatgtggcttcctggtcaacgtcatcaagtccctgggattcagcgagaccaccgaggagcgccagaaggagaagcagaagatcgaggcggaattcaagcgctcggatctgcgcttgaacgagctggtctcgcggcacgaccagcagcttacccaggtgctgcccctgttcagccaggtgtcctcggaggtgacggccagccgggagcggattcatgcagtcaaggagaaccttggtgtctgcaagcggctgctgcagtgccggcgcgatgagctccggaagatgtggatggatgcggtgcagcacaagtacgttctggagatgctggagcaaatccaggagctgcgcaaagtgcctcaaagggtggtgggctacaccgccaaacgacagtatctgcacgccagcaaggccctaactgatgccctgaccaccctcaatggacccttacaggccgtcgagggcttgtcagatttgcgaactgacctgcaaacccgacgccagcagctgtatcagcggctgcacgaggaactggtcacccaggtgtacaccaactcggccaacgaggccctctcttcgttccaacgcaccaactccagtaggctgaattccagttttactcggggaataggtgctcgtcgctctacggatcgcatcgaggccaatgctcgagtgcgcaaagcgctggccgaaatggcgcagagcttcgatttggacaaggcagaggttatcgaagacgcagatctcatttacccggagctgagcatgagctacttcgttgccatcatagtggagtcgttcggaatgctgcacaaggtgcctgactctctggagacactgcgcgtccaaatccaaacagagttgctcaacgtggtgcggcacacaacgcatcaactgtctgtgagtggagcaacggcggacaccaatccgctcctttcacttctggaggtcatattcaagcagttcaaggcaatcgccaaaacgcattccttgttgctgaagaactatttgtcggtgggacagaagtactctgttgttggaccgcaaccatacgatctaaccgatttctgggcccaggctcagtcagtgttcgataagtcctcgcacgttggcacgagcaacaatagcgacgccttcaaggagcatcgtcgcaacgcctcggatgcctccgtggatgacaaccttgccggccagcttggtggcagtggcaagggctccaccagtggcctctttcctcacgagaaaaagcagcgggaaaaaatacttatttgtacgcccgatcaaagtatcataaccaaagtgtatctacctctaatgggatatatcaaggagatagagaactttatgaaatgcaagccagggcaaccctgcagtctacatgactttttagacaactacattaaggacacattcctaaccaaaggccacaaccgcaacctgcagctgaccatagagtcgctgtcgaagaatcaagacgcatggcgcactattataagtcctgaggaaataaaggctcttaatctaagcaggccgttgctgcagtctactgtgatggtcgaacggaggttgatggaaactaagaacctcattcaagacttgccctgctactccgaagacctgcttaaaatggtgtgcgcgttgttgaaggcctatcgggaaatatgtcaggcggcctatcgcggaatcgtgcagccagattcagaggataagagaatttacagcgtggcatggcttaaagatgaagatatcagcaggtttttaaaaacgcttcccaactggactgatttaaagacctacagtcagaagtcgcgccacaaccgaaaactgcatcgcggaagctttgagccgtcggaggaggagagcccgttgcaggttcagcagcgcaacatccgcgaggctgaaatgctgaccagtaatttaggcgagggtgggatcacccaacaagagattttggtcgagatcagtgtgcttaaggagctggccatactgcaggagagcatggagtggttttcgtgccgagtgtcggaatttgccaacgacttacgccggccgttggtaaacggacttaacgccgttccagctgagtgcggcgccgacattgctgtgaaggatgggacgatcaaagtgatgactaatctggctttggagtttgatgagctggcgaacacctgcctgctggtattgcatctggaggtgcgcgttcaatgcttccactatctgcgctcgaagtcgagtgtaaggaccaacagctatgtgggctccaaggatgatatcttggagcccgaccgccaggtgcaagttctgaccaaacgactgtctgagatggatgaggcgtttagtgccactctacatccgaggaagaccaggtacattttcgagggtctggcgcacttggcatcgcgcattcttatccaggcctccaattatctggagcacatagatcaaataaccgtgcagcgcatgtgcaggaacgcgattgccctgcagcaaacattgagtaacataactgcctccagggaagtggctttggatcaggcgagacacttctatgagctgctttgcatggagccagacgaaatactcaatgcgttgctggagcggggcactcagttctcggaaatgcagctgctcaatgccttgcagttgtcctgcaagtccttcggcataaccgacgccaatctcctcgcttcctatcagcagaagctgtcggacatactaggcgccaagccctcgaagggagtagttgtgtagttagcgtggcagg

SEQ ID NO: 3330 - protein, 936 aa, DROSOPHILA
MDAPPPTKPPRGVKYGKDESAGCGFLVNVIKSLGFSETTEERQKEKQKIEAEFKRSDLRLNELVSRHDQQLTQVLPLFSQVSSEVTASRERIHAVKENLGVCKRLLQCRRDELRKMWMDAVQHKYVLEMLEQIQELRKVPQRVVGYTAKRQYLHASKALTDALTTLNGPLQAVEGLSDLRTDLQTRRQQLYQRLHEELVTQVYTNSANEALSSFQRTNSSRLNSSFTRGIGARRSTDRIEANARVRKALAEMAQSFDLDKAEVIEDADLIYPELSMSYFVAIIVESFGMLHKVPDSLETLRVQIQTELLNVVRHTTHQLSVSGATADTNPLLSLLEVIFKQFKAIAKTHSLLLKNYLSVGQKYSVVGPQPYDLTDFWAQAQSVFDKSSHVGTSNNSDAFKEHRRNASDASVDDNLAGQLGGSGKGSTSGLFPHEKKQREKILICTPDQSIITKVYLPLMGYIKEIENFMKCKPGQPCSLHDFLDNYIKDTFLTKGHNRNLQLTIESLSKNQDAWRTIISPEEIKALNLSRPLLQSTVMVERRLMETKNLIQDLPCYSEDLLKMVCALLKAYREICQAAYRGIVQPDSEDKRIYSVAWLKDEDISRFLKTLPNWTDLKTYSQKSRHNRKLHRGSFEPSEEESPLQVQQRNIREAEMLTSNLGEGGITQQEILVEISVLKELAILQESMEWFSCRVSEFANDLRRPLVNGLNAVPAECGADIAVKDGTIKVMTNLALEFDELANTCLLVLHLEVRVQCFHYLRSKSSVRTNSYVGSKDDILEPDRQVQVLTKRLSEMDEAFSATLHPRKTRYIFEGLAHLASRILIQASNYLEHIDQITVQRMCRNAIALQQTLSNITASREVALDQARHFYELLCMEPDEILNALLERGTQFSEMQLLNALQLSCKSFGITDANLLASYQQKLSDILGAKPSKGVVV

SEQ ID NO: 3331 - DNA, 8838 bp, DROSOPHILA
taaaaatgtcttgctgccttactcgtttatcggtctatctctttctcagctggcgtgtgccgttctgtttgtctctttctcccgagctcaaaaatattcaattcttctctagctgtagttctagttgtcctgctcgcaccattttaaacttcctgcttgtggtctggtatcgaatgataattcagctgagcatatggggaatttctttcagtgtaaacataatttttcatgacagaaattcgccatctgtttcgttcatacaatttaaattcgattggcactgccactcaagttcgagccaatcccaaaggatagtcaaattgttggaaaatgggtatttaactaaatttaaaactcttgtagtgtagtgtagttcttttgtaaaaactgtttttctctgttaccaactattttcttttgttgtcttgcgaaattctttacgttcatctagttgcttgttaaaaaatggtttatttgtacttttggcaatgatcttttttcaactcccactaactcttagtctgactttttgtttctaagcaaaaatttctttatttagtttttgttttagtagtattcgttttgttcttgttctgtagttctgtagtttgcttcctgcttgtctttaaaaataactcatttaacagaaatcgttttgttgctggctcttaagaaactaaagttaatagttgattttaaactaactgctcattcagtttagaaacttgttatttttgtgtgatttttgctgagtgaagtgtgatgtatctgggatattttcttgtggaatggtgacaactctggcccggcagcgtcaactgtactctttcaactgcaactctttttccgggaactcttctaattctcctcctatggcacactaaatcaaacgcatttacaaaaataattaaatcctctgtctctgtttcttttctttgctttgagtgaattttcagtcatacaaccctgttcttcagtttaatttcgatttgtttggcggttttggaaaaaaatttcaattactttcctcattatttgtgaagtaaatcgagtaaaaatttagtgctgttatgtatttgtcaaagtttttggtttcaatctagctttttggaataactttgcgttgaaaacttggtaattgaaagtgctttaaatcgaagttcaagaaactcttcttttcaaattcaattcaaatatatctgaaatgtgttcaatttattactatccgatccgcccgattcaatcgtaattcaaacccggaacaggattgatttgtgtggattcttaagattaggcctatgcagcggactccggcggctggttaccagtagtagcccctcagcctgaatagattcaggtctgctgctgctgcggcagctgctgatgcggagtgggcagcggcggcggtgctgcggtgccagtgggcgtgcccggcggtggatggatgagcccactgccaggcggtggaggcagatgctgctgctgctgggcggggcagccaccaccgttgggcgcgttgttcgtggacgaggtcggactgctattgccctccgggtatttccccgaaaccacgcacggatgcgtggggaacagggtcgtccacgacgtggtcgtcagtgttggtgcgtggagggcaaccttctcgttttttgactgctcgttggcctgggactttttggaatcgctgctcttcttctttttactgccgctggctccgttctttagctgctggccattggcggaggattcctttttaatgggcaccggctcgtcctgcatcagtgcatcctcgtcgagttcgtccatatcctcgccagccgccttctttatcagtcgctcgcgctcttctttggctttgttgtctaggtccgtgttgatcttctttacccgcatcttctcctcccactcgtcgatgccatggcgacatcgattgaggttcctgtgctggtagaagatcagggtcatccgcgtggggtgatgtcgatctggccggcgcaccgccgtcgtggcgtgcatctcgtgtttggcgcactctatcaagacactgccgtgattcagagctatggccacgccgcccatttgcggatcctggaaggcctcgatgttctcattgatctcggccacctcgccaatgggctcgattttggtggaattggtgctacctggcgaggcgatgggaggtgccgttgttgctgcacctgctccacttgcgggcgcttggtttccagcacccgggttgccaggtcccgcgtcattgctggatgaatctccagtcggcgtgggcgttgctactgtatcggagttggtttggccattgctcaggtcgggtaatatcgtttgcggagcttcctgttgcagttgttgcacctgctgctgttgctgctgctgctgctgctgttgctgttgttgctgttgctgctgctgctgctgttgctgctgtagcacctgttgctgttgatgatgcagtggtcctggcactggaaccatcgctttctggaggcccacgcccgcggaggctactgacccatggctggatatcaaggaacccgctcctgcagcaggatttgcactgccatagcctgagttcacggaccccgtctgatggtgaccatacatgttccagttgggcgatggcggaggtggcgtgggtggaggcgtctgctgtggatacattccgtacggcgagtacgcctgatgatacccatagttatagttcatattctgataggcatcataggcggagtacgccgaatgcggcggtggtggtggaggcgggtacatctgatagttgttcggatactgagccgtgtactgggccgtatagtcgctgggcggtggctttggcttcacgaatccctcctgcggatggtgcgaggtcgtcagcggtgcgaggttcgtcatcggttgcatggccgtcaaggctgttagtttactctccgtgagattatgatgatggtgatggtggttgaccaaggtagtggagtcgggattctcctcgctgaccagtcggcccttgaggtcaccaggtgccccacccactacgggcaggccaccgggccccactcctcctgtcagcgcggactgttgctgggcctgctgatgttgttgctgcacctccgtggttactcctccgggattggttagattcgaggcgggattactgacgagggtttgatagttgccaggtccatagccattgctcgtttccagctgtgttggggtagccgtaggaggagctgtggccggaagagctcctgttggtgctcctgtggtcgttcctccggcaatggaagtcgccggcggaacacccaattgcggttgagccgtaggagtactgggtgtcagaggtggcacgcctgccaccgttcctcctggacctcctcctcctagtccacccacctgcgcctgcatgcccatcggagcatggggcgttggccactggccgtagtagttccgggagtctatgtaggaagccgtctggtagtcataggagtacggcgagtctaggacagtacttgagatctggttggactgcagctgggcatccgtgaaggtgtcgatcatggtggccatgttcatcaggctggagttggagctcatgagctgtccgggctgattgcccgtgccttggccaccattgctttggggattggcattggaaccgtggacgggtggtgtactgaaagcactgcccgccggactgggattgttagtcactggagtctggcaccgcggcgagggagtcgagggaggcgcggatcccggcgtggaagcactcgaattattggactgattggactttcccttgcccttcgatttgctactagctccatttgcgttcacaccattgccgttctcttttttgatgtgtgcggttcccagggctggtggactgctctgctggttattggcttgggtctgggactgggcaccgttgctggagctgctctggctattggcatcgcccaccgcgtcctggtctccgtctggtggcgccgcttcgtcgccatcctttcgcttcttgccatgccttctgcacggtatcaaaggtgttgatcgaacgcgtacctcgcagggaaatctatatgattgggaggcaaaaaatggaggttcatattagcaaggcactagaataagtacactcagaacaaaaatcgagcgagatccttaggtttcgatcgatttcccttccgagtgcccgggagcggctgctcaaaactcaacggtacactcacttgtccagcatttgcaccgctccggtgcggtgcttgtccctctgaccctcgacgctctcgaactcatccgtgccgtccatcgtgtagagcggcaggacgtggaactgttcgtcgtctgggaggcgggtgtcccggttgccgggcttcagcagcgccacgtgtaccgtgcagccatcctgcatgttgtgcagatccctgtgggagtgggcgcagaagtccaggcaggcggtgaccccggagaagggcttcccgggctccagacccagccggcagtcgctggcctcgtgctcgtactttgtctggttgtcgtaggatcgcggacagacctgcttgaacaccggcgccagcagggtggcaatcaggttcatgtggtcctcgatggccgcctcctcgctctttacggacagccggaacttccgcaccgtcttggagcgggcgtacttgcagccattgtagtacatcgaccaggagcagccgaaggagtacgacgcgcccgacgattccggatcgagtcctgaagaaaccaatatttatatctatcccaatttccatggactggatgtgtggtacataccttggcaggcacaggtgcgattctcattggtggcacatcttcgcgtggtgggcaggccgtacttgttcagcttcgggatcagattcttgtaagcgttatccgcctccagacggggcattccatcccaggccaccatacacactacaatatatgcagctatgcatctggataacaaatatacaaaattatcaatcttgaagaagtagtgaatgatgtaggaaacccacctgtgacccggtcgtttcttgaccaccaccagaatcttctcttcgagatcagcccgccggatgacccatttggccaccgggcatccctgtgaagtcttgccctccttgcccgtgtagacgatcttctcgattctcaactgacgacccgtcaggttgcaacgctcctcgaattctcttcgcaaatccatgagagacgaagccgtgcctaaaccaggatgcattgtaattagtttaaggttctgatgtaaatggattaaggccaaactcacccaaatgtgtgtagtaagtacccggctccggaggattcttgtcggactggaagcactcgcactcgggaatctctgtcttgttgcccttctccagacgatccgtggtgtcaaacatggggttgatcttctcgtgcttcaccacaatctcagggatttcatcgggcttctgttttcccttggctttgcccacaccaccaatgggtttgagcccattgccatgggtgtcgatcagttcatcctcgtcgatgagttcctccttgggttgtatacccaatcccaggcaggttccgtcctttaagtgctcggcggtgggtggacgagtgccaccctgtcggcagcaggagaacccattgttcaggggttttccctcactccccagataggcatagcctccaccgtgtcccagcattcccatgtcctcgatcttgggctccagcatgccgtggtgactcaagtgcggaggagctccgtgtcccaaagcatagcgatgcggcggaatgggataggcgggtatatccttctcgtagttcgtgggcagtggtatgatgctgttggtatccggcttgcggtccagttccatcaagctctgaccatgcccatggatctggtgcggttggttggcaggcggcttccctctggcaccgtaggtggagtgctggtatcccgggacaaaattctgctggaagttctgctgaaaactactggctccggcgccataataggcggagttgtgatgatagccggcgtagtcctgctgcccatgaccatggtgctgttgcacgggctgtccttggccatcgttttggcagaagtccgcgtactggatgaagttttggtagttccgctcgtagccctccattttatttggctgcggaggaccaagtaagccaggctcggtcttgatgtactgcgagtgatagtcctggcccggtggcggtcctccggcggcatgtggatgcgggggatagtgagcactgagcggtttcaggccaccacctcctggatccgtggagtttcgatcacgatcgatctccgccgctgcctccgctgctgctgctgccgccgccgctgctcgactggctttgctgcgacttcgcgacttcttaggctgggcggcggctactggaggatgttgttgtggtggcaccactggcggatcgaccgagtggttgatggtcgtgtgctgtcctggctggtgttgctgcaactgcagctgcaactgtgcatcctgtgatgccggatagccgctaaccacgcttggctttttgaacgagttggcgtggtgcggcttccagatgtgatcgccaccacctccgatcggctcggcagccacttgtccaccaaccgcctgctgttgctgctgctgttgttgcacctgctgcacttgctgcacttgctgctgctgctgctgcaggttgggcagtgggtgggtgggcgtggcactgctcggtccgttggcgctcagcgccgcttcgggccggagatggtggctatacgataaaaaatgaccggtctgctgctgctgttgcacctgctgcggctgctgctgcaggtctggcggcggatccttgggatcgctcttgcgcataatcatcgacttgatgcgtgtgttcagatgaagtctctcaccctgggcatagccctcgccgcccaaagactgctgctgctgttgttgctgctgccagttccagtcctgcatcggtggcgaggagaggtgttgctgctgctgttgttgttgctgctgctgcggtgccacgtagggctgcagcccgttgcccgtgggcgactggtgttgctgctgctgctgctgcagcatgttgctgcgcgtgggtgactggggcaccgcttggttaggtggctgcatgggcgaggaggcgggctgggccaccactgtaggaggtggggctggcgtggtggtgcctccgctgaccactgtggtggcgttgttgttgctggcgttgctgttgttcgtgttgctggtgttgctgctgctgttgttgttgctgttgctgttggtggctggggaaccgctgtaatcgcctgaatacccgttacagttgagtgagcgcggcggcacgctgctcacccgcggatatccaggcgtgtcgtttcccgacatcgtcttattgaggtccgctcccagatgctgctgctgctgttgctgttgctgctgttgttgctgctgcgacggcggcactggtgcggcggacacctgtcctgcgtagctgggcgcgaatcccgccacactctgcagacccacctggttgatggccgacggagccgtggacagctgctggctctggaagtcgtagcgctgcactggcgccgcatatggcgacctaccgtagttgggatcgaatcccaatcccgactgcacatagccgttcgagggatacgcatacgactgcgtctggaagtccagggagttcaaggacgttatggccggtgtgttctgtggtatctgctgtatgaactggttctgccagccctgcgacggatccgcctgccatgtggggtagaaggccatgggtgcctggaaacaaagatggaacgaacattaataatctttcaattatgtgcacttcaagttaaagcaatttgaatgtaaaataaaataagtgaagtaataaccgcttcctggccatttttttatacccatatccccattaattccaggtctagacaaaaaaccaacgcaactcaatgccattacctcctttgcaacaccattcataaataagcattttggccataaaaacagttgaaaactgacatgaattatgtagccaaagctagcctggattggccagtcataaatcatattttgtgtgccctaattaggctcagtctaattggtagcaagctccaaaacccaaaacagaaatttcctttttgcctgagttacaacttccgcggcgtacacaaaacaccactgttaattaacacgcctcaaattatgctacatttttgctccctgaataaacaggaagcgccatgaaaggaaataaaacgagaaataagccagaaaaacaaagccagactgccggccagacccaaaaactcaacccgttttcatttgcatttttacgagcgcgcagaaaagttatgaaagtgaaagtggggagcagtggcaggcggccacaatgaaattcaaataaaatgtaaaaaattaaagcacacacaattcggattacacataaaaaaaaagtaattggtatgctttgaagatactcagcactttatataagtcaagttctcacataaattcaccttattgtgcccatcttattttagaaatatgtacacttcaatgtattttaagtaagtagttgtgatcgacacatttttttgcctcagtgcaggcaagttgagttgccaggcagctggcttcctgcgtctgaaatttatctgcacctggctcacgtgtgtgtggttttgttttcaaaagcatttagcaatcattgataaaaatcgacaaaatctttatgaatgaatggggaactatatctactatatatatatatatatataca

SEQ ID NO: 3332 - DNA, 5027 bp, DROSOPHILA
gcacccatggccttctaccccacatggcaggcggatccgtcgcagggctggcagaaccagttcatacagcagataccacagaacacaccggccataacgtccttgaactccctggacttccagacgcagtcgtatgcgtatccctcgaacggctatgtgcagtcgggattgggattcgatcccaactacggtaggtcgccatatgcggcgccagtgcagcgctacgacttccagagccagcagctgtccacggctccgtcggccatcaaccagatcgatcgtgatcgaaactccacggatccaggaggtggtggcctgaaaccgctcagtgctcactatcccccgcatccacatgccgccggaggaccgccaccgggccaggactatcactcgcagtacatcaagaccgagcctggcttacttggtcctccgcagccaaataaaatggagggctacgagcggaactaccaaaacttcatccagtacgcggacttctgccaaaacgatggccaaggacagcccgtgcaacagcaccatggtcatgggcagcaggactacgccggctatcatcacaactccgcctattatggcgccggagccagtagttttcagcagaacttccagcagaattttgtcccgggataccagcactccacctacggtgccagagggaagccgcctgccaaccaaccgcaccagatccatgggcatggtcagagcttgatggaactggaccgcaagccggataccaacagcatcataccactgcccacgaactacgagaaggatatacccgcctatcccattccgccgcatcgctatgctttgggacacggagctcctccgcacttgagtcaccacggcatgctggagcccaagatcgaggacatgggaatgctgggacacggtggaggctatgcctatctggggagtgagggaaaacccctgaacaatgggttctcctgctgccgacagggtggcactcgtccacccaccgccgagcacttaaaggacggaacctgcctgggattgggtatacaacccaaggaggaactcatcgacgaggatgaactgatcgacacccatggcaatgggctcaaacccattggtggtgtgggcaaagccaagggaaaacagaagcccgatgaaatccctgagattgtggtgaagcacgagaagatcaaccccatgtttgacaccacggatcgtctggagaagggcaacaagacagagattcccgagtgcgagtgcttccagtccgacaagaatcctccggagccgggtacttactacacacatttgggcacggcttcgtctctcatggatttgcgaagagaattcgaggagcgttgcaacctgacgggtcgtcagttgagaatcgagaagatcgtctacacgggcaaggagggcaagacttcacagggatgcccggtggccaaatgggtcatccggcgggctgatctcgaagagaagattctggtggtggtcaagaaacgaccgggtcacagatgcatagctgcatatattgtagtgtgtatggtggcctgggatggaatgccccgtctggaggcggataacgcttacaagaatctgatcccgaagctgaacaagtacggcctgcccaccacgcgaagatgtgccaccaatgagaatcgcacctgtgcctgccaaggactcgatccggaatcgtcgggcgcgtcgtactccttcggctgctcctggtcgatgtactacaatggctgcaagtacgcccgctccaagacggtgcggaagttccggctgtccgtaaagagcgaggaggcggccatcgaggaccacatgaacctgattgccaccctgctggcgccggtgttcaagcaggtctgtccgcgatcctacgacaaccagacaaagtacgagcacgaggccagcgactgccggctgggtctggagcccgggaagcccttctccggggtcaccgcctgcctggacttctgcgcccactcccacagggatctgcacaacatgcaggatggctgcacggtacacgtggcgctgctgaagcccggcaaccgggacacccgcctcccagacgacgaacagttccacgtcctgccgctctacacgatggacggcacggatgagttcgagagcgtcgagggtcagagggacaagcaccgcaccggagcggtgcaaatgctggacaaatttccctgcgaggtacgcgttcgatcaacacctttgataccgtgcagaaggcatggcaagaagcgaaaggatggcgacgaagcggcgccaccagacggagaccaggacgcggtgggcgatgccaatagccagagcagctccagcaacggtgcccagtcccagacccaagccaataaccagcagagcagtccaccagccctgggaaccgcacacatcaaaaaagagaacggcaatggtgtgaacgcaaatggagctagtagcaaatcgaagggcaagggaaagtccaatcagtccaataattcgagtgcttccacgccgggatccgcgcctccctcgactccctcgccgcggtgccagactccagtgactaacaatcccagtccggcgggcagtgctttcagtacaccacccgtccacggttccaatgccaatccccaaagcaatggtggccaaggcacgggcaatcagcccggacagctcatgagctccaactccagcctgatgaacatggccaccatgatcgacaccttcacggatgcccagctgcagtccaaccagatctcaagtactgtcctagactcgccgtactcctatgactaccagacggcttcctacatagactcccggaactactacggccagtggccaacgccccatgctccgatgggcatgcaggcgcaggtgggtggactaggaggaggaggtccaggaggaacggtggcaggcgtgccacctctgacacccagtactcctacggctcaaccgcaattgggtgttccgccggcgacttccattgccggaggaacgaccacaggagcaccaacaggagctcttccggccacagctcctcctacggctaccccaacacagctggaaacgagcaatggctatggacctggcaactatcaaaccctcgtcagtaatcccgcctcgaatctaaccaatcccggaggagtaaccacggaggtgcagcaacaacatcagcaggcccagcaacagtccgcgctgacaggaggagtggggcccggtggcctgcccgtagtgggtggggcacctggtgacctcaagggccgactggagggattcgtgaagccaaagccaccgcccagcgactatacggcccagtacacggctcagtatccgaacaactatcagatgtacccgcctccaccaccaccgccgcattcggcgtactccgcctatgatgcctatcagaatatgaactataactatgggtatcatcaggcgtactcgccgtacggaatgtatccacagcagacgcctccacccacgccacctccgccatcgcccaactggaacatgtatggtcaccatcagacggggtccgtgaactcaggctatggcagtgcaaatcctgctgcaggagcgggttccttgatatccagccatgggtcagtagcctccgcgggcgtgggcctccagaaagcgatggttccagtgccaggaccactgcatcatcaacagcaacaggaagctccgcaaacgatattacccgacctgagcaatggccaaaccaactccgatacagtagcaacgcccacgccgactggagattcatccagcaatgacgcgggacctggcaacccgggtgctggaaaccaagcgcccgcaagtggagcaggtgcagcaacaacggcacctcccatcgcctcgccaggtagcaccaattccaccaaaatcgagcccattggcgaggtggccgagatcaatgagaacatcgaggccttccaggatccgcaaatgggcggcgtggccatagctctgaatcacggcagtgtcttgatagagtgcgccaaacacgagatgcacgccacgacggcggtgcgccggccagatcgacatcaccccacgcggatgaccctgatcttctaccagcacaggaacctcaatcgatgtcgccatggcatcgacgagtgggaggagaagatgcgggtaaagaagatcaacacggacctagacaacaaagccaaagaagagcgcgagcgactgataaagaaggcggctggcgaggatatggacgaactcgacgaggatgcactgatgcaggacgagccggtgcccattaaaaaggaatcctccgccaatggccagcagctaaagaacggagccagcggcagtaaaaagaagaagagcagcgattccaaaaagtcccaggccaacgagcagtcaaaaaacgagaaggttgccctccacgcaccaacactgacgaccacgtcgtggacgaccctgttccccacgcatccgtgcgtggtttcggggaaatacccggagggcaatagcagtccgacctcgtccacgaacaacgcgcccaacggtggtggctgccccgcccagcagcagcagcatctgcctccaccgcctggcagtgggctcatccatccaccgccgggcacgcccactggcaccgcagcaccgccgccgctgcccactccgcatcagcagctgccgcagcagcagcagacctgaatctattcaggctgaggggctactactggtaaccagccgccggagtccgctgcataggcctaatcttaagaatccacacaaatcaatcctgttccgggtttgaattacgattgaatcgggcggatcggatagtaataaattgaacacatttcagatatatttgaattgaatttgaaaagaagagtttcttgaacttcgatttaaagcactttcaattaccaagttttcaacgcaaagttattccaaaaagctagattgaaaccaaaaactttgacaaatacataacagcactaaatttttactcgatttacttcacaaataatgaggaaagtaattgaaatttttttccaaaa

SEQ ID NO: 3333 - protein, 1555 aa, DROSOPHILA
MAFYPTWQADPSQGWQNQFIQQIPQNTPAITSLNSLDFQTQSYAYPSNGYVQSGLGFDPNYGRSPYAAPVQRYDFQSQQLSTAPSAINQIDRDRNSTDPGGGGLKPLSAHYPPHPHAAGGPPPGQDYHSQYIKTEPGLLGPPQPNKMEGYERNYQNFIQYADFCQNDGQGQPVQQHHGHGQQDYAGYHHNSAYYGAGASSFQQNFQQNFVPGYQHSTYGARGKPPANQPHQIHGHGQSLMELDRKPDTNSIIPLPTNYEKDIPAYPIPPHRYALGHGAPPHLSHHGMLEPKIEDMGMLGHGGGYAYLGSEGKPLNNGFSCCRQGGTRPPTAEHLKDGTCLGLGIQPKEELIDEDELIDTHGNGLKPIGGVGKAKGKQKPDEIPEIVVKHEKINPMFDTTDRLEKGNKTEIPECECFQSDKNPPEPGTYYTHLGTASSLMDLRREFEERCNLTGRQLRIEKIVYTGKEGKTSQGCPVAKWVIRRADLEEKILVVVKKRPGHRCIAAYIVVCMVAWDGMPRLEADNAYKNLIPKLNKYGLPTTRRCATNENRTCACQGLDPESSGASYSFGCSWSMYYNGCKYARSKTVRKFRLSVKSEEAAIEDHMNLIATLLAPVFKQVCPRSYDNQTKYEHEASDCRLGLEPGKPFSGVTACLDFCAHSHRDLHNMQDGCTVHVALLKPGNRDTRLPDDEQFHVLPLYTMDGTDEFESVEGQRDKHRTGAVQMLDKFPCEVRVRSTPLIPCRRHGKKRKDGDEAAPPDGDQDAVGDANSQSSSSNGAQSQTQANNQQSSPPALGTAHIKKENGNGVNANGASSKSKGKGKSNQSNNSSASTPGSAPPSTPSPRCQTPVTNNPSPAGSAFSTPPVHGSNANPQSNGGQGTGNQPGQLMSSNSSLMNMATMIDTFTDAQLQSNQISSTVLDSPYSYDYQTASYIDSRNYYGQWPTPHAPMGMQAQVGGLGGGGPGGTVAGVPPLTPSTPTAQPQLGVPPATSIAGGTTTGAPTGALPATAPPTATPTQLETSNGYGPGNYQTLVSNPASNLTNPGGVTTEVQQQHQQAQQQSALTGGVGPGGLPVVGGAPGDLKGRLEGFVKPKPPPSDYTAQYTAQYPNNYQMYPPPPPPPHSAYSAYDAYQNMNYNYGYHQAYSPYGMYPQQTPPPTPPPPSPNWNMYGHHQTGSVNSGYGSANPAAGAGSLISSHGSVASAGVGLQKAMVPVPGPLHHQQQQEAPQTILPDLSNGQTNSDTVATPTPTGDSSSNDAGPGNPGAGNQAPASGAGAATTAPPIASPGSTNSTKIEPIGEVAEINENIEAFQDPQMGGVAIALNHGSVLIECAKHEMHATTAVRRPDRHHPTRMTLIFYQHRNLNRCRHGIDEWEEKMRVKKINTDLDNKAKEERERLIKKAAGEDMDELDEDALMQDEPVPIKKESSANGQQLKNGASGSKKKKSSDSKKSQANEQSKNEKVALHAPTLTTTSWTTLFPTHPCVVSGKYPEGNSSPTSSTNNAPNGGGCPAQQQQHLPPPPGSGLIHPPPGTPTGTAAPPPLPTPHQQLPQQQQT

SEQ ID NO: 3334 - DNA, 3695 bp, DROSOPHILA
ataattagcattcgttagctgtatatgtatatgtgtaaatgatctgtatatataaaccatttgttagtttacatgctcgttatcgtttgtgaattttcatttggggaggcaaaaaaggcactataatctaataagttacgacgattaaaaaattagtttttctttcgttccttctgtatatacttatatattttcatatatattctcattcacttgttcgccgattctatcgattcctaacgaattccgtttcttatttataaactaaatatgcacaaaaattggtgtttcaagaactcgaagtaatgctttcaaaattcgttaattttatactcttttatttatttatcattttcatttttgtgtgtgaggcaaattaagttaggttggagtttttctagttaaagtttaggcaatgaaaaacaagccccaatcgttaaatgcccattaacacgttaacagtattttgacacttaaaccgagtataatgacaaaaaatagttgttagggattaattgttttgcgttttataaatacaatgtaagcaataaattaattaaacaatgacaaaaagaacatatatttatatttatagatacataataaataaaatacacacacagagttgaactgttttaagcttacaatataggttttcgttacatttcgtttgcgttcattattataattattataattttctttcttattttttgatttttcttaatattttgttagacaaatttgtaatgcgcacttagtcgataggaagagaaccaaaaatcgaacaatttgcagcgaattttgtaagctcggcgcacggccaaaaggaaaagtaaagtgatagctagtccatgtggtttgctccactgtgcgagccccaaaggagtcgcacaatggccagatactttgcttcccttttttttttttttttttttttttgtttaggtttgttttcgtttctcttttgtagttatgaatatataagtatatagtatatagtttacattaataagcctatatataaattcattgcttaacatcgctgtacttttaatgtatttatttatctgcatgtttcgggagttttggatctgggagctgctgttacggggacgttgtcacaatttccattcaacagataatcatcaaatgcaggaatcgacttaactatgggcctctgagtgtttcactgatgtttctgctgctgctgctgctggtgttgttgctcctgatgttgctgctgcaactagcaggtacacggataaggtaatcaagttggatacagatgacacatcagataacagataatgacggattcacatagatgttgatattcatgcacttcgattttgcttgctttaatagctcacacatttaatttatcatttgccctttctctactatcgcctaacgctctccttttctatcgtttcgttatatttatatgtatatatgtgtgtatctatgtaaaagtttatttctgttgtttgttgaacctttaaggaaatggaagcggatggatatattatttcttcttgttggtcgcaagcattggggcgctgcgctgcggtgttgtgggtcgcgacgagttcattccgctgtacagatacttggccttcttctcggatggtttcaggatctgcaaatcgaattagatatcaagctgtagtaaaaatcgtagccagcatgcatttgacatctcacctggaatgagcacatcagcgtgtcgtccacggtcatcattccgccggcattgtcgaactctccacagtaattgggcgccgagaacaacgtgaccagttgccgacgcgcaaagaactcatagccatcctccacaacctaataagccaacatatcgttagaattatccagtcaaattactaaattttgttcacccacctgatgtgcacggcagatcaagtccagctcgtggcggttcaaaaacttggagaccacatccacaccgaaggtgaagctcacaccgcgatcattctcgccccaaccctgaacatccttgtcgggatcactccacagaagatcgcacagtaacccggtatccggcacatctgtgggtcgcattaggcgacggatctgctccatgccctgaagatcgggactgaggccgccgtggcagcagaagatcttttcgtcaataatggcggctaccggcagacagttgaagcaatctgtgaaagtcttccacagtttgacattgtatcggcgcttgcactcatcgtagaagcctgcagaaaagggatgatgattaaaggtatattcgaacaacaaatgtggattcggaattaccgtaaatcctattaatactggcgcactcgtggttgccgcgcaacaagaagaagttctccggatatttgatcttgtaggccagcagcagacagatggtctccagggactgcttgccccgatcgacgtagtcgccgaggaacaagtagttggcagccggagggaatccgccgtactcgaacaggcgcaacaggtctgtgtactggccgtggatgtcgccgcagatgatcagcggtgcctccagttccagcaggatgggctgttgcaagaagatctcgcgcgacttgagacagaggccacgcacctccgcctccgtcatctggacctgtttgcccgttcggcagctgcgcactgcaagtaaaccggttgttagtggacttcacttacagatggattcatgaatagatatatatggcaaatacacatagtcaactagagcttagccaacgtttgacgctttagcaacggaccgaacgacagacgagcacagtaactatcgacgcagacacgaggagacgaatccatagttgggttaggatttttaggattttggcgggaaaacaatgccacaagaaatgattgcatactttgtggcgctagcgaaactgcgtgcaggctatagtgagggtacagttgagctgaaaacatcggtacaggtgtattgttcttgacaatatgtatgaaatacatatgactaagtggtatttccatagttcaaaagcataatagcacatacaaaataccaattaaatactggaataaattgttggactagctttctagtttacataatcaaactccgatttaggcttaaacactatagcaaaacgtccattctactcttgaattactagtgttgcgaccacaactgcaagttgtttttaacgtgggcgtcatacaatggcgcaaggcacatgtgtgtgtggttggacttcctggtcttggggataattgcaggttgtcgctgttcagagaccatatctcgaaaccttggccaacaagtgggcgtgtacacatagccccaccagttcaagccacaccacaacgccataccaccttcctgcaattaattttgtgcaaaaaacgctccacagccgggaaaaacgatgatagtgctatcctttatcctgggaatacaagtaggtcgtcctctgtcagtgtcagtgtgtgtgcgcgtgcacaaaaaatttaattaaatttggatagaccaaaatgctggcccagcgcttggctccaaaaagcagacaagccccatccattcgtccttgctccggaagttgtgagccaattctggattttgggtcgagagccagtactcttggcttccaaaaatcggggtagatcaaggtgggagtgtgggtgccggctctgatggccaactgggttgcggt

SEQ ID NO: 3335 - DNA, 1509 bp, DROSOPHILA
atctgtaagtgaagtccactaacaaccggtttacttgcagtgcgcagctgccgaacgggcaaacaggtccagatgacggaggcggaggtgcgtggcctctgtctcaagtcgcgcgagatcttcttgcaacagcccatcctgctggaactggaggcaccgctgatcatctgcggcgacatccacggccagtacacagacctgttgcgcctgttcgagtacggcggattccctccggctgccaactacttgttcctcggcgactacgtcgatcggggcaagcagtccctggagaccatctgtctgctgctggcctacaagatcaaatatccggagaacttcttcttgttgcgcggcaaccacgagtgcgccagtattaataggatttacggcttctacgatgagtgcaagcgccgatacaatgtcaaactgtggaagactttcacagattgcttcaactgtctgccggtagccgccattattgacgaaaagatcttctgctgccacggcggcctcagtcccgatcttcagggcatggagcagatccgtcgcctaatgcgacccacagatgtgccggataccgggttactgtgcgatcttctgtggagtgatcccgacaaggatgttcagggttggggcgagaatgatcgcggtgtgagcttcaccttcggtgtggatgtggtctccaagtttttgaaccgccacgagctggacttgatctgccgtgcacatcaggttgtggaggatggctatgagttctttgcgcgtcggcaactggtcacgttgttctcggcgcccaattactgtggagagttcgacaatgccggcggaatgatgaccgtggacgacacgctgatgtgctcattccagatcctgaaaccatccgagaagaaggccaagtatctgtacagcggaatgaactcgtcgcgacccacaacaccgcagcgcagcgccccaatgcttgcgaccaacaagaagaaataatatatccatccgcttccatttccttaaaggttcaacaaacaacagaaataaacttttacatagatacacacatatatacatataaatataacgaaacgatagaaaaggagagcgttaggcgatagtagagaaagggcaaatgataaattaaatgtgtgagctattaaagcaagcaaaatcgaagtgcatgaatatcaacatctatgtgaatccgtcattatctgttatctgatgtgtcatctgtatccaacttgattaccttatccgtgtacctgctagttgcagcagcaacatcaggagcaacaacaccagcagcagcagcagcagaaacatcagtgaaacactcagaggcccatagttaagtcgattcctgcatttgatgattatctgttgaatggaaattgtgacaacgtccccgtaacagcagctcccagatccaaaactcccgaaacatgcagataaataaatacattaaaagtacagcgatgttaagcaatgaatttatatataggcttattaatgtaaact

SEQ ID NO: 3336 - protein, 302 aa, DROSOPHILA
MTEAEVRGLCLKSREIFLQQPILLELEAPLIICGDIHGQYTDLLRLFEYGGFPPAANYLFLGDYVDRGKQSLETICLLLAYKIKYPENFFLLRGNHECASINRIYGFYDECKRRYNVKLWKTFTDCFNCLPVAAIIDEKIFCCHGGLSPDLQGMEQIRRLMRPTDVPDTGLLCDLLWSDPDKDVQGWGENDRGVSFTFGVDVVSKFLNRHELDLICRAHQVVEDGYEFFARRQLVTLFSAPNYCGEFDNAGGMMTVDDTLMCSFQILKPSEKKAKYLYSGMNSSRPTTPQRSAPMLATNKKK

SEQ ID NO: 3337 - DNA, 3137 bp, DROSOPHILA
aaggatgatatcttggagcccgaccgccaggtgcaagttctgaccaaacgactgtctgagatggatgaggcgtttagtgccactctacatccgaggaagaccagggtaagttgaatattcgtctccagttgcattttgctcgaacgtattcttctctagtacattttcgagggtctggcgcacttggcatcgcgcattcttatccaggcctccaattatctggagcacatagatcaaataaccgtgcagcgcatgtgcaggaacgcgattgccctgcagcaaacattgagtaacataactgcctccagggaagtggctttggatcaggcgagacacttctatgagctgctttgcatggagccagacgtaagagtgattggcccaagttttgtaattcacctttttacttagaaacactttgcacttacccacaggaaatactcaatgcgttgctggagcggggcactcagttctcggaaatgcagctgctcaatgccttgcagttgtcctgcaagtccttcggcataaccgacgccaatctcctcgcttcctatcagcagaagctgtcggacatactaggcgccaagccctcgaagggagtagttgtgtagttagcgtggcaggcggcgggtaaaaccaattttaatatccatacttttgtttacatcggctgcaggtgtaagtgcaaattgtatgttagtgttaagctcaaaataattgcgaatgttctgaacatgattggcgagcacttagtgttgtagccgtttgtaaagatacatattctaaagatcattaacagtacttcaatggcctatacacaataaatgagaattcaacaacgatgttttgactgtattaatttgctgcatctagtgtatctaattttaacattttttcaactcaaccggttgctaaaccgtttcagcaatgttatttaacagggtttgagtgctcgctaaatggacttacgaaatgagtatggaattttcgtgcagcccagtcatggtcacgctgcctctctgaaaagccgcaagaaaataaaaataaatatatctttctagctattattattgttgttattattaacaaaaatgtcggaaacagttgatagcacagaggtaaagtcgccgtcgtacgacttatccaagttccaactgaagcgaatcctaaccaacaacagcgttaggaaaagtatatccctgcttggcacttttccggatttaggaaccgatgatgccattgttgttttcgagaaaaatggtataaaagcgtaaatgaaagcaactaatgttcgctacagtataatccttactaaccgcagcgtaccgggaaagcgatgtggccacggcgtcatcagaagagtctcccaagaagcctagctattttaccgcggacctgaaagttgacactgagtttatcaacaatatctacggcagttttcaggttgtgccgacccaggatttgtgcagtaaatattagattcataattcatactgataaatcatagatttttatcattcatttcgcaggtgtgaaaagcacagtcatttatcccgccaccgagaagcacatcgagaaatactcagtatctcaaaagtatctcatccgggagactcctgatctctaccaaagaataactcttccatatctcacctcaagtcaattctccctcgagtgggtctacaacatactcgagcataagcaggagacggaacgtatcgtgtacgaggacagggatccaaagactggctttatccttctgcccgatctcaaatgggacggacgcaatgtggaaaccctctatctgctgggaattgtccacaagcgcgacatcaagtctctgcgcgacttgaatgaaagtcatctcgatcttttgcgcaacgtgcgccaagcgtcgaaggacgcaattgccaagctatacggcattaatcccaatcagctgcgcatgtactttcattaccagccgtccttctatcacctccacgtgcacatcaatccagtacggaacgatgcaccgggcatatggtgcgagaagtcccacatgctggacacggtgatcaacaacttggagctgatgccggactactatcagcgagccaccttgccgtttgtcctgtacgaaggcaataagctgttggatctctatgagcaggagctacccattagagcgctgacagtatcgagcgacgataaggagctccctgactcagactctttgaacgtcgctccaccggaaggctttagcgatgaggagccggaggagaggcagtgcaagcgcataaagttgggctcgccggagcccaaggaggccgagtccgctgttcaggcgtgtgcctaaactggtattacttaatgagaaagctaaccctagatgttgcctatcaaaaatacatcctacttatgatcattcaattcaaaataaagttattttcaaaaatttcgtttgagagcacttgctggaagtacacattattaattgttataaaatattcagaatatttcttttcgtttcacacatttaaaaacagtcgcttaagagaaaacgattgaattctgagtacctcgtgaatagttgtgatgcctcactgctttgacatcattgtaatggggttcgcaaataagaatcatatatacactatttaacttcatttattttttcatatacaaaaatcacgtctgatcgctatgaccgcaaaattacaagagcgaaagaaagaatacagttcagttcaattagcatcgatatataaaatgttaatccgctgttaagacagctgaagcaccgggtgactccgctcataatccgtacatgccgcccgccaatgcgtcgtccagcatgaaggctccttgtgattcttgatccgtgtgttgatcataattatgttgaaatcggaagtggacaaagctttgtgattgacctcttttgaatgccagatttcgtctttaatgtaaccactctgactagcgagtccgatccagggtgcagttcgacgactcggcctatagtccatttagctggtggtagattatcatcctttataatgactaagtcgttgatgttaagattatctttgatttggcaccactttggccgagtttgcaagtgtgataaccaatcacgagaccattgagaccag

SEQ ID NO: 3338 - DNA, 1329 bp, DROSOPHILA
tcatggtcacgctgcctctctgaaaagccgcaagaaaataaaaataaatatatctttctagctattattattgttgttattattaacaaaaatgtcggaaacagttgatagcacagaggtaaagtcgccgtcgtacgacttatccaagttccaactgaagcgaatcctaaccaacaacagcgttaggaaaagtatatccctgcttggcacttttccggatttaggaaccgatgatgccattgttgttttcgagaaaaatgcgtaccgggaaagcgatgtggccacggcgtcatcagaagagtctcccaagaagcctagctattttaccgcggacctgaaagttgacactgagtttatcaacaatatctacggcagttttcaggttgtgccgacccaggatttgtgcagtgtgaaaagcacagtcatttatcccgccaccgagaagcacatcgagaaatactcagtatctcaaaagtatctcatccgggagactcctgatctctaccaaagaataactcttccatatctcacctcaagtcaattctccctcgagtgggtctacaacatactcgagcataagcaggagacggaacgtatcgtgtacgaggacagggatccaaagactggctttatccttctgcccgatctcaaatgggacggacgcaatgtggaaaccctctatctgctgggaattgtccacaagcgcgacatcaagtctctgcgcgacttgaatgaaagtcatctcgatcttttgcgcaacgtgcgccaagcgtcgaaggacgcaattgccaagctatacggcattaatcccaatcagctgcgcatgtactttcattaccagccgtccttctatcacctccacgtgcacatcaatccagtacggaacgatgcaccgggcatatggtgcgagaagtcccacatgctggacacggtgatcaacaacttggagctgatgccggactactatcagcgagccaccttgccgtttgtcctgtacgaaggcaataagctgttggatctctatgagcaggagctacccattagagcgctgacagtatcgagcgacgataaggagctccctgactcagactctttgaacgtcgctccaccggaaggctttagcgatgaggagccggaggagaggcagtgcaagcgcataaagttgggctcgccggagcccaaggaggccgagtccgctgttcaggcgtgtgcctaaactggtattacttaatgagaaagctaaccctagatgttgcctatcaaaaatacatcctacttatgatcattcaattcaaaataaagttattttcaaaaatttcgtttgagagc

SEQ ID NO: 3339 - protein, 374 aa, DROSOPHILA
MSETVDSTEVKSPSYDLSKFQLKRILTNNSVRKSISLLGTFPDLGTDDAIVVFEKNAYRESDVATASSEESPKKPSYFTADLKVDTEFINNIYGSFQVVPTQDLCSVKSTVIYPATEKHIEKYSVSQKYLIRETPDLYQRITLPYLTSSQFSLEWVYNILEHKQETERIVYEDRDPKTGFILLPDLKWDGRNVETLYLLGIVHKRDIKSLRDLNESHLDLLRNVRQASKDAIAKLYGINPNQLRMYFHYQPSFYHLHVHINPVRNDAPGIWCEKSHMLDTVINNLELMPDYYQRATLPFVLYEGNKLLDLYEQELPIRALTVSSDDKELPDSDSLNVAPPEGFSDEEPEERQCKRIKLGSPEPKEAESAVQACA

SEQ ID NO: 3340 - DNA, 6197 bp, DROSOPHILA
aatgacctcacaagagtcattcaatcgctcacacggatgagtgaaaagtgagaaggaaaaggagaaagggctttctaagccgcctaatgaatcggtccgccggaaaatgactaagctgtgaaaatgaaagggcaatcgggtggggtaaaagtgggggctagttttgaactcaacagacatacgtacatgctacaaatatgggcactgcattgcagtcgaatcaaagggccaaggccaccaaaaaaaaaaaaaaactaaaaaaaaacccgagtcagaaagccaaacgaaatgtgcaatggcttgcagaatattgggaaaactaaagaaaatcccacatgaaactgcactacttaaaaggttatactaaacaacagatgttgtaagtattggcggcatgatccttcgcagtttacggctattaaaggtagcagggcattatccttatagccgccatatgttgcgttctaaaaaaaaaaaaaactataatgtgcgtctgcagccaagttccaccctccaccaaattaattaattagcataaattatcaattaaaatgcgctcagtcagcgattcgagtcagttgccgacagcgggcgataggggaagtaaattccggtttcaggatcgctgcaaccacccctaccaataatgcatatatatatatagttatatatatatggagtatatatgtacatatatggtggtgaattcgagcgtcagctggcacctatatcagcattttccactccccgatgcattttagcgctattaatcaacttccatccccgaaaaatggattttatctgcttccaaatggaattaacttttgaataacttgtgccaaaagctacgattatctgtttatatgccgcttgtttattttgttgttaaagttatacaacttgtactctttatttattactcttggcttaggctagaaaaaaaaattattcaagttgatttgaatataaatagtgttagtagtaaatagcatattgaagtagtgttcgaaaatttatatttgggcatacgaaaaacgcaagttggttaccgaaactacaattttgaaaatacaaaagaaaaaaaaaaacattacaataatttagaattgatttcaattgaatacacgtttatgtttgtgttagaagcactatatagagtttcaagatccttaacctctatacataatcctcatccgctcagatctccaccacatagcgactgctgcccgagggactaatggagtagtagctattctctgaaagtgaatttatattgttttataaacttcattcgagtaattgtatggaaaatatctatgaattaaccttaccttcgtcgctatcgaagctatagaaattgtcatcatcgcgggtcatggaacgtcggctacgtcgttgatgctgcaggatttgcgatggattctgattgggattggtactgggattcggattggaattcgagttggcattgagattggtgggcgtggaactgcgacgactgctgggaaaggatagcggcgaaccgtactcggatctgctgcaattggagttctgtcgatccagggccagttccatggacttcgtcttccttgtgtcggtgatctcctgatgagcagattgatccgattgatccgattgctccaattgccgctcattgttattgttgttgttgacagttatttggggtatgaccacagcgcgattcgttggtgtcaccgagtcgacggctcgtctttcgattatctgaagctccagtatttgctccatctccggttcctcatcctcgggctgggcacatcgctcgtactcctcgctgtgcatccgccgtgggcaaagtcgtggtctgccgccctcgaagcgggatatcagcttattgaccttgcccacatcgcctggtcgcacctgttcgttgtaggtgaggcgcagggaactggttttgaccaacggcttggccggtctcgacatggaggcgcttctctgcgccattgaccgggtgacgggagccggggagggaagcgatgccaccgatggaatagtttcgaccgacggaggcggcggtggtttgctgactggcagcggcggaggcactgcatcgtaaatgggaggcgtggctgggcgtttcgtaggcggacgtcgctgtggtagtggcggcggtggcggtgattccgatggcggacgctccgagggatctctctcctcctcctcctcctccgaatccctctccgcctctttgtcctcctcctcctgcgccataaggctctccctactgttcccgatctgtggactctgcacccgtatccttgtgacccgcgaacaactgtcgtccgcctcctcgccactggtatcaatgctactcccagcactgatcctcaaaacgggtgcatttcgcagggcctcatcgaaatcggcaaaggcagctgatccaccggccgatgcctcgaatatatcgatgctcttgggcttgtacaaagctggagctggccacgatgtctgctccttgaagccggcgatgatctgttcgttgggcaaccaggcgctggtctcagattttggcacgattttgttgcccccagcaggagttttgaattccggcgatggtgatctcttggtcacaggctcaccacgcggattgcctggagagtacgacatgcttttttgtggtccagaggctgaaattctgatctccggatggggcgatgtttttggccccgccgctggagaacttttaagtccggaacttcggacgaccggagacatcgagctccccttcgacgccaccgctatgatcagcgtggattcgtaggcatcggagtgctcctgatggatgagcactctgggatagtcctcgtcggcgatctcctccagcgattcactgctccaggcagccgctccgctcttcgacgccgcctgaatctcagccagcttcgccatctggcgagcagcgtgggcggtcgcaattcccgatacggatgattggccccgcttcgtctgatcctggctgtgatcctcctcgttgtcctcctcctggatctggccaaatgcctcctcagcggatatatcctcgccgctgtcatcgttctcgttcccgttcccgttctcagcctcgaggctatcgctgcgatggtaggtggcctccagttcatcatcatcgatttcgatcggttcgtgacccactgtattgggtttcggttgcttggacgttgtcgcgttttgattattggcgttacgctgaaaaaactttagctgatgcaccttctcgttcagcttggccagggtcttctccagctgacttccaacgagcagcccgcccagaactcccgatgcaccaccagtagcactaccttccgctttggtttccagctcttcgggttccttggcaaccttgaaactctttcgccagcgctgctgcaattgctccgtggatgcaaatcgactgagacgagctctcagatttgcagtggagcttctggtaggtgcatctttcgttttttgaccatccggcgttgcttcctcttcgtctgaatctggaactggagccgcagccttggacttaatcttgctcggtcgtttaatggactttctgagtctcttgatgttctgccttatgctcagctttctgctggcattgttttcgtcagcattttctgcagtttttgttgtctcctctttggtcctggaaaactggggtaaattgggcagactgggtagatggggcaacttgttgatgagcaattgcttatagctactgggacgtggtggtggtggtggtggtggattagcttgtggagattcctccgccgctgcctgctgctgctcctcctccatttccagtggtggcttcctgaccttggcgaatctggtggcagctataccgggcttacggcgacttggcaatggcggtgtagcctccatgccgctctcatccgtttcgtggcttatcttgcccctctcgaactgctcgtgctccacgtcgtcgtcatcgaaggtgttttgtcgagtgcccgccaatgttttgattttaatgtcatagttctcggctatctcgcgatccctgcgctccctggccagcttctccgatttcaattcccgttcgtactgctccacatagcgatccacctcgatgttgtcccttcgcactgtcgtttgcttggcaaagatgtgcttgatcctcagttcgctgagactcttgtatcccctctgcaggcgttgggtgaacgtggtgcgtacattcccattctcactgggcgagctgtcatccaatgcaccaacgactggaattttaatgggacttatgggtcgcgaggctctatcgccgctgccaggcgcatagtaatcgtcatccagactaccagcacttcgatacgttcccggctgtgattgtcccagatttgcacggatctcctcctgctcaccctcgtacattagcgaactgatggtggagattctctgtggcgtcctgttgatgaactgctgcgattgaccggccacctgaaggtgcgtttgctgcgctgctccggcgccatctttcgcggatccacccgctgtacctcctcctgctgcattcgatccgcttttggagctgcgaaatatcttgcgaccacgcaacttgggcagcgatttgggcaactttagttgtggcaatttggctatgattaaaagattataattaacatcaaatactatgataaaaggaataaggaatctagcctatactataagtattgatattgattgattctactatatcgaccttggtctaaaaatgacgaatccattgtcctaacaatttcctacctttcaaaccgtccacatcgatgcgttggcatagatttcgaaaatccatagaggaaccaatccgatccgtattcctactgcgatttggctccaagtcggagctgcgttgctccaactgcgtttccgattgcacctgatggatgtgatgatgatgatgatgatgatgatgttgatgatgagggtagtgctggaactgctgctcctggtgactcatggcaccaagctagcccagatctatttaactatccactagatcagcaatgcgatagaagatcaaaaccaaaaccgatacggaaacagaaacaaaaacggaaactgaacggaattcatggaacgtccgatgcagttcagcattttagtctatttgaagaggctccggcagagaatagtgcagaaaaatacgaactatggctgcgccactggcacctgtcaatggaaaatcgctaattcaattagcatgcgggggatttttcaaccctttgttttggtcgaaataagaggtatttgcagggtgtttcactttaaagcaaacgggtgtcaaagaaatcaaagcatagaaagaaagccacagtttttaaattgttatataatcatttcaaatactttcgtttcgaaaacagtctttgctttgtaagaactaaagtgcaacttgtactttgcatagcaattttcgaattaaagggtacttcgctgtcgacaccctttttgcactatcgttttaacttgttttccatctcatttcgaactatttttatgctaactgccctggcacattttctaaccaggtctatgacgttaccacctcgcatagccaccaaatgtgatgtacatagatgtatgtatgtatatgtatgtatgtacatattgattcattgtgcggttgtgcgtgtggttttctagttttctggtccttcgctgcatttcgtttaccaattgtcacagttctcttggccatttccttcgcgtctgttttcactgtcccaaggcaaatatcgtcgcaaaagtaataaattcgcaataatcgattctcggtcgcctctgcgtttgtttttctcgctgttttctttttttttgtgttcttgcattttagctttttgtttgcctttgtgcggttaatgattcgaaatggtaaaacgcattcgatatcgaaattgtagagtctctttgctcacaaccaacaataagtgtacaaactaaacccttttttttttggtctgattttcgaaatagaaaataatcggtattttgatcataacattggaaataatggttcaaatttggaatgtcatacctcgttgagcttgttatttaaattccaatcgatttgcattcaaattttggaattttatttttttgcaatttttttgcaaattttgatgatgttacaaaaaatgcaaaaattc

SEQ ID NO: 3341 - DNA, 3915 bp, DROSOPHILA
cgtatttttctgcactattctctgccggagcctcttcaaatagactaaaatgctgaactgcatcggacgttccatgaattccgttcagtttccgtttttgtttctgtttccgtatcggttttggttttgatcttctatcgcattgctgatctagtggatagttaaatagatctgggctagcttggtgccatgagtcaccaggagcagcagttccagcactaccctcatcatcaacatcatcatcatcatcatcatcatcacatccatcaggtgcaatcggaaacgcagttggagcaacgcagctccgacttggagccaaatcgcagtaggaatacggatcggattggttcctctatggattttcgaaatctatgccaacgcatcgatgtggacggtttgaaagccaaattgccacaactaaagttgcccaaatcgctgcccaagttgcgtggtcgcaagatatttcgcagctccaaaagcggatcgaatgcagcaggaggaggtacagcgggtggatccgcgaaagatggcgccggagcagcgcagcaaacgcaccttcaggtggccggtcaatcgcagcagttcatcaacaggacgccacagagaatctccaccatcagttcgctaatgtacgagggtgagcaggaggagatccgtgcaaatctgggacaatcacagccgggaacgtatcgaagtgctggtagtctggatgacgattactatgcgcctggcagcggcgatagagcctcgcgacccataagtcccattaaaattccagtcgttggtgcattggatgacagctcgcccagtgagaatgggaatgtacgcaccacgttcacccaacgcctgcagaggggatacaagagtctcagcgaactgaggatcaagcacatctttgccaagcaaacgacagtgcgaagggacaacatcgaggtggatcgctatgtggagcagtacgaacgggaattgaaatcggagaagctggccagggagcgcagggatcgcgagatagccgagaactatgacattaaaatcaaaacattggcgggcactcgacaaaacaccttcgatgacgacgacgtggagcacgagcagttcgagaggggcaagataagccacgaaacggatgagagcggcatggaggctacaccgccattgccaagtcgccgtaagcccggtatagctgccaccagattcgccaaggtcaggaagccaccactggaaatggaggaggagcagcagcaggcagcggcggaggaatctccacaagctaatccaccaccaccaccaccaccacgtcccagtagctataagcaattgctcatcaacaagttgccccatctacccagtctgcccaatttaccccagttttccaggaccaaagaggagacaacaaaaactgcagaaaatgctgacgaaaacaatgccagcagaaagctgagcataaggcagaacatcaagagactcagaaagtccattaaacgaccgagcaagattaagtccaaggctgcggctccagttccagattcagacgaagaggaagcaacgccggatggtcaaaaaacgaaagatgcacctaccagaagctccactgcaaatctgagagctcgtctcagtcgatttgcatccacggagcaattgcagcagcgctggcgaaagagtttcaaggttgccaaggaacccgaagagctggaaaccaaagcggaaggtagtgctactggtggtgcatcgggagttctgggcgggctgctcgttggaagtcagctggagaagaccctggccaagctgaacgagaaggtgcatcagctaaagttttttcagcgtaacgccaataatcaaaacgcgacaacgtccaagcaaccgaaacccaatacagtgggtcacgaaccgatcgaaatcgatgatgatgaactggaggccacctaccatcgcagcgatagcctcgaggctgagaacgggaacgggaacgagaacgatgacagcggcgaggatatatccgctgaggaggcatttggccagatccaggaggaggacaacgaggaggatcacagccaggatcagacgaagcggggccaatcatccgtatcgggaattgcgaccgcccacgctgctcgccagatggcgaagctggctgagattcaggcggcgtcgaagagcggagcggctgcctggagcagtgaatcgctggaggagatcgccgacgaggactatcccagagtgctcatccatcaggagcactccgatgcctacgaatccacgctgatcatagcggtggcgtcgaaggggagctcgatgtctccggtcgtccgaagttccggacttaaaagttctccagcggcggggccaaaaacatcgccccatccggagatcagaatttcagcctctggaccacaaaaaagcatgtcgtactctccaggcaatccgcgtggtgagcctgtgaccaagagatcaccatcgccggaattcaaaactcctgctgggggcaacaaaatcgtgccaaaatctgagaccagcgcctggttgcccaacgaacagatcatcgccggcttcaaggagcagacatcgtggccagctccagctttgtacaagcccaagagcatcgatatattcgaggcatcggccggtggatcagctgcctttgccgatttcgatgaggccctgcgaaatgcacccgttttgaggatcagtgctgggagtagcattgataccagtggcgaggaggcggacgacagttgttcgcgggtcacaaggatacgggtgcagagtccacagatcgggaacagtagggagagccttatggcgcaggaggaggaggacaaagaggcggagagggattcggaggaggaggaggaggagagagatccctcggagcgtccgccatcggaatcaccgccaccgccgccactaccacagcgacgtccgcctacgaaacgcccagccacgcctcccatttacgatgcagtgcctccgccgctgccagtcagcaaaccaccgccgcctccgtcggtcgaaactattccatcggtggcatcgcttccctccccggctcccgtcacccggtcaatggcgcagagaagcgcctccatgtcgagaccggccaagccgttggtcaaaaccagttccctgcgcctcacctacaacgaacaggtgcgaccaggcgatgtgggcaaggtcaataagctgatatcccgcttcgagggcggcagaccacgactttgcccacggcggatgcacagcgaggagtacgagcgatgtgcccagcccgaggatgaggaaccggagatggagcaaatactggagcttcagataatcgaaagacgagccgtcgactcggtgacaccaacgaatcgcgctgtggtcataccccaaataactgtcaacaacaacaataacaatgagcggcaattggagcaatcggatcaatcggatcaatctgctcatcaggagatcaccgacacaaggaagacgaagtccatggaactggccctggatcgacagaactccaattgcagcagatccgagtacggttcgccgctatcctttcccagcagtcgtcgcagttccacgcccaccaatctcaatgccaactcgaattccaatccgaatcccagtaccaatcccaatcagaatccatcgcaaatcctgcagcatcaacgacgtagccgacgttccatgacccgcgatgatgacaatttctatagcttcgatagcgacgaaggcggatgaggattatgtatagaggttaaggatcttgaaactctatatagtgcttctaacacaaacataaacgtgtattcaattgaaatcaattctaaattattgtaatgtttttttttttcttttgtattttcaaaattgtagtttcggtaaccaacttgcgtttttcgtatgcccaaatataaattttcgaacact

SEQ ID NO: 3342 - protein, 1178 aa, DROSOPHILA
MSHQEQQFQHYPHHQHHHHHHHHHIHQVQSETQLEQRSSDLEPNRSRNTDRIGSSMDFRNLCQRIDVDGLKAKLPQLKLPKSLPKLRGRKIFRSSKSGSNAAGGGTAGGSAKDGAGAAQQTHLQVAGQSQQFINRTPQRISTISSLMYEGEQEEIRANLGQSQPGTYRSAGSLDDDYYAPGSGDRASRPISPIKIPVVGALDDSSPSENGNVRTTFTQRLQRGYKSLSELRIKHIFAKQTTVRRDNIEVDRYVEQYERELKSEKLARERRDREIAENYDIKIKTLAGTRQNTFDDDDVEHEQFERGKISHETDESGMEATPPLPSRRKPGIAATRFAKVRKPPLEMEEEQQQAAAEESPQANPPPPPPPRPSSYKQLLINKLPHLPSLPNLPQFSRTKEETTKTAENADENNASRKLSIRQNIKRLRKSIKRPSKIKSKAAAPVPDSDEEEATPDGQKTKDAPTRSSTANLRARLSRFASTEQLQQRWRKSFKVAKEPEELETKAEGSATGGASGVLGGLLVGSQLEKTLAKLNEKVHQLKFFQRNANNQNATTSKQPKPNTVGHEPIEIDDDELEATYHRSDSLEAENGNGNENDDSGEDISAEEAFGQIQEEDNEEDHSQDQTKRGQSSVSGIATAHAARQMAKLAEIQAASKSGAAAWSSESLEEIADEDYPRVLIHQEHSDAYESTLIIAVASKGSSMSPVVRSSGLKSSPAAGPKTSPHPEIRISASGPQKSMSYSPGNPRGEPVTKRSPSPEFKTPAGGNKIVPKSETSAWLPNEQIIAGFKEQTSWPAPALYKPKSIDIFEASAGGSAAFADFDEALRNAPVLRISAGSSIDTSGEEADDSCSRVTRIRVQSPQIGNSRESLMAQEEEDKEAERDSEEEEEERDPSERPPSESPPPPPLPQRRPPTKRPATPPIYDAVPPPLPVSKPPPPPSVETIPSVASLPSPAPVTRSMAQRSASMSRPAKPLVKTSSLRLTYNEQVRPGDVGKVNKLISRFEGGRPRLCPRRMHSEEYERCAQPEDEEPEMEQILELQIIERRAVDSVTPTNRAVVIPQITVNNNNNNERQLEQSDQSDQSAHQEITDTRKTKSMELALDRQNSNCSRSEYGSPLSFPSSRRSSTPTNLNANSNSNPNPSTNPNQNPSQILQHQRRSRRSMTRDDDNFYSFDSDEGG

SEQ ID NO: 3343 - DNA, 2633 bp, DROSOPHILA
tagcagaaccaccaccaccaccacaactgaacccacaacagaacccacaactgaacccacaactgaacccacaactgaacccacaactgaacccacaactgaacctacaactgaaccgacagaagcaccagatacagatgataatatcgaattgttcggcgacaatgaagaggactctgaggatcaggaggatctagatgatcaaggagatcaggagtatcaggaggttgacccctatggcacttacgatagccaaatccactcaattggggctaatgatgacggcaactggaattagacccaaatgaaaagcagcaaatgatcgattcgatctgttgactcaattgaacatcaataaaatggcaatagcggaactgcgctacataatgtaatgctacataaatgtcttttcgagggttgacagaaaagttatgcatgtaactttttgatgttatagaaaattctgcaaaaaatcgcagtagcagtttttatctgttttatggcctctccctcaaatatctgcagtttttcgagaatgttctggcctcgccaattgttatataatcactagtagctcgtgccattgtaggtcaattccagactagtgcgtctgagtcgagtgtaaataccaattgaacgtatctcgtttagtatatatactatatggtctatttatatgccatatttgtcacagcttccggcttaacggggaaataatcgtatttatttgggaaatcgtagcgatactaggatatacatttaaaagggcaacattatctgaatgaccatcacggaatcatcggcctgcagctgtatctccatccatatcattgtgtatttgtatctttgtcgagttgtgcttaaatcagcgcacaattgcgatgattgttgccgttcgccaattgaattaaagaaaatgcgaagcaagtgacacacaaaggcgacggcgatacgaataaaatgggtggaaatcgaagcgccccaggtcagtccagtatcagtggagtcaacgttcagtctggtttttgtggataaagccaaaggaaccgaatatatcaagatgaatagcttgcaaggatcgctggtcctcctgctgctcgccggagtttttcttcaaagtcaggcgggtctcttcgattgcgaggacaagatacccggacttggagatgtgagcgataagatatcggagattacgggcagcagtagcagttcggagcacgaggtgcgcgacttcttcaagaacgtgggatgccacatcaaggagggagccaagaagctgggcgagaaggccaaggacttgggcacggaactcaaagagggcgcccagaagctgggcgagaaggccaaggtcctgggtagcgatctcaaggatcgcttcgatgacttccgcgacaagctggccaaggattccgccgaggagatgagcaaggatcgcggctttctggccaacgtggagattatcaatccggacatcctcaagggcgagcagcagtgtgggcatggacacattctggatgccttgggcaactgcagcaaattgaggaaatagtccccaaagagtcctaccccctcccgttaacacttaagtttttttatgagttttttttttttatgtgtaaataaaaatggacagtaaaaatacaaatgtggaaaagtccctatttcttggtatgtgaatttttagtgttttaaacaaagtattggaaataatactccaaataagttgtgccatattgcgttgagtaattaatgcaatacccaatcgaaatttaattttctgagatatttgataagtttttgggctataactaaaaaaataatagtccaaatgtggaactaaatacctcgttgagttcgtcattaaatttccaatcaaactgtattaaaaaaatgatattcaaatttttttccattttatgcaaattttgatgatgttaccccttacaaaaaatgagaaaattgacccaaaaattaattttcctaaattcttcaaaaagtgatatttatcgttagcactggtaattagctgctcaaaacagttattcttacatctatatgagcatttttagcctagttatgacgaaaattccgtttgtaaatatcaacttcttggcaaaatccgtttttccgaatttcggtcttcagaaacagtttttttgccataactttaaaaataattgtctgaatatggaatgccatatatcattgtgctcgtaattaaatttccaatcaaactgcgtttaaatatggaaataaaatttttttgccattttttgcaaattttgatgatgttaccccttacaaaaaatgcaaaaattggccgaaaaattaattttcctaaattcttcaaaaagtgatagggatcgttagcactggtaattagctgctcaaaacagttattcttacatatatatgagcatttttagccaagttatgacgaaaattccgtttgtatatatcaagtttttggcaaaagccgtgtttccgagttttggtcatcaaataatcagttatttacatattctttcatctttatgagcattttcagccaagttattacgaaaataccatttgtaaatcagtttattctttggctattagctatttaaacgacaaaaaagcgttagtatcga

SEQ ID NO: 3344 - DNA, 633 bp, DROSOPHILA
gtggagtcaacgttcagtctggtttttgtggataaagccaaaggaaccgaatatatcaagatgaatagcttgcaaggatcgctggtcctcctgctgctcgccggagtttttcttcaaagtcaggcgggtctcttcgattgcgaggacaagatacccggacttggagatgtgagcgataagatatcggagattacgggcagcagtagcagttcggagcacgaggtgcgcgacttcttcaagaacgtgggatgccacatcaaggagggagccaagaagctgggcgagaaggccaaggacttgggcacggaactcaaagagggcgcccagaagctgggcgagaaggccaaggtcctgggtagcgatctcaaggatcgcttcgatgacttccgcgacaagctggccaaggattccgccgaggagatgagcaaggatcgcggctttctggccaacgtggagattatcaatccggacatcctcaagggcgagcagcagtgtgggcatggacacattctggatgccttgggcaactgcagcaaattgaggaaatagtccccaaagagtcctaccccctcccgttaacacttaagtttttttatgagttttttttttttatgtgtaaataaaaatggacag

SEQ ID NO: 3345 - protein, 162 aa, DROSOPHILA
MNSLQGSLVLLLLAGVFLQSQAGLFDCEDKIPGLGDVSDKISEITGSSSSSEHEVRDFFKNVGCHIKEGAKKLGEKAKDLGTELKEGAQKLGEKAKVLGSDLKDRFDDFRDKLAKDSAEEMSKDRGFLANVEIINPDILKGEQQCGHGHILDALGNCSKLRK

SEQ ID NO: 3346 - DNA, 6197 bp, DROSOPHILA
gctgtccacaattaaaactgcccactctattcgaagaatccgagcactccatgtaaaaagttttcatggttatcactttgctccctgtgggggattttatttttcatggcttttcaattttaattgaaatttatgcgccgggcctcaaaggattctgttcacactacctcctgccatttattttcggtcacgtgctcattcgccaaaaagagaaagagtgttgcaaattgttggaaatttcgaaatttacatggacaattcaccgggcgcacaaaaaaggggtgatcctgtgatttacagcccgcactttcgtaatttatgagccgcagcacttgaaaaacaaagccaaaaaccaaaccgaactgaagtgaaacaaacgaaaaaccgggaacatggaaagtgcatgcaaaacattttgtggcgccattttattgtgcttttcgacttgttcatgtgtaaaatttgaaattgttgtcaataattaccctaatggctgccgccccattttcttacccctcgaaaaatccaggcagttaatttggagtcctcgggcatcgtcgccatttgtaattaagcctaaaccgttaatatttcagccagataagagcaactgcatccccaactccgcacccaagtgcccataaattcacggccagaagttggtccttcgcgcaggatcacaaccaaattgttgggcaactttttttcggttcgggtgttaatttccaggcagatttttccttatctcagcgagcgaaagtgaaaatttcccggccatccttttcgaggccacttgcttttcccgcctgcattggcaagaatttaattagcataccgaatcgttaacaagattggaaagccagtgagttatgcacaagttttgcatttaagcattgtggggtgcgaagggttaatcctttgaaattggaaaattcggtataatttagaaataagttgggtttgctgcaaattaagacgcagagaatgacaaggtaaatttggaagcgagacatattgtaaattgtttttatttttaacatagaataacaaaaaatctacataggtctcaaatcgttcttataacaaccaaaatgtgtatagtggtatgtataaatatgttttaagtaagtttaataggttattttttaatgcaaccatacaatggcgaaacatataactacgataatgtaattttattcaacaacaaatacgctaagatgcaattacacaaatccaaattttagccgatcttaatatctggaaacataaaataattatattagttagttgggtcctccttcacaatgaaattcaattgaaaacttactgttatgatggatatttatgttgattttaggaaacttaattttcggttttcctcttcgttttggagctgcgcagacattttgcgaggaaatgaagagtagaacggcgactagaagccagcagaatttaaagtatatcattgtgatagtaatataatccggcgattttgtttctgagctgagcgttgaattaacactgaagctgtggcggggatgcctcttgattaaatatttccgattcaactgctaatgacatcataatctcccttatcagcttggtttttaccgaagaagagcttgtcgttgaatcgaaaggtgaacccccgggagctctaaaaaaacccaaaacagctgaatcggcgttgctattatttactttgagtcgtattttatctgtattgatgtcgaagaaaatatacaatttagctgagcgaaaacaataagaaattaaaacatttgtttggttggttgtatattcatgttttattgagagtttttagggtaagcaggcaaactgaaaatgtatcgcagtattgcagtatttctgtaggtgtttgtatttttgaaaccacctgaaattgattaaacatgtagttttgaaaatgtacgtttcactcacctatgtctgtgttgttgttttgttggcaacgggcgtgtttttattggttttttatcaataaatcggaatataaagaaggaaaatcccttaacccattgtcaccccaacacccaataactacataaacatgaataaattgcatcataagcgacccaaacaaagcattatgaatctgaacccttcaaacagccataactattcattatcgacgcataaacgacccttgagcactcataacttcaatttttattaaataaacaggacaaagcgatgtgccggaaaaatgtcacacaccatatatagggaatgagaatatagcgaatctgcagggatgtgccacatccttctgacccactaaagtggatctgcgaatcgccggagaaccctttccctgcccttcgcatcccctgcctcttcatccggcgtaattcaatatttgactagatgagatttatggccacagggtgtagcgatttcctgcgtggcaacctcgtcctcgccggcgtcctttcgctttatttgtgcaaagcataatttttgatttagtgcgatttgtgtcaacgggttgtgcagcccaatagtttcgcaatattcgcctaagtgaaagttttccccggttttgtttgccatccagcggatatgagaccgcatgctgattgtcaatctgaagtgaggggtggagttcaatgtgaccgaaaccctttctctttttttttcagccggaaacggatgttctgccagcggaattcgcataaaactttactattatgccgaatattttgccgaaaattgaatcgcgtggctgccagaaaattactttgtacgccaaatcgcgagggaatccgaggatctacgagggtgactccggcaggtacggcactcaggctacaggactcaggatgccatagatgataaggctcaatggcgccagggcaatttgccgccagaatttgcatacacacaacgcgcgaaaaagggttgattcgcacgaccggaaaagcgcgacaagcgaatttattacaggttgcattagatttaattagcgagaggagcgtgcgcggaaaagctaatacttcaacgctcgagatgaagttatggttcgcaaaggacttcttttgaaagctgaaagcacattttactgataaaatgcacattttcggaagatgtaatgatatgcgaaactctgaagagagatattgattgtaaagaatgtcgttccttcaatagaaaccctaatgaaatatgatgcattggtttcaaaaccacatgttttgccaaagaataaaggaattcagaattctgagttttgagatccctttcgtgaagcccgtttgaacttgaaggaaggtcatcgaaatcctttaagtgtaaccagtgttacggtatcattgtgtttttagtatcatctaagccaggttctttaagtgtaaccagtgttactgtatcatattgtttcgaatgctgtaagcagaatcattgtgagatctggtgttatgggttaaaaagagttatctttgcagttgggcgagtcctgtataaatgtctacttatcaaaaactctaaatacctcaagataaggtgctgaaaatgaaggacaagtcgctgtaattccttaagtttgatgtttcgtcaattgatatatcctgaaaatattccttgttagtctgaaaatcatgccatcttttgcaacaagaaaagcatgttagcattttaaatctagtatgctaggctacacctacagtagcaacttacttcctctggtattggaacccttttctcatcagcagtttcctggccaagttcgtggtctcagcctcctgtctccttcattcccatagcccaatcccgaatagctggcatgcaaaaagttcggcggaagttcccttggactataaggatcatacctgagcatctgttgttgattccactgcatcataggattactatgactgagccaaggattatgggattggttccacggactatcatttgtgatcactggttcctgcggagcaggcacaatttcccgacttacagcagccttgtccagggattttctatttggtgacgtttcttttctaccatttagtacggatttcctatcgagggagtttttcaaacaaagttttacacgcccgaatcgaaaggatatcgttccattcagttcgatcagtttcttgtgcgattcattgtcaactgccatggaaagatgcagtagctcaccgtgggtcaacctgttcataaccctccattccgccgttgagactgggttctgggcctgaatgatttccaagaccttctggctgctggtggttagactatctggaaaatatccgagaacgacattcctccttggcagttcagactcatccattagcttcagcttagtggttactttcgactggatgtggcaaaaattttgtttgaaccattctgaggtggaggagttggaacaagtcacaaggagccatcctcttcgagccacacatccctcgaactggggcttctgactgccagatttctccacggtgacgtcgataatggcctccttgatcatggtcatttgctcgctggtcagggaagtcccagcagactccgcagctaagccgattctcacgcactcaactaaacccgaggggtacggattggcggtttggttttcataaggatcgggtaggagtcccttgactatgggaagagcttgcaccacctccagagccttttctctggtcagccctccatgaagagcctttcgcagcagcttcttttgcctggttttcagcctgacaaagccaggacccgaatccactgaaggatttcggttgggtgatgcttctggagcagcatcagactcatttacttctaaactattcatttggttcccacgagtgcacgggaaaggaggtcgcccacggcagagcccgaggtgccgcaagaagtccgagttgaaactgcgggtggacaggtgcgcagagtccgccagctagagaccgagttccccctcggccacacatccctcgacgctgtctgttccgtcttggattggggtaatcttccagagttgtcttctcttcgcccgactaccattcgccaggagccttcggcagagacatgaccttgccgaaggacctgtttccggccgccctcacggggagagtgtagtcgcacttccgggtgtacagacagttacggcacgtccatcgggcactgtagctccgaatggtacgcgtagttccccctgtccatcacccggctgacggccatttagtagttgcacctattatttttcaggaaactttaaggattcttctttagtgatatgggagcatttgtttcaaattgtattattggcttgtaacagttaaaacgatttatagttaatgggttttaagaatttaaaaataaataagtgcacaaaaatcaataatacagaaaacttatttataaaaaagtaaatttaagtacttataatacataaataagaaatccattggaagaccatagaaaaacatggttaggtaacattttttataagaatataattgtgaaaaacaatttgttaaattaaaattaaagtaaccctactctaaaagtaaacgtttttatgtacactacatatatgtatgtgtagatgaacaactgattgtgaggctggggaagtgttcctagtgtagcatagaggtcctgcgactcacttagttgcgtttcatctcctcgatctgcttcagtaagagctgcatgcgatccttcatcaagggctgtcccttttgggtccttttgctgatggccttggttttctccaaacgtttctttttataggccttcacctgggcatcccggtccgctctaactttctcccgctccgcagcctcctgggcagccttttccttgcgtttcatgttccgaatttccggtttatttggcttttcctgggaagataatgcaaaaacatgtgtggtgtataccatttcagagtacatacttgattttctcgcttacccctttggccttttggttgttcttgttcttgaagtagggtttctggttgtggcccaccttaccagcgcctctgtttggttttccattgggttttccttggcttttttgcgatctcggtttcatttttgtgttttattaaatataaattaagctgcgaactaatcgatttatcgatggttgcacgcatgttacaatctggaatttaccagcactgccgaacagctgttcacagctacacggagtagtaatcgata

SEQ ID NO: 3347 - DNA, 4018 bp, DROSOPHILA
ccgggtgatggacagggggaactacgcgtaccattcggagctacagtgcccgatggacgtgccgtaactgtctgtacacccggaagtgcgactacactctccccgtgagggcggccggaaacaggtccttcggcaaggtcatgtctctgccgaaggctcctggcgaatggtagtcgggcgaagagaagacaactctggaagattaccccaatccaagacggaacagacagcgtcgagggatgtgtggccgagggggaactcggtctctagctggcggactctgcgcacctgtccacccgcagtttcaactcggacttcttgcggcacctcgggctctgccgtgggcgacctcctttcccgtgcactcgtgggaaccaaatgaatagtttagaagtaaatgagtctgatgctgctccagaagcatcacccaaccgaaatccttcagtggattcgggtcctggctttgtcaggctgaaaaccaggcaaaagaagctgctgcgaaaggctcttcatggagggctgaccagagaaaaggctctggaggtggtgcaagctcttcccatagtcaagggactcctacccgatccttatgaaaaccaaaccgccaatccgtacccctcgggtttagttgagtgcgtgagaatcggcttagctgcggagtctgctgggacttccctgaccagcgagcaaatgaccatgatcaaggaggccattatcgacgtcaccgtggagaaatctggcagtcagaagccccagttcgagggatgtgtggctcgaagaggatggctccttgtgacttgttccaactcctccacctcagaatggttcaaacaaaatttttgccacatccagtcgaaagtaaccactaagctgaagctaatggatgagtctgaactgccaaggaggaatgtcgttctcggatattttccagatagtctaaccaccagcagccagaaggtcttggaaatcattcaggcccagaacccagtctcaacggcggaatggagggttatgaacaggttgacccacggtgagctactgcatctttccatggcagttgacaatgaatcgcacaagaaactgatcgaactgaatggaacgatatcctttcgattcgggcgtgtaaaactttgtttgaaaaactccctcgataggaaatccgtactaaatggtagaaaagaaacgtcaccaaatagaaaatccctggacaaggctgctgtaagtcgggaaattgtgcctgctccgcaggaaccagtgatcacaaatgatagtccgtggaaccaatcccataatccttggctcagtcatagtaatcctatgatgcagtggaatcaacaacagatgctcaggtatgatccttatagtccaagggaacttccgccgaactttttgcatgccagctattcgggattgggctatgggaatgaaggagacaggaggctgagaccacgaacttggccaggaaactgctgatgagaaaagggttccaataccagaggaagatatatcaattgacgaaacatcaaacttaaggaattacagcgacttgtccttcattttcagcaccttatcttgaggtatttagagtttttgataagtagacatttatacaggactcgcccaactgcaaagataactctttttaacccataacaccagatctcacaatgattctgcttacagcattcgaaacaatatgatacagtaacactggttacacttaaagaacctggcttagatgatactaaaaacacaatgataccgtaacactggttacacttaaaggatttcgatgaccttccttcaagttcaaacgggcttcacgaaagggatctcaaaactcagaattctgaattcctttattctttggcaaaacatgtggttttgaaaccaatgcatcatatttcattagggtttctattgaaggaacgacattctttacaatcaatatctctcttcagagtttcgcatatcattacatcttccgaaaatgtgcattttatcagtaaaatgtgctttcagctttcaaaagaagtcctttgcgaaccataacttcatctcgagcgttgaagtattagcttttccgcgcacgctcctctcgctaattaaatctaatgcaacctgtaataaattcgcttgtcgcgcttttccggtcgtgcgaatcaaccctttttcgcgcgttgtgtgtatgcaaattctggcggcaaattgccctggcgccattgagccttatcatctatggcatcctgagtcctgtagcctgagtgccgtacctgccggagtcaccctcgtagatcctcggattccctcgcgatttggcgtacaaagtaattttctggcagccacgcgattcaattttcggcaaaatattcggcataatagtaaagttttatgcgaattccgctggcagaacatccgtttccggctgaaaaaaaaagagaaagggtttcggtcacattgaactccacccctcacttcagattgacaatcagcatgcggtctcatatccgctggatggcaaacaaaaccggggaaaactttcacttaggcgaatattgcgaaactattgggctgcacaacccgttgacacaaatcgcactaaatcaaaaattatgctttgcacaaataaagcgaaaggacgccggcgaggacgaggttgccacgcaggaaatcgctacaccctgtggccataaatctcatctagtcaaatattgaattacgccggatgaagaggcaggggatgcgaagggcagggaaagggttctccggcgattcgcagatccactttagtgggtcagaaggatgtggcacatccctgcagattcgctatattctcattccctatatatggtgtgtgacatttttccggcacatcgctttgtcctgtttatttaataaaaattgaagttatgagtgctcaagggtcgtttatgcgtcgataatgaatagttatggctgtttgaagggttcagattcataatgctttgtttgggtcgcttatgatgcaatttattcatgtttatgtagttattgggtgttggggtgacaatgggttaagggattttccttctttatattccgatttattgataaaaaaccaataaaaacacgcccgttgccaacaaaacaacaacacagacataggtgagtgaaacgtacattttcaaaactacatgtttaatcaatttcaggtggtttcaaaaatacaaacacctacagaaatactgcaatactgcgatacattttcagtttgcctgcttaccctaaaaactctcaataaaacatgaatatacaaccaaccaaacaaatgttttaatttcttattgttttcgctcagctaaattgtatattttcttcgacatcaatacagataaaatacgactcaaagtaaataatagcaacgccgattcagctgttttgggtttttttagagctcccgggggttcacctttcgattcaacgacaagctcttcttcggtaaaaaccaagctgataagggagattatgatgtcattagcagttgaatcggaaatatttaatcaagaggcatccccgccacagcttcagtgttaattcaacgctcagctcagaaacaaaatcgccggattatattactatcacaatgatatactttaaattctgctggcttctagtcgccgttctactcttcatttcctcgcaaaatgtctgcgcagctccaaaacgaagaggaaaaccgaaaattaagtttcctaaaatcaacataaatatccatcataacaatattaagatcggctaaaatttggatttgtgtaattgcatcttagcgtatttgttgttgaataaaattacattatcgtagttatatgtttcgccattgtatggttgcattaaaaaataacctattaaacttacttaaaacatatttatacataccactatacacattttggttgttataagaacgatttgagacctatgtagattttttgttattctatgttaaaaataaaaacaatttacaatatgtctcgcttcc

SEQ ID NO: 3348 - protein, 364 aa, DROSOPHILA
MNSLEVNESDAAPEASPNRNPSVDSGPGFVRLKTRQKKLLRKALHGGLTREKALEVVQALPIVKGLLPDPYENQTANPYPSGLVECVRIGLAAESAGTSLTSEQMTMIKEAIIDVTVEKSGSQKPQFEGCVARRGWLLVTCSNSSTSEWFKQNFCHIQSKVTTKLKLMDESELPRRNVVLGYFPDSLTTSSQKVLEIIQAQNPVSTAEWRVMNRLTHGELLHLSMAVDNESHKKLIELNGTISFRFGRVKLCLKNSLDRKSVLNGRKETSPNRKSLDKAAVSREIVPAPQEPVITNDSPWNQSHNPWLSHSNPMMQWNQQQMLRYDPYSPRELPPNFLHASYSGLGYGNEGDRRLRPRTWPGNC

SEQ ID NO: 3349 - DNA, 32872 bp, DROSOPHILA
gaaacgctagagttggctttaaaatgttcgctaagcgttctgtgttatatgaaaaagtaggtagtcattgtcgactttttctagtgagctgatttaaacaaattttttctgacgtgatccgcttgcccacttcggtcatatttctgtattgcctgcgcgtttgtttataactgtaaatatagtgttataataaatattacattttacaatattttactgttgcttttcgtacacgttttcgtttagatatactcatttaattttttccgtttttgttaattttgtattgtaatttaattgtttccactgtgtctgtattaattttaaattacgatcacttctactcatgcttacgatctaaattcatatcatgtaagttacatttagttgattctttaaccatttctgtattttgcattttattacttcatctcatttcctttgttctttgctccaacatacaaataatttcactttctaaatatatataaacttccatatttgttcgcttctgtgtgtgttgtccgttgtgaggtccttgtaaaattatcaaaaaatctttcagttttcttgctaaaacacgtatgtctttcgttaccagtacgtctatgataatatattattaccttttgtgttttgatacatactttaagattatactttttagcttaaaattggtttaatttcctgtttcctgttttttgtagttcaatacatacatgtcggttttgtataatttgcgctagtttaacaacatttacatatacatacacacaaaaggtttacgtacgcgttgatttaactgcctttaaaattattattttcccgttagtctaaacaaacggacgtgccaaggatatatctttgcattgtccaaattattgatttatataggtttattaaaattaatacaattttcttaaattccatttaacgttatttcacattgccttgctatacttcaatatgcttagggctcgatgtgtttattcgggaccgtttttctaaatactttcttactttttacttttttaaattaaaacatctattagctacgggtatgctatttcttcaattgaaattgcgcacttgtaaaaaactaaagttaagttgcattcatttaaaatataataacagcatcatgtacataataaaacattgccttaattcatttttaacataatttcttccttcgtatgtttttgactttctgtcgttttttaaaaccaaaacacagtacagtgcactaaaaatattttaagttacgatctttctctttttactttaaacatacttaactcctctctactcatcatatattttttgttttgttttttttatgcaatgcaggtttcttacgaactataggtttaaagttaagcttaagttacgatgttgctgattgttagtttgtgggttgtttgtttgttttgttgtctgcgcgtgccataacttaaaatgctattttcgtggtaattttcatgtatatttatttgtagttttttctttatcaattcagtaagattccttaattgtttgtgtctttcccactaaggggtagtgtatgaacagaaaacagttcttagagtgagttgaattgtttaaaattggtatagctcttgcatcgattgtttctgctgattattatgttggattgggtgggtagtgcttctggagtctgccatttcagtagaagtttgcgtgcatttttcttgtactacggattatagtttgtatttgttgctgccaatggatctgaaggtgttgctgctgatgcatctgtatgtagctgtacccgccggaggtacctagtcaggttcagtaaacctgacttcgcatcggattctagatgttcgacttcgagaagcttacacgcaggtgattcgactcggacagctggtggttgtgcatcttaatcagtgctaggacagcctcctccacggacaacagttgaagcagtgccattttacggtccttcctgtaaaataaaaaggacgaggttattagtggttgctccgatagttttaatagcacacatagaagggaaaaaaaattttaaaaatagttgtctgtgcggccattacttacgggaaaaatttgaatgccttaacttcaaagctgtttgaggtgaaagcttctttgatgtcatcctcagagcaggatgagctgcagggtaagagagaagatgttgttagttacctttaaagagtgtcagatttaagggtacgtgggtatgtggcagcgcctgctgtgaggctggttcattgattccgctcggtaggcgcttcgaagagcctgtggtgcgattggctcgattcataaattcacgcagcggagggtagtcaccccgtcttctagttggcatgcgaatcccagccagcggggtgctttgtcaaattttggtagaatagggtgctacgcggggtttccactgctcatagctataattgtaattgccttgtcgtgccgaaatcaagccgtctcacagcatccataccgaagcagtacccgaccacgcctactgcccaatctgattccctcaggcacagacagcgcattgtcatgccctgtagaatacttacggaatgttgcttaaatgtagtgtcgccgacggcggatagatgttctggtagttcttgcttcccggtttcttgaagcggtgcaacggattttgcgagtagtcacgtgtgagtcctgcgtccggctgtccctccttgggcagctggacggcctggtgtttgcttgccatcacacgtatcggctttccccataaacgtaatttatcaaggtgagacatggctgtggagcagaaagtaacacgttaaaatgtatacactagggaaaagttttttggttgttagatgagtctgtatatggaaaatgtggctgtgtcaatatatatgtatttgtaccaatgcaatttatttgctgtgacacaagctataaaaatactcctgaatctcagaaagaacattgccaaaaaatttgtttttgatccaaacaatatatttagaatattatttttattttatttaacaaattaaatctaaacctgatgaatttgatgagttctagctaactgtgccttcaactcgatttttactttgtaacttcgagaataataacgaaaatagtatagtcggataaacaacaatgttacgtattgctttaaaccaattacaaccttttttatattaaaagtacggtcctttcctcagtgtagtgaaagatcccgaccaccagccgtcgaacaaagtcaacaataagggcaggcaaatatttacatactcagatgtaactgcaactttatcaatgtcgtctgcctttggtgatttatacgagctgaaatgcttgtttggccgtaaaagtattaccaaacaaaagtttgccatctccaggctcttttccggcgcatttccaatggactttgccttatttctcatattctcagaagccataacacctgcggcttggatggaatgcatgtgcagtactcaaatacatttcaatctgccttttcatttcgatttcagtttcgattacgttttatttaatttaagttcctgccaagtcatccgacagcttaggtcaggccactgtccagaaaaggttctaacattttttaactctcatgcattacattaataaattacatcacattttatcactgctcctctgttttattgtaacgcaatatgcttactcagccgtttattgtttgcctaatggattaagtgattttcaaaaacgaaagacgcaggaatataataaattgtcaaataacaggagcgccagcagtgacaaagcccgccgctgctcgtatggcctaagcatcctttttccctgcacccgtccttgtgtatgacaaacacttgtaataaagattaatgtgcaggcgagacacatttcgaaaaggccaggagcgggttccaactttgcctacagctgcagctgcttctgggcccggctcaaaaagtatcttaaacttttaattacaaagctgagcctgctgaccaacatcagcggcaaaaagaaatcattattaactaacaaaagaaagtagagtggaacatggaatgggaaaaccgaaaagtaagtgaaatgactcggcgccgagtctttgagggtctgcccttgttttatgcatgaagttctgggtttaagacttttaagcatcatacacttgggaccaaccgcactcagaaaatgttactctacaagcggaaggcgcacaggatggggaaaatgtggctcaggtgagcccgcatccggaactagggatgagtttactacccccacctgatagttagttgcaactttcatgatttgaacgattaatgtccagcaattccttgactatgatctacggccgcactggccaggcgctttattatctctggctcgtaaactatgcaaaacatcctctgcccggcgttttccctgtttcgtaattaatagtggcccacagagggccgggcgccaagtcattcaaatagtcacttagcattgtcaacccaagtccgaggaaacttttaccgagctcgacttttagtttggcagcacacgcacacatggcgtatgcgtaatcgaccataatacaaatggcaatgaaatgtgaaagtctgtgtttgttgtttgtttttattgcaaatgcctttatgcgtacgcttatgcaaaatatttgggagtaatttgtacggcaaacaggaaaattatttgctagcagggggaggaggggggaagtccctagctgacagctgggagtgcgccaataaatttcatacatggttggcaatacgttgcgcaaaacttaatcccacccatcctcaccccatcctgtgccccaccacccaacaaaatagtccattacaacatccttggtacgcaaacaccttaaactgcccaccaagtggacgccacattgggtggtggaaagcttattgctttccatttcgtatttgtctattttctggctccttgcctccgtgcattcagattgctgtcgcatttagtcctgggaatgggtgggtgcccattccatcttgaatctcgtagggtcctctttttgccccgatttccgttgacttctcttgcaaaactttttgcgcctttacgctgtaattcgtatgctgagtgtgcaattgtagccgtattttgtctgtggccctcgccataacgcacaccactttacgagacactttcgtatgcatggggagtgcgggttgaccccgggcagctgctgcttcctgctgctccacgttcggtaatcgtctttgtttgttggcgagagttttgggcaaagtaacgaatgaatttgttaatattttatgagtgaataagtgcgcactcccgccccgaacccggcttccattttgggctggttcttgtgtccaggtagctgcttacactttgaaaaaaaaaattggcatcaaatcagaaatcgtttctctcagaccattgtacctcgttactattccaaaaaaaattttaatagtgtagatggatgggctaaaacaaagctaaaatgcagtagtggaagtatttgccatttggcagcccatgcgccacatttgtagtctatatgctatgttggattcccattaatgttttcatatgccctggggcagtttgttcgccgttgtgtgtttgactgggggagtgaaaaggagtggtttgtgcagagcgaaagggatgttgaccttctagtttggcacaataatttgcttgtttggtcaaacagttgactgtttcggtttcgtcgcctcatttgcgtagagttggcacaatagttttatcaattgcagccggtggcaggattttgtggtcttcgaaatgccgtcaatttttcgacgaatttaattaacacagcattacgtatacaccaccgaaacgaattcggacagctgctgatgctgtcactgcgtgcaaatgcgcacaaaggaaaattacccgtaattatgccatgcattttcaagagtagctgttgattagctctacttggcagccccatcacccatccgtttgtttaaccgaattaattaagatggaaaatctcaaagcaggaatgctattgagctgcaagccaaagaatgcaaggtgccccgcccgccaaagcggcttcaaattcaggaagtttttttttgcttacataattataattaaaaaataattgagtacaggacaaagcatattttaaagggaaagcactccacccgtttcgtgacaaggttgcgaaaatagttcgcggtggagcggcggatgtgcgggtgcaactgcgaatatttggtctgcgggttcgtggatacccccgggcgtatttgtgcacctgtgtgtgctgggctgccgagcacttattctctttttatttaaatcaataaacagttgatggcatttattatgcagtagcttacgctttttcaggcgcacaatttgctggcaatttccgcagcgatcgcactttgcatttattgaacagattaaatttatttaaacgttattaacagcagcagcagtcgctgcttgtgcgcacgacatgaaatcgtgacggaaaatataattgataaattacatgttcgaacgattaacgccctgatgacattcaacctgattttcattttcatatgctctcagcaaacttaagtagctaataaaatatgcttcttatgcagaaactgtgcgaaagtggccttgcataataataaagagacggcaaaacaaaggtgatctggccagtgacaagcaaagacaatacactatatgaaaataaatctgagcctactcacaaaggctttagaagcgaggttcaagaagctgataaatttgcatatatgtacaccgcagacactgcattttccttaaaagctgaaacgaaaggacagcggcttcaagaggggactttcgcactgttgttgttttcaattaagcgcctccctgcagggccgcagcactttgacagcttttgagttatttttccaatgaataaataacacaaatgaaagacagcggcggacgcaccgctgagtgggaacaatgaatgctagccagagaaaagagagccgatggacgtggagcgggaggtgctcgctggatagttggcgtgctaaatggaataaaaccaaatcgaaattgaaaaaggtgtcgctgtcagcgctgtcaacgcttcgatcgccttgccactgctgctgctcctgtttttgtaataaagtggaatttggcacgtcggttggttgctcttaacgcgtcgcaatgcgcgacaattttcatttcgtttaatgcgtgcagggggtcagattggattggattgggatccgaagggggcgtccttggccatcggcatgccgggcagcctgacaatggcaaagtgcacacaaataaatgcaataaaatgattggcatgtcccgccgtgcaggagaggaggagcctttgttgcctggaaggcggggaagcagtgggtcttggccaggtgttgctgctgcccaggcgggctggtaataaagcgcttataaaattccatttatgtgcacggccagccatccctcgcttttggccctgttgccgtctctttcgctttaacaatttttattattaatacattttgtttgctgcatttgcagctgcacaacccacaccaacagcagcaatggttacggttgccaaaggaatgcgccgtttggaatttcatgttgccggaattttcattttaaacaagctgcaaattgcagttgctcctttttcgccccgaccctcagcttacggatcgagactcagatttttcattactctcgttttgttgtgtttccgtgtggtatgcagtagatgaagggtatattcgagggttagtgaggtaaaagtgcgtctgcttgacttacccaaataagcttgctggggctccgccatttgtatgagtgccgagtccttcttgttgtacagaatctttacacgttgcacatcgccgtatacacctgcggattggagcagttgagaattatgagtaaatggttgtgagagtagtggtaagtaaagtaatttgggtattgccgcacgaatggtgagcgggccaactaaagaactttgtagctgctgctccggtaaactttctcttatataaaattttacacgtggaatcccaaaaaagtatatactatttaaaagttctaaaacttactgtcgaacaatgggttcggtaagaaattaacttgtttttaagtgtagtacctttttatgctttaagctttgaagtgtccagagtattccctttcattcccctcgactgctttctgaatttttggacatctccaaacggtttacggcgaccgcggaaaaactttacaccctaccaaaaagccataacatgtacaccagatatcttgggcactatcatttttccaccttgctttctttgcctacaacccaagcactcgcattattgccggggggcacgccgttagtatcatgtacgaaactcataactggctcaataagttttctgtgctattttttacgagcttcaattcgaactgcgtctgcttggctacagcttttgcgttggcccagctggcttggcttccttgccgcatttcgttttaaggccacggattttacagctgtcagacaaggtgtgctggtgtgcaacaattcggcggcaccggacgcgttattgaattgtattttatggctttacttacgccacaaactacgcaatataaggtgagctgagaccaagctgtagaactgcattaaggctgaaagcagaatttaaggaagctgctgactctttcctatggccagtgtcttttgctttgacagttggccaagatccggtctattgggtgacccttgccgggcttcacatcccatgtgcagccaatcagcgcaaattcgaagcggggcgcaaattgccatcaagcataaaaaatagttgccggtcgacttggtggccaaagggcaacggcaatgccaatggcaaaaccgaccccaaagcaaacaatgtaaagtgcagccctgcccaagacaacaaatcgaataatgcggaaagtaaattttcaacttcttttagccacacacacgcgcacagaagaggctttacactttgaccaattttacttcgctacttaagattaatttattcccttcttaaatattaagcagcccacgccagttcttccatgtgatgcaggagttcaagtcttttgaaattaagatatactaaagagtcaatgaatcttctagattttttaccagtgcaagaacttcggaagccatgccggctatataagtaggggctatgtcagctactcgaagcgtagccaagcgagcgctgcgctaacaagttacaaaactagcaatggaaatgcaggtagtaaatagtgaggtgcaaggaggagttcgcaggacggagaacgcagttcaacagttggcagtaaatccattttatacagacgactggctgcctgactgactgccttagttcccagttatccgatggacttgacttatgccaaacaccgagcaatatcgtttcgttttttccaggaattcggggtaacaattgcaggcgaggccagaagtagcagcagcagcagacgtcgacatcaacatccacatctgcaggtattggcagtggagcatattgaatgccaggcatgcggctcttctccagtcaccagcataactcggcgtgcaacggggcgtatgagcaacagctgccgtttgccgtgcaaagtgtgcccggtagccacaatctttatttgtattcccagccgcgtccaatagacagagacttgataataatttattatcgtctgaatgttcctccaaaagtttcttttttttgtggctccgcgacactaacgtatgcagacagcgaagccgattccccggcggcccattagtcgcgtgtttgagcatattctatgaagatgaagaattatgcggatggcggtggcatgctggcctgagagtctataaagttgaaacagccctctgaacttatcttcttttccatctccattatagccggtgtcaaaagccaaacggaaattcaaattcaaatcgatagctcccatttaatcacattgccaggaacgcctgtcatactgcgtttagatgctaaagcgatttgttgcgattcattgaaattatttgcacattggatttaatttttcctgtttcgggcactttatcaaattgcatttctgccacaacatgtatcgcataaaagtttatgaaattattatttcgcgcattcataggaacaacaatcggcgcacatataaagagggaaaatcacacaacaacacgctggagctttgaacgcataaaaaatcaattaaacacgtttcgacaatattttcgtcaataatataaatttttatcacgctcttaaaattacagaagcggattacatagcatatgtgcgagtgttagggtatcagagcatgcttcgcagacgatttccagactgattaggtttcttttattgttatgcaaaggcaactaagtcccagcctccaaaagtgggcaatcggatgatatgggctgttggcttgttggtccagctggctgtgtttccggccgagtggggtataggacgatattgaatgcttgacagcctaagcggaatgtgtcaagcgtctaaagagcacgccccagagggcctctgggacctttcaattgggtattcgcctagtcgcaggcagagctaacaaagcgctgtcaaaactaataaaatgtctgactggctgacaccaaaaagggttctgggcctacttttccgttcctttgccctttttgttgcgccgcttgttgctgttttcggctagattaatccctgcgcttaaagtgcgtccttcccggttccagagttaacctctccacttttattatttggtatgcaaacagctttcaggtgaacgcgggctgcgaaccgcatactcattcgcccctcggtcgctccctttctctaaccctttgaagtgccaaattcaccaaccaaaagtggcccgcagcgtctttggcccacctcatgtgaaaatcgctgttacgtgtcctagcgtgttgctattaacataacaaaagcaactgtttgccatttgctggttgacgtttcctactcgattgccagttgcctactacactgatcaaaaaccgggcctgatcctgactgcttgaattgaggctttatacatgacgatgatatgatgatgatgatattcactgagcaatagccgaaacaattagatatttgactcgctaatatattgtctgtgaaataatcgaatctcaaaatatttaaaaaaaaaaccccacttaaatgtgacggcttttattgtgcacttgtttgtagagcacctcctagctcttttaagtgtcactggtggtgctcctgtctgtccgctgtctgcttagagctacttggaaattcaaaggatattacataaaattttagcttgccattcggttgattgcccgtcgagactctggccgtcaattacacgctgggtgcttgctcggctccttgggaagccgtcgagtttatctacatctattggcaccccaataataatacgcttaacgttcgacttatcgacatctctccatctcggctgtgcaacagggcgtattggtatccaacttttccacttcgctctgggctgagcccttcgaagcgtttaatcagcaatctaagctttattagcagtgcaggcggcaggcaactggcgtacgagtggaaggcagataaggagggtgaggagcagaagctgtaacttcagatgcagcaggagtctgctaagcggtctgctgatcggatttacccggctcagtggctcaaagttgccctgtggtgctctgtggtttacgctgcacaaatccggcaacaagaacaacggcacgacagaacagaaacaatttttaagcaattaatacgtttggcaacgtttctgtttactttgagcgataagctccgaactgctgacagaatggatgcaatttgtaaatataaatcaaaggcacagcacacaagggtgaagttccgggtaagcaagcggcttaactcattgttgccggtcattctccatgtggttgcgtttgtttggcagaagtttatatttgggcatttaaactcaaattaaatgcatttgcatacaaataaatgggaagcctgtgtgtggccgcaaacaaacgttttgtgtcaccagagacaaagggtcgagagccagactggttgttgaacacacataccatgcatgcgcattggggcaaaaaaatcaccagagattgaatcgccagtattgagaaagcggaggagaagggtacagctcgtgttgtggcaacaaaatccattatgctgcaattatgcgccacacttggcagaattctcgtagcaccggacaaaaacttgctcaatcgatgtgttttggtaattaaatcaagtacataatggggcaagctaaatggagaaatgcagcgcaagtgaaaagtcaactgagaatcccataaaataataaaacacacacggagctgggggcagctggaagagcaattcaaacagcaaaccccattaactttacaaagttagttaaattcatttggcaaacagacggtagacgacgaaaatccagcacggagactggagacaatccccttttccatttgagaaaccaaccaaccgactggctaaccgaaccaacgagctacaaaaagtcacaagtaaattttatttcaattgtaagagccagcaaaaactacacaatgatcatggctgtgtgtagtataaaaagtatataaatatgtatacaaggaccgagaaagcgttaggtaaaaaccacacacacgcacagagaaaaaaacccatttcttagtccgaaagcgctgaatgtcgagtggtttaacaaaatgttaatatttaaatttaaaatatttatactttcgagacgacaattcgcatttgtgataagagaggttgtcctctttcgaaatattgtggcgaatgtgtgtggattttaatgtccgagggacacgacaagccacgtattttcttcgtgtgcacacaaactatagaaaagcagcaaaagcagcaatgggcgacagcaacaagcgcaatgataactaaataaatggacatttttatagctatgcacttccgcactcaatctttcgtgctgcgtgtgtgttagtgggtgctggagttcatgtgtgtttgtctgtgtgtgcggaaggatgagcacatgttaaagcatgtgttctgtgcatgcatttcagctctcagcccacaggagctcgctctcttaccctctcgccctctggacctgggtcctgtgcctcaacaatggaaaccaacaacgagcacacttaattcatgtaatttcacacacacacagacgcaccaacgcacacgaagacaacggaggagcaacaggatgcacacgtagtggtgttgccaatgcaccaccgctcccgccagagtgcggtttcacttgttgccagttgcgtctgctctgtttttaatttatgtacgtaggggtttccaggacgtcgagtgtattctcattttcattgttttacaatttgtaagcagaacttatgacaggataaatggcagaaggcagaaggagaagactggataccaaaagaacattttccattcctatttcaagcttcctgatggatttgtccctgctgctctgggcaaaaagctattagaaagccatttggtgccagctttagtaggtttattccatttcgcaatacaataaatattgacactgctatatgaaagaccatttctccatttaaatgggttttacatcatgatcgggatgcgctaaatttatttacatttcttgcaggagaatggccttcgaccatctctggaatacgattggtttgcgatagtaatggagtttttcacgaggtccaggagtatgagctctatgagttaataattctgatccacatctcccatctctggcgaatgcattttacgtgcaaactgccagatgcccgatgtatacccaaattaccaaattccaacccgcggacccttggaaaggctttttcagcattttaaacagtttgtgccgcatttttgtcaagtattgctttgttagcccaccgcacccccgtgcctcatccaatactgtgctataaataatacatggcacttttgctgattgcacgtaaatggcgtaaatgccaaacggaagcaagcatgaaaggagaacacagagagcagctacatgaagtaaaggataagcgttggcttcgctcgattcgtacagtgtaaattcaatgaataatcaagtgaactacttataaatagtttaaggagtgtaaatttctgtggaaaacgttgtagccgggcaaagctagacaggacaataggtgcacccttattccagggtagagatcgaaaaggagtcagattaaaaaagagacagaggtcaacagcaaatgaagatgtgtccgcagaggagtgcattaatgcacctctcccactaacagccatcctctagcttggcccggacaacaaacaaataaagttgaaagatctcgcaattaatagagtaatcgtttgtgcagacgtaccaaaaagggtaaagagagcatcaggcgtgaccatctacagagaaaaagagaaaatagagtttgtcgtcagttagcgagagtttcgtttcagatgtattacaaataaaaaacaacaaagtatacgttaaatagaaaacaaaaaaaataatacagcatgatggttctgtagattatgtttcagtaacaggctgggacacagagaaagagatagccaggtagagggagggaaaggggtatctctcaggtcccaacatttactcaatatatctatattattattcgtgtaaaatacatgattataagaatatgaataaatttgcgggaggtaaaaatctaatgcgtgttttactattggattaataatttggcgcataccaagtgaaactaattaattttttatattatatctgaatgattttcttccttgtcgttttagtcactttctaaaatagcagactcgggttgcttatctcaacaatttgaatacccgaccagggactaagaacttaatttccctgtaaaggtccgcacttacctcctcatttaaattcgagacaagcaagacattcgagtaacctcgcattgcaggagcggtcgtctgcagggcgccactgttggccagcgagaaagctgctaagttgggcagtgcgttgttgtatccaccggtcagtggagtgcccaggcccaaggcaaagggcggcaggactccgggggcgcccaggccgttgactgaaagagaattgaacaagagtaagcaatctacccaggctgacaatgttttattagttagcatgctacttaagctctgtgtgaatcgatagcaggtgtaaaagcaaaaaacacaatatttttactaatgccaaaaagaaattagcttatgttaagcctctttacattttaatttggatttttaaattttgaaaaagtgataaagcaacgtcaaaatacttcggcaaaaaaaattagtaatctaattacacagaataaccgtattactttgaacgacagaaataggtcatataaaatattgtgtcggaaaatctcttgattgaaaatcgaaaaagtttggtggaaaagtaaggcgtttgagtggttagcaacttgaagctgaagaaagcaaagaaaaatttgggaaaatgttccgtttgtgttacctattttatcacctgagagagaaggtcgctgacgggcggcgatcaaaagcaaatcattggtgttcatcagtccgccggcggtgggcatgatatccactcccggttcaccaggtggcagagcggggttagtgaagtcgcgcgatttgtcgttgttgtacttaacattcagagccgtcagcttgctgttatcaatacgcaacgtgcagcaaccgttgtatatattctgcccgtccaggagcgacttggcgtgctgggcggaattggcgtccggatattggatgagggcctaagaggggagaggtttgttagcccttagatgtgtggttttgaggataatcaaaatactgaacatcgcaaccttaactcacctggaatgaattgttctttgtgaaggtgacaatcttcagcaccttgccgtagcgctggaagatctggtgcagtatgtccagcgagacggggtacatcaaggactcgacaatcacacggagcacagtattgggtcccccggcagcgttggtgttgccgcccgcattgacggcgcttgtgttttgtaagattcccatggcgctgttgctgtcgcttgagctgtttgcattgttgctggtcgcgttggcagcggcgctaaggggcagaggcgatccgctcgccggggactggacgctgtagtcgctatgggcggtcgagttctggaaacagggagaagagggaacatggtaaagatgttgagtcaatttacaggcgggaatcgcgaagaaaactttttttagttaaaggcgaaacttttgcgcattaatcaaagcactggcagtgcacacaatttatgcattttgccaagttttttagggctagatgactgcgcacttaaaggaatactgtgcgaatttatttataatactattttcttatacctataatttactattcctcttttttatttttaaatgccgttttttctagggatattcaaattaaagcatttccaaagattaaaaaaaaaactagacacatttttttaagtgcacagtatgctaaacgtttgcacggcagcggcatcccctgctactcagaaatcatccgcgataacataaatctcaatcaaaatcaataatatcaagtatcgtaataatataaaaaaacggagatggaaggcagaggcgtctgtcggtgatgaggatgctgggcggatgccaaaaacggttcatagtaggcaacaaaacttcttgcgtgaaatatacacgttctatcggaaaacaatttaatgacattcggaagtgaatttattcctattcgtgctgaattttgatttcgaaaatcataacgtaaacacattcgaccgcccaccgccaccgacccacctgccaccgatttcctcttatcctgtccatttgcgacgcgttttttgtgcgtttgccagcaacaggaaagataagggggaattgaatggaagaacttcacggcagtcctccccaggcgtgctatttgttttttccttcgtctagataaattcctacccatcggaaacaaagagcccgtcgacgtgagcttcgcctttcagctcagagccaaagtttgtaaaaataataaaaattgattagaattgccgagtgccgagctgcgtggctagacagggcgtatgtgggatgttccgagtggcaagagagcccatgatgatgcggctccttcatcttcgattgccaggctggctttagatgcctgagggatgccatcagtggctgttgctgggtttcctttcctttgccagtaatttgatactccactttgcctgattattatgatgacgatgacgttgattgtgtaaaaattgtaatgtaattgttaggaagcgtttgcccatctattactcatctatgttggccctgtataaacagcaaagtcggttagcagtaactacctgtcaatcgggcaatagttaggcaattttgcactttgattgactcagagctattcatttttaggagggtgtaatgcacgcacaattaaaaaatgcaatgctaataataggcatttacatgtggaaattttgggagcacttgcacgcatattaggctaagccattctaattatcctgcaggatattggataaagggagggaaacgggaaagtttagggaccagaactagcaacatcattaaacataacaaatcgttgtgtgtgcggctatgtttgcattggaccttgcttgtcgcggttttgcctgttaatgagtcaattgtgcgtacccctttccatgttgttgtgggctgattagatatgcaagcacccacacccacctatcacaggaaaccactcaccacattgttataatttaatatcgacgggcggactgcttctttgctcccctcctgcataaggccacattcgataagccaaaatgctttgataagcgaaatgtgtcgactacttgctgataagcacatttatcgatcgattcctgtcagtgggaaaatctggacaaaagacacacgtgtccccgctcctcgcctcgggaaaaccgtaattcgggaaactttaaccaggacttcgcatcggagcttatggacatttgtgtcttgtgaactttataaactataatgcgttaagccaagtctctatatggcacaaacagaaactattcacaaaatctgatactgtgtagctcgctaaaggagttcttagcaaacttttgcaatattcaactagctgaaaagaacttggcaattgttttatgattttgatgcggtttttgcataagaaataaacccggaaaaaggctcacaaaaggcacaagctcagggcagacaccgcagctctgaaggcgccaaaaaatattgacgttgctttcacttaaggttttgcataaatatttttgtttcatagcgctttcgtgtgcttctcccattttcctgcgggctgcaagtttattttcattgcaatgtcacactgagtacctttgcttctcccaacctgtaccccattacgcaccattctcccggacaggcacactttaaactgcatggcaggtcctttcgcgcaggaggaggactcaagagtcgtctccccttttgaagagccggctggagcaagagcttaagtgttcgggccaagttagaaagtaaagcagttacagatgcttggccacaatctcctccgtacctccgatcccctttcgactggtcaaaaggagctgccgtttcggcgctttcgcactggagtggggaaactttttttgggcaaatacgactacaagttatgaacttgtgaaggtaagttttaaagctgagctcgggattatatattactttgctgcgagtcgtttatctgttgggtggtttttacggtcaaaccaaagagaagaagttgtccagagcccggcggtttcactgccatcataccacatttgtcttatttatgcaaagggcaaacaaaaatagcaaccgtggcaagtgtgttaaaagccttaaagaaaaacactgcgcaaatgggactataaaaccgaacggcttaaataaatacgagttacgcaaagtagcaaaatccgctgcccaaaaaaaccaaataaatacgcctgcaaaaacaaagtaaggaaaggggaggaaaccacttatgggggcagtcgtggagtaaaactaatcaatacaatgataatattgacagaaccgctgggaaagtcagtgcgtacgtaagttgtcatttgtcgatagtcagttttttgggctctctgcgttgtcgacagttccgcagttgttatcctgccattctcggtcctatactcctctcggatctcacgtaccctgaaacaatgtaatttaaatccatcttcaacacgtcgccaatcaaaacggcaaaaagctttagcattgcacaagtataagcaaacattcgcatccgcacagccacaatcgcgatggtcttgcttttcagcgctgttgtgaaaacaataagattagcttacttttgtttcgacggcgacggcgacgaagagcagtgagcggtcgggcgggcggtaaagtaaacgtggaaataaaatgggaaaacagcaaagaaaaacacaagtcaggcagcgcgcatagaaaaacaaacattgagcagatagcatacagcggatagcgccgcatatgtgaagttatttgcctggcgaaatcctttactgctcatgcctgagagttggacaaataccgtgctgaaaggaaaggctccataagccggtttcctcgttttcttttttttttgcctttcgaacccccgtaatattgacaagctgtcagctagaggcgcaaattaaataacacattgaggtctgtgtcgctgagccctgctcatattattaacaccaaatcaaatgtacggccttctccccgttggcctgttatttgtagggatgcgggcttagacatcacgaataggactttgctaatcagtttgatccttttgtggattaatcgcttgacatttgtcttagttctgtgctatttgtcttagttctgtgctactcgcccaggcttccgctcgagtctccccttcaggtgtcaaacgctgtgtaaattaatcccacttcgtgtttccgcctaattttcacgtgtgtgccattaattgacaattgctgtccgtcacttgcctccttttgtgtttttcttgactgaatcgccattgtttggctggcgggaggcgtccgtaaaatgcggtcctctctgtagccggcaatttaatttaattacaaggtaaccttatcactggagagaaaacgagcacctgcacacccacacctactcaccaaacacatgcaaacacatgcaaacaacaagcgcttagaaagcaagcatttgcatgagcactgagaaaaaggggatcttgactaaatggagacatccatatatgtaaatgtctaaatacggcaaagattttatcattcatttaatatgatcattctaaccatattcagtataataacagcgttagctttcgacaatggtgtgctgttagttccaaaatgcatgcaaaaaaatggtcttagtcagatttttttgggagtgtgtgccagttgtttggtgagtgcagcttgcaccaatcggctgcagtggaccggcacttgcctcggcaccattttcgtcctcccgttgggctggtttggtgtattggcggcgagtgccaattatgatgattacacaaatttgtgttcgcacttgaacgtgcgactcttgttaagctgcgccgatgtgggaagcgtctttactgtgcatgcaacaatttatcaattgtgcgcggctaatgaagccagaatggtgtcgaaggggtgctcgcaaatgttacagtggagattaggctggggattggctgccttttgtggcgaaattatatttcaatctaattcattgtgagacgggggctggccccatttccccgagtggctgtcaaccctttttgtccgtaaaagaggccaggctcaaaaattaatttatcaaaattacccagaacaaaactggcccacagaggcaacagatgcgcccttacagtcacacacaaaacaatcacatgtcaaatttgaaacccactaaacaatgccagttgcggacctttggggttgggtttttggattgccatgtatccgagtagctgggtggctgagtggctctttggtttctgtgggcagctcgttgcggtcgtaaccgcgtgaacttaccagtgcatttatcttcatttctggcatcttagtcgagggacgccgaagcgcgggagtaaaaggggaaaggctaagacgctagagtaagatatcaacaaaaatagtcacagaaagctcgaagaagacggaggaagggagagagaagcgaagcaaaggtgaaaggacatcccaacgacatgacatattagaatcctgttacgcagcagcaacagcagcgttgccggttgactgccaaattgccaacataaatgtcagaggggagaggaaagttggtatgggtggaatggctgcaaagtatgctacgggatttttcatttctgttgcttggttttccctcctatttgttttattttctataccatgcaatcactcagccgttgaaatcacacatgtgtgcgactggatgtctccgcgtctgagtgtgtatgcgtgtgtgggtggaggagatgatttagaaatcctgtattgctgatttgctgttgctgctgtcgtcgcagcttttgccttcaggtgcgtgtcgtctcctctgctagggttaaaatccctgagggccatgcaatggatttgtctctccttgggtggaatgaaatagaatttcccttccccattcgtcagtttaaagcaactttgccaacaggaaattgacgaaaatttgaaatttacggaaatatacaactaacgagggaattaaaaaagatttctcatgcaattgcacaagtcccgcacttgacagcaaacgtcgccggcttctgctcatatgattccttaggttacgcctcagccggggcgtcgacaacaattcactaagcatcttatcttcaggttgccacattgcagcagcaccagcaatggcaaaagctgcaagagctgcaaaagcagcaacacaaacagcaaatgacaggcggcgaaatatgacgcaaaactcagaaataaaggaacagtcaacagtagctgggccaggacgccaaacaatcaactgaatgctgctcaggtgggccgccagacacaggacacaaaagaaaaaagggaaacccaagacaagacattcgcacaatggacacgggggcacaagaaagaaaactgaatgagaaattgtataaatatgttgccagcagcgtacagcacacaagattaaaccttttccactcgcacaaacacactctcctccattttaagagattttccactagagagagcggcggcgttgacttttccactcgtctgacttgtctcacgttgtctgcgggctaacaacaaggccttttaccaggattagtagttaacaagagaaatctgcccacgcacacaaaactagagagggatacatacagccacgatgttgggccgcagccaaaaggtaatcagtgaaatgtaactgtattgtttggtctagctgtgttggtgttgcttctgtttctgcctttgttgctgctgtgtcacctaagtcacaggcccgctcccttggtgtgcttcttgtttcggccctcgtgtcgctgctgctgcagcctcttgacctttttgttgtttgtgttgctactgctgctgttgcgatctctttttaagtagtttgcttttgggctcaccagcaccaaatccaccccgcaaaaggtgacaacctcgcaagggtttcctcctggccggtttattgctgctctcactgcgttgcggttgccccattggcacaccccttcccctcgcgccaacatcccaccacttccatttaagtaatcaaaatatgcttttgactccgaactaagcagctggcattccggtgctggtctcctgattcgtttgtctccttggtatgcgtgcggtttcatttatatttatgttcaccccacatcaccaactaaatttctctgtggggctgggctgtccgcaaaaccccaaaaactatgcattttactgcttttgtcagacacgtgtgtgtgccaatgtcggcgcggccatgtgtatttatttgaaagctttttaaactttgtcagtgactttgtggcttacgaaattaaaattagaaatcggtttagagcgcccacaaatacaggcacgctttcaaaggatgttatgatgaccaaatctcttaaggagcggggtttaagttgcccagaaagtgtaattaatcagaacgtttgcagggccgacccacatttgcatataaaatggtagctgcttcatttgttttctgtggcttaaatcttaattgccacattaataacatttaaaaccggaaaatgtgccaacgggagattttggtatagaggttatatggaattactgctggaagtttggatattacatctaaaatacaaataaattacacagaatactagtttacaccttttaaatagatggaaggtatccataattacaaatttgtgtgttcatatcgtttaaggttttacttacgttgtgaccttggtccgtctttagttcgcgatgattagaaaactgcacgtagaccatgcggccgcgcatctggggcggagttactgtgtaacaggacaccattgacgttgcggagatctcgtcggccatctcgatgaaagcctggttcttgcccttgagcaccagcacgttggtcacacgtccaaacggaatgcccagggcaatcacatctgcctcgccggactcgttcggaatgttgcgcaagtggatgacttttgaggccttggctgcaacaaaaaagcataaaataagcaaacgttgaaatattaaacaggtgacaatccctataggtctctctctctctcttttgcaacatgcccgcctctttcggggaccacctccggttcacttaatggccagcgctgtctgcacttccgcttccgcgcttcacttaatttgtttgtttttgggttttatttgctggctgcttttgttcctaaagtagagtggggtggtgcgaataaaaatgttgataacatggccaagcgcagccacatttgtatacactttgcacagttaagccaactgcgggggtaccgccataaattcattcattgcacactttcaacggctgtgaataacccaacagcaacacggcgacaatgtccggcgcacagacaacgtttgaggcttttaggcactcgtcgacgtttttgcagtttctctcctcgccggatacttgtttgttatttttgcataaataaagcgtttgcagccagatttcggggatatccctacaacagcactgcgagatattatctgttctaacttccctcaatcaaaaaaacccgtctaaaaaaaatgtaaattagttgtaccagtggcttgtcgcagattcaacaagaaagcaataggctgtctcctaataaatcgctataccatcttcaaagacaatttttcgctaagtgagcctgggcatgaccacagaagtgccttaaattttttaaaacaaagacaaacaaatttgccactctttatgcagttgcaagaggaaaagtggagggctagactagaatctgcctggcgcttagtcaacacctgttaatgttttggtttgtgcgctttttatattttgccgcacctgcaagagaacagtttgctgttcatatgcaaatgaaatgccgtcgcccctcatgcccttatccgattttcaaacactctggtgtttgctaaacaagcccacacatggtcgtagatagtcgtggtttcgagttccggacagagtccatctcccgttttaatagtgcccgaatttaaatgaatttaaggtctaacaaagcattaggacaatcgtgttcaaaagttccataaatttgttaaatttaagatctaaggccttgccccgccacttcagcgtttggggaaagagtttctagaactttgataaatcgatggttcgatcccaaacttcttcgataacatttaatgtaaaaaggtcattatccagccaattccgtacattcaatcaaaacccagacgctggggtcaatgttctgatatacttcacaatactactactaagccaccaaagaggctgaaccgattctttccctaacccactttccagaagcctttgtgcctgtaaaagcgaaaagtcaagccacttcgaagtgcactgtggaaactctccctgcttgccggtcaatgttgaatacaactaatcggaaattacactttttgattagttcgaaacggaaatgaacccgaaacgaaattatgcagacgggtcaggacctgtgcggtcgttatagttgggcattctgcctttcgagcggcaactcaaaaatttattaaaaatcgatgggcaactgcagaacgataatatctgctccatcactctactgccccacaaactcaccataaataacagacgaaatcgaaaaagactggggactgctatgaatcaaaactaaataaaagtgtcgatggacgcggtccggaaatgttctgcacaagacaaacaacaaatcaagtgccgtcggctagttgcctggaaaaaaaggcgacggcaaaaatatgtaaaggtatctatcatgcatgatgatgtcggcgaaccgggcgaaaaactggcgaaatttgtggattttttttacgttccgctgccaggagctcgattcgatttttctgcactgtcggttctccttagctacatttgttttaaatcgtagtgcctgatggtgtgaaaagagaaacatcaatccaatgagctcatcgacaagcgttgcaaccatcggagcctacggctgcagcactgtttccaacaaaggcaggcgtcgtaattgaaaagaaggatggcgcccagcgatgacgacaaccggaaacgcaaccaaaagcacggcagctacaatttctactggcaaaaaatttcaatttgaatcaggcgctttcggtttggggtacgtagcctgcggctagattggttagcagttatggtattgctgctttttaattaacagcgaactgaataacccgaacaaatatttgcgcagcaaacattaattgcaattgcagaatcaaaattaatcatcagtttaaaaacagctgttgcagctcgactgatacctcaccggcgcacatataccctaggataatgctatgccaacaagcctgaaatgcattaactggtgtggctgaaaaaagtgcatcgataaaatttgcattcgataatgatgtcgctggcgctgcctgttgactgtcaatgccccatggatgatatgaatagtaatcatccgctcggctgcgcgttaaaatgagctgcaaggacgtagggccaaagctcagcagtattaatgaccctcacacgctttttgcgaaaggcgaggaacgcgccccatcctgccattttcaattaaacacacagcctctccaccacttacaatgagttgcacgaaaaatatacataaataaactatttatagctaattgaaaagtttacaaactgtaattgagttcggacgtcgatggttgggttgcaatgaatggtcagtctgtccagcgtggcgtatgtgtaataatttacccccgtcccttctcttaaccgatgcgaaccaagttaattaatgacaatttaaattcataaagcaaacagaaaccccaaacgaaaaatgtaaatgaaaatgaatggaaaaggcgagtggaacaaaagaaaagggctttccccagcggcgatgggcgtggtgttcgggatgaaataagtgctgattgttaataacaattaaatttatgcttacatggcggcatttaatgatttaatgtgagcgcgacgccagtgtttgtctgagttccggcaccaaactttgccgagggtgtgtcaacagtcgaatatataatttaaataaatacacgccgaactcacgcacatggagccgttcgagcgtctttaattatgcgccagtaaattagatttttacaagctcacacatcataaattttaaattgttgggcaaacttgtgtcctttacgtgtctgtcgttctgctacctccgccacaatgtgagcacaacgacttaatgatatttgcttagccagccaggccttgtctatatattttaaacatttgcccatgcgtaatcaatcatggcacatttttttggcagcaaatgaaacccaatgccagaggttccgttgccttaggatttctggaaaatccccagacacaaaaactggcccataattgaaaataacgattttctttttacagctcgagcttaacacccgcaagaaatgtaattcattaaaattttgccagaaaaaaggaaggggagtgggaaagattggagctttcaccaagtgaatacaaacgcacggagccaacgttcgcagctgggtttcaacagcctgagcgttgatgacgacgactttaaataaatttaattgcatttcaattaggaaaatagtttttttcgctcacacatccgagtgggagtctgaaactgcattggcatttagcaggctgcaggatacagtctgggaaatggcgaacttcatgtctgtgtgcagtcaagtggctttcagtcaaacagcagagagctaggactagaaaatatagttcacaacaaaataatcaaggaactacgtttaatttcattatatttgcgtatattttttggctacacatcgaacacactgttcccaatgcagtttatatttctatggatctttgtttttttgtgctattatactccaaagtattttttttagtgctcgatttcaactgagagctagttagcagtctgtaacgtataacaatggtgtaagttatgagcaaacataggaggtttgttggtcctggcaaaactttttccacttcatttgtgcattaaaacttcgaccgtccaacgggtcgtatgcttaattaaatggcacacacaaatatttcgcagtttcccacagtcacccatacagtggcaggaaattcagaagtcaggccgagcactgcctgaaagtccgctgccactaaccgcactcacgtttcgtgactgccataaatagctgcacacaacgcaagccagtcatcagcgagtcaaaccaattgacaattgctgtttgcccttggtctggccggatttttacactcctttcaatgctgtctcaatattgatacagatggcagggaaaacaacaaaaaaaataatgacaatattattttattgactgcgaaaatatttacacgcaacgcgtagaccaggaggcagagccagggacgtgcgaatgatacccaagccagagcggcacgcgcaggattcgcaggacatggaaccaaccgacacttgtcgtatccaaactgtcgtcttattggttacagccataaaagcgtttaagtgttcgatcagaccacagaagggattggcaacgacccactgtgcagacagcaaaccttgagctttaaattgatgacactacactagtgggctgatttaaggctcaagggatgacccttgatagatatttttagatattttttcagcatatttttccgatgccgctggctgtctggtcagagaattagcaatgccgaagagctggagaaaaaaaaatatggtcctcacgcaacagctgcaaaactcctttttttggcggtaggtcctagctgccataggtggtgagctgaccgttaagcccccaaaatcggtcaataaacaaacaaatgttggtggactgtacaaacagcatggaggcgatgcatgtgtgagagctgtaacaataaacaacaaactgaaattgcggggaagggggcgagtgtcgcgacaacgaaagcaaaacactttctagccacgtttggtgtggtgtttcagccggacacgcgacacgctatggtctacacgagaaaaagtcggccgtatcaatttaaaaagtttttaattatcttgataacaaaaatgggtattgtaataaaaaataattaagttgaagtagtttttcaagaaatcttatttctaaaaagattggaactaattttgattgccttgtcaacattttttcttccggttattctaggaattaaacgttacggttcaactctatggggtctcgtgtacctggcataaaatatacctaataataaaaaatcaaataaatcaagcgaagctagttattagccggtcaaaactcggaccatgaaggtccgagacctactagttttccttttgcagactgtgtactgccttgcgagcatgagtgtgtgtgaacatttttccagccacacgcagtcacccaccaatacacgaaaagccgagcccttatatcaagtgggtgggcgtgtccccgcctttccccccttgttgctaaaagatctgcatctccacctcctacgcgctgcacatgccaaagtgtttttattacatttacgtgaaaaatttgttgcatgtccttctaagctcttgtaacggaaacgggaagcgtgcgtgtgtgcgaatccagatatcgatgtattggtttagtggcgcttggatacaattgacccgaggagtgcgtgtgtttatctaaggctcgaccacagaggcatacaatgctcattgttgctttttagatttctgctatttacttgtctggtctttgttgtgctctgtgtcaatctcgagcccttagacatgaattgggtcttgcagtgtaataaaagtgtctctacacatttatttagcaattccctttattattatttttggcatcatcggcatggcctctttgtgtgagaaaggagagatttaagaggtgagcacaaaaatgaattcattggatacctagcctttctcattcctgcttcaccgaataccctgcttcctttaagcgcgactttaatggagaaggacaaaatgcggcatgtgtgttagtgtgtgtgtgtttgcacaagaactttacgtggaaaattaaaatggccgcaggtgggaggcgtccaataggtgtagtcgggccatggccgcaaaaatgccgttgggtcaaagtagtcgtctgcatcgaccgtcgaacaatggcagacggtagagggggtgaaaggcgaaccgctaactgccttcctctctgtgcgtgtgcgggtgtctgcttgttgctttttaattaatagaaaagtcctttgtaaagtaataaataaatattatgcttccgctttttgcgtacattttttcgctctcagccgattgccatttacaggctgccgatcctttcgcaacccttttttcgtcctccgtccacccatctcttgtcctggcgtgacctttggctgtctggcggctaatgctcaagtgctccctttgtggtaaccacccactcatactcacccaccgatgttgctggcggcggtgaacgctcttaattacggctaaattgcaaaagcattttgaaaactcccacgaaaaggatatcgacgcacagcacctgcatatggcgttaattaaattcgctcacacaaaagcaacgcaatcggcgggtagagcagtcgattacttttgaatttcagcgaaaattgttgcctattgatttgtttgcattggcaatcattttgtggctcactgaatttttgtgggcaggtattggctttcaaatccagttttggcggggtgcctacgaacccgtcaaatatttgcctaatgtgtggttcattctgctggtttcggttcactatggttttgacggcttggtgtgcggtttttgattagctttattactttgcggcggcatatacagggcgatactcgtaccggctaagcgtgtgtgggtggtgtgggcggctaattaatgtgtcgacacagtgtgtagccagtcagcgcggacgccaaacatttttcccgtaataattttccggcagcacaaaagggacgaaccaaatattttcgctgttgacttgtttccatgctaattagtaggttaattggctatagccatcaaagcgcgcttgccttcaataggggtactcaagtggccaggcgactttgttgccaatgttgaaggcttaagcctaatactgcactgggaccacccacaagccaacttaacagaaactacaccaccgaaataagagggcgacagtactttcaccatttacaatatgttttcttttctgaaaaatttaaagatttctaaattctttttatttctatatagcatgtttttcggtcagttatggtaaacgcgtttttcagtgtacaatattgtcccagtgggcgtggttaattggcagacaaaccccaactgggcccaagaccatggctgtaaatgcacttaatgcaagcgtcgctcaggggacgggagacgtaaaggcagggttttaatccaagacaaaaggaaaggcaaggttaatgcaaaggtaagccggagagggaaagagagagaggtagagaggataggcagacacagataaaagaggatagagctgaaacttaccaattccgccggccagcacagtgcccggctccagtttggccttctttgtggccaggtcctgattgttattgtcggaagcgggcgccatgaccgctgcttgactcaaaagttcgtcgcttccgcgctgattttcagatacacagtttcaggcacaggtgaggatgcgggagcagtttcaaatgcagatgcaggatcatattcagatgcgggagcaggtaggcacaggcacaggcagttggttaatattttttatatagttgtagtttgtagttgatgcacaggcggcagggcaggcacagacagaagttgaagatggtttattttcagtagtagtggagttgtagtagatgaggaatatatatacgtatacgagtacggtacataaaaagagaaaataaagagagagaacaatataaatatttaatatttacgcaagctaaataaattagagattctttggacccacttccgcccacctcgcaaaggatttgcatagctcagggattttgtttaggtttggttctccagtttggttgaagtcaacaagaaaagtgggtaagtggaaattattgtgccaagcggactgcagttaatcgctttccagtgtttactcagctattctctgaccagcgaagtttacatagccgcagctgcataaaaataaaatccactgtttcccatttggttacttgtaaaaaaattcatggaaaatgttaatttgaattagtccgctaagcagttggcacattgttgctcctctttctgctctccgtttgcttttttcgtgctttattgcagcgctaaactctaattacaaagcacatgagtgtattgtaattacatgtgacacttaattaccgcactaacacaaagagtcaatgccaaaccaggagcaaaagttgaagcagcagccatagaagcgaacatccacactttacaaaaaattgtgtttttacaaattttttttacctagcttacaattttaaatgaaaatttccctttcaagcgtttagtcatggcatcgtccagtctgtattaacaatgtttggtataccaacactcatgtccaactggcctatttctagcagtgtgggaatctgaatcacacgcagagccggagtcggattcccagag

SEQ ID NO: 3350 - DNA, 2598 bp, DROSOPHILA
tgaaaatcagcgcggaagcgacgaacttttgagtcaagcagcggtcatggcgcccgcttccgacaataacaatcaggacctggccacaaagaaggccaaactggagccgggcactgtgctggccggcggaattgccaaggcctcaaaagtcatccacttgcgcaacattccgaacgagtccggcgaggcagatgtgattgccctgggcattccgtttggacgtgtgaccaacgtgctggtgctcaagggcaagaaccaggctttcatcgagatggccgacgagatctccgcaacgtcaatggtgtcctgttacacagtaactccgccccagatgcgcggccgcatggtctacgtgcagttttctaatcatcgcgaactaaagacggaccaaggtcacaacaactcgaccgcccatagcgactacagcgtccagtccccggcgagcggatcgcctctgccccttagcgccgctgccaacgcgaccagcaacaatgcaaacagctcaagcgacagcaacagcgccatgggaatcttacaaaacacaagcgccgtcaatgcgggcggcaacaccaacgctgccgggggacccaatactgtgctccgtgtgattgtcgagtccttgatgtaccccgtctcgctggacatactgcaccagatcttccagcgctacggcaaggtgctgaagattgtcaccttcacaaagaacaattcattccaggccctcatccaatatccggacgccaattccgcccagcacgccaagtcgctcctggacgggcagaatatatacaacggttgctgcacgttgcgtattgataacagcaagctgacggctctgaatgttaagtacaacaacgacaaatcgcgcgacttcactaaccccgctctgccacctggtgaaccgggagtggatatcatgcccaccgccggcggactgatgaacaccaatgatttgcttttgatcgccgcccgtcagcgaccttctctctcaggtgataaaatagtcaacggcctgggcgcccccggagtcctgccgccctttgccttgggcctgggcactccactgaccggtggatacaacaacgcactgcccaacttagcagctttctcgctggccaacagtggcgccctgcagacgaccgctcctgcaatgcgaggttactcgaatgtcttgcttgtctcgaatttaaatgaggagatggtcacgcctgatgctctctttaccctttttggtgtatacggcgatgtgcaacgtgtaaagattctgtacaacaagaaggactcggcactcatacaaatggcggagccccagcaagcttatttggccatgtctcaccttgataaattacgtttatggggaaagccgatacgtgtgatggcaagcaaacaccaggccgtccagctgcccaaggagggacagccggacgcaggactcacacgtgactactcgcaaaatccgttgcaccgcttcaagaaaccgggaagcaagaactaccagaacatctatccgccgtcggcgacactacatttaagcaacattccctcatcctgctctgaggatgacatcaaagaagctttcacctcaaacagctttgaagttaaggcattcaaatttttcccgaaggaccgtaaaatggcactgcttcaactgttgtccgtggaggaggctgtcctagcactgattaagatgcacaaccaccagctgtccgagtcgaatcacctgcgtgtaagcttctcgaagtcgaacatctagaatccgatgcgaagtcaggtttactgaacctgactaggtacctccggcgggtacagctacatacagatgcatcagcagcaacaccttcagatccattggcagcaacaaatacaaactataatccgtagtacaagaaaaatgcacgcaaacttctactgaaatggcagactccagaagcactacccacccaatccaacataataatcagcagaaacaatcgatgcaagagctataccaattttaaacaattcaactcactctaagaactgttttctgttcatacactaccccttagtgggaaagacacaaacaattaaggaatcttactgaattgataaagaaaaaactacaaataaatatacatgaaaattaccacgaaaatagcattttaagttatggcacgcgcagacaacaaaacaaacaaacaacccacaaactaacaatcagcaacatcgtaacttaagcttaactttaaacctatagttcgtaagaaacctgcattgcataaaaaaaacaaaacaaaaaatatatgatgagtagagaggagttaagtatgtttaaagtaaaaagagaaagatcgtaacttaaaatatttttagtgcactgtactgtgttttggttttaaaaaacgacagaaagtcaaaaacatacgaaggaagaaattatgttaaaaatgaattaaggcaatgttttattatgtacatgatgctgttattatattttaaatgaatgcaacttaactttagttttttacaagtgcgcaatttcaattgaagaaatagcatacccgtagctaatagatgttttaatttaaaaaagtaaaaagtaagaaagtatttagaaaa

SEQ ID NO: 3351 - protein, 568 aa, DROSOPHILA
MAPASDNNNQDLATKKAKLEPGTVLAGGIAKASKVIHLRNIPNESGEADVIALGIPFGRVTNVLVLKGKNQAFIEMADEISATSMVSCYTVTPPQMRGRMVYVQFSNHRELKTDQGHNNSTAHSDYSVQSPASGSPLPLSAAANATSNNANSSSDSNSAMGILQNTSAVNAGGNTNAAGGPNTVLRVIVESLMYPVSLDILHQIFQRYGKVLKIVTFTKNNSFQALIQYPDANSAQHAKSLLDGQNIYNGCCTLRIDNSKLTALNVKYNNDKSRDFTNPALPPGEPGVDIMPTAGGLMNTNDLLLIAARQRPSLSGDKIVNGLGAPGVLPPFALGLGTPLTGGYNNALPNLAAFSLANSGALQTTAPAMRGYSNVLLVSNLNEEMVTPDALFTLFGVYGDVQRVKILYNKKDSALIQMAEPQQAYLAMSHLDKLRLWGKPIRVMASKHQAVQLPKEGQPDAGLTRDYSQNPLHRFKKPGSKNYQNIYPPSATLHLSNIPSSCSEDDIKEAFTSNSFEVKAFKFFPKDRKMALLQLLSVEEAVLALIKMHNHQLSESNHLRVSFSKSNI

SEQ ID NO: 3352 - DNA, 3084 bp, DROSOPHILA
cctcaaaatagcctcaaagcggttaaaacacatactaacttccctctaaattattaaaaattgggattaaacgtttgaaagggtcttggcgcacacccattaccattaattgtataagctactgtgattaatcactctgccataccctattttgggttacagaaacgagagaaatgagagtcggctaattccgccgaatgaaaacagaagtgaatttattcacggtcttggctaataggattaccagatactgctgctagatggctgaaagaaagtgaaaacgtcttagacctaacattttcttcaatttgaaacttgtagatcataaagacgaatcgcactgggactatgagacgaacggacagaattggggaggaatttgctctacgggcgaaagacagtcacccatttcgttaaacgtccaaaaagtaagtaacaaatacatatgacaccacttatgatcagaattagttagagttcctttgcaatgatttaatgatttgaacagccttacattcctaatcaactatttgttggtctttagcttcagacctagtttaaagtgatgtaaagaaatcaattaaatttaaaatgtgtatcaccaaattcgtattaattatgcgtgccaaaactcagccttatttcatatgcgcatctatttaagcgctgttactgcataacaaaatcgtctaagaacttgtataatatttgtcaaaagaaaacatttaaaatcagcaacggatgctgcgattgtatgaaaatgaactataactgggcgatgattggcactattattctcccaattagcttatataattgacttacaacatggggaatgtgatagtcgaaattggcatatagtttgtaacatatctactttaacaattgggagctcttttaacgccactttttgcattacaaggggtaatgggtgtggaaaatggaagcgctgaaaggcctaatttatttcaataaccactaatacattgtcatactttcgatgaggcagtcgctcatcgtcccactaccgcggatcgtcttcggaaactatgacgtaaagctgaggggaccgctcaccctgctcaataatggacatacaggtgggttgtgggttcgagagatctccaatggttttgaacgaaagctactaattgcttggcagctcacgtggagataccagaaactgctaacggcaacaaacccttcataaccgggggtctgctcaaaggcagatttgtggccgaggccttccacttccactggggatccccgagctcccgcggatccgagcactccattaaccagcagcgattcgacgtggagatgcacattgtccaccgaaatgagaagtatggagatatcgatgaggcgaaaaacaagaaagatggcattgctgttattggagtcatgctgaaaatcgtaaaggtgagtatctatctatctatttttcttaggtcagtaatcgtacaaggggttgttgtaccgagaaaccaggtgcaatctaatccaacgtgatggaacgatgatgcaatgaaaatcttcaccgtaaaactaaatttgccatagaaaaataaacgtgccaatacgtcactttcagatgaatattctttcatcgtttttttctgcttatatgaatcaatcatttgaacacaaagacggttcaaaatttcattaggagtttgtaacaaataatttgtgtatatttttttttacagaatcccaatcgcatatttccgggattgagcaaagtgatgagtgcgttgccgcgggtgacgaagtacaacgcgaagacgaccattccgggcggactaagtcttggacagatgcttggaaacgtgaatccccgggacttcttcacctaccgtggatccctgaccacgcccctttgcgagcagtctgtcacctggacggtgttctcccaggttctgcccgtaccctattcgtcggtgtcgaaattctggaaactgcgagactccgagggccacagactgatcaacaatttccgggacatacagccgcgaaatgggcgcccagtgttctacaggatcggaaaggatctgagtggggcctatctgggaaagtgatgctaatgtaactcgactaagttccgtatttattatagtttttaagacaaataaattatttcatctgttgtaagctattctccctcgtacctaccgtttttcactcttggcgttccaaatcagatccgatacggtgggaaatcgttgcaaatctcacctgaaccgagagtaatcgaactatttgtgatacgctccagttggatgtagtctttagtcggagctgcagccaagttagcatatctcccgcgcattgacatcggaagaactaagtaaaatccacaccgacgagcgacataagacacacgagttatcaattaattgcaataataataatagcattgcaatcgtagcaatcacaactgaaattcacaacaatgcaggcgattgcgtttcacaaactgttactactgcttccgctggcgttttatcaatcaacaaatggtaaatcaaatgccagaagttatatgtatatttgcatatgtgggaaacttggcgagttctgacgaattagagacattcaaaagaataaataagcatttcaatttcaaatcaatttagcagtccattatgagtactaaacaaggcagttaaaagtagaataaactaatcatttgcttccttcacttgaaacttgcaggtatggagtggaattacctgaagaatggcaaggattgggaggacctctgctcctccggaaaacaccaatcgccgattttgttggattctagaacggtaagcagtataccaaacttatttttatgtttttttttttaatgttttctcgtacttactggtaggcgcgcaagtgggtcttacctgggatcactttctggcattattataggctgcttaagcgtccgttttacatcagaaacaatgggcactccagtaggctttatatagtggttagtagttcaaaactgagcgcaactaattgcaatattggtagttagcttggacattcccgtgacgagcaatggaaggaagcccttcataaccg

SEQ ID NO: 3353 - DNA, 708 bp, DROSOPHILA
atgaggcagtcgctcatcgtcccactaccgcggatcgtcttcggaaactatgacgtaaagctgaggggaccgctcaccctgctcaataatggacatacagaaactgctaacggcaacaaacccttcataaccgggggtctgctcaaaggcagatttgtggccgaggccttccacttccactggggatccccgagctcccgcggatccgagcactccattaaccagcagcgattcgacgtggagatgcacattgtccaccgaaatgagaagtatggagatatcgatgaggcgaaaaacaagaaagatggcattgctgttattggagtcatgctgaaaatcaatcccaatcgcatatttccgggattgagcaaagtgatgagtgcgttgccgcgggtgacgaagtacaacgcgaagacgaccattccgggcggactaagtcttggacagatgcttggaaacgtgaatccccgggacttcttcacctaccgtggatccctgaccacgcccctttgcgagcagtctgtcacctggacggtgttctcccaggttctgcccgtaccctattcgtcggtgtcgaaattctggaaactgcgagactccgagggccacagactgatcaacaatttccgggacatacagccgcgaaatgggcgcccagtgttctacaggatcggaaaggatctgagtggggcctatctgggaaagtga

SEQ ID NO: 3354 - protein, 235 aa, DROSOPHILA
MRQSLIVPLPRIVFGNYDVKLRGPLTLLNNGHTETANGNKPFITGGLLKGRFVAEAFHFHWGSPSSRGSEHSINQQRFDVEMHIVHRNEKYGDIDEAKNKKDGIAVIGVMLKINPNRIFPGLSKVMSALPRVTKYNAKTTIPGGLSLGQMLGNVNPRDFFTYRGSLTTPLCEQSVTWTVFSQVLPVPYSSVSKFWKLRDSEGHRLINNFRDIQPRNGRPVFYRIGKDLSGAYLGK

SEQ ID NO: 3355 - DNA, 3386 bp, DROSOPHILA
atcaatcgcaactccactatttaaatccactaaaactggtcagtttatgtttttgttccgattgggccgcaaaacgcgcgattgcaagtgtgaccgcgttttgacagccttaaaataacagatgacaccacaatacagtttatttcgtcattacctaaaagtaccaaaaaaatacacacggtgggaacagtttcactaaggttttactattttaaacttttccagtaactaatttaaaacaatgtttgacgcccatgttttgacacaaatagggacaacttaacaataattattaaagtagatgaagtattatttccatctcatctcttattgaatacttctattattcgacgtgttttaaaaataaattctattcggctataattctgacacataccaaatgaaattcaaacattactttaatttaaatatgctctaccttctaaaaatatgttaggtggtatattcgtcataatatagaaacgtttattacaacatttattctttttaaaaaacttttgattactatgaaaccatttccttgatttttttagaaaccgcattgttgattaacagaaacttgaattcgtatgattttcgagcagaaaggctacgccatacacccctagtgtccttgcgaaaagattcgttagtagtacacactacagtattcgttgactttggcaatacaaaaaatagttttgagattttcaaaactaattaaaatctattatggtagaagtggtatgtctgatctaaaggaacgacattagccaagagtctcgaaatccacattcaattcgtactctaaaacgtttccatcgtcttcatctgctacttaagatcaatataaatggattttaatgcgaagtggatggtcccgccaaaagataattcattgcagtagggaaagtcaaaccgaacagccatcaatcgatatacagattaccgtcaactttcaatcggtatctcgccttaataaaaaagccaagttgcgttttaattaaatttaaagtgtttcatttaatgtaaaacggattttttactcctgcaggtcagtaattcaagtcggatattaacttaaatccttgatgggtacagcatctgcaagaaaaaagaaggcatgttaatacaacccaattgtcggacagaaaaggtgtgtttgaactaacgatgcggatgcggtggcccatggcatgaccgggcaggttcctgttgaaacgggcacgcacagcgccggtgttgccgtggatgcgggtgaccttgccccagacagcgcggacgcgggtcttgcgctcgggatgctgcggcacgcacttcttggtctcggccttgtagacatagacgcaacgcttcccaacgtagaaggatccgtgctccttgcggcgggcgccctcaatctgcaatgtaatatgttggttaatcaattacattactaaaatgtttttacagaactggaatgtattaattattatttgaaaaactctgtgaagtccggacccatcacattgaagtatagacataccttgaggatggcctggttctcgtgctggttcctcagaccacgcttgtagccggtgaagacggccttggcgaagaggcgtccgtgacgcttgtacttcttggcggaaactttagcctctgaggcggcgggcttctcggccttaggcgccttgacggccttgggagccttctgggccttggcggccttgggcgcagtagtggacttggcttgtgtgtcggccatggcttagctgtggatgagaaaagataatctttagagccgtaggcattcatcataggtattcgttggggcttgagggtttcgatcatttgcatgcatttgattaaacgaaaagtactttaaacattgaagatattgaggtgcacagctctgggcaacagtacattaaaaacatcattttatataaaaataaagcggagtctggtgaaaattcctgtacccgaccggcctggggcaacatttaatgataaaaacaaaaactgataacacggatcacttattaatcttccacaagaagttattgaaatcacgttaaaaacaacaagaaaagcggaggccaaaaatgaacgctgaaattttgcaatcaatgtgcactgtgcgaagcatggaacttttggacggcatcgaggtgctattacgaatcgggcagtgcccgtagggtactcctatcctgggttgtcccaaggaaccacttagtcacaaaaaatcacagataaagttcgccagtagatttttgtgcacgtgggttggcgtttgcaggttattccatgattatttgccgtttttccggtgtacagactcccattatggtgtccgcggaaacccaccttgttgttcgatgaatgtattaacaccgctaaaaacaaaaacagaatattattaaaggaaaatatacagagaaatttaatttacttacttcgccggaaacgaaagcgaaaagaaggaaatagtgtggctgcctctagacgccacaaaaacgcgatatgttaagtgaaacagcgcgccgttgctcgaaagtgtgctgttaggggcaaaataaacctcagttgaaaagaaaacccttagtaaaaataagacaatacattgtttaaattttaatttgtattcacagtttatgcatactcaagatacgaaacatgggttagtttaaatcgggttgaagaaaccatatgctcttctctgttaaaactataaaaaacaactgcttaggctcatttagatggttcctttctaacattcaactttatgtatgaaattattaaatataattgttttcctctgtaattttacatttttagttttaccaagcttttgccaactaaccacattttaaagaataaaagggataaattatagataaatatatcctttaatatggtaaatttattccgctgaatagaaaaagcaagtaacactatctgcagagtaatggggtatacaagattcgtattaaaacgcagaaaaagtcatcttcgattctctaaggtgtacataattgttcttgattggactaaaactagtcttgtaatctcttgttttatatttagattacagatttaattattttcaaatttaaatacaaattctgacagatttgcccctgaaatgttatcgacaaacgaatgtggttatcgccgactcgcgcaatcgcatagagttttttttcagtgccgaaaacaacatcaaaatgttcataacaatgttgggattttagagacagccacaaaatttagaagcacatgtgccctgctagatcgaaccgaacctgagaactgatcgccgaaagaagctgcagattgttgcataaaccgcgcgcgcagctaccgctccgaactcgaaaaggtgctccacgggtctccga

SEQ ID NO: 3356 - DNA, 595 bp, DROSOPHILA
tttagcggtgttaatacattcatcgaacaacaagctaagccatggccgacacacaagccaagtccactactgcgcccaaggccgccaaggcccagaaggctcccaaggccgtcaaggcgcctaaggccgagaagcccgccgcctcagaggctaaagtttccgccaagaagtacaagcgtcacggacgcctcttcgccaaggccgtcttcaccggctacaagcgtggtctgaggaaccagcacgagaaccaggccatcctcaagattgagggcgcccgccgcaaggagcacggatccttctacgttgggaagcgttgcgtctatgtctacaaggccgagaccaagaagtgcgtgccgcagcatcccgagcgcaagacccgcgtccgcgctgtctggggcaaggtcacccgcatccacggcaacaccggcgctgtgcgtgcccgtttcaacaggaacctgcccggtcatgccatgggccaccgcatccgcatcatgctgtacccatcaaggatttaagttaatatccgacttgaattactgacctgcaggagtaaaaaatccgttttacattaaatgaaacactttaaatttaatta

SEQ ID NO: 3357 - protein, 157 aa, DROSOPHILA
MADTQAKSTTAPKAAKAQKAPKAVKAPKAEKPAASEAKVSAKKYKRHGRLFAKAVFTGYKRGLRNQHENQAILKIEGARRKEHGSFYVGKRCVYVYKAETKKCVPQHPERKTRVRAVWGKVTRIHGNTGAVRARFNRNLPGHAMGHRIRIMLYPSRI

SEQ ID NO: 3358 - DNA, 7182 bp, DROSOPHILA
tttatattggccaccgattacggtttagtgcttaggttagatgaatccaaattcagcagccccgagacttgcatcgaaattcagctttatctttgcgttgccactgcactgcaacaccaactaacacaggcaagccacacagtacagacaagacaagacaagtcctgacaagactagtcaagacaagacatgttacgtatatggaaatatgcccagtattatagccctaatattctagcgaacgttgacagtttgattgctaagcggagtatccaaagcagtttgaggcagtgtatccgaatccagcgaatgccgaattaccaaacagtagctacgctgctctcgccttcgattgatgttcccccctccttccgccttctgcaacagagagtgtacataatttatatacatatataattgcattccaaacccgatccaccgagggcgctgctactgttgtacaaagcacaagtatatcctgcatatctggcaaactgtaatattttggatgttgatttacaactaacagcagattcaagtcaaaatatatacatacatatatacctatacgagaaatatatatctatacatttgatagtgttgtgaactagaggaacccacactgaacactccgccggcggcaatgcgtaatccacttttgtagatagcctttaggccgacctttaggccaagtgacaaacgcaaggaagttacaatcttccacccagagtcaattgagatggccaaggagcagacacactgactacctgacatgaaccacctacacagtacagaaaacctggtgccgaagccgagatgggcactagaacagccggcgtcgtgataacacgcaagctttaactttcacttgttgttagattccggatggtcagagataaaaagatagttaacacgcggaagccacgtagcgatttcttcttagccacgagttcttgcaaaacgatatacatatgtgaatgtaaatgtgtactacgtgtataaaagtattcaataaactatattaaataatcagtgtacaattggcgttagttctttttacgggggtttacacatatatatttagcgagtcatcctaaattaaatgtacataagtaaaaagttatgtcgatatagacgaacacgaacgtgtcccactccaagatggaaacgaaaaatttgaattggaaacataaaacaaaattaataccaatgcgaacacgattaaaatagcaaattgagtaacttaaaaagagaaaactgttaacaacccgcccgtttgtggtcattgtccgtgctgctgacaaaattgcaatgggtcagcgggtcagtgggtggttccccaggcgcgcagcagtgtcagtgccttgttaaggtaggcgcaccactcctcgcgctcctcctttgtgtcggctgagagcagatggcgcaccgtggtggtacgtccgttgggtacgattatcaaggactcttggtctgtctccagcgccggccgttcgcactccagcagcatggtgttgagacgggcgcaaatgtcgcgcggtgccgtggtcaccttctgcgaagtgcaggaattcagatctatactacccattggcgtcttgcgcttctcatcatccgggtacttccagtagttgatcacggagccattcagatagcaccaacgacgatgccatgccccgaaaccggagatgtcttcgaacatggtaaggaatcccttgtactccacgcttacggatagttcgcaattgactttcatgtgaaccacaccctccagtggactgacgcccagcacctgggtcagcgtccatgtggtgcgttgaatttcacgcagcgagaaaatggcaaagccgtattgcaccagctgcggtgtccgtaccacatgcggtcccgccggactttgtactggcggcatcaccagtcgattctcgccgcccttcttctttggcgtcttgatgccacccttcttgttcaagttgatgtggtatttcagctcgtgaggcagctgatcgcgttgggccaacatgccatagatttctagcgtgatctgcagacgaagttttcgcaataaaatcgaatattggctaaagaagcaaaaagcaatatttaccctgaagtcagcatatacattgtttagttgcaggacatcgggaaacttgacagacagcagccctggcatcgtgggtactgtcttggtggccagcacgtgctcattgtacttcaggaggcacacaagatgatggccgttaatgttgttcgaggccattttacgcacgtactcctgtcgcagtggaatggttatgtccttgaccgtcagtaggcccttttcttttggtgcacccaccggacgaatactgttctcaactcttaaacgctggacttcatccaaacacgcctggcgtcgatgggctgcaaggatattaaagagatgttcagcttaattggacattcaaattgccaattcggtttggaattcaacgaacaggcaatttatacttgaatacactgaagatcacacttacttgcaagaaggagatatcgctctccctccacggactctgtggagccggagaattctacggtggcagcacaaaggttgagggcctgactggcttgtcctatcacctgctgctgcttgcacacctcgctcaacagctttttgatcttgtcttgtgcctgcgatgcatcgtttacttcccgcgcattctgcatctcttcatcgtcctcgtcggtctgatcagctatgtcagttgctgctgcgacataatcagactgctgaggagagtcgtactccagtctgtgcttggcatgacaatcgcctgctagggctgatcgcatgacctgctgctctcgacagatcttgcgaaccggtgtggaattggagctctataaacaacgagtacttagaatttgttagttgtgatatataagtaatcaactcacgttagcgctctgttggcggcgatagaagctgaccgtgtgcaccagggtaaccaggttgtcgttgtcctggttgacactcaattcagacttgaccggctgggcaccactgagcagtggcgtctgcaggtccatctccatctcatggtgctcttcgataggcgtgcaaatagaggcaggattttttcggaaggaaaagctgtttgaggccgtcgttcctttgctctgaaaatgtaattaaagaattgttttgatatacgaggaaacttaatcagcaagtactcacgcccaaggacagccgactggcattttgctcgtccccgctgtcgctctggtcatcctgagtgctgccgtagtcctcgacaagtgcttcatccagataatcatcgatgcccgctgagacctgcgacgagttcagagagctgtcatcgtaatacatgtcctggtccgcatagcgcacagtctggaaaggtgtgaaatcgtgttaatggtgaccacccgctgtgttgacagtttttacctgcacttaccttcttgcccgtctgctgctgctgcatctccacttcgttgcgctgcactgcgctcattatctcgcggccaagactgccattgcacatgccggcgctactgtcctcagtctgtgactggtcgtcggactcatccatgcaactgcacgaatcaaagataaacggttagttaagaaagcgattttattgttggtcttgtctaggggatggggtttaaagctatgtctcttaggcctatcagtcttggaatgctactcgatgcagagcagaaatagcaagcaggaatagcatttttcagcgcacctttcggtttcctcctcgtcctgttgatggctgtcatccgtagcggaggcagtttcggcggcgcagcagttgtcaccgctggagtcgaggtcggacagggcgggatacagacgatccgaatgcgatttgcgggctcgcttcgaatcctcgtcagtggtgggcgcatcaccagctgaaattgcggatgtataaggacaagtccttagataaagggtttagtcatttcttacgtgatcgcctcttgctgctggccagtccgggcgagagagcagcgatgggcggtggtggaggcggtggcatgggccgcactactctgctgggagctggcgcgggaggtcgagcttgagcagccacagaactatcggatggttgattgtcaaagagctccttttgtttgttaaagcgattagaaataatctgcatgtcttcctgcctttggcgatcaatgtccttgatacgcgtctctgcacttgattgcgcatttgccaccaaagcggccaccttgtcacgcagcttgttttcctgtttcggcttggttgctgcaaccacggtagtagctgcggcagcagtcaccggatgcattgcagctaaatgttctgttaacaaaaaaaaaatgagtatgagtagctattatgaatatagaagggctgccaaactcacgtttcacctcttccgctcggatttgggtaatactgggagcagatcctattggcgccatcggcaacatcgctttgttgttgcccgtttcgaacagcttcatccgctccttcagcgacagctcacaaggatccttctggttgcgtaggccttgcgactgtcctccggttcccttgttttcaaagagagccgcccgtccggaaaccaagccggacttcacactaacagcaggcgctggtgcgggcttaggcgctggggcggaagatgcaaagttcttggcgacctggctgaccgtcgttgatttctgcggcactggcggcttggcagttaataccgcatcttccactttggaggctggggccgcctcttcctgtttggcataatcatatgtgtgtttaatggtcgatgattcgcggcgctgaaaaccttgtgcctccagagagctcaataccttgggatcccacttcagctgcttggtcctgcttgcctcgtcgacttcatccttcttgggtggcagtggagctggacccttctcggcccttcgactggacaaatgcggtttcggtggaggtgcttcgagcagtctgtgcacttcgtggtgcgacgtgtcatcctcccactgattgatggtatccgccaaggcggccagtttgcccaaccgttgttttggttgcctgctgctacggttgccgcagtcctcttcctcacccgttgtcacatggaactgcccctcggttcggtggattggggaggatagatcgtccgtgtttgagtacagggcacccatgcgttgcagtcggctgcgggaagtgtcccttagcctggctaggggctggtttactggttccgcctccagcaggggatttagcgcacctccttccgcctgctcttcgtcatctgtcacctcctgctcctgaatctcaacttgcacctgaaggtagtgcagcaaggatgagcaaaagggaagaacccagaaaagaacgggaaaacttaccccaattggcttgtccgtggttatgtttatctctatgcccatatccaagttttccttgtttaccgccgtatagtgacgcagcggcttcgccggcgacgcctccagcgtggcctttcccaacgtaacgaccttgccgccgccgctagccgcgctctggcctccaggcgaccggctcctcggtgccaggaccccagcatccccgccggatgcggaggtggcggaggagcttggaacgctgcactcgacgagcggaaatttgctggcattgctgatgccaagggcgcgactgcgctgttccgccttctcgagcatgtgctgcaagggaaaatgggaaatagcagtgaaaatccgcgggtgccttcactaacaccagtgcaatcaccagacaaagggctttgctgtgtgcgaattggcctcgtacctgagtaaacgggtccattgttgttgctgcagctgcaaatgcaaatgcgagttgtgattgcgcgcactatgctattgaattcactgtactgctcgacactccacgttggcgatatttgatgtttgtttttcactggcgggttgcgcgtccgtttgcattcgaaattctgcgcgtcgcttctgctcgtttcggcggttggcttttcagatgtgttgaataatttcaaaacgacgcgcaaatgccataggaccctcaactgaccacgacgaaataccgaaattggggagaaaatgccagtggtgagttgccaagggctgccactttgtcgtatttggcagggtggcagctctgtcgcacatcaatggttaaaccggttcaccaatcacacatatttaccggtttaatttcggccgacagctgtttatttttcttaaagcgttatcaaaaagggtttttattgatgttataatatgaatatccaaccgtaatttaccacgtatcactttcaatatttatcacgcatagctggtaagttaagaacctggaattaggcttgaaatgcacctttgatttctctggtgagctgcacacgttgtgccgtcagtgctgtatgttttggctagaattttggcatgtttcctctatttaggctacctctttaagtttggcttttctgttggggtttcgttaattaatgtaggaaaacatttctggaaataattacgcttaaatatatagaatttgttttttcagtaaattgtcagcgtccgccatgagtgaccaaaaaacagtaaatttgctgtggaactgtgcctccaagctgaccgaccaaacccacacagaacggatcctcaaatcctattacatgtgagatccgttgtcaattccttaagcacccactaaaatttcgtttccaaaacaacccagaaccacctgtaggaagctggcccggcacaatgtccagttgcccgaggagagctttggacccgcacgcatgtgctcccgctgcgggaaccagtggacaggtggccgctaccagctccacctccagccacaagaactgatgcagagtgctaagaaccggagactgatcaccaagctggaagccgtgaagggcaagatggcaaagggcgagatgaacagcggggccaggaaacgggccaagtggctcaagaagcgtatggccagtaacatggtgagaaccaggagctaatagaatgtctagaatatgtctagattgtgggaaaaaatacttttatttctttaatttcataaatataaatataatatctctttgcttccatggatgaatggtatagatggatagtttagtaccttataag

SEQ ID NO: 3359 - DNA, 4372 bp, DROSOPHILA
ccaccctgccaaatacgacaaagtggcagcccttggcaactcaccactggcattttctccccaatttcggtatttcgtcgtggtcagttgagggtcctatggcatttgcgcgtcgttttgaaattattcaacacatctgaaaagccaaccgccgaaacgagcagaagcgacgcgcagaatttcgaatgcaaacggacgcgcaacccgccagtgaaaaacaaacatcaaatatcgccaacgtggagtgtcgagcagtacagtgaattcaatagcatagtgcgcgcaatcacaactcgcatttgcatttgcagctgcagcaacaacaatggacccgtttactcagcagcacatgctcgagaaggcggaacagcgcagtcgcgcccttggcatcagcaatgccagcaaatttccgctcgtcgagtgcagcgttccaagctcctccgccacctccgcatccggcggggatgctggggtcctggcaccgaggagccggtcgcctggaggccagagcgcggctagcggcggcggcaaggtcgttacgttgggaaaggccacgctggaggcgtcgccggcgaagccgctgcgtcactatacggcggtaaacaaggaaaacttggatatgggcatagagataaacataaccacggacaagccaattggggtgcaagttgagattcaggagcaggaggtgacagatgacgaagagcaggcggaaggaggtgcgctaaatcccctgctggaggcggaaccagtaaaccagcccctagccaggctaagggacacttcccgcagccgactgcaacgcatgggtgccctgtactcaaacacggacgatctatcctccccaatccaccgaaccgaggggcagttccatgtgacaacgggtgaggaagaggactgcggcaaccgtagcagcaggcaaccaaaacaacggttgggcaaactggccgccttggcggataccatcaatcagtgggaggatgacacgtcgcaccacgaagtgcacagactgctcgaagcacctccaccgaaaccgcatttgtccagtcgaagggccgagaagggtccagctccactgccacccaagaaggatgaagtcgacgaggcaagcaggaccaagcagctgaagtgggatcccaaggtattgagctctctggaggcacaaggttttcagcgccgcgaatcatcgaccattaaacacacatatgattatgccaaacaggaagaggcggccccagcctccaaagtggaagatgcggtattaactgccaagccgccagtgccgcagaaatcaacgacggtcagccaggtcgccaagaactttgcatcttccgccccagcgcctaagcccgcaccagcgcctgctgttagtgtgaagtccggcttggtttccggacgggcggctctctttgaaaacaagggaaccggaggacagtcgcaaggcctacgcaaccagaaggatccttgtgagctgtcgctgaaggagcggatgaagctgttcgaaacgggcaacaacaaagcgatgttgccgatggcgccaataggatctgctcccagtattacccaaatccgagcggaagaggtgaaacaacatttagctgcaatgcatccggtgactgctgccgcagctactaccgtggttgcagcaaccaagccgaaacaggaaaacaagctgcgtgacaaggtggccgctttggtggcaaatgcgcaatcaagtgcagagacgcgtatcaaggacattgatcgccaaaggcaggaagacatgcagattatttctaatcgctttaacaaacaaaaggagctctttgacaatcaaccatccgatagttctgtggctgctcaagctcgacctcccgcgccagctcccagcagagtagtgcggcccatgccaccgcctccaccaccgcccatcgctgctctctcgcccggactggccagcagcaagaggcgatcacctggtgatgcgcccaccactgacgaggattcgaagcgagcccgcaaatcgcattcggatcgtctgtatcccgccctgtccgacctcgactccagcggtgacaactgctgcgccgccgaaactgcctccgctacggatgacagccatcaacaggacgaggaggaaaccgaaagttgcatggatgagtccgacgaccagtcacagactgaggacagtagcgccggcatgtgcaatggcagtcttggccgcgagataatgagcgcagtgcagcgcaacgaagtggagatgcagcagcagcagacgggcaagaagactgtgcgctatgcggaccaggacatgtattacgatgacagctctctgaactcgtcgcaggtctcagcgggcatcgatgattatctggatgaagcacttgtcgaggactacggcagcactcaggatgaccagagcgacagcggggacgagcaaaatgccagtcggctgtccttgggcagcaaaggaacgacggcctcaaacagcttttccttccgaaaaaatcctgcctctatttgcacgcctatcgaagagcaccatgagatggagatggacctgcagacgccactgctcagtggtgcccagccggtcaagtctgaattgagtgtcaaccaggacaacgacaacctggttaccctggtgcacacggtcagcttctatcgccgccaacagagcgctaacagctccaattccacaccggttcgcaagatctgtcgagagcagcaggtcatgcgatcagccctagcaggcgattgtcatgccaagcacagactggagtacgactctcctcagcagtctgattatgtcgcagcagcaactgacatagctgatcagaccgacgaggacgatgaagagatgcagaatgcgcgggaagtaaacgatgcatcgcaggcacaagacaagatcaaaaagctgttgagcgaggtgtgcaagcagcagcaggtgataggacaagccagtcaggccctcaacctttgtgctgccaccgtagaattctccggctccacagagtccgtggagggagagcgatatctccttcttgcaacccatcgacgccaggcgtgtttggatgaagtccagcgtttaagagttgagaacagtattcgtccggtgggtgcaccaaaagaaaagggcctactgacggtcaaggacataaccattccactgcgacaggagtacgtgcgtaaaatggcctcgaacaacattaacggccatcatcttgtgtgcctcctgaagtacaatgagcacgtgctggccaccaagacagtacccacgatgccagggctgctgtctgtcaagtttcccgatgtcctgcaactaaacaatgtatatgctgacttcaggatcacgctagaaatctatggcatgttggcccaacgcgatcagctgcctcacgagctgaaataccacatcaacttgaacaagaagggtggcatcaagacgccaaagaagaagggcggcgagaatcgactggtgatgccgccagtacaaagtccggcgggaccgcatgtggtacggacaccgcagctggtgcaatacggctttgccattttctcgctgcgtgaaattcaacgcaccacatggacgctgacccaggtgctgggcgtcagtccactggagggtgtggttcacatgaaagtcaattgcgaactatccgtaagcgtggagtacaagggattccttaccatgttcgaagacatctccggtttcggggcatggcatcgtcgttggtgctatctgaatggctccgtgatcaactactggaagtacccggatgatgagaagcgcaagacgccaatgggtagtatagatctgaattcctgcacttcgcagaaggtgaccacggcaccgcgcgacatttgcgcccgtctcaacaccatgctgctggagtgcgaacggccggcgctggagacagaccaagagtccttgataatcgtacccaacggacgtaccaccacggtgcgccatctgctctcagccgacacaaaggaggagcgcgaggagtggtgcgcctaccttaacaaggcactgacactgctgcgcgcctggggaaccacccactgacccgctgacccattgcaattttgtcagcagcacggacaatgaccacaaacgggcgggttgttaacagttttctctttttaagttactcaatttgctattttaatcgtgttcgcattggtattaattttgttttatgtttccaattcaaatttttcgtttccatcttggagtgggacacgttcgtgttcgtctatatcgacataactttttacttatgtacatttaatttaggatgactcgctaaatatatatgtgtaaacccccgtaaaaagaactaacgccaattgtacactgattatttaatatagtttattgaatactttt

SEQ ID NO: 3360 - protein, 1232 aa, DROSOPHILA
MLEKAEQRSRALGISNASKFPLVECSVPSSSATSASGGDAGVLAPRSRSPGGQSAASGGGKVVTLGKATLEASPAKPLRHYTAVNKENLDMGIEINITTDKPIGVQVEIQEQEVTDDEEQAEGGALNPLLEAEPVNQPLARLRDTSRSRLQRMGALYSNTDDLSSPIHRTEGQFHVTTGEEEDCGNRSSRQPKQRLGKLAALADTINQWEDDTSHHEVHRLLEAPPPKPHLSSRRAEKGPAPLPPKKDEVDEASRTKQLKWDPKVLSSLEAQGFQRRESSTIKHTYDYAKQEEAAPASKVEDAVLTAKPPVPQKSTTVSQVAKNFASSAPAPKPAPAPAVSVKSGLVSGRAALFENKGTGGQSQGLRNQKDPCELSLKERMKLFETGNNKAMLPMAPIGSAPSITQIRAEEVKQHLAAMHPVTAAAATTVVAATKPKQENKLRDKVAALVANAQSSAETRIKDIDRQRQEDMQIISNRFNKQKELFDNQPSDSSVAAQARPPAPAPSRVVRPMPPPPPPPIAALSPGLASSKRRSPGDAPTTDEDSKRARKSHSDRLYPALSDLDSSGDNCCAAETASATDDSHQQDEEETESCMDESDDQSQTEDSSAGMCNGSLGREIMSAVQRNEVEMQQQQTGKKTVRYADQDMYYDDSSLNSSQVSAGIDDYLDEALVEDYGSTQDDQSDSGDEQNASRLSLGSKGTTASNSFSFRKNPASICTPIEEHHEMEMDLQTPLLSGAQPVKSELSVNQDNDNLVTLVHTVSFYRRQQSANSSNSTPVRKICREQQVMRSALAGDCHAKHRLEYDSPQQSDYVAAATDIADQTDEDDEEMQNAREVNDASQAQDKIKKLLSEVCKQQQVIGQASQALNLCAATVEFSGSTESVEGERYLLLATHRRQACLDEVQRLRVENSIRPVGAPKEKGLLTVKDITIPLRQEYVRKMASNNINGHHLVCLLKYNEHVLATKTVPTMPGLLSVKFPDVLQLNNVYADFRITLEIYGMLAQRDQLPHELKYHINLNKKGGIKTPKKKGGENRLVMPPVQSPAGPHVVRTPQLVQYGFAIFSLREIQRTTWTLTQVLGVSPLEGVVHMKVNCELSVSVEYKGFLTMFEDISGFGAWHRRWCYLNGSVINYWKYPDDEKRKTPMGSIDLNSCTSQKVTTAPRDICARLNTMLLECERPALETDQESLIIVPNGRTTTVRHLLSADTKEEREEWCAYLNKALTLLRAWGTTH

SEQ ID NO: 3361 - DNA, 15207 bp, DROSOPHILA
gccttccagtttgcacggaagcatatcgctggacttccaggccagggtgaaaacagtgcacagtgagctctccacccagttatcagcggccggtcccagtccggatcgtctgaaaaaggcagcgaaaaagagctattcgaatggtagtgaaccggagatgctctctcccctgaccagccccgtccaaacgcccaccaaggatcagaagaagcagcgcaagtcaaccacctcaccgcaatccagtccggtcagcaaggactgcgacaagctggcacgaaactggttcctcagtcgccttaacaagagcaccggattgaaggcgaccaacacgggcagtgcatcaccaaccaacgccaagtgcaagcagagcgagaaggagaacctgctgacggaagcggagctgggcgagggctatgatgcaagtcctggtgatcggtatcacggcctgccgggcagcccgcccacgtcgccgtgtctgaaggcggaggccaagagcaaggtgaacatgattatcaaccagtttgagagtagcggtcacctgtccaccatgttcagcgtggaagctttggccgccaatgcactcgcctcgctgacatccttctgcgaaagtgatggttgcaacaactacgagccaatcatgcccctggccacgactcccagcagctttctcaagaaggtgtagactgccgcacatccgtcatctgctattcacatccgacgtcctggagagctcgttcgtctctgtattgtagatttaatccttaggctagtgaaaaccactctccggatgtcacataactttgacataaaattttaatatcaaaaccatggttgttaacatacgtaaaagtgcgacatgtaagtttgagttttccaattgggcgcacggtgcttggacagaaaaaatcttgatgatcgaggtagatttccatgtcgttgctgctgtcgtggggatgtgattggattataatatagttgggaaataaattcagttctattgtcaattatgagccggataggcgatggtggcccttaacggattgggatcggagcgctgagattctataatgtccacaagagcgtcacgtttgcgctcatctgccacgagcactaactttcgaggtgactccttgctgctaaacagaccaagtaccttcttgccatccgtctttactgtgaactggacaccgcgagccgttgcagccacggagctaatctcgttccataggtaggaccaaagagactgtgtgtaaaagaagtataagtaaggtccaactactgaaagttaacagcaaaactcaccgtccaaacgccgaacatctcgttacgttgcacgtacatcacccggtaattggtcaccaccaagtactcggacttttggataatctcctcacagtgaatgaagttatctgtggtggcaaatttacccttgtcggtttccctgcgagtatatttggttaagttcgcgttttttgtactccagctgaaaatctagtagctatcgacacttacttcattattttattccctgtcgcctccatcaagcaatagggtctcaacacgaagtcgtagtgctggaaacgcggcggtcgcatacgcttcacatcctcgcttgcatccgccgcccgtttcacagcctcgaagctgccactggcaaagtcaaccacgccagcggtggggcgagcaaccaggccaattgcacccttacccaggcccttgaagaagccctcgaccccgttatcgcgagccccagtcactggtttggttacaacgccagtgacaccgtccacaaagccctgataaaattatagagtcatatggatttcaaactgatgaaccacatagatgaggtcttaccatcactagacccttgctgctgcgggccaatccttcgtggaagttcttcggtttgttttgaataccctgtcgtcgtttcttttgatagtcctcgtcgaaggtcagcgcagccaaaccctttcccatagcaccagttattctaatggttgaaaattgaagttggtattagagggccgactgtactttgattaaagggcagcttacttcgaaaccgctcccgcagcaccacccacagtgtggccgaaaagagactttacgcccaggaccaaaccctcggcgaattctccaggaccttggatggcaccctttaaaatgataaatcaaacaggtgagcgatagaattagttaaaaattaagtttgattcacctggaacggttcatagaacaagtcttcgacgcccttcttaagaccaaccactaggccatagggattgcccaggacatcaagtccgaggacgagcacatacagctgctttaacgcttggccagtgtagtgtgaggtgatctcgttgattagctgcttttgggagaagaattgatactcgcgctcgaagaaggccagacggaaaacaacatcgtttacgtccgttagagtcacacccacgccctggaccaatgagcccaagaaaccgggcaacgcctttgtgtccgacccggccatcgagaagctgacatggatcttgagcggacccaaatgcaggttatcgtaaaagctcttctgctcctccaacgagtgctcttcaaagaacgctgaaagcgggagctcaattgattcaacatcctgacggaactgcttagctgctgcctcgtccgagacctccttggcaaacatttcggcgatggcagtaaggaagttcaaatcgactttgaagaggaactcttggatcagtatcctggcgtacttgaactgacgcacagttgagttcggcatgatgcgctgcaccatgctgcactcgataaatggtttaagactggtggtacttgccacactcttcgggggtggaattggcgccaacaccacagggaatattggatccaggaactgattatccacctgtatacgattaattttcacatgcagctggctttggaatggcgacgacttgcgggacaaccaaatcgctggatagaaactgcgtcttaagtttctctccaccgtcttcttgaggatcataaggtcgaagtcgatctaaaaataaacaatatacgataaaatctccgaatgccgagttttttttttttttttttttttggtttttcttaccgggaacttgttatctagcttgtaggtctgcacatcgttgacactcttgtgaactagatatttttgatactcaatttccaaaagcgcgttttcgttaatggttaactccttaaagcgattcttggtcactttctttgactcccatataatgccggagctggtaactcccagataaagtatgtcaaggcccgtctcgttgttgatcactgacaagccaatgccgtgaatacgcagatcaatgctctgggtaatagactgtaacgaggccgtgctttccgtacgattggcgatcgattcgttttccgtaaagagcagcacacgttgcaggccgtcgaggaatgatacccatagaacctttccgccgtcttgcatgctattggttttgaattgttaattatgagatatagattttaggagtcgtagtcttgctcttagaagatacttacatcacttcgccaattccgtctcgtttcagatccgtctcttccttgtttgtgccgaacacaagcatttttggacctgtaggatcgtcccaggcatacattatagtactctttgcatttaggatatgctcgtttttggttcccttctcgtggtaaacaatctgcttgccagtgtgattgatgagcaggccaggcgcatcggctggcttatagtccgtaaaggtgatatagacgccgccttccgttgtctgaacgtccacattgataccgccgtacttgctgtcctccagtttcaggagcgtacagatcacctccgtaaagtcgaaggccggtgtaatcttgccatccacgcgcaccaccaaattgttctttgtgtcgtttctcggccagagaggttccatctcatttggctcgagatggagccatggatcggctggacgactctgctcctgcagttctatatcaaagtgacacttgttgcacacaatataaaagggtatgaacgttatctgcttggtcaaagagttctgtgtcaagtggttgtgaacaccgacagggtatttctgattgttcgcaaagcagatcacttcgccaaccgaacccgccacgtccaatggaatcttttcactccattgaccattgtctatgcgaattgaagcttttttcttgtcaaagaatagcttatcccggaaagtgaacaaaatgggaccagaatactcaggaggatggtagagaacttccacggaggtcgtttccgatttgtaagtgagcatcatgccggtcttattgatcatccaaaaagggctaaaaagcgtaagcatcaagctgccatgtcggttctctgttctgaaaaatatatgaatatgcatatattatttgttaaattaattaattatcacttacttcacataaagatccatgtccaccttcatttccgagtcatatgatgaaaacgtccaggtaataacatcatcagtgtaatcccagatctcggtagcgcaggaccagtctttctccagatattgaaccagctaaaaaccacggaagtggtcataaattgcgatcaatttttattatttgagagatactcacccgcacaactaggaaactcttcgattccttgcctttcgaggccaatcgaacggtcggcaggtggagcacgtcgccggaatttacaggcttttctccatagtccagaaagtcttccttacgatagcctctgtcaacaaagcgctgcgacgactgtgcatccaggccatcctcttttcggacagagcagccggcaactgacacttggatattaatgggcagagagttgcgcagatagagtggagggcgcagatgaatcgtgtagaaggcgcttagcaatgtatacttgttggtgttttcgaagtacacctccgattttgatcttcgagcgttcatgataagcggttcgaacgtattggtcggatcacaatgcaactgatgcgaatagttaaggtccgagggattggaagcccacgaaatgccctgcactgatcttctgtagccgcgcatggaaaagaataaatccttggattccgcgtatatggcgtgcagtggtacatggaacacttcgccgggacgcacacgtccgacgaaaatatcctcgaaacattgtgcagtaggggcaggattgcgtcgataaatattcaagccggtcgtaaagtgattatgaacctgcaatgaatggagttggaattaacaaaattgtatatacgatcaaactgctagtacttacactaacaacaccatggatattgactttggttgtgccgtactcctgctttacttcagaaataatgccccaaggctcgtgagaggtactgcgcatcaggttgaagaaacgcgtgtccgacttggaaacgggcagtgcgatctccttgttgatatctccaatctgcaaaagaaacgttttaatagaattgagaacacttaactgagcaacatttccctcctaccgtcacataaagagtgtagtcctcggaatcctcttctgataacgtgctcagatccttagtctgcagatatgcccttccgcccgtcgaaatggtgcaggtttttatgacgctgggatcgacctcttcagattgggccaccataagaagggtactatttgcacccacaggtgtgccgccgcggtgcacttcgtgcagtgtaaagatgcccttccgcagattcaggttaacatcgaagccagtgtcgttttccagcacgtaaggagccacgatgtctggcttggtaagaccgttctggtcaatagcctgcgagaaggcctcggccagttcgctcaatagacccaggcacgtcttgctcaacgtaatctccagcgtctctgccgagtggatgttcatgtgcatcgcctgctgttcagcatcgtcttccaattcgctctgcaccttctccatgcccatttcgaacttaagctcccatggcgtgtattcacgaacgccgttgcgaccaatgacctcgttcagctcaataataggctcccattcggcaagggcttggttatagtaattctaaaaaaaaagtaaaatgttacataaaaaaaataattatttaagaagcccagggttgcggttatcggaactccttggagaactccttaccatatttagtgtcaacgagccatgagcggtgagactgcggctccaattgttgaaaacggcagtaatgcgggtgtctagcgaaataagtggcttcgtgtagtagcctacgccggactcaatcacgagcgtaatgctgggaatttcaattacacacttttctgtcttctgcttttcgttgtcagtgctgacgcttctctgctcagcctccagggcatcgacgccctgttccaccttggtgaaccaatacgtgcggctatggaagtggtgctgatgccacagattcgaatagttccgcgactcctcggcaatagcgcacttggtcatggtgccactggagacgctcagcattgccttgtttagcagctcgatggtggccggcgacacgttgatgataatgtcactgagctttaggctaatgtgcatgccctcttcttcgggagttgatccttgcaggctaataacgcacgggtgaaggatataatgacgcgtcatctctcgccgctctggtaggaaagcacacatgtacatcttcagagcatcgatctgtccgtttacaatctgtttgtcgtttatgctgcggtaattcaaatgcacttgagcctgaataaaaattgaggtcaattaaggattatcattatatctttcgattaactttgattaacttacattgaaaataatacaactggtattaagatcttccagattttccactaatattatatctggctcgtcaatatgcagtattaaattcatttttcggtttggaacttcgtgacctagaacaagcatatggatgtcagggaatctttgagatttaataacatttgtgacatactggatgactcgacaggaaccagctcttgggcggctaatatggcggaggagcgaatagagtgcttggtatcccgagcagtttccgaaacaggcgctggctttatataaacagactcgcgcggattctcctcaggcggcaaggtaagaaacgtagtcagtttcagcaggaagtcgatgcagacgatcagatcgaagccacgcacacggacctcagctgcaaaatatcgtatcgtatcgtatatcgtatttataagaaactaaaaaaaaaatggtatcacctaccgaacgtgtcatcttcttttattatagccgtcacatcgaccatgaagttgcgctcgttgtaacaggcatcgatgatctcgtctgtatccaacttaggctgaacccaatccttgcgactcaagtactgtcggatctggcttttggaattacttcgcatgtcatccatttgaatattgcacaatacaacagaagtgctcagtgtgccgttgtccaacttggtgcccttaacggagaggaaatatattccaaacctggcgagtcctgctccttcaccttcagggcaaagcaggttagtcgcaggctgagcttatagcccgttaagttacttaccctccattaaatttatgaccacaccgtcaaactgaaagttaaacttgattgattcgtgaatcttttcccttatcggagaaacttgaacggtacgagataaacgtcccgcacgagagttgcgtctttcgggtctaacttgtgcttcctgcggcgcctcctcgcttggagggaactcttccaagccctcgtttaaattgcgattgagaacaagcattaccaaagcataatcatccgcgaatagagtgagctgcaagaggagataaagtcgtctcagctgtagctgaaatcgatacgaatatatcttatttacctcaatggactttaatcgaccggaaagatttagttcgggcacatcccggtaccatgtgtatgacaaattgcgcgtgattgataaggtgcaactcatgggattcatcatattgaatttagagaggaaacccacttccgcgtccacttctaaataaattaatagttgattagtagttgtacggatttggaattacataaaattattgatcttaccatcaaccgttgactcgttgccatctaataagacaattttggaaatcttaacatcgcatatttgcaacttgatctcgtctataacagctagccgttcctcttcggccaccgccacctccaccgtgttattcgttagctccagtaagcccaaatcgagcagcaaggcattcctgtcctgtgacccaattggcacaatgataatgggagccttgatgcggatatttagtttcatacgagtggccgtttcataggcatccattgccttctggcgagcggactcggcagccgcagcaccagcctgcgatatggttgcttgggccgctgtgaagttgtttaagaagttctgcaaaggcgtcaggctcattaaaactaatgcttatatattttaatctcatagatcttaccataacacctgccacaaaccaattgaggaagatgatcttcatgcagccaatgtccacggttattttcatatcatcagagttgtagtcttgggtctcctccttgttgtagatcacaatctggcagttgaaagcgtccttgccaacaatactcagaatctgaagaatagaataaattgattaattctggtcctcggacgattaagctacttacattcttgtgaatagtgtaaggatttaggtccaacacctgaatgtctttaaggccaatgttgacttccgtgtaggacgactttatgatcagactggacacgaatttcttcacattcatctctgctatcggccgctttcggccggtcagcaccagacccacttgatccaaattagcgataacacgaactttcaccgtctctacgacgtgagtgcggcgcgtcttctttcgccgcttcatctggtcggtggtcattatttcctctgtgtcctcaagaataacattaagcgtacgtttaatgccatctcctcccccaatggagcccatccgatcccgtggtcgggtacttgatagtacaagatctaggtttctttggaaattgtttacgacctccataatcctttgtaggcattcctggtgcagcacgatttgaagtacctcgaagttagccacgaccaactgttcagtggagttgtacttggtgctgaactctggcgacgacttgtctgcaattgtgcacgagacggtgaacaggtaattggaactattctcctgtttcggcgtatagataacatctagtacatccatgtcactgtcctggcagtcatactgtcgcaggttgatatctccaagtctaaaaacaaagaaagtatggttaaaagatagtttaaagacagattttgtaacatctttacttgactgtggccaccgattcataggttttggacacaaagtgggcctccaggcgtcgaatgtcgattgagagaatctgctgaggtggcgttgggggtagctcttcaataggctcctggatattctcagtcaactgagaaggaaggacatcaccatcaggagtcagaaattcaatagaaacatcggggcttgtctcgcattttctactggactggaacaaaacgaagttgatttctccaagagaaaaatttacatcgagactggtgtactgaatgatctcgtccagcaacggatccttactggcagagctccccgatgccgaaggcccaatctttttcacttccttgttgatgaaattggatatggacattgagctgcgcgagttcgtctgtgtgagtctactagccggttccttttgctccggcaggggaatacttgttgccacctttatggcgaggaaaatgcgatcctctgagacattaactaggatcgcaggcaagtcgatgtccactttaatatttggaagacgcggatcattgtcaaccacacatagtgcggcagttacttttagggagacggggcgcaaaacgtgcatctccgttgagtttgcctccgctagcgcattttgccacggctctccagctcgcacgaccagcatctgcacatcgtcaactgcgactgtaaacctgtcataagcattttccattaccgtcttgaggatctcatccttatcctcgccggctgagaaaagatgctgcagcttgttcgactccctacgcggttggctggagaggtgcacctggcccatgctaactactagcagggatacgttgcccgcatcgtagactcctttatgtggtacgaccaggatgtttggcattaacaggatgtccacatccagcactgccttcttgtcgatcatgtactgcattccagtggctgaacgctccttgaagttcgagattttcgtgctggcagcatcctcaaacttggagagcgtgacatcgccaggcgtctggaatgcgtttatcagggccaatatggttggcgcatcatacgttatctgcaacgggcgcgccacaaccttcactcgctggtcgcacaacttgtccagtgggtttgtctcgaaaaacacttccagcaggttgaactcgtcggtgatttttgactcaaccaataaaggcgtgtaatcgttgcgcgtgagaccagttaccttgatttctctcatgccagcaataatgctgatggcttcggcagctggccgttgggtgatcaacgcggtggccatagaaaagttaagaaggaccagcgacggcagctcatggaagtccttcgttgccgcggaactattacgctcatccttgtaaaggccgacctctaaggctatcagtttaaagttcatcctgatggcctcgtagctctctggaaggtctgtgggcttggcgttctcttggtaaccaatagctctgtacatcttctctttctcttcactggtcattgccgcttcaaacttctcaactgaaaatttaaattgaaagatcgctcttctgtaaaataattaaatacctaccaagtttttgactggtggtttggtcatccttcttggctccgccgccccatccccaaccactgaaccagcccgacttttgttcaggcactgcctctcgttgcttggctatctcgatgttgaccctctgccggattagcagcaagttaaaaacgtccagctccgtttctagcaaacggcaggtttccgtaagcacggctgacggttttttgcttaagcactgctccttgtatttctaaaacgtaaaatgtgcactgtggatactgtagtttctttagttaagacattccacacacctgtgcataagtgttgcagcgttctctgtgggtcttgatgtgtccccaagtccagctctctctgggtttccttacttcctcctctagaatagaagttattgcaaagtgccaccagtccctggcgtggcctttgtatgctaaaaaaaataatacatcaatttatggttaataactactgaaaaaaatcagagtctgatcaatacttacgtatattgtagggacgatatttccggtacggtatgcccaactgctggcggttcatagcgtctccaagcttcatgagattgtcgaactgtgtgtttgtcaagccgacattaagcttttccatttccagcgtaagatcgattttaggtttttcaaatggcggatcatcgagctccgggttcatgtttagctttagcttggcattgcaagagataggacccagcactataaccgcaaggaaacgttttaggtgtttctcgtacagaattataaaatattaccatagttgtagttgggttttgtttccttgcaagcaatattcgtcttgaactgctgtgaaaggtcgctcttgttgttcgcgtacagttgtccaccacagttcaaataggcggaaagacatgagagattcgctattttgaagacctgcgacgcctgctgggccatgtagcacttctcccagtcgcaatcggtggtgtaaagttcgagctcatgcagggatatgccgaaggagaagggactacccgtcgttgtggtatcctcgtatcgcagatgaacgttggttatctgcacctgcagattgttaacgatctgcgccgttagcttttcggcaaatcctgcatctgctttgggctgatctgtgaatgagtataatatatatatatatatttcgattcattcaaagaatggaaaagaagattcgcttacccatttccaactcctttttgcgagctgcctccagggcatcaagcgccgccttcttgaggtccatctcatatttggcctccttttcggcgttgtactggacattgttgttgggtgaaactaagacataaagatcctcaatgttgacaattaccggctggctgtacaaattcttccaggggatcttaagcactagtttgcctgcaaatttattaaattcacagtgtatgagtatccaattcagttggaaactaatgctttacatacccaagtaaccatagataagctgtacgggcaggtccaactcgtccagggcattctcccgtatcttgaggttctgcaagacgacatcgcctgccaaacaaagacagaatttgctttcattagtcttatcagtcgcagtaatcagtcatttgcaaaagtgggagcgaatgcctattaattaattacgggttaattacatagggagagcgctatagctacatttatatatgactaaggctttgcaaagtgttaagtacgcaaatggaaaaagcagcgggcgcaccaatatgtcaatactgtttaccaatgtctggcattttgggcatgcggcatttatagttgttaagtgtttgttatgcttggaatgcaaaatgggcagcacaattggtgaatatactatacattgaattacgcttgtgtgtcaatagtttaacgaccaagcgaccccattaaagttatccaacatttgaggccagtcgaatcgcactgataggaacatgtttggccttactttacaaacttcatatctggccaataatcataattctgcaagtggtgttcaattatcgacattaaatacaagagtattaattataagttactctgataacagtgttgtaacaactgattaaattagattgcttcaataaacaagaagagttattcacctgattgcattttacaatatatgtacatataacacgcttgacttgtaaattgcaaaatgaaaacaaatatgaatcattgggcaaataatataatataaataatataccctgcatagaagcaatatatacacacatattccattgacttaactaggtcatttttgattagttaagctaatcagttttattcaaaatatttaggtattgtagagaaaatatcattttatagcatatattcattcatttctaacgaagcataagcccggtctttcttacttcaagcatatttgaatgaaatactcttatataagtttaaaacaaaatgctaattaacatgaatttatgaacgcaaggcattatgtcaccaagttcaagatcagccgaattaaaacaggcttgtcgccgaacgtcactctttgaacaaacccgtttactgggtttgtcgcaaacttgtcttcgtgaagtggaatttacaacccacttaacatgaagtgaagtgagtacattcagataaaagaccgaagaattgtttatgtttcacacagaaaccctatacaagtagatttgtaaataaaagatataaaggcagagactaaatgagctcatggagagccaagagaaaccacaagaattgctctatcgcacagcaagatgcaacagttgtcccacccctcgaagtctgaatgctcctccgtcttttctctttctcagaagaattcattgggttcgcatgaacttgcgaatacggctcacttagaagcgacgaaattaggtcattaatagtattttgccaaggataaggtcaccgccatcattgttttttctgggcacttgcgtgcaaatagaccaataaacaatgggtaccgcagtaaggcgatgtttttgcgtgagggtggagcagaatggtgtcatcctctccggggaactggaactcacctccccaaatgccaatcttcagctggttccggtccaagttctcgatgtagtcgccgagcaccttgttcagcacatcggccaccaccgcctcgaagaccattgtgtcctagcagatgctcctattgattttcctccaagtttgtggttgttattccaattgatgtggtcgtggtgagtgcttcaaacaatctggcgttcgctgtgcggtctatagttgatctaaaatacatgcatatgtaaacacagaaaccaaacagatggaacggagagacggattaaaacacaatgtcgatgatgtcatcgttgaacgcatttcaaatattttggcacaatccgccaggcccattgttccaaaataaactaacaagccaaacgattgtccagggtcagctggagtagggctggtgcgattaactcactactccactccagagcacgtgtgcaacgcccgttcttatctctatttactgcacccaattaccagcggcatttccacgcgacaaaaaagtagtaactccgtgcgatgcgcgttctttaaatgctcgcccgaaactaacagctgttgtgttttccgtttgcgttctccacctggggacgctcaatcagctgttcggtcgcgttcccgggcgaatggcaaactgttaggtgacgtgtttgaccgtgcgaattgctgagctataggaaaaatatttataaaacaccatgcaaacacgtcttgttttgctgctgctagctctgaccccgctcgtcctggccaagaagttcaaggaggaggagaaaccggcgtgggccaaaaaggatatacgcgactacagcgaggcggacctcgagcgtctgctagatcaatgggaggtaggtaacaacactgcgattggaaagcgacacatcggacccaactctccagattcgcacctagcaagggagtaatgccaaccctttagattcccacctatctaaggattcatcatttgtagagacggataactgataccccttcttttaatcttctcttaggaagatgaagagcccctcgaggatgatgagctgcccgagcacctgcgcccccagcccaagctggacctgagcaatctggacagcaa

SEQ ID NO: 3362 - DNA, 9729 bp, DROSOPHILA
atggtcttcgaggcggtggtggccgatgtgctgaacaaggtgctcggcgactacatcgagaacttggaccggaaccagctgaagattggcatttggggaggcgatgtcgtcttgcagaacctcaagatacgggagaatgccctggacgagttggacctgcccgtacagcttatctatggttacttgggcaaactagtgcttaagatcccctggaagaatttgtacagccagccggtaattgtcaacattgaggatctttatgtcttagtttcacccaacaacaatgtccagtacaacgccgaaaaggaggccaaatatgagatggacctcaagaaggcggcgcttgatgccctggaggcagctcgcaaaaaggagttggaaatggatcagcccaaagcagatgcaggatttgccgaaaagctaacggcgcagatcgttaacaatctgcaggtgcagataaccaacgttcatctgcgatacgaggataccacaacgacgggtagtcccttctccttcggcatatccctgcatgagctcgaactttacaccaccgattgcgactgggagaagtgctacatggcccagcaggcgtcgcaggtcttcaaaatagcgaatctctcatgtctttccgcctatttgaactgtggtggacaactgtacgcgaacaacaagagcgacctttcacagcagttcaagacgaatattgcttgcaaggaaacaaaacccaactacaactatgtgctgggtcctatctcttgcaatgccaagctaaagctaaacatgaacccggagctcgatgatccgccatttgaaaaacctaaaatcgatcttacgctggaaatggaaaagcttaatgtcggcttgacaaacacacagttcgacaatctcatgaagcttggagacgctatgaaccgccagcagttgggcataccgtaccggaaatatcgtccctacaatatacaaacggagctggacgtttttaacttgctgctaatccggcagagggtcaacatcgagatagccaagcaacgagaggcagtgcctgaacaaaagtcgggctggttcagtggttggggatggggcggcggagccaagaaggatgaccaaaccaccagtcaaaaacttgttgagaagtttgaagcggcaatgaccagtgaagagaaagagaagatgtacagagctattggttaccaagagaacgccaagcccacagaccttccagagagctacgaggccatcaggatgaactttaaactgatagccttagaggtcggcctttacaaggatgagcgtaatagttccgcggcaacgaaggacttccatgagctgccgtcgctggtccttcttaacttttctatggccaccgcgttgatcacccaacggccagctgccgaagccatcagcattattgctggcatgagagaaatcaaggtaactggtctcacgcgcaacgattacacgcctttattggttgagtcaaaaatcaccgacgagttcaacctgctggaagtgtttttcgagacaaacccactggacaagttgtgcgaccagcgagtgaaggttgtggcgcgcccgttgcagataacgtatgatgcgccaaccatattggccctgataaacgcattccagacgcctggcgatgtcacgctctccaagtttgaggatgctgccagcacgaaaatctcgaacttcaaggagcgttcagccactggaatgcagtacatgatcgacaagaaggcagtgctggatgtggacatcctgttaatgccaaacatcctggtcgtaccacataaaggagtctacgatgcgggcaacgtatccctgctagtagttagcatgggccaggtgcacctctccagccaaccgcgtagggagtcgaacaagctgcagcatcttttctcagccggcgaggataaggatgagatcctcaagacggtaatggaaaatgcttatgacaggtttacagtcgcagttgacgatgtgcagatgctggtcgtgcgagctggagagccgtggcaaaatgcgctagcggaggcaaactcaacggagatgcacgttttgcgccccgtctccctaaaagtaactgccgcactatgtgtggttgacaatgatccgcgtcttccaaatattaaagtggacatcgacttgcctgcgatcctagttaatgtctcagaggatcgcattttcctcgccataaaggtggcaacaagtattcccctgccggagcaaaaggaaccggctagtagactcacacagacgaactcgcgcagctcaatgtccatatccaatttcatcaacaaggaagtgaaaaagattgggccttcggcatcggggagctctgccagtaaggatccgttgctggacgagatcattcagtacaccagtctcgatgtaaatttttctcttggagaaatcaacttcgttttgttccagtccagtagaaaatgcgagacaagccccgatgtttctattgaatttctgactcctgatggtgatgtccttccttctcagttgactgagaatatccaggagcctattgaagagctacccccaacgccacctcagcagattctctcaatcgacattcgacgcctggaggcccactttgtgtccaaaacctatgaatcggtggccacagtcaaacttggagatatcaacctgcgacagtatgactgccaggacagtgacatggatgtactagatgttatctatacgccgaaacaggagaatagttccaattacctgttcaccgtctcgtgcacaattgcagacaagtcgtcgccagagttcagcaccaagtacaactccactgaacagttggtcgtggctaacttcgaggtacttcaaatcgtgctgcaccaggaatgcctacaaaggattatggaggtcgtaaacaatttccaaagaaacctagatcttgtactatcaagtacccgaccacgggatcggatgggctccattgggggaggagatggcattaaacgtacgcttaatgttattcttgaggacacagaggaaataatgaccaccgaccagatgaagcggcgaaagaagacgcgccgcactcacgtcgtagagacggtgaaagttcgtgttatcgctaatttggatcaagtgggtctggtgctgaccggccgaaagcggccgatagcagagatgaatgtgaagaaattcgtgtccagtctgatcataaagtcgtcctacacggaagtcaacattggccttaaagacattcaggtgttggacctaaatccttacactattcacaagaatattctgagtattgttggcaaggacgctttcaactgccagattgtgatctacaacaaggaggagacccaagactacaactctgatgatatgaaaataaccgtggacattggctgcatgaagatcatcttcctcaattggtttgtggcaggtgttatgaacttcttaaacaacttcacagcggcccaagcaaccatatcgcaggctggtgctgcggctgccgagtccgctcgccagaaggcaatggatgcctatgaaacggccactcgtatgaaactaaatatccgcatcaaggctcccattatcattgtgccaattgggtcacaggacaggaatgccttgctgctcgatttgggcttactggagctaacgaataacacggtggaggtggcggtggccgaagaggaacggctagctgttatagacgagatcaagttgcaaatatgcgatgttaagatttccaaaattgtcttattagatggcaacgagtcaacggttgatgaagtggacgcggaagtgggtttcctctctaaattcaatatgatgaatcccatgagttgcaccttatcaatcacgcgcaatttgtcatacacatggtaccgggatgtgcccgaactaaatctttccggtcgattaaagtccattgagctcactctattcgcggatgattatgctttggtaatgcttgttctcaatcgcaatttaaacgagggcttggaagagttccctccaagcgaggaggcgccgcaggaagcacaagttagacccgaaagacgcaactctcgtgcgggacgtttatctcgtaccgttcaagtttctccgataagggaaaagattcacgaatcaatcaagtttaactttcagtttgacggtgtggtcataaatttaatggagggtgaaggagcaggactcgccaggtttggaatatatttcctctccgttaagggcaccaagttggacaacggcacactgagcacttctgttgtattgtgcaatattcaaatggatgacatgcgaagtaattccaaaagccagatccgacagtacttgagtcgcaaggattgggttcagcctaagttggatacagacgagatcatcgatgcctgttacaacgagcgcaacttcatggtcgatgtgacggctataataaaagaagatgacacgttcgctgaggtccgtgtgcgtggcttcgatctgatcgtctgcatcgacttcctgctgaaactgactacgtttcttaccttgccgcctgaggagaatccgcgcgagtctgtttatataaagccagcgcctgtttcggaaactgctcgggataccaagcactctattcgctcctccgccatattagccgcccaagagctggttcctgtcgagtcatccagtcacgaagttccaaaccgaaaaatgaatttaatactgcatattgacgagccagatataatattagtggaaaatctggaagatcttaataccagttgtattattttcaatgctcaagtgcatttgaattaccgcagcataaacgacaaacagattgtaaacggacagatcgatgctctgaagatgtacatgtgtgctttcctaccagagcggcgagagatgacgcgtcattatatccttcacccgtgcgttattagcctgcaaggatcaactcccgaagaagagggcatgcacattagcctaaagctcagtgacattatcatcaacgtgtcgccggccaccatcgagctgctaaacaaggcaatgctgagcgtctccagtggcaccatgaccaagtgcgctattgccgaggagtcgcggaactattcgaatctgtggcatcagcaccacttccatagccgcacgtattggttcaccaaggtggaacagggcgtcgatgccctggaggctgagcagagaagcgtcagcactgacaacgaaaagcagaagacagaaaagtgtgtaattgaaattcccagcattacgctcgtgattgagtccggcgtaggctactacacgaagccacttatttcgctagacacccgcattactgccgttttcaacaattggagccgcagtctcaccgctcatggctcgttgacactaaatatgcctattattgagctgaacgaggtcattggtcgcaacggcgttcgtgaatacacgccatgggagcttaagttcgaaatgggcatggagaaggtgcagagcgaattggaagacgatgctgaacagcaggcgatgcacatgaacatccactcggcagagacgctggagattacgttgagcaagacgtgcctgggtctattgagcgaactggccgaggccttctcgcaggctattgaccagaacggtcttaccaagccagacatcgtggctccttacgtgctggaaaacgacactggcttcgatgttaacctgaatctgcggaagggcatctttacactgcacgaagtgcaccgcggcggcacacctgtgggtgcaaatagtacccttcttatggtggcccaatctgaagaggtcgatcccagcgtcataaaaacctgcaccatttcgacgggcggaagggcatatctgcagactaaggatctgagcacgttatcagaagaggattccgaggactacactctttatgtgacgattggagatatcaacaaggagatcgcactgcccgtttccaagtcggacacgcgtttcttcaacctgatgcgcagtacctctcacgagccttggggcattatttctgaagtaaagcaggagtacggcacaaccaaagtcaatatccatggtgttgttagtgttcataatcactttacgaccggcttgaatatttatcgacgcaatcctgcccctactgcacaatgtttcgaggatattttcgtcggacgtgtgcgtcccggcgaagtgttccatgtaccactgcacgccatatacgcggaatccaaggatttattcttttccatgcgcggctacagaagatcagtgcagggcatttcgtgggcttccaatccctcggaccttaactattcgcatcagttgcattgtgatccgaccaatacgttcgaaccgcttatcatgaacgctcgaagatcaaaatcggaggtgtacttcgaaaacaccaacaagtatacattgctaagcgccttctacacgattcatctgcgccctccactctatctgcgcaactctctgcccattaatatccaagtgtcagttgccggctgctctgtccgaaaagaggatggcctggatgcacagtcgtcgcagcgctttgttgacagaggctatcgtaaggaagactttctggactatggagaaaagcctgtaaattccggcgacgtgctccacctgccgaccgttcgattggcctcgaaaggcaaggaatcgaagagtttcctagttgtgcggctggttcaatatctggagaaagactggtcctgcgctaccgagatctgggattacactgatgatgttattacctggacgttttcatcatatgactcggaaatgaaggtggacatggatctttatgtgaaaacagagaaccgacatggcagcttgatgcttacgctttttagccctttttggatgatcaataagaccggcatgatgctcacttacaaatcggaaacgacctccgtggaagttctctaccatcctcctgagtattctggtcccattttgttcactttccgggataagctattctttgacaagaaaaaagcttcaattcgcatagacaatggtcaatggagtgaaaagattccattggacgtggcgggttcggttggcgaagtgatctgctttgcgaacaatcagaaataccctgtcggtgttcacaaccacttgacacagaactctttgaccaagcagataacgttcatacccttttatattgtgtgcaacaagtgtcactttgatatagaactgcaggagcagagtcgtccagccgatccatggctccatctcgagccaaatgagatggaacctctctggccgagaaacgacacaaagaacaatttggtggtgcgcgtggatggcaagattacaccggccttcgactttacggaggtgatctgtacgctcctgaaactggaggacagcaagtacggcggtatcaatgtggacgttcagacaacggaaggcggcgtctatatcacctttacggactataagccagccgatgcgcctggcctgctcatcaatcacactggcaagcagattgtttaccacgagaagggaaccaaaaacgagcatatcctaaatgcaaagagtactataatgtatgcctgggacgatcctacaggtccaaaaatgcttgtgttcggcacaaacaaggaagagacggatctgaaacgagacggaattggcgaagtgatcatgcaagacggcggaaaggttctatgggtatcattcctcgacggcctgcaacgtgtgctgctctttacggaaaacgaatcgatcgccaatcgtacggaaagcacggcctcgttacagtctattacccagagcattgatctgcgtattcacggcattggcttgtcagtgatcaacaacgagacgggccttgacatactttatctgggagttaccagctccggcattatatgggagtcaaagaaagtgaccaagaatcgctttaaggagttaaccattaacgaaaacgcgcttttggaaattgagtatcaaaaatatctagttcacaagagtgtcaacgatgtgcagacctacaagctagataacaagttcccgatcgacttcgaccttatgatcctcaagaagacggtggagagaaacttaagacgcagtttctatccagcgatttggttgtcccgcaagtcgtcgccattccaaagccagctgcatgtgaaaattaatcgtatacaggtggataatcagttcctggatccaatattccctgtggtgttggcgccaattccacccccgaagagtgtggcaagtaccaccagtcttaaaccatttatcgagtgcagcatggtgcagcgcatcatgccgaactcaactgtgcgtcagttcaagtacgccaggatactgatccaagagttcctcttcaaagtcgatttgaacttccttactgccatcgccgaaatgtttgccaaggaggtctcggacgaggcagcagctaagcagttccgtcaggatgttgaatcaattgagctcccgctttcagcgttctttgaagagcactcgttggaggagcagaagagcttttacgataacctgcatttgggtccgctcaagatccatgtcagcttctcgatggccgggtcggacacaaaggcgttgcccggtttcttgggctcattggtccagggcgtgggtgtgactctaacggacgtaaacgatgttgttttccgtctggccttcttcgagcgcgagtatcaattcttctcccaaaagcagctaatcaacgagatcacctcacactacactggccaagcgttaaagcagctgtatgtgctcgtcctcggacttgatgtcctgggcaatccctatggcctagtggttggtcttaagaagggcgtcgaagacttgttctatgaaccgttccagggtgccatccaaggtcctggagaattcgccgagggtttggtcctgggcgtaaagtctcttttcggccacactgtgggtggtgctgcgggagcggtttcgaaaataactggtgctatgggaaagggtttggctgcgctgaccttcgacgaggactatcaaaagaaacgacgacagggtattcaaaacaaaccgaagaacttccacgaaggattggcccgcagcagcaagggtctagtgatgggctttgtggacggtgtcactggcgttgtaaccaaaccagtgactggggctcgcgataacggggtcgagggcttcttcaagggcctgggtaagggtgcaattggcctggttgctcgccccaccgctggcgtggttgactttgccagtggcagcttcgaggctgtgaaacgggcggcggatgcaagcgaggatgtgaagcgtatgcgaccgccgcgtttccagcactacgacttcgtgttgagaccctattgcttgatggaggcgacagggaataaaataatgaaggaaaccgacaagggtaaatttgccaccacagataacttcattcactgtgaggagattatccaaaagtccgagtacttggtggtgaccaattaccgggtgatgtacgtgcaacgtaacgagatgttcggcgtttggacgtctctttggtcctacctatggaacgagattagctccgtggctgcaacggctcgcggtgtccagttcacagtaaagacggatggcaagaaggtacttggtctgtttagcagcaaggagtcacctcgaaagttagtgctcgtggcagatgagcgcaaacgtgacgctcttgtggacattatagaatctcagcgctccgatcccaatccgttaagggccaccatcgcctatccggctcataattga

SEQ ID NO: 3363 - protein, 3242 aa, DROSOPHILA
MVFEAVVADVLNKVLGDYIENLDRNQLKIGIWGGDVVLQNLKIRENALDELDLPVQLIYGYLGKLVLKIPWKNLYSQPVIVNIEDLYVLVSPNNNVQYNAEKEAKYEMDLKKAALDALEAARKKELEMDQPKADAGFAEKLTAQIVNNLQVQITNVHLRYEDTTTTGSPFSFGISLHELELYTTDCDWEKCYMAQQASQVFKIANLSCLSAYLNCGGQLYANNKSDLSQQFKTNIACKETKPNYNYVLGPISCNAKLKLNMNPELDDPPFEKPKIDLTLEMEKLNVGLTNTQFDNLMKLGDAMNRQQLGIPYRKYRPYNIQTELDVFNLLLIRQRVNIEIAKQREAVPEQKSGWFSGWGWGGGAKKDDQTTSQKLVEKFEAAMTSEEKEKMYRAIGYQENAKPTDLPESYEAIRMNFKLIALEVGLYKDERNSSAATKDFHELPSLVLLNFSMATALITQRPAAEAISIIAGMREIKVTGLTRNDYTPLLVESKITDEFNLLEVFFETNPLDKLCDQRVKVVARPLQITYDAPTILALINAFQTPGDVTLSKFEDAASTKISNFKERSATGMQYMIDKKAVLDVDILLMPNILVVPHKGVYDAGNVSLLVVSMGQVHLSSQPRRESNKLQHLFSAGEDKDEILKTVMENAYDRFTVAVDDVQMLVVRAGEPWQNALAEANSTEMHVLRPVSLKVTAALCVVDNDPRLPNIKVDIDLPAILVNVSEDRIFLAIKVATSIPLPEQKEPASRLTQTNSRSSMSISNFINKEVKKIGPSASGSSASKDPLLDEIIQYTSLDVNFSLGEINFVLFQSSRKCETSPDVSIEFLTPDGDVLPSQLTENIQEPIEELPPTPPQQILSIDIRRLEAHFVSKTYESVATVKLGDINLRQYDCQDSDMDVLDVIYTPKQENSSNYLFTVSCTIADKSSPEFSTKYNSTEQLVVANFEVLQIVLHQECLQRIMEVVNNFQRNLDLVLSSTRPRDRMGSIGGGDGIKRTLNVILEDTEEIMTTDQMKRRKKTRRTHVVETVKVRVIANLDQVGLVLTGRKRPIAEMNVKKFVSSLIIKSSYTEVNIGLKDIQVLDLNPYTIHKNILSIVGKDAFNCQIVIYNKEETQDYNSDDMKITVDIGCMKIIFLNWFVAGVMNFLNNFTAAQATISQAGAAAAESARQKAMDAYETATRMKLNIRIKAPIIIVPIGSQDRNALLLDLGLLELTNNTVEVAVAEEERLAVIDEIKLQICDVKISKIVLLDGNESTVDEVDAEVGFLSKFNMMNPMSCTLSITRNLSYTWYRDVPELNLSGRLKSIELTLFADDYALVMLVLNRNLNEGLEEFPPSEEAPQEAQVRPERRNSRAGRLSRTVQVSPIREKIHESIKFNFQFDGVVINLMEGEGAGLARFGIYFLSVKGTKLDNGTLSTSVVLCNIQMDDMRSNSKSQIRQYLSRKDWVQPKLDTDEIIDACYNERNFMVDVTAIIKEDDTFAEVRVRGFDLIVCIDFLLKLTTFLTLPPEENPRESVYIKPAPVSETARDTKHSIRSSAILAAQELVPVESSSHEVPNRKMNLILHIDEPDIILVENLEDLNTSCIIFNAQVHLNYRSINDKQIVNGQIDALKMYMCAFLPERREMTRHYILHPCVISLQGSTPEEEGMHISLKLSDIIINVSPATIELLNKAMLSVSSGTMTKCAIAEESRNYSNLWHQHHFHSRTYWFTKVEQGVDALEAEQRSVSTDNEKQKTEKCVIEIPSITLVIESGVGYYTKPLISLDTRITAVFNNWSRSLTAHGSLTLNMPIIELNEVIGRNGVREYTPWELKFEMGMEKVQSELEDDAEQQAMHMNIHSAETLEITLSKTCLGLLSELAEAFSQAIDQNGLTKPDIVAPYVLENDTGFDVNLNLRKGIFTLHEVHRGGTPVGANSTLLMVAQSEEVDPSVIKTCTISTGGRAYLQTKDLSTLSEEDSEDYTLYVTIGDINKEIALPVSKSDTRFFNLMRSTSHEPWGIISEVKQEYGTTKVNIHGVVSVHNHFTTGLNIYRRNPAPTAQCFEDIFVGRVRPGEVFHVPLHAIYAESKDLFFSMRGYRRSVQGISWASNPSDLNYSHQLHCDPTNTFEPLIMNARRSKSEVYFENTNKYTLLSAFYTIHLRPPLYLRNSLPINIQVSVAGCSVRKEDGLDAQSSQRFVDRGYRKEDFLDYGEKPVNSGDVLHLPTVRLASKGKESKSFLVVRLVQYLEKDWSCATEIWDYTDDVITWTFSSYDSEMKVDMDLYVKTENRHGSLMLTLFSPFWMINKTGMMLTYKSETTSVEVLYHPPEYSGPILFTFRDKLFFDKKKASIRIDNGQWSEKIPLDVAGSVGEVICFANNQKYPVGVHNHLTQNSLTKQITFIPFYIVCNKCHFDIELQEQSRPADPWLHLEPNEMEPLWPRNDTKNNLVVRVDGKITPAFDFTEVICTLLKLEDSKYGGINVDVQTTEGGVYITFTDYKPADAPGLLINHTGKQIVYHEKGTKNEHILNAKSTIMYAWDDPTGPKMLVFGTNKEETDLKRDGIGEVIMQDGGKVLWVSFLDGLQRVLLFTENESIANRTESTASLQSITQSIDLRIHGIGLSVINNETGLDILYLGVTSSGIIWESKKVTKNRFKELTINENALLEIEYQKYLVHKSVNDVQTYKLDNKFPIDFDLMILKKTVERNLRRSFYPAIWLSRKSSPFQSQLHVKINRIQVDNQFLDPIFPVVLAPIPPPKSVASTTSLKPFIECSMVQRIMPNSTVRQFKYARILIQEFLFKVDLNFLTAIAEMFAKEVSDEAAAKQFRQDVESIELPLSAFFEEHSLEEQKSFYDNLHLGPLKIHVSFSMAGSDTKALPGFLGSLVQGVGVTLTDVNDVVFRLAFFEREYQFFSQKQLINEITSHYTGQALKQLYVLVLGLDVLGNPYGLVVGLKKGVEDLFYEPFQGAIQGPGEFAEGLVLGVKSLFGHTVGGAAGAVSKITGAMGKGLAALTFDEDYQKKRRQGIQNKPKNFHEGLARSSKGLVMGFVDGVTGVVTKPVTGARDNGVEGFFKGLGKGAIGLVARPTAGVVDFASGSFEAVKRAADASEDVKRMRPPRFQHYDFVLRPYCLMEATGNKIMKETDKGKFATTDNFIHCEEIIQKSEYLVVTNYRVMYVQRNEMFGVWTSLWSYLWNEISSVAATARGVQFTVKTDGKKVLGLFSSKESPRKLVLVADERKRDALVDIIESQRSDPNPLRATIAYPAHN

SEQ ID NO: 3364 - DNA, 2804 bp, DROSOPHILA
aaggggtttttgtgcgggtgagtaaataccaatcggattattcttgcggcatatgcctcactgcgttgcatactttgcggtgctccggaaaccaactatcgaatttggcctgaaatgtgaaaaggccaagggaggcgaaaaatggccggccattttgcattcggtattagccaaaataaaatatattagcctgaattttaactaggatgataggatgtactggctaagctgtcatttataataaaaaagttggtttcaacggaagcctattataatagacgaaaattgtgagtgaaagctgttatcagttcatcgtggccaaataaatacaaacatcatttaaagtcgtaactggttatcggcacaaattcagtttgatttataatagttcttaacagatttcttgggtacattggcatttttttttgtaccgtataactcgattaaagattaaattgataaatttacatttttgcaatgactcaaatattattttatgtacctctaagcgttacaaacttgacaattcgtgaattcattcgtcataaattttcaatagacacacttcctctgcacttatcatgtgataaaatattgccgtagtttagtgctccctattggcacctccgactaaaaagttaagggtttttaataatactcattccttttttgggggaaataataaaaggattatttctagcaaagaaggtcttgcgcaggcgaataagaaatatccttcgtagttactatgtggcgccatctaaatagactgctcagtctatagagcaaaacgctcttaactatttccgaaattaaatttcgctttgagataggtttgtaacaaaattggcaaacgacaaaacaaacaaaacatgaacattcaaaatagtacaaagatataaaagtccgcaaatttatgttctacaaattttattaaaaaattccaaaaagataaacggaaaagaaaacactaagctattagtagaaaaacactaagctcttagtacgagatgccggtgttgtcgcggatccagtccaagtatccggtgacacggctgaagacagcgggagcaccagactggcagccggcggaggaaacgaaggaggttactccgaccaggcggttgccctcgtgtgtgaccaggggaccaccggagtcacctccgcaggtggactttccgccgttggtgttgatgcaaatcatgttgtcgtggagagaccacgagcggctgcaatcactctgggacatgatctggacatcgacagcctggagccagtcgggcagtgggctgccatcgtaggtgccgccccatccggaggccacggcccaccatccggcgtagtcctggtagcggtcgttgtagctgggcaactccaccttgttgaccaggtgccagaagtcgacgtgcggggtgcggatcagggagatgtcgttgtgcaggttgccgctgttgtagtggtggtgctggacgaagtttccgcttccaacccagtgggtgtactggggctggttgcgcagactggctccgtagttgatggtcactccactggctccgttggtgcagtgggcggcggtcaggacccaggtgttgccgatgatcgagccaccgcaccaccagtttccattgccactgaaaaggagacccacgatgtagggtaccttgccctcgtaggctgggtagccgttggtaatgcgaccctggatcttgacatccttcaccggggtggggaccaacttttgctccggggtaggaatggctgtggcggcggccacggccagagccaggaatacgaacagtttcatcttggcaggtctaacaacttgtgccttgttcagaaacggaccgagcttttataccatcgccttatcaataccatggtttcttgtcgctttttagtaatacttgttgccaatatattttgccagatttctgtcgtggcaagttaagctggctgataaaacttaaattattgcctgtacttggcaattgatgagtgccattattagagtaagtccatagtctgtaatgtaatccttcgatcttacaatttatataaaattaaagattgtcaagacgattatcacatttgcaaatcgaaccaacatacaaaaatcaaataaatatacatttacattacatactatcatattctatcagtaaaatatttactaagcagcagctttaaaagtcgcgatcgcatgacgaaatgaatcaacgctttaaattttgtcctttaaggatacttttcaattcttaagctaaacaggaaactagatatataaataattaaattctaaaagtcgtagtctgttacgtctttgacgatctgaaaggtttatgtttgatatttacgaggtacgcatatcttcctcaacaatcacacttatgtctctaatctagtttaggacacacgtacgatgaatgataattacttgagtagcgaccataaataaacgtctttctctactgataaaaatgtactactaggagctaccagctaaaaattatgaactgattgcggctttcattcattatttttgtactcattcagcattgcaatggaaagtccatactacgattactttaccattatatcaaaactttaaagactaacataaaaataaaaacaaaatgtttagggaaatatggtaagacaacggagttttcacacattacagaatatacgaaactttgaaatcttgagtacacgccatatattcacgaaagactcgttccgttcctcccacttctcagacgccaaacttatcatgccaaattctggacaaaatatacagccgtcgt

SEQ ID NO: 3365 - DNA, 804 bp, DROSOPHILA
atgaaactgttcgtattcctggctctggccgtggccgccgccacagccattcctaccccggagcaaaagttggtccccaccccggtgaaggatgtcaagatccagggtcgcattaccaacggctacccagcctacgagggcaaggtaccctacatcgtgggtctccttttcagtggcaatggaaactggtggtgcggtggctcgatcatcggcaacacctgggtcctgaccgccgcccactgcaccaacggagccagtggagtgaccatcaactacggagccagtctgcgcaaccagccccagtacacccactgggttggaagcggaaacttcgtccagcaccaccactacaacagcggcaacctgcacaacgacatctccctgatccgcaccccgcacgtcgacttctggcacctggtcaacaaggtggagttgcccagctacaacgaccgctaccaggactacgccggatggtgggccgtggcctccggatggggcggcacctacgatggcagcccactgcccgactggctccaggctgtcgatgtccagatcatgtcccagagtgattgcagccgctcgtggtctctccacgacaacatgatttgcatcaacaccaacggcggaaagtccacctgcggaggtgactccggtggtcccctggtcacacacgagggcaaccgcctggtcggagtaacctccttcgtttcctccgccggctgccagtctggtgctcccgctgtcttcagccgtgtcaccggatacttggactggatccgcgacaacaccggcatctcgtactaa

SEQ ID NO: 3366 - protein, 267 aa, DROSOPHILA
MKLFVFLALAVAAATAIPTPEQKLVPTPVKDVKIQGRITNGYPAYEGKVPYIVGLLFSGNGNWWCGGSIIGNTWVLTAAHCTNGASGVTINYGASLRNQPQYTHWVGSGNFVQHHHYNSGNLHNDISLIRTPHVDFWHLVNKVELPSYNDRYQDYAGWWAVASGWGGTYDGSPLPDWLQAVDVQIMSQSDCSRSWSLHDNMICINTNGGKSTCGGDSGGPLVTHEGNRLVGVTSFVSSAGCQSGAPAVFSRVTGYLDWIRDNTGISY

SEQ ID NO: 3367 - DNA, 4866 bp, DROSOPHILA
gtcgctagccaggagcaaacaatagcaaatttggcgccagctggaacagtaacagtaacagcaacaacagcaccaacggctacaacagccgcaacatccgtgaccagccacaaggataagccaaatgtggcagacgaggaggaggacgaagatgacgacgatgatgaggaggatgaggatggcgagtacgatgaggaggaggatgaggacgaggacgacgaggaggatgacagcgatcaactcataccaaatattatatagttaagaacctgacaaatgacaagtaatccctcttatatatatatacacattgttcagttaagggcccacatatgcagcatctcaaagcaatttttttttttttctgaatatttattattaactaatgaatgaaacatccaattaaaaaactccatccattgcgatagatatacatatataaattgtatttatttatgataattttagggattaagctaagcaattttcgatttaacaaatgtcaaaaaaaaaaaatgatattattaaagtttgctaatcttaagtgctacaagaaatcgttgaatcgaaatatgaataggggaccagaggattggactcagagcctgtgggagttcaattcctgcactcggattgcacttggttcgcttaaacttaagacaaatgggggactacgagctcgggtttgaatggggatctatatggccatcttagcgccaccgagttgggggtagtacgattggattgggtatcgaaaattggaatatggaaaccagcacatcatagacatctaaacatacatatggactcttgcatatgggcgttaataaatatatgtagtaactggtatgggagacttacgaatcgacaaaaaaatatgtagaagtatgggagagagagagaatgactcaatacaatatcgatacgaataataataataataattataataataataatgggtattgcaagagcgagtagctaagcaatcctggttgccttagttgagctcccgcttgtcgcgctgactgatctgcgccatggtgatatactggcgcaccaggcgcgagatctcgtgggcctgctccgtttggacacggatcacgcgctgctgcatcagattgcccaccttcatgtccaggaagagggcgccatcctccgaacgaacctgccagaatatattttcagtaagcaatacagtttgccattggcaggcaatttcaactccatacctttcgcgtggaaatgacctccatgaagctccagtgctgcagggtctcgtgtgtattgggatccaggaagagaacgccacgtcgattgagcgccaggatgagatcccgccacatgggactatggttatcctccacatgcggaccctcctccgcccaaatgcgcttcactgcgaagaagctgctgccgaagagcggccaggtggccagcacgttgaggaactgcgccttcacctggccgggacttaggttggccacctgcggccacgccgactgaacgagacccacccactgggcaggtcggatctcacggatacccagcgccggcttgggcagcaagaatttgatctccttcatagcgggcacgtgacttagatcggcagcccgatggagcagggcagcaattctggccatatccctgaccatttccggtacgggcaccccattgccgggcagttccagcagcagaccctccagataatcaggtgccacctggttgaagagcacctccacgtagagcggcatgggagccggttctcgtttcaaggcaaagtgccaaacggatcggcagaagatcaggtagaagggctgtccggacttgagcagctcggtggtcacatcaaggatatactcatcggcggccaacggcatggtgaacgcatcaccctggacgatgcagtacagcgagaactcctgctgctcagcctcggattccacgcccaggagggcgcacagttcggcaatgacatcagccaccacggtggagcaacgggtgttgaccacacgctccgctccgccgggcaggcggtagatctgtcgcctggctgaacgtccagcggacacggccgtcacctcctccacactgggcacattcttgcggccgccacagcgggccgtcttccggagattggtcagacaaacggccgcagtgccgtgacaggaacggcgacgatcggaggccgccgaggttaggtgctccatcaggtagggacgcagtgcgtccgagcagccaaagtatgccgccaggatgctgagcagacgccaggcacgctgcgagctatccggacatggtgaccggttggccgtcgtctgcttcatcagctggcagtagacctcgtcacgcagggccaagtatttgtgacaatgctgttaaggaaacatttcgaaaaaatgagttaaataagttgaatattattattacaatataattatccgacttgaaagtcttcttccttgataaccataaatcaaaagatatgtgtttaatacggaagctgatagcttagtttgttcaagatacaacttaagagacttccgattgctgactttatataacaactcttcctgtttgcaactcaaatcaagttttgcaaaactggaacttgtctcctttatcgatattgctacttggagtccacatcctttatctttatactatataataaccatatatgctaagtactctcgtactctgacttgcaaaacgatcttcatttccccagcgaatttctgactttgaaatgtccacatccaaactatttccggttcgggtgcttaagtcgaatttctagggcagcagaacggcctgcgattctgttgtcgcccgaaaccagttgcacatatctgtgggatcacctccaagacatcggattccaaccggtttggctaacccagaatccagaatatagaacccagaactaagaactatgaaccaaaaagccgggcacaacactcaccatgagcacagtgtagacgcacttgacctcggtgaggtcgggatccagcggtatatcaccgcagtagcgcaggatgcagtcgaagcactcgagcgccagtggcgccaaatcatttggaagtcggaggagcggcaggcgtatggcgtggccctgccacttgaccagttccgcataggagcggttcgcggcggactggtgccgctcgtggtggcggtcagcgtccctcagttggctacaaaggaatcacagatatacacattagaatcatgtctcttggccaaatcaacccatgccccatcccacttgaaatagaaactcactcattgcggaagtgctgcatggcgaactggagcagcgagtacttggtgaccgacggtggagtgccaccattactctcgtcctgcagatagttggcatccaggtcgtgatgcggtagggactgtgattgctgctgttgctgctgcagcatctgctcctggtggtgcacctgtccgttggtcagcgaggagggctgttggccagcattcgattttcgggcggagtgcaggtagctctgctgcttgaggaagcgctgctgttgaccctgctgctgacccaactgctgctgctgctgctgctggtgatcggtggccatgtgctgctcctccatagcgtcctccaactgctgctgttgctgctgctgctgatggtgctgctgctgctgctgctgctgctgctgttgctgcaggtgatgatgcagttccgactgctgcagctgctcattctgtcgtgatccgccatccacgccgtgctcgttgcgctgggcgtgcgcctggcgggattccaggcgctccagcggcacattcaatgtctgggcggcggctcgggcacccgacgacaaagtggaggccttcgattgtgactgcagggggagaaaggatcaaatattttattatttaaatcttcttactgtttggagcaatctttaagctcttaaataagtatccttagactatattgaatataatatacctatattaacaatataggtatattgttaatataggtatgatgatcaaacatacatatattacaaaatcaatgttaccattagatcatcaaggtgttttagaccaggataagtgtttaattattgttaacgctgcggtttttaatagctgattaatcaatttgcaaaaaagatgaccgccaatgttttacacagaaataactttcaaactcaattgcaagatggcatgttcatttgagctaaaacactgataaaaaataatgcaaaaaagaaataaacttttctgtttttgttgttaatatcaaggcatttcctaattttgattacaagaatataaccaacaatgcaactcaattaaaatatttaaatacacaaattaaaaaatgatttataattggttgtggaagtcgtaagtataaatttcggttgagatgcgacttaaggattacaaattagtttcgaaagtcgacttttctggcgattacaattatttttttcccgtgcagagttgagagaggcagcaatttgttaattgacttgcaccgtgcaacttgcaacttgcagcccgccaatcgcatatatattgtattttttttttttagttttgctggccatgtcaatggcatgtgaaagttgctgggtgcctttttggccaactcgatgaccagcaaccagttgccgccgttcggctgccatttgctcgcattgacgcccatcccgttgctgtgcgggaagggggcgtggccgatgatttatgctcccatattgcccggtgacagctggcggggattggatattggcgatcgtcggcgatacgagcgattttggcaacgaaagtgtttgctggcattggtgatttttcacttttattgcttgcattcaattatttggt

SEQ ID NO: 3368 - DNA, 1851 bp, DROSOPHILA
tcacaatcgaaggcctccactttgtcgtcgggtgcccgagccgccgcccagacattgaatgtgccgctggagcgcctggaatcccgccaggcgcacgcccagcgcaacgagcacggcccctcctcgctgaccaacggacaggtgcaccaccaggagcagatgctgcagcagcaacagcagcaatcacagtccctaccgcatcacgacctggatgccaactatctgcaggacgagagtaatggtggcactccaccgtcggtcaccaagtactcgctgctccagttcgccatgcagcacttccgcaatgaccaactgagggacgctgaccgccaccacgagcggcaccagtccgccgcgaaccgctcctatgcggaactggtcaagtggcagggccacgccatacgcctgccgctcctccgacttccaaatgatttggcgccactggcgctcgagtgcttcgactgcatcctgcgctactgcggtgatataccgctggatcccgacctcaccgaggtcaagtgcgtctacactgtgctcatgcattgtcacaaatacttggccctgcgtgacgaggtctactgccagctgatgaagcagacgacggccaaccggtcaccatgtccggatagctcgcagcgtgcctggcgtctgctcagcatcctggcggcatactttggctgctcggacgcactgcgtccctacctgatggagcacctaacctcggcggcctccgatcgtcgccgttcctgtcacggcactgcggccgtttgtctgaccaatctccggaagacggcccgctgtggcggccgcaagaatgtgcccagtgtggaggaggtgacggccgtgtccgctggacgttcagccaggcgacagatctaccgcctgcccggcggagcggagcgtgtggtcaacacccgttgctccaccgtggtggctgatgtcattgccgaactgtgcgccctcctgggcgtggaatccgaggctgagcagcaggagttctcgctgtactgcatcgtccagggtgatgcgttcaccatgccgttggccgccgatgagtatatccttgatgtgaccaccgagctgctcaagtccggacagcccttctacctgatcttctgccgatccgtttggcactttgccttgaaacgagaaccggctcccatgccgctctacgtggaggtgctcttcaaccaggtggcacctgattatctggagggtctgctgctggaactgcccggcaatggggtgcccgtaccggaaatggtcagggatatggccagaattgctgccctgctccatcgggctgccgatctaagtcacgtgcccgctatgaaggagatcaaattcttgctgcccaagccggcgctgggtatccgtgagatccgacctgcccagtgggtgggtctcgttcagtcggcgtggccgcaggtggccaacctaagtcccggccaggtgaaggcgcagttcctcaacgtgctggccacctggccgctcttcggcagcagcttcttcgcagtgaagcgcatttgggcggaggagggtccgcatgtggaggataaccatagtcccatgtggcgggatctcatcctggcgctcaatcgacgtggcgttctcttcctggatcccaatacacacgagaccctgcagcactggagcttcatggaggtcatttccacgcgaaaggttcgttcggaggatggcgccctcttcctggacatgaaggtgggcaatctgatgcagcagcgcgtgatccgtgtccaaacggagcaggcccacgagatctcgcgcctggtgcgccagtatatcaccatggcgcagatcagtcagcgcgacaagcgggagctcaactaa

SEQ ID NO: 3369 - protein, 563 aa, DROSOPHILA
MLQQQQQQSQSLPHHDLDANYLQDESNGGTPPSVTKYSLLQFAMQHFRNDQLRDADRHHERHQSAANRSYAELVKWQGHAIRLPLLRLPNDLAPLALECFDCILRYCGDIPLDPDLTEVKCVYTVLMHCHKYLALRDEVYCQLMKQTTANRSPCPDSSQRAWRLLSILAAYFGCSDALRPYLMEHLTSAASDRRRSCHGTAAVCLTNLRKTARCGGRKNVPSVEEVTAVSAGRSARRQIYRLPGGAERVVNTRCSTVVADVIAELCALLGVESEAEQQEFSLYCIVQGDAFTMPLAADEYILDVTTELLKSGQPFYLIFCRSVWHFALKREPAPMPLYVEVLFNQVAPDYLEGLLLELPGNGVPVPEMVRDMARIAALLHRAADLSHVPAMKEIKFLLPKPALGIREIRPAQWVGLVQSAWPQVANLSPGQVKAQFLNVLATWPLFGSSFFAVKRIWAEEGPHVEDNHSPMWRDLILALNRRGVLFLDPNTHETLQHWSFMEVISTRKVRSEDGALFLDMKVGNLMQQRVIRVQTEQAHEISRLVRQYITMAQISQRDKRELN

SEQ ID NO: 3370 - DNA, 8382 bp, DROSOPHILA
ttcaccgcgtaaatagtcgattcgtatgctaggtgtataagtatgatccttattatcccctgatcctaatccttttgatctgactttagccagactaaacgacttgccattcgtttgtgttctttaaagctgaaacccacgcattgtagttattattttcatggcttatatctaatcgcatttagttgcttattgtgcatttctcattattgtcaactgcacactttcttattgttttttagattcattgttgttgtaagacagcatatttgggtttggagaagagcctactgctacgtccatcaaatgcccaagatcagcaatgattccttgttttctttgatttggtttggttatagttatacattagtttctacaattgattttcttatttcctgcattaattttcaacactcaatagctgggattctactatttatacttcacaatatttttctgaattcttcttcgattatcataatttttccagtggagtaatactcgtacttataataatacagggttcattttcaacacaaaattcagctacaaaattgaattatattctgggtttcggggtatttagacacaattatcaattatttagattttgggtacataacggttactttccatttacgtggtaatatataaatcgctcttgcaatatgtattgacatatgtttgcaccccctttttcggtttgtctgggttataaaatgtctgcggtttaggttcataaaaatctctttgtaaaaaaattgacaaataaattcggcaaattgacacatgattatgttgcccaaatcggtgctagccggctggctaataccctaagttcagtagcaaaatatatgtatgtatcctacaggatccatctgttccgtttgactttcgtaatttgtgcaattgtttcatggatatgctcggttccagaatcacctgacgactgtggtgactcttcttatagaagagtcacggcataaagccgtggtcaggattaatttttggacgacgtcctggaatgagtgtagtggtgtggtgcaccctcgcgcatagggtcagtggctattttggatagtatatcgggtcctccgggatgcaggtcatacttgttaacgcggtcctctttaatgggacgcgaatgcttcgcgatctgctcctgtatccagggcacatattgcaccacgtttgcatatacgcccggcagacggggatgcgcacacataatgccccaggagactatgccgcccacaaaccagcgattcttctccccgggatacggacacagcagcggaccgcccgaatcaccctggtgttttgggttacatttccactcaaatatacggtcaggatagtgaataatatcgcttacctgacaggcatccttgcctccgtcatcgaacccggcacagaccatgccctccgacaccgtcaggttgtccagccattcgtcgcactgattacgcgtgatgatgggcacttgcacctcgttgactatgtactcgtacgtggatttggctgtggaacaacgaaaactgaatagttttgcgttagccggatattatgttgagtagactcacgatccttgtcctcccgctttccccatccgatgacggtgcacagggtgccaggatgcagattcctcacgcttggcggcggcaaacatacgggcaataggtgttcatggaaagcaacacgcgtggcaagctgcaaatgtatccaagaatattagaaacgagaggaagttggtataaaagattttctaacttggaagagggctatgtcattgtcgtgggcaatagccatgttgtattgcggatgcggaattacggccttgaccttgaccttctgacccgagtaggtgaaagagttgcgacgcgtcacgcccagctgaatggtccaatcctccaagtcgatcacgctataactgtcaagcaaggaggttcataagtgaccaatatatattcatgcctgggattcaacttactttcccacgcagtgggaggctgtgagcacccattgatccgagattagaacgccagcgcagtagaaaatcttctccggaccgcccaaaattgcggccaggaatggccaattgccgggactggcttgggttcctccaatgatgcgtctcgatggcttgtgtctaccccgctttactcggccgcactctgaaataatagataatgaaatagtgaatgccttatgctgacttcccacccagagccactgaccataattggagcacgttagatcggccattggataatcctctgtctttttgcagttggcaaactcctgcatcaaggtcgactttcgtttggcgtacattttccatatatctgtggacacatttaccgtggctagcagtgggcggtgagtaagttgggtcaggacactggtggcattcacggccgagtagcccagaatggaacacacagcgctgggcgatactgcccgatcccagttcttcacacacgcgggcatccactgccgctggcctatgcgatagacctccaggacaccggtgcccacatcgccgttccgctcacttagcctcactaaaaagtgattcggcagaatagttaggtcattgcacgaaataagatccttttacttacagcagttgcgctcatcctggccgtagggacagtcgatgataccgtcgcatatgtgcttggttccaatgcactggctgtcgccgcagtagatctcgtccggtccacaacgctcgcacttggcctcgtctgcctggtccatgcagtccaggtggccatcgcacacgtactcctgcggcagacaacggttctggtcgcactggaacccatcgcacttgggatgcgtggcggctctcatcacctcgcgaacctcatccaaacccacgcagtcctcggaactcggaaagtccttgaagagtttgcagttcaggtactcgggcagactcagtccgaaaacgtcgaagaagaagccacagcggcgcatcgtctccgtacagagggtcttgcaaggtggcacggtggccctaaacgaatttgtgaccatcattacttaataaaagggaaaagttgaaatgtacatacccgctctgtccgcacttcggcacgaaaagtgtgcagagaaacagggaaacgagctcgtaacatcgcacatccaccagggcctcataggaatccaagtcctgcaatggtttggagtcagtaaaataaatggtaatcctgtatatccccgaatttaccgtttgagtctccagctgtccaaagtgaccgatatagttgggaaacacggtgtagttgtagggaatctgtggaccttgacaaaaccggactatgatgggcaggcaggtgcctggggctggattcttgccaaaacttgtggtgtcctccacgtggatcgtgttgatgatagtcttgttcacgaactttatagtcggatacgcattaaagtaggcagccagaccgccggcgatagccagcagggcgaatgcgttgatcaaaatctggaacaggcggaactttaggcggccgtttgtgatgtacggattggagctcttgcgccggttaataatctgaaatagtaggtaagatataatctttgcacatacaatattaatgcaaaattcaagtattatacctgatgctgcaaggacatggtgtgcggtgctccattttgaaagcggacaatcgtctgcaggctgctgggctggccggccgccttatgaagcggcgagatcgtctgcggcggttctagttcctcgatgggctcgtgctgaactccctgacggcacacgatcggggctggcgctgaaaggacataggagtagaggagtgacaaggcccgggtatggaaaggacttgtacttaccactgcacagccgcttggcggacaacgagggcagcagcggcgcctccatgagcttaggattgtatcccggactggacgtctggctaaagctgtcgctggagatggtcgagtcctgccggaagttgatcttactcctcggtggcggcattgcaggaccctgctttccgcttccggttcctccgccggcgccgcccagaaagcgggtgggggccaagtccatgagcggagtctggcgctgtgcgctgccgggtgcattagacttacgtcccccctgctgggaacccagcagtggcgcttccataagcttggagttgtagcccggactggagctgatcgagtagctgtcgctggacagcgtggagtcctggcgctgttgcatccgaggatacgttatcggtggcggtttattgcgcccgagcttgttccgcacagtcaatggaggtggcgggtgaccccgcgatcccgtctccactggatcaaacacgttggcctgccgtaatggtggctctggcggccctggacgtttggtaatggcatctgtgggcggcacaacggctggacatggccctgacatagatgacatggtgccgctggatatagtgctggaacctgcggaggcggcggacgaagtggaggccgaggccgacacgctgcttggttccttggagctctgcgactgagtttcgccgattgagttgctgctgttgctgctgcccttcactggcggcggctgctttcgggcaggaaccactggtagctgggaaccatcgcttgccacgctactgccgttgttgttattgctggccgagtagagggccagtcccaggctggtgttattgttgttcagcttatgcatggcatcgttgagcacagcacgttccctgtacgcatccctgggatccctggccagcggcgagtcaatcgagctagacagcggcttctcatcgagcgaggactgggtgtccaccgaggagaagcgactgcgaaagtccacgctggtcgagctgctagcgaaccgctcactgtggccgcccagcgatgagccgtaggcggagtccacggtgctgctggaggaacgctgcgcccgcttggccatgtgactcagcccggcatagcggccggccaaatagccggcgaccttgacgggcgtggaggttagcgactcgtcgaacacggagttctccagactcatgcggtcgtcatcggaaatcccatcggcatccgcatatccggacgccggacgtgtggctatgtcaacaagcagtgctgattgcagcccggcacctccgcccccctgtccgtcgcccgatcctcggaccactgcctctgcggtcacgttttctggctgcggataaacaaacacagtgcccgtgcccgtgccgtgggcgccatcctgtccgccagccgagagtggaagtgggtgtggactcgacgcctgccaggcggacttgccgcgcagtagtcgccgcggaatgggaggtgggggcgtcactggggtgtccacccgcactaagtgctgctgctggtggtggacctgccttcctcccgcgatggaggcaccctgatgcgctgactggcaatatttctgctccgtcatgtttacctgccagcgaaaatcgaggaaaatttgtggtaaaagcaaacaatggaaatttgtctgagcgaatgtttctaaaaagaaacataaatatgactagcttttatgaaacttttgtatcactaaacggggttataaggtataaatattaaatatataaataacaacctacgctgtaactttaaaatgctctaataaggaaataataaatgaaatttcttagtaatgcagttgagtgcctttcacaatgttaaaaagatataggatatattgccctggtgatagaaacctgtttccactgtaatgtttgctacttcgatccaccactgtggcaatattatccagcagcaatattctgcattttaagccccatccaggtgcagaggatgaagtggggcaggggactaagccctggctgagccgggcgcagaaattctgacgcgcaggaaataactttggggggatttgcggccaggtcctcctgctggaaaatgaatcaggaacagaggcaagtggttttggctgccgtccacatcgatctcttgagtcatgcaaagccaaactatagctaatccctcatcttctttgcccttcactcgaaacccttgacggtgcaacgccagtcgaataacccaaacgaggatgagtagggtattaaatttgaatactgtttccttggcggttgcgaaactgaggaaacttttcgaaatttcagctttgtttacttcgccgtgaaaagcgcaatagaaggattatttattttcgtagatgcagaagaggaaatttctcattaagggtcagttctatgtacatccgttaattccattttcctttgtcttttcgcagtcttcatttctgcagcaaattgtattgtgctgcacttccaaaaaaaacttttcaaaatgaatggctattgtgagggaaaaactcgaatgtttcgcggaaagtttctatcttcttttccctgcgtataaaattctcaaaaagtgcagttcgcttgaaatgtgtaaaggaaactcgtatattatattaattaacagacatcgtattatccttttttcttactaccacctgctctttaatttggtaactgagaaagtaatgccaagctgattgcttcgccaattcttttcagtggaaaagctcaaaatatatccttttttccggaaaaatctggctttcttaaagtattctgagcccggtagaaatttgaccacttcttcgtaaattcgcggtaaatacagattgcgattacattatcagttgcgattttagatctttataaacaaacttctggatacataacataactagaagtttaaattatttgttctctaatctgacacatagttagtagatgtatctagtcgtttactataggccaaagaagatcctggcttggtggtcatatttctctacgattatgggttacttctctacaattatgggtttctaaaatggaaccatttctagatagtcacagggaattacatcgtgccataaatctagtgtggattgccgtactcacaagcatttcggtggctgcctggggcagctgcgacggcttctgcttgtcctcgagcatgggataatagtgggaggagtgtcggcgcacgatgctgttgctgctggagaggctgctgctctcactgatgctgccggagttgctgggcaagggcagcagggtgacggacttgcactgctcctgctgcttgtcgtagaagtccagcagcgaattgaggggcagcgccaggctggaggcgcgttccgatctggggatggggatacattggacatcatgtggcagctagttagtgttccaaactcaccttgagcgactcctttgatctgccaccgaggtctgatgctgatggtcctgggagacgctcagaaattgtttattcatatcgagtgcgttcatggcttaatcgcgtcgtacttcgaaatcaatctgcaatggagaaccggattgggttggtcaggttgtgtttaacgcctgcgttgtacatgccatgcatatcgaaagaggactgctccatgcggaacactaaatgccccgcagaccagaataataccgttcatgcaaatagctgcgggcccctttggccacaggaatccaaatcaattactcaatggcccccactcacacactcacactcgcagcccggcacgtgacaatagatcccacaaaagtcaaaataaatgcagtgtgtgtctgtgtgtctgtgtgccgggatatacgtatacgtgtagcatgtgcggtgggcatattgatgccatcggaatcgggccaagcaatttagtcttttgtgtctaatggatgccattagtcggctcgcagcacaatggatcccgcaagcgccaacgatccccatccccttatgccaccatgcttataatatgtgaccaaaagccgcttcgaagcgaatttaaccaccctgcaccatagatggcacaactggaagcgagtaaattaagtaacttaatcggaagtggtaaattctgtgcagaaagcgttgagactccataagataatattcataaactgtttcacaattccgttggcagctcgttgaatattgggttagtgtttagtgcataatatagtgcgctctaagccaatgttattactttaagcgatttacctgtaattgtgaacctggatgcacattcaagggtgttctactatgacctacataaatcggctgcatgaatgccagcgagcatcatgtttcgtgagcgcgaaaaggctttcaacaggttgaaacgttgaaaaacgcattgcaaatttactgagcaaaaacaaagctcccacacacgcacgcaagccacgcccaccagcgagcctcacgtggtcgacggcagagggcagaggtcaggcaccggagatcgcaatgtgtcaaggacgtatattgacacca

SEQ ID NO: 3371 - DNA, 4140 bp, DROSOPHILA
atgaacgcactcgatatgaataaacaatttctgagcgtctcccaggaccatcagcatcagacctcggtggcagatcaaaggagtcgctcaagatcggaacgcgcctccagcctggcgctgcccctcaattcgctgctggacttctacgacaagcagcaggagcagtgcaagtccgtcaccctgctgcccttgcccagcaactccggcagcatcagtgagagcagcagcctctccagcagcaacagcatcgtgcgccgacactcctcccactattatcccatgctcgaggacaagcagaagccgtcgcagctgccccaggcagccaccgaaatgcttgtaaacatgacggagcagaaatattgccagtcagcgcatcagggtgcctccatcgcgggaggaaggcaggtccaccaccagcagcagcacttagtgcgggtggacaccccagtgacgcccccacctcccattccgcggcgactactgcgcggcaagtccgcctggcaggcgtcgagtccacacccacttccactctcggctggcggacaggatggcgcccacggcacgggcacgggcactgtgtttgtttatccgcagccagaaaacgtgaccgcagaggcagtggtccgaggatcgggcgacggacaggggggcggaggtgccgggctgcaatcagcactgcttgttgacatagccacacgtccggcgtccggatatgcggatgccgatgggatttccgatgacgaccgcatgagtctggagaactccgtgttcgacgagtcgctaacctccacgcccgtcaaggtcgccggctatttggccggccgctatgccgggctgagtcacatggccaagcgggcgcagcgttcctccagcagcaccgtggactccgcctacggctcatcgctgggcggccacagtgagcggttcgctagcagctcgaccagcaagccgctgtctagctcgattgactcgccgctggccagggatcccagggatgcgtacagggaacgtgctgtgctcaacgatgccatgcataagctgaacaacaataacaccagcctgggactggccctctactcggccagcaataacaacaacggcagtagcgtggcaagcgatggttcccagctaccagtggttcctgcccgaaagcagccgccgccagtgaagggcagcagcaacagcagcaactcaatcggcgaaactcagtcgcagagctccaaggaaccaagcagcgtgtcggcctcggcctccacttcgtccgccgcctccgcaggttccagcactatatccagcggcaccatgtcatctatgtcagggccatgtccagccgttgtgccgcccacagatgccattaccaaacgtccagggccgccagagccaccattacggcaggccaacgtgtttgatccagtggagacgggatcgcggggtcacccgccacctccattgactgtgcggaacaagctcgggcgcaataaaccgccaccgataacgtatcctcggatgcaacagcgccaggactccacgctgtccagcgacagctactcgatcagctccagtccgggctacaactccaagcttatggaagcgccactgctgggttcccagcaggggggacgtaagtctaatgcacccggcagcgcacagcgccagactccgctcatggacttggcccccacccgctttctgggcggcgccggcggaggaaccggaagcggaaagcagggtcctgcaatgccgccaccgaggagtaagatcaacttccggcaggactcgaccatctccagcgacagctttagccagacgtccagtccgggatacaatcctaagctcatggaggcgccgctgctgccctcgttgtccgccaagcggctgtgcagtgcgccagccccgatcgtgtgccgtcagggagttcagcacgagcccatcgaggaactagaaccgccgcagacgatctcgccgcttcataaggcggccggccagcccagcagcctgcagacgattgtccgctttcaaaatggagcaccgcacaccatgtccttgcagcatcagattattaaccggcgcaagagctccaatccgtacatcacaaacggccgcctaaagttccgcctgttccagattttgatcaacgcattcgccctgctggctatcgccggcggtctggctgcctactttaatgcgtatccgactataaagttcgtgaacaagactatcatcaacacgatccacgtggaggacaccacaagttttggcaagaatccagccccaggcacctgcctgcccatcatagtccggttttgtcaaggtccacagattccctacaactacaccgtgtttcccaactatatcggtcactttggacagctggagactcaaacggacttggattcctatgaggccctggtggatgtgcgatgttacgagctcgtttccctgtttctctgcacacttttcgtgccgaagtgcggacagagcggggccaccgtgccaccttgcaagaccctctgtacggagacgatgcgccgctgtggcttcttcttcgacgttttcggactgagtctgcccgagtacctgaactgcaaactcttcaaggactttccgagttccgaggactgcgtgggtttggatgaggttcgcgaggtgatgagagccgccacgcatcccaagtgcgatgggttccagtgcgaccagaaccgttgtctgccgcaggagtacgtgtgcgatggccacctggactgcatggaccaggcagacgaggccaagtgcgagcgttgtggaccggacgagatctactgcggcgacagccagtgcattggaaccaagcacatatgcgacggtatcatcgactgtccctacggccaggatgagcgcaactgcttgaggctaagtgagcggaacggcgatgtgggcaccggtgtcctggaggtctatcgcataggccagcggcagtggatgcccgcgtgtgtgaagaactgggatcgggcagtatcgcccagcgctgtgtgttccattctgggctactcggccgtgaatgccaccagtgtcctgacccaacttactcaccgcccactgctagccacggtaaatgtgtccacagatatatggaaaatgtacgccaaacgaaagtcgaccttgatgcaggagtttgccaactgcaaaaagacagaggattatccaatggccgatctaacgtgctccaattatgagtgcggccgagtaaagcggggtagacacaagccatcgagacgcatcattggaggaacccaagccagtcccggcaattggccattcctggccgcaattttgggcggtccggagaagattttctactgcgctggcgttctaatctcggatcaatgggtgctcacagcctcccactgcgtgggaaattatagcgtgatcgacttggaggattggaccattcagctgggcgtgacgcgtcgcaactctttcacctactcgggtcagaaggtcaaggtcaaggccgtaattccgcatccgcaatacaacatggctattgcccacgacaatgacatagccctcttccaacttgccacgcgtgttgctttccatgaacacctattgcccgtatgtttgccgccgccaagcgtgaggaatctgcatcctggcaccctgtgcaccgtcatcggatggggaaagcgggaggacaaggatcccaaatccacgtacgagtacatagtcaacgaggtgcaagtgcccatcatcacgcgtaatcagtgcgacgaatggctggacaacctgacggtgtcggagggcatggtctgtgccgggttcgatgacggaggcaaggatgcctgtcagggtgattcgggcggtccgctgctgtgtccgtatcccggggagaagaatcgctggtttgtgggcggcatagtctcctggggcattatgtgtgcgcatccccgtctgccgggcgtatatgcaaacgtggtgcaatatgtgccctggatacaggagcagatcgcgaagcattcgcgtcccattaaagaggaccgcgttaacaagtatgacctgcatcccggaggacccgatatactatccaaaatagccactgaccctatgcgcgagggtgcaccacaccactacactcattccaggacgtcgtccaaaaattaa

SEQ ID NO: 3372 - protein, 1379 aa, DROSOPHILA
MNALDMNKQFLSVSQDHQHQTSVADQRSRSRSERASSLALPLNSLLDFYDKQQEQCKSVTLLPLPSNSGSISESSSLSSSNSIVRRHSSHYYPMLEDKQKPSQLPQAATEMLVNMTEQKYCQSAHQGASIAGGRQVHHQQQHLVRVDTPVTPPPPIPRRLLRGKSAWQASSPHPLPLSAGGQDGAHGTGTGTVFVYPQPENVTAEAVVRGSGDGQGGGGAGLQSALLVDIATRPASGYADADGISDDDRMSLENSVFDESLTSTPVKVAGYLAGRYAGLSHMAKRAQRSSSSTVDSAYGSSLGGHSERFASSSTSKPLSSSIDSPLARDPRDAYRERAVLNDAMHKLNNNNTSLGLALYSASNNNNGSSVASDGSQLPVVPARKQPPPVKGSSNSSNSIGETQSQSSKEPSSVSASASTSSAASAGSSTISSGTMSSMSGPCPAVVPPTDAITKRPGPPEPPLRQANVFDPVETGSRGHPPPPLTVRNKLGRNKPPPITYPRMQQRQDSTLSSDSYSISSSPGYNSKLMEAPLLGSQQGGRKSNAPGSAQRQTPLMDLAPTRFLGGAGGGTGSGKQGPAMPPPRSKINFRQDSTISSDSFSQTSSPGYNPKLMEAPLLPSLSAKRLCSAPAPIVCRQGVQHEPIEELEPPQTISPLHKAAGQPSSLQTIVRFQNGAPHTMSLQHQIINRRKSSNPYITNGRLKFRLFQILINAFALLAIAGGLAAYFNAYPTIKFVNKTIINTIHVEDTTSFGKNPAPGTCLPIIVRFCQGPQIPYNYTVFPNYIGHFGQLETQTDLDSYEALVDVRCYELVSLFLCTLFVPKCGQSGATVPPCKTLCTETMRRCGFFFDVFGLSLPEYLNCKLFKDFPSSEDCVGLDEVREVMRAATHPKCDGFQCDQNRCLPQEYVCDGHLDCMDQADEAKCERCGPDEIYCGDSQCIGTKHICDGIIDCPYGQDERNCLRLSERNGDVGTGVLEVYRIGQRQWMPACVKNWDRAVSPSAVCSILGYSAVNATSVLTQLTHRPLLATVNVSTDIWKMYAKRKSTLMQEFANCKKTEDYPMADLTCSNYECGRVKRGRHKPSRRIIGGTQASPGNWPFLAAILGGPEKIFYCAGVLISDQWVLTASHCVGNYSVIDLEDWTIQLGVTRRNSFTYSGQKVKVKAVIPHPQYNMAIAHDNDIALFQLATRVAFHEHLLPVCLPPPSVRNLHPGTLCTVIGWGKREDKDPKSTYEYIVNEVQVPIITRNQCDEWLDNLTVSEGMVCAGFDDGGKDACQGDSGGPLLCPYPGEKNRWFVGGIVSWGIMCAHPRLPGVYANVVQYVPWIQEQIAKHSRPIKEDRVNKYDLHPGGPDILSKIATDPMREGAPHHYTHSRTSSKN

SEQ ID NO: 3373 - DNA, 5643 bp, DROSOPHILA
cgccctcgctgccagctacgacgccgacgccgaccgcagcgctgctgcccgcatcagctgttgaggcactaactatgtgcggcgggggctgctgcgtcgactgcgacggcggggtcgctgctgggcaggatgcacttacggggccggccgccaaggaagggtggtgctggatgggttcatccgctaccgtgctaccgctgatgccggcattcgcttggctatttgacattagggtgcggtcaccgacgcggctgcggctgttgagcagtgctgttccagttccagaaggcctcgtcgtcttcggtttccagtgtttattttctttgttggactgcctacgtttgcgctagcttttcgtggtatccactacggggtccgggcaacgagctacatccgccgctgctcctctgccgctgcctctgccccactcactggcgcacacatacacacgcacgcgcccacacagctcatccactgcacccctcgcccagtaaacactccgctgcgacggctggcggttgctgggacgtttttcggcaccttcgacggcgtcttctgttccaatcctcgactgcgtcgcgaactgcgatccgtttgttgcactttctggcctgacacgctgccgattcgtttatttaggcgtttttttcacgctaaaacacccaagaaatgtgagcaaatcgatgcctctggcttatcgatagtcacccccgcatatcgctcggccagcgcaactgcggcatgctcatcgataataacgcgttaagctgagatatgccaaaaatggcttaatttatgtgatttattaattttttatacggtaacgagcaaggaaaattagtttgcaggcggttcatttgattataagccaagtttttagtaaaatattctttttcttttgaacacattaagagctggcaaaaaatagctagatggtccggaaatatgcagaattaccaacatcatagaaccgttttcgatagtttctcaatggtaccgataacaccttgccatccgtgccggcagctcttaaaaatatccgaagtatcgcagatttaggcaaaatctgcatcaattaaccaaacatggatagcataattggacgcagccagtttgtctcggagacggccaatctgttcacagacgagaagacagctacggcaagagctaaggtagaacacaaatcttaatcagacaagacagtccggactgctgtattgtaccatatattttcccattcaggtggtcgattggtgcaatgagctggtcatcgcatcgccttcgacaaagtgcgaactgctggctaaggtgcaggagactgtgcttggatcgtgcgcggagctggccgaagaattcctggagtccgtgctgtctttggcccacgactcaaacatggaggttcgcaagcaggtagtcgccttcgtagagcaagtttggtaaggatttccatcaaaggatctaacttcttgctgaaacgatttatattttccatcccagtaaagtgaaggtggagttactgccccatgtcattaacgtcgtgtctatgctgcttagggataactcggctcaggtaatcaaaagagtgatccaagcctgcggtagcatctacaagaatggattgcagtacttgtgcagcctcatggagcccggcgacagtgcggagcaggcgtggaacatcctcagcttaatcaaggcgcaaatactggacatgatcgacaatgaaaacgacggcatacgtacaaatgccattaagttcttggagggcgtcgtggttctgcagagctttgctgacgaggacagtctgaaacgagatggagacttctcgctggcagatgtccccgatcactgcacactattccgccgtgaaaagttgcaagaggagggcaacaatattttagatatcttgcttcagttccacggaacaacgcatatttcctcagtgaacttgattgcctgcacaagcagcttgtgtacaattgccaaaatgcgacccattttcatgggcgccgtggtggaagcctttaagcagctgaatgccaacctgccgcccaccctcactgactcgcaagtaagctccgtgcgtaagagccttaagatgcagttgcagacattgctgaagaaccgcggtgcctttgagtttgcaagcactatccgaggaatgttagttgatctggggtcctccacaaatgagatccagaagcttattcccaaaatggacaaacaggaaatggctcgtagacaaaaacgcatcctcgaaaatgctgcgcaaagtcttgcaaagcgtgcgcgcttggcctgtgagcagcaggatcagcagcagcgagaaatggagctagacactgaggaattggaacgacagaaacagaagtctactcgagttaacgaaaagtttctggcagagcatttccgtaatcctgaaactgttgtgaccctggtgctggagttcctgcccagtctgcccactgaggtgccacaaaagttccttcaggaatatacacccattcgcgaaatgtctattcagcagcaggtaaccaatatctccagattttttggcgaacaactatctgaaaagcgcctaggcccaggtgccgcaaccttcagtcgagagccgccaatgcgggttaagaaagtgcaagcgattgaatcaacactaactgcaatggaagtggacgaggatgctgttcaaaaactgagtgaggaagagtttcagcgtaaggaggaagcaaccaagaagctgcgcgagaccatggagcgcgccaagggtgagcagactgttattgaaaagatgaaggagcgcgccaagacgctgaagctgcaggagatcaccaagcctctgccacgcaacttaaaagagaagttcctaactgatgcagtgcgtcgcatcctcaactcggagcggcaatgcattaagggaggagtgtcatcaaagcgccgtaagctggtcaccgtgattgctgccacctttcccgataacgtacgttacggcatcatggagttcatcctggaggatataaaacagcgtatcgatttggcattttcctggctctttgaggagtactctctgctgcaaggatttacaaggcacacttatgttaagacagagaacagacccgatcacgcctacaacgagttgctgaataagcttatcttcggcattggagagcgttgcgatcacaaggataagattattttgattcgtcgagtatatctagaagcacccattcttccggaagtctcaattggacatctagttcaattaagcctggacgacgagttctcccagcacggcctggagctaatcaaggaccttgcagtgcttaggccgccgcgaaagaatcgtttcgttagagtgttgctcaacttttctgtgcatgagcgactggatctgcgggatctggcacaggcccacctggtcagtctgtaccatgtacacaaaatactaccggctcgaatagacgaattcgctctggagtggcttaaatttatcgaacaggaatctccgccggcagctgttttctcgcaggactttggtcgaccaaccgaggagcctgattggcgggaagacactaccaaggtgtgctttggtttggcctttaccctgctgccctataaaccggaaggtaagttgttgctgtcccgtattaaagaagaaaaaaactattaaatcaatttcttaatattctcttcccctgatagtttacttacagcaaatttgtcaagtgtttgtttctacatctgccgaactgaaacgcacgatcttgcgcagtctagatattcccataaaaaagatgggtgtagaaagcccgacgttgctgcaactaatcgaggattgtcctaagggtatggagaccttagtgatccgtataatttacatactgacagagcgagtgccatccccccatgaagaattggttcggcgggttcgggatctctaccagaacaaggtcaaggatgtgcgcgtgatgatacccgtgctaagtggcttaacccgatccgagctaatttccgttctgccgaagctgattaaacttaatcccgctgtggtcaaggaggttttcaatcgattgcttggtatcggtgccgaattcgcgcatcagacgatggccatgacccccactgatattctcgtggctttgcacaccatcgatacgagtgtctgcgatattaaagccatcgttaaggctacatccctatgtttggctgaaagagatctgtacacacaggaggtacttatggctgtgctgcaacagcttgtagaggttactccgctgcctactctgatgatgcgcacaacaattcagagtctaactctgtacccgcgtctggcaaactttgtaatgaacttgttgcagcgtctgataatcaagcaggtctggcggcaaaaagtaatctgggagggctttttaaagaccgtgcagcgcctgaaaccgcagtcaatgccgatcctgctgcaccttcctcccgcccagctggtggacgcactgcagcagtgccccgatttaaggccagcattgtcggaatacgcggagagcatgcaggatgaaccaatgaatggtagtggtataacccagcaggttctggacatcatctccgggaaatcagttgatgtgttcgtgacggtaactatgcattttttgatttagtcttaaatgaaataatagtaactcaaataccgaaccaatatcgaagacgttcagctactacatacgagtatcttcttttcaggacgaaagcggcggttacatcagtgccgagcatattaaaaaagaggcaccggatccatcagaaattagtgtcatttccacagtgcccgtactgacgtctctagtaccactaccagttcctccccccataggcagtgatcttaaccagcccctgccgcctggcgaggactagttgcagtttaattgttttgtttgctcatacacatttttaaattacttaataagataaggtctataattttataaactcactgttctaggcgataatacataaaaccaaggtcttgaccgcacccacatacattataaaggaatataattttgtttgttaatgatcaaaagattgggagtataccccacgcaaataacacaaaaatttcgattctgagtggccacgaccatttacggatcagttcattgcgagcactgtcatcggcgtaatacaagtgtttcaataatttcagtacctttaaaatacctttgaaagtacgaaatatttaattagaacattgtacataattacaaacagatgtttttaaaaagatgtggaaaaaattcattgtacgctgagattacacggcttacagctctacttcggctaccattttatcgccagctaaggcagcaagaatatttctggctgtaatccgggacatttccttgcgcgtttcgatgtcagcgctgccaatgtgggggagaataaccacattatccagtttcagaagaggatcgtcgattggcaatggctccggcgtcgttacatccagaccagctgctagaattcgtttggttttcagtgcctcgtacagggccttctggtctacaacgccaccacgcgccgtgttgataagaatgcagttgggcttcatcttctgaaaggcagtggcattgaagatttccttagtctccggggttaggg

SEQ ID NO: 3374 - DNA, 3436 bp, DROSOPHILA
taacaccttgccatccgtgccggcagctcttaaaaatatccgaagtatcgcagatttaggcaaaatctgcatcaattaaccaaacatggatagcataattggacgcagccagtttgtctcggagacggccaatctgttcacagacgagaagacagctacggcaagagctaaggtggtcgattggtgcaatgagctggtcatcgcatcgccttcgacaaagtgcgaactgctggctaaggtgcaggagactgtgcttggatcgtgcgcggagctggccgaagaattcctggagtccgtgctgtctttggcccacgactcaaacatggaggttcgcaagcaggtagtcgccttcgtagagcaagtttgtaaagtgaaggtggagttactgccccatgtcattaacgtcgtgtctatgctgcttagggataactcggctcaggtaatcaaaagagtgatccaagcctgcggtagcatctacaagaatggattgcagtacttgtgcagcctcatggagcccggcgacagtgcggagcaggcgtggaacatcctcagcttaatcaaggcgcaaatactggacatgatcgacaatgaaaacgacggcatacgtacaaatgccattaagttcttggagggcgtcgtggttctgcagagctttgctgacgaggacagtctgaaacgagatggagacttctcgctggcagatgtccccgatcactgcacactattccgccgtgaaaagttgcaagaggagggcaacaatattttagatatcttgcttcagttccacggaacaacgcatatttcctcagtgaacttgattgcctgcacaagcagcttgtgtacaattgccaaaatgcgacccattttcatgggcgccgtggtggaagcctttaagcagctgaatgccaacctgccgcccaccctcactgactcgcaagtaagctccgtgcgtaagagccttaagatgcagttgcagacattgctgaagaaccgcggtgcctttgagtttgcaagcactatccgaggaatgttagttgatctggggtcctccacaaatgagatccagaagcttattcccaaaatggacaaacaggaaatggctcgtagacaaaaacgcatcctcgaaaatgctgcgcaaagtcttgcaaagcgtgcgcgcttggcctgtgagcagcaggatcagcagcagcgagaaatggagctagacactgaggaattggaacgacagaaacagaagtctactcgagttaacgaaaagtttctggcagagcatttccgtaatcctgaaactgttgtgaccctggtgctggagttcctgcccagtctgcccactgaggtgccacaaaagttccttcaggaatatacacccattcgcgaaatgtctattcagcagcaggtaaccaatatctccagattttttggcgaacaactatctgaaaagcgcctaggcccaggtgccgcaaccttcagtcgagagccgccaatgcgggttaagaaagtgcaagcgattgaatcaacactaactgcaatggaagtggacgaggatgctgttcaaaaactgagtgaggaagagtttcagcgtaaggaggaagcaaccaagaagctgcgcgagaccatggagcgcgccaagggtgagcagactgttattgaaaagatgaaggagcgcgccaagacgctgaagctgcaggagatcaccaagcctctgccacgcaacttaaaagagaagttcctaactgatgcagtgcgtcgcatcctcaactcggagcggcaatgcattaagggaggagtgtcatcaaagcgccgtaagctggtcaccgtgattgctgccacctttcccgataacgtacgttacggcatcatggagttcatcctggaggatataaaacagcgtatcgatttggcattttcctggctctttgaggagtactctctgctgcaaggatttacaaggcacacttatgttaagacagagaacagacccgatcacgcctacaacgagttgctgaataagcttatcttcggcattggagagcgttgcgatcacaaggataagattattttgattcgtcgagtatatctagaagcacccattcttccggaagtctcaattggacatctagttcaattaagcctggacgacgagttctcccagcacggcctggagctaatcaaggaccttgcagtgcttaggccgccgcgaaagaatcgtttcgttagagtgttgctcaacttttctgtgcatgagcgactggatctgcgggatctggcacaggcccacctggtcagtctgtaccatgtacacaaaatactaccggctcgaatagacgaattcgctctggagtggcttaaatttatcgaacaggaatctccgccggcagctgttttctcgcaggactttggtcgaccaaccgaggagcctgattggcgggaagacactaccaaggtgtgctttggtttggcctttaccctgctgccctataaaccggaagtttacttacagcaaatttgtcaagtgtttgtttctacatctgccgaactgaaacgcacgatcttgcgcagtctagatattcccataaaaaagatgggtgtagaaagcccgacgttgctgcaactaatcgaggattgtcctaagggtatggagaccttagtgatccgtataatttacatactgacagagcgagtgccatccccccatgaagaattggttcggcgggttcgggatctctaccagaacaaggtcaaggatgtgcgcgtgatgatacccgtgctaagtggcttaacccgatccgagctaatttccgttctgccgaagctgattaaacttaatcccgctgtggtcaaggaggttttcaatcgattgcttggtatcggtgccgaattcgcgcatcagacgatggccatgacccccactgatattctcgtggctttgcacaccatcgatacgagtgtctgcgatattaaagccatcgttaaggctacatccctatgtttggctgaaagagatctgtacacacaggaggtacttatggctgtgctgcaacagcttgtagaggttactccgctgcctactctgatgatgcgcacaacaattcagagtctaactctgtacccgcgtctggcaaactttgtaatgaacttgttgcagcgtctgataatcaagcaggtctggcggcaaaaagtaatctgggagggctttttaaagaccgtgcagcgcctgaaaccgcagtcaatgccgatcctgctgcaccttcctcccgcccagctggtggacgcactgcagcagtgccccgatttaaggccagcattgtcggaatacgcggagagcatgcaggatgaaccaatgaatggtagtggtataacccagcaggttctggacatcatctccgggaaatcagttgatgtgttcgtgacggtaactatgcattttttgatttag

SEQ ID NO: 3375 - protein, 1116 aa, DROSOPHILA
MDSIIGRSQFVSETANLFTDEKTATARAKVVDWCNELVIASPSTKCELLAKVQETVLGSCAELAEEFLESVLSLAHDSNMEVRKQVVAFVEQVCKVKVELLPHVINVVSMLLRDNSAQVIKRVIQACGSIYKNGLQYLCSLMEPGDSAEQAWNILSLIKAQILDMIDNENDGIRTNAIKFLEGVVVLQSFADEDSLKRDGDFSLADVPDHCTLFRREKLQEEGNNILDILLQFHGTTHISSVNLIACTSSLCTIAKMRPIFMGAVVEAFKQLNANLPPTLTDSQVSSVRKSLKMQLQTLLKNRGAFEFASTIRGMLVDLGSSTNEIQKLIPKMDKQEMARRQKRILENAAQSLAKRARLACEQQDQQQREMELDTEELERQKQKSTRVNEKFLAEHFRNPETVVTLVLEFLPSLPTEVPQKFLQEYTPIREMSIQQQVTNISRFFGEQLSEKRLGPGAATFSREPPMRVKKVQAIESTLTAMEVDEDAVQKLSEEEFQRKEEATKKLRETMERAKGEQTVIEKMKERAKTLKLQEITKPLPRNLKEKFLTDAVRRILNSERQCIKGGVSSKRRKLVTVIAATFPDNVRYGIMEFILEDIKQRIDLAFSWLFEEYSLLQGFTRHTYVKTENRPDHAYNELLNKLIFGIGERCDHKDKIILIRRVYLEAPILPEVSIGHLVQLSLDDEFSQHGLELIKDLAVLRPPRKNRFVRVLLNFSVHERLDLRDLAQAHLVSLYHVHKILPARIDEFALEWLKFIEQESPPAAVFSQDFGRPTEEPDWREDTTKVCFGLAFTLLPYKPEVYLQQICQVFVSTSAELKRTILRSLDIPIKKMGVESPTLLQLIEDCPKGMETLVIRIIYILTERVPSPHEELVRRVRDLYQNKVKDVRVMIPVLSGLTRSELISVLPKLIKLNPAVVKEVFNRLLGIGAEFAHQTMAMTPTDILVALHTIDTSVCDIKAIVKATSLCLAERDLYTQEVLMAVLQQLVEVTPLPTLMMRTTIQSLTLYPRLANFVMNLLQRLIIKQVWRQKVIWEGFLKTVQRLKPQSMPILLHLPPAQLVDALQQCPDLRPALSEYAESMQDEPMNGSGITQQVLDIISGKSVDVFVTVTMHFLI

SEQ ID NO: 3376 - DNA, 3779 bp, DROSOPHILA
tgttttatagttgctgtgtaacgatgtggtcgtaaaatataagtctgccaaatatggaaaaagggatggaaagaaagcccgcccgcagcatttaagcccgatcccaaactggttttcgctctcagcaagcgcaaataaaacgtgaaagcagtaattgctcgcttacctggcgaaatccgcgggactcggagtggcgtcgtccaacgtcgagatcacgccgtagactggccccgctggattcgtggggctaccagctcctcggcctctgtggtacctgctcatattcggagtcggagtgtgctcttcgaattgttttatgatccccgcggcgattagatttcccgatccaggccactgtggccaaacgcgcctcggttcgttattaaaaatcaacggctcaattggcgtaatgtggaatatcgaaggcaattggcaggttaattccagcgcgagccgtcaattaatgcaaagtcgaagttccaatttgaaggcctgggaagtctcaattatgcaatattccgggaagttccattgacggcgcgacacgatgagaaatgcaagagtgtccagaagaagtcgactgcaggggagaacaaccagctttcgcaaattttgtcagccatttgaacactcaaaagtggaatttgatttaataaacatcggatcggaaggcaagaataaaactgacagtcgaacagctgttcgtccggcgaaaaaataccgaatccatcgcacgtgcgacagagcgagagcgtgactaagataagagaacattttaaagtactgctggctctctttatagagcgcaactgttttgttatgggtttggaacttataaattgtgttcctagaagagtatattagttagcaagctcgcttggcattcgccatttaaaagctacattttagcattccatttttatagtttcgctgtaacatagaaaaggcatagatgttttctcaacaaagctaccacttcaaaaccaactgtgcattttttatactgttcaacagagactttaattaaagcggaaagaaataaacaccagtatgtgaaaaccaatcccccagaaacccaaatgaatgcataaatgttctcctccagctgcagcacttgaaacgcttgtcacgcagtgctacccacccccgcaagttgacttggttgcttagttcgagcagagctggcggtaccagcttttgctctccctgcactttggattggagcacatgggacaacgcatgaggaacttggggttgactgcctgctgggacttcaggtggtctgccacaacgtttgtcagggcgtcgatgaacagcgggtggtcgttgggggttgcagctcgacggatttcctctacgcctacctccttggccagttcgtcgcagtactcgatgtcgagctcatgcagcgtctcgatgtgctcgttcacgaaggcaatgggcacaaggatgaagttcttcaggccttgcttaacatagccctgtaaagatgggattggttttagtggatgggaatggaaatccggcattaaagttacaccttaatggcatcatcagttgcgggcgccagccagggtagcgggcccaccttggattgccatgccaggctgtagggattcgtctgaccaagttcctgcatcaccatgtgtacgctagcaccaatctccgagggatacgcgtcaccccggttcacagccttaaggggaagggagtgggcagtgaagaggatgaccacatcatttcgtttcgtttccacaaatttggccagctcgtcgcgaattcgctgggcaaacgttttgattagaagtggatgagtgccccacctgtcgataatgctccatttgatatccgagggcagattactaaagaggtagaggggatcaaataaatagctgcaattgtgcatttctaactcacttgctccgataatgagtaaatatggagttaaagctggatccggaggtggcgcagctgtactgtggatattgtgaaaagagtacaacgcgctctggtttgtccctgtaaatatgttaaaatattaacatgtattctttaagtagcgcaaatgaccataatttccaggtttaggtttcagtaatttgtccaagaagtcaactgataatagcaggacattgaaacatgcataagaagtcagaagtctatacaaacttatttactagaacatatcttattgtgagagtccgtagcaatatatataggtcaatttcacgaccttcggattatttacatcactcttgttctacttctcgactacactcacttttcgatctcggccagcgtgttctcagtgaggggattcacgtagcggaaaccgacgtagtgcttgtgaggtgctgtctccggggagattctgtccaactgctcgcacatgagctggccctgcagctcggtccacttaagaatcggtgaaccaccgccgatctccttgtacttcttctgtacctcgggcgtcctgcgctgggcgatccacggaccaagacggctctgcaccggcagctggatcatgtcccggtcggtcataatacgcaggaggtagtcatgcacctggtccgtgtgggtcggaccgcccatgttcagcattaggatcgcggtcttcggtttttggccgctcaggttgcgcactcctcctgccagaccacctgttggggaatatgtaggaatgtcgtgggaactgtatccactcgtatactcacttgccagtctgcaaaactttgtgttatgcaaaaacatagttccttttaaattgacccaaattgatggcaccggtgtcgaatagtgttaccagttgctaaaatagtttaaataccaaaatgtatgatctcacagattctagagtttttccaaacgtaacagagttctgtaaaaagtaaccgtcacgccatctatgtgtgtaaaatagctgccaactattactcaacagtaatctaaatatttaaaaatttttccttttgttacacatttaccatttaatttctctttattgaaaccgaaaccaatatttggtatatactgttcttcaagcgaccaacagaaatttttcgcgcatgcgtccttatttctttcccttgtcatcaacgctgcgtgcaacggtaaaagctgactgtggtgcagtctcgctcttgcacgctgcatttcgctctcgtcgcttgctgcgagtgtttcgtttcctccgatcaaataatattttgtagtttttccaccgaatgcaggcacaattgcttcgtaaaaacgcaataaaaggcgcggcccatggtccgaaaagataagaaagcttgaaaaacaaccgaaagtgtcgtttaacatcggagaaaagcaaaaggacaagcggcgcagcacagtgaaaaaaacgtaggaagttttggagtgagtgagagggaaggagttccaccgcggtggtgggtgtacgtgcgcgagtattggtgatgtgtccatgtccgtgttatcgccaccagcattaaagtgctccaattcgtggcgcacgcgcagaataactagcgctctcttgctctctttctcgacttagaagaggaacaggatattttattatactgaaattcctactcaggaaattcgcatagttgcgaaagcttcgcgctgccacacggacgcattccgctacgggttccccgcaccacccacacactctcacacccgcctgccgcgagcccacacaccgcgcccgcaagcactctcgcgcacagatcaatgaaaaggccaaaaaataaattgcaccttttccgggaaccaaaaacatgttg

SEQ ID NO: 3377 - DNA, 1349 bp, DROSOPHILA
atcaatttgggtcaatttaaaaggaactatgtttttgcataacacaaagttttgcagactggcaagtggtctggcaggaggagtgcgcaacctgagcggccaaaaaccgaagaccgcgatcctaatgctgaacatgggcggtccgacccacacggaccaggtgcatgactacctcctgcgtattatgaccgaccgggacatgatccagctgccggtgcagagccgtcttggtccgtggatcgcccagcgcaggacgcccgaggtacagaagaagtacaaggagatcggcggtggttcaccgattcttaagtggaccgagctgcagggccagctcatgtgcgagcagttggacagaatctccccggagacagcacctcacaagcactacgtcggtttccgctacgtgaatcccctcactgagaacacgctggccgagatcgaaaaggacaaaccagagcgcgttgtactcttttcacaatatccacagtacagctgcgccacctccggatccagctttaactccatatttactcattatcggagcaataatctgccctcggatatcaaatggagcattatcgacaggtggggcactcatccacttctaatcaaaacgtttgcccagcgaattcgcgacgagctggccaaatttgtggaaacgaaacgaaatgatgtggtcatcctcttcactgcccactcccttccccttaaggctgtgaaccggggtgacgcgtatccctcggagattggtgctagcgtacacatggtgatgcaggaacttggtcagacgaatccctacagcctggcatggcaatccaaggtgggcccgctaccctggctggcgcccgcaactgatgatgccattaagggctatgttaagcaaggcctgaagaacttcatccttgtgcccattgccttcgtgaacgagcacatcgagacgctgcatgagctcgacatcgagtactgcgacgaactggccaaggaggtaggcgtagaggaaatccgtcgagctgcaacccccaacgaccacccgctgttcatcgacgccctgacaaacgttgtggcagaccacctgaagtcccagcaggcagtcaaccccaagttcctcatgcgttgtcccatgtgctccaatccaaagtgcagggagagcaaaagctggtaccgccagctctgctcgaactaagcaaccaagtcaacttgcgggggtgggtagcactgcgtgacaagcgtttcaagtgctgcagctggaggagaacatttatgcattcatttgggtttctgggggattggttttcacatactggtgtttatttctttccgctttaattaaagtctctgttgaacagtat

SEQ ID NO: 3378 - protein, 384 aa, DROSOPHILA
MFLHNTKFCRLASGLAGGVRNLSGQKPKTAILMLNMGGPTHTDQVHDYLLRIMTDRDMIQLPVQSRLGPWIAQRRTPEVQKKYKEIGGGSPILKWTELQGQLMCEQLDRISPETAPHKHYVGFRYVNPLTENTLAEIEKDKPERVVLFSQYPQYSCATSGSSFNSIFTHYRSNNLPSDIKWSIIDRWGTHPLLIKTFAQRIRDELAKFVETKRNDVVILFTAHSLPLKAVNRGDAYPSEIGASVHMVMQELGQTNPYSLAWQSKVGPLPWLAPATDDAIKGYVKQGLKNFILVPIAFVNEHIETLHELDIEYCDELAKEVGVEEIRRAATPNDHPLFIDALTNVVADHLKSQQAVNPKFLMRCPMCSNPKCRESKSWYRQLCSN

SEQ ID NO: 3379 - DNA, 3621 bp, DROSOPHILA
cctgcttgttggcctcgaatagtcggcggttggtggccagaagcagggcaagcgttaattctgccgtggcatccgttaggacgtccggtgtgaagcccactcgaattccacgtttcctgcactcctccacgtcgatgtgatcgtaacccaccgaaatagttgccacgcacttcaactgaggaccggcagcatccaagacttccttgtcaaccttgtccgttagagcgcagtaaagggcatcttttccggccacgacgcggataagctcggagcggggcaccggattggtctcatgccaggtactcacttggcagctgagcaaaatcgtgcatgtcgaaattagtgtctatgctaataactaaatagccggttacaacaacaaaaacaaacctcttgcgcagcagctccagaccgctgtcatccacatccggcctggttacgtacaccttgtgttgggagctcatccttcgaattatgtgtccctgaatcaataagtttctgacttgtccgaacggcaaccgcggtggcattgagttcaaaatttccaagcaagtaggtaaacaaagtaacaggttccgtaagtgtgcccgaattttacattacacattaatccgctaaaaaaggaatatcacagacatcggggatctcgactttagactaccctgtacatcggcttaaatttttagctacttattaccactgcctttaccgccatagtttaatttttttattcgtatttttatattttcatgttgaatattaaatatatataaataatattaataccacactcaaaaaaaatattatgaataaaagtatatttactttttaatgataacggtatgtctctgtcaatatcttctgtcaatatctttgacggaaaacatcagaattattattattataacttacttttctctcacaaagaacgagtaagacatacgactacagcactacagggtatacatcacatttgaccacaaaactttcgagtctaaacattagatcttaaatttttcgacattgcttagaagttttgccgggcgggctcgaatatcttacatgaatggaccaagcctcctcgtaaagttgaccacacgtgccttcctgttattcaacggtcgcccccagaatcgctggctaaagtcgatggccaatagtatggtttgctcgcgaggcgtctctccagaattgattgcccagctgggaaaaccacctaggatgcgcacaaacccggcattccggaaggtggcaactcctgagttcaaaagcatatttacccccgagctgaatgaccttgtggcgctctttaagaagtacgactacgagctgcggatcgccggcggagctgtgcgcgacattctgatgggcattccaccgaaggacatcgacttggccaccaccgccactccggatcagatgaagcagatgtttgagaaggaggaggtgcgaatgataaacgcaaacggcgaaaagcacggcaccatcactcctagaatcaatgacaaggagaacttcgaggtgaccacattacgcatcgacatccgcaccgatggacgccatgcggaggtgatgtacacgactgactggcaactggatgcgaaccgccgcgatttgacaatcaactctatgttcttaggctttgatggcaccgtgtacgattacttctatggctacgatgatctccaggagcgtcgcgtggtcttcgtgggcgaagcagatattcgcattaaggaggattttctgcgcatcctgcgctatttccgattctacggacgcatcgcaagtgaggaaaacaaccacgataaggccaccctggcagccataaaggaaaacgcgaaaggtcttgcgagaataagtggcgagcggatctggtctgagctccaaaagatagtgccgggaaatttcggagccgcattgtttctggagatgcaccgttgtaacctattcgagtacattgggctgcctaaagagccatatctggatgagttcgaccggctttgcaaagcgctagatcaatttgaaaagccacatcagccgattttgtacttggcagggatgctgcactccgtggaagacgccatggaaatgcacaaacgcctgaagctatccgcctacgaacgagacctggctaggttcattacccaggagcgggagaaggtaagaataccgatccgatcaagttaaaattgcgtctttaaacaccagtttccctttttaggttggctcacagtacacgaccctgcgtgactatcagaagttgtgcttacaaaagtacattcaaagggatttcgtagaacagttgctgaaatactctggcaaactggaactttacaaccagctcaagtcgtgggtcaagccggacttcccgatcaggggaaatgctttggctcagcgtggtctgaacggaatgaggcttggtttggtgatggatgaactgaaacttttgtgggcagacagtgattttcagctaacacacgacgatttactgaaatggattcccaacgtactgaaaaagataccaagcgctcctggtaaagtgaagcgaatgaagtagtattgattacatttagatgtaatcgatgtaaataaatatatgggtttcccttgaattttcagataattttcatttcttgattttctttttatttcctacgactttgtaaaaatttggatcggtcgcttgaatcctactttgcagtgctccggtatgcccataagtttcatttcggcaaagcccacttccgggctaagcagatattcggtgaaatgatcaggtcggaatttaattgcattgtagttatctcttatttgttcctgaagagataaatgtacatacattaaattagaatattctctatcgattgtccgtctaataaagctcaccgatagcttcttgcgcctcttgtagccgtcgaaggactgaggttccaggatcagcttgccgcccgggcgcagctgcaggtacatgcgtctgaaggcctgcttcaggccggaatcacagaaattaaggtggatccacttagtgacagacaggcagagtatgacgtcgaactgcggccgttcaatttcgagcaggacgtcgtcctccaggacgtagttcccgtgcacaaactgtatgtggggtatcccctgccccggggttgcgtgacgtttcaggtgactgacggttttttgggcatcatttattagcccccgatctatgtccaggcccacgaggctcttaacctcgaatttcctggcaatctggatggacaggtggccagagttgcagccgatgtcaagcagctgcttgttccgaaacaaatccggttgcgtgccaagcacgtccaggcgtatgtcgtgaaaatccttgttcaggatgcgcttgccgtagtagtgcttatagttgccgtacttgaagttaaggtccttgttttgcatgggctttccgtttagatggagccgttttttgggactctgcgcaggcggacggcttgtggcctccacatttgattcctcctttttcagtcttttggattccacttgcttttcatctaatgttattacacattttcgctttttcgcacatttttcggcttgtttgccggtcaatggcgtattgttgttgttctccaaatc

SEQ ID NO: 3380 - DNA, 1560 bp, DROSOPHILA
attagatcttaaatttttcgacattgcttagaagttttgccgggcgggctcgaatatcttacatgaatggaccaagcctcctcgtaaagttgaccacacgtgccttcctgttattcaacggtcgcccccagaatcgctggctaaagtcgatggccaatagtatggtttgctcgcgaggcgtctctccagaattgattgcccagctgggaaaaccacctaggatgcgcacaaacccggcattccggaaggtggcaactcctgagttcaaaagcatatttacccccgagctgaatgaccttgtggcgctctttaagaagtacgactacgagctgcggatcgccggcggagctgtgcgcgacattctgatgggcattccaccgaaggacatcgacttggccaccaccgccactccggatcagatgaagcagatgtttgagaaggaggaggtgcgaatgataaacgcaaacggcgaaaagcacggcaccatcactcctagaatcaatgacaaggagaacttcgaggtgaccacattacgcatcgacatccgcaccgatggacgccatgcggaggtgatgtacacgactgactggcaactggatgcgaaccgccgcgatttgacaatcaactctatgttcttaggctttgatggcaccgtgtacgattacttctatggctacgatgatctccaggagcgtcgcgtggtcttcgtgggcgaagcagatattcgcattaaggaggattttctgcgcatcctgcgctatttccgattctacggacgcatcgcaagtgaggaaaacaaccacgataaggccaccctggcagccataaaggaaaacgcgaaaggtcttgcgagaataagtggcgagcggatctggtctgagctccaaaagatagtgccgggaaatttcggagccgcattgtttctggagatgcaccgttgtaacctattcgagtacattgggctgcctaaagagccatatctggatgagttcgaccggctttgcaaagcgctagatcaatttgaaaagccacatcagccgattttgtacttggcagggatgctgcactccgtggaagacgccatggaaatgcacaaacgcctgaagctatccgcctacgaacgagacctggctaggttcattacccaggagcgggagaaggttggctcacagtacacgaccctgcgtgactatcagaagttgtgcttacaaaagtacattcaaagggatttcgtagaacagttgctgaaatactctggcaaactggaactttacaaccagctcaagtcgtgggtcaagccggacttcccgatcaggggaaatgctttggctcagcgtggtctgaacggaatgaggcttggtttggtgatggatgaactgaaacttttgtgggcagacagtgattttcagctaacacacgacgatttactgaaatggattcccaacgtactgaaaaagataccaagcgctcctggtaaagtgaagcgaatgaagtagtattgattacatttagatgtaatcgatgtaaataaatatatgggtttcccttgaattttcagat

SEQ ID NO: 3381 - protein, 477 aa, DROSOPHILA
MNGPSLLVKLTTRAFLLFNGRPQNRWLKSMANSMVCSRGVSPELIAQLGKPPRMRTNPAFRKVATPEFKSIFTPELNDLVALFKKYDYELRIAGGAVRDILMGIPPKDIDLATTATPDQMKQMFEKEEVRMINANGEKHGTITPRINDKENFEVTTLRIDIRTDGRHAEVMYTTDWQLDANRRDLTINSMFLGFDGTVYDYFYGYDDLQERRVVFVGEADIRIKEDFLRILRYFRFYGRIASEENNHDKATLAAIKENAKGLARISGERIWSELQKIVPGNFGAALFLEMHRCNLFEYIGLPKEPYLDEFDRLCKALDQFEKPHQPILYLAGMLHSVEDAMEMHKRLKLSAYERDLARFITQEREKVGSQYTTLRDYQKLCLQKYIQRDFVEQLLKYSGKLELYNQLKSWVKPDFPIRGNALAQRGLNGMRLGLVMDELKLLWADSDFQLTHDDLLKWIPNVLKKIPSAPGKVKRMK

SEQ ID NO: 3382 - DNA, 2588 bp, DROSOPHILA
cacagattgctcaaggggaggggggaggaaaaggatatgaaaggctggcaaaagacgcagttaaagtgaaaattgtgtttatacattttatgggctttattacacccccccacccctcgttattcagcttgactttttattgtgccccgaaggcctttctatgtgagccgcacacacctttcttctggctcctttggcattcatagagcctccatgtgttcacgcctgccagcctgccaccatgccacgcctacaaacacgccgacgcctaccgtaaaaggcagactgtatttaacgggaaatggagcgcacaaaagtgtgctgtagttttacattgtgccgggctatgcctaatccgtgcccaaccctccccttcccatttctttttttttatcctttttttgcgtatctactccagatgaaccatcaacgttccctgatcacgtacttcaagaacacgaagatgaaaaacgacttaatgtagcaatagattattgtactgcagtctctattttatattttaaatttaaaaaatatatatatgtatataacaggaaataatacgcctagttggccctatttatttataaacagtcttcatcttagctgtgccacattttatggccaagttatggggttaaatcccgttggattatatcagatttagacaccatatttatttttttcttttaataatatataatcagtatttcttcgatggcaataaaatcacttgtgcattaaatacaaatgaaacatcataaatcgttgaattcgtaacaaaatgcactatccacctgcatttaaactgggaaacttttgttaatgtaaatttttgtataaggcaagaagtttaaggatcttgttgtgcaagtagacattatagaaattttaatttatattaatgataaaaatgtcaaatgaagtcgagatgcttaacagcaggtattggtgtcattcattggccctctgcagatctgtgctagattagattaattggttaatccggtgactctgcagcgtcctcctcttcctgctcagatggcatcgggctgatcgggttgtgaagtacataacgatggtatatgtccattgccaacgagctaaatatgtcatatacattcattccactcttggcggaaacctcttcaaagccgagtgccccacgatgggcatagttgaacccctgctccatgctcacctggcgatggttcggatcatcacttttgttgcccaccagcaggacggttaccttatccggacacatgcgccgtatctccttcatccagccatcgatgttttggaaacttttggacgacgttatgtcgtagacgagcagtatgccatgggcactgcgataattggacggcatcagcgaattgaagcgcttgtcgccggaggtatcccagacctgcagcatcatcacccgactgaccagctccacgctgcgcgccttgacatctatgcccatcgttctcaggtatttctcggtgaatcggtcatccgagaaacgcattagcaggcaggatttgcccacgccgctgtcacccaggacgagaaccttaaacagatagtcgaagtggctcatcgtcaagtcggtttggtttaatatgtataacgattcgactgaagtgataatcttagcttgggttgttctgcgttttatttttttgctgagaaaggatgtttgaacaaaatgtttcaaagtactctacttttgaataggtccatcaattgggatttgaacatattttgaaattgatttagtagttacaagttatggagaaaacccgattgtaagtatccgatttttggcaatatttatattatgttatttttttgctaaaaaataatcggtattttctcaatagcaataaaaataattgtccaaatgtggaatgtcatacctcgttgaattcgtaataaaattccctatcgacctgtattcaaagttggaaattctaattttttgccatttttcgcaaatttagatgatggtaccccttatcaaaaatgcgaaaattgtaaaaaaatttttttttgggaatcataaaaatagtgatagggatggttagctatacttaatggcagtacaaaacagtctttattttagcggtgatatattttttgaccaagttatggagaaaacaccgcatatccgttttttgggaaattttatttttttcgtacaaataatctgtattttctcattgttaatagaaataattgtccaaaaggggaacgttatacctcgttgaattcgtaactaaatttccaatcgatttgaatttaaacctgttcgtttttattttcggaaatttttcgtatattttgaaaaatgtatattttatgcaaatattttattgtccaagcggtacaaccggacgacggaatatgctggttccggccttatggctgagtggctgcaaattggctgccgatgtcatacaaggaggaaagaatcagatggctctctgtagcattgaatcgccatttaattacgggccggatattacgcatacgacatggggccgtagctggagcaatcctcacactcactcggtcgacagacttgaatgcatctaaat

SEQ ID NO: 3383 - DNA, 588 bp, DROSOPHILA
atgagccacttcgactatctgtttaaggttctcgtcctgggtgacagcggcgtgggcaaatcctgcctgctaatgcgtttctcggatgaccgattcaccgagaaatacctgagaacgatgggcatagatgtcaaggcgcgcagcgtggagctggtcagtcgggtgatgatgctgcaggtctgggatacctccggcgacaagcgcttcaattcgctgatgccgtccaattatcgcagtgcccatggcatactgctcgtctacgacataacgtcgtccaaaagtttccaaaacatcgatggctggatgaaggagatacggcgcatgtgtccggataaggtaaccgtcctgctggtgggcaacaaaagtgatgatccgaaccatcgccaggtgagcatggagcaggggttcaactatgcccatcgtggggcactcggctttgaagaggtttccgccaagagtggaatgaatgtatatgacatatttagctcgttggcaatggacatataccatcgttatgtacttcacaacccgatcagcccgatgccatctgagcaggaagaggaggacgctgcagagtcaccggattaa

SEQ ID NO: 3384 - protein, 195 aa, DROSOPHILA
MSHFDYLFKVLVLGDSGVGKSCLLMRFSDDRFTEKYLRTMGIDVKARSVELVSRVMMLQVWDTSGDKRFNSLMPSNYRSAHGILLVYDITSSKSFQNIDGWMKEIRRMCPDKVTVLLVGNKSDDPNHRQVSMEQGFNYAHRGALGFEEVSAKSGMNVYDIFSSLAMDIYHRYVLHNPISPMPSEQEEEDAAESPD

SEQ ID NO: 3385 - DNA, 3065 bp, DROSOPHILA
aaagaggtcaagggcaaggtgcaaaccttttatcaggtgctcatagacacccgcgattgcccgtacattgtaagatgggtctagttttgcttccttcgttttctaagttggcatttcgtgtctttcagcgcgcccagaccgaggcggtcacctttctcggcaaccaggactccaaccgcagcctctacgccatccccgggctggactacgtggcccacgaggacatcatgccttacagctccagcgagaagagtccgctgcagcacgagctgttcgataagttccttacgcacgctccggacgcggacccgccatttgtgggccaggacactctgaaggcgtggcaggagaagaaccatccctggctggacatgagcgatgtacacaaggagaccacggagaacgtgcgcattaccgtgattcccttctacatgggttgccgggagacgcctgctagttcggtctactgggtgcgttaataagaaactcctttctttagtttaacgtcataaagtacctttccagtggcgctactgcatccgactggagaacctcggcgagctgagcgtgcagctgcgcgagcgccactggcgcattttctcactgtctggaaccctggagacggtgcgcggaagaggagtggtgggccaggagcccattctgagcccccggctgcccgcctttcagtacagcagccatgtgagcctgcaggctcccagcggccatatgtggggcaccttccggctggagcgcgaagacggatactccttcgattgcaagattccgcccttctcactggagagcaagccggacgacctagggacgcccacaccggccacgcccagtgcccacgataaaaagcgcgacgatagcgattaagaggcagttgttcacccgtagttaaatgattttaaaacgcaatcttttctgacaatgcatgcgtacatgtgtttagtgcaaattacaataatcaacaaggacgcagagccagttttgattctcagccaagtcgcacggtctttggttctagctgaatggcaaagtcaaagggtctccggttgtcgcgggtgtcaaagatgctctgcagagcgtcgagtgccgcagtctctgtggctgttttcacatcttcaccgaatcccttgcccagtagctgccggttggcgtagatgcctacttggtaggcggctagcacagtgttctttccgcagtctccaagcaggcggggctccgcttcgcccagctttcgctcctggcatatcttctccagcagctggattggttcctggggagtccacacctccaacaggtccttttgattcagttgcgtgcagatgaaatcgcgtacaaaaatgaaagccctctcgattccactggaactggccagggcgccaataactgcgtgtaaagatttggcctgactttcggccgagggcgggtattccgtagactgtatcagatcctttgtgcccaggtgggtcgagacgtgagcaagcgtttcggtgctaagtagataactggcgatcgcctggagtccttcattagggaccttcggtaactggtgctgcaggaaggcctcaacgtaggcacgggcaatttgttggcccttctcgaccagatcgctattgtgaggcatctggaggtcagactcctcaatgcctagctgccgacgacgatcctcctcccgctctgcaaacgatttctctgtaaaagcacgctgcagctccgacaattcaaaggattcgcccaaacgcttgccgaacgcgaagagctccgatcgctggttccactccacgaacccagaacgccgctctggcttttgtggtcctagtttcttctgccggtgggcgagctcacgtaacgttggcgaaacccatcgcttgatgtggcgcctcgtttgcactgccgaaaatcacgattactgactggcattaggtgaatccgggttactcaccagtcggtgagccctccaagagcttgacacgagccaggagaccaacagcactgcgtaagaatgacatctttaaagcgatcttaaaaataagtaacgaatatgttttcgcgcatgggaactagtgttgcacgggtttttgtggcagtgatggcagtctaaccgtaaatataattttataacttataacttaacttatacattttaataatatttgtttcttgttgtttctatatttattcagagatgtataattaaaaaaaaataataataactaaatatgtttctttatgaattataattttatcatttaatcgagtaattataacgaaaaatactttcagctttttatttagcgttttgtagctaaaaggcgccagtactaaattgcgttggtggcacccgctcgttttccaacactcccgcaatagacgccatgtacatgtctgtgtttgtgtatgcgccaagaaaatttaagtcgcggaatattaacaaggaatccctgccagaaacagggcattgagagaccacagaagaaaatatacccaacatggcactgcagacatacggggacaagccggtggccttccagctggaggagggcggcgagtactactacgtgggctcggaagtgggcaactacatgcgccacttccgcggcattctgtacaagaagtacccgggaatgacccgcatcgtcctgtccaacgaggagcgcaagcggctggctgagtccggcctcagctcccacatcttagccagctctgtatcgctgctccgcgccgtagaggtggatgatatcatggccggcaacgatgaaaagtaagtgggcgtcttacctaagtaatgtccccagaatagtaactaaatagggcctttcctaaaaattccaattaacttcgttgatatctacttcctactagtcctacttaaacgtttgtttttaaatgtttaatccaatggtatcaagtaatccttttatcaaatataagacatgtgtacatttggctgaagattcttcattttagtaacattgttaatgaccacttagttaaaaaccacttatcattctgaagtgaagacgtatacaaacacacatagccacacactgcccagt

SEQ ID NO: 3386 - DNA, 1013 bp, DROSOPHILA
catgcgcgaaaacatattcgttacttatttttaagatcgctttaaagatgtcattcttacgcagtgctgttggtctcctggctcgtgtcaagctcttggagggctcaccgactgtgcaaacgaggcgccacatcaagcgatgggtttcgccaacgttacgtgagctcgcccaccggcagaagaaactaggaccacaaaagccagagcggcgttctgggttcgtggagtggaaccagcgatcggagctcttcgcgttcggcaagcgtttgggcgaatcctttgaattgtcggagctgcagcgtgcttttacagagaaatcgtttgcagagcgggaggaggatcgtcgtcggcagctaggcattgaggagtctgacctccagatgcctcacaatagcgatctggtcgagaagggccaacaaattgcccgtgcctacgttgaggccttcctgcagcaccagttaccgaaggtccctaatgaaggactccaggcgatcgccagttatctacttagcaccgaaacgcttgctcacgtctcgacccacctgggcacaaaggatctgatacagtctacggaatacccgccctcggccgaaagtcaggccaaatctttacacgcagttattggcgccctggccagttccagtggaatcgagagggctttcatttttgtacgcgatttcatctgcacgcaactgaatcaaaaggacctgttggaggtgtggactccccaggaaccaatccagctgctggagaagatatgccaggagcgaaagctgggcgaagcggagccccgcctgcttggagactgcggaaagaacactgtgctagccgcctaccaagtaggcatctacgccaaccggcagctactgggcaagggattcggtgaagatgtgaaaacagccacagagactgcggcactcgacgctctgcagagcatctttgacacccgcgacaaccggagaccctttgactttgccattcagctagaaccaaagaccgtgcgacttggctga

SEQ ID NO: 3387 - protein, 321 aa, DROSOPHILA
MSFLRSAVGLLARVKLLEGSPTVQTRRHIKRWVSPTLRELAHRQKKLGPQKPERRSGFVEWNQRSELFAFGKRLGESFELSELQRAFTEKSFAEREEDRRRQLGIEESDLQMPHNSDLVEKGQQIARAYVEAFLQHQLPKVPNEGLQAIASYLLSTETLAHVSTHLGTKDLIQSTEYPPSAESQAKSLHAVIGALASSSGIERAFIFVRDFICTQLNQKDLLEVWTPQEPIQLLEKICQERKLGEAEPRLLGDCGKNTVLAAYQVGIYANRQLLGKGFGEDVKTATETAALDALQSIFDTRDNRRPFDFAIQLEPKTVRLG

SEQ ID NO: 3388 - DNA, 6359 bp, DROSOPHILA
aaaatgcaaatccaaaatcaatcgtactccgcccctcgtcctccggcaatcgattcgtcgatattcggggattcccttcctgatttgcataagtttccagatagcgcgcgtgcgcagtcgatcggcgcacccgaatccgtaatgcggagcaaaccctcctccccgatgtagtgcaggtccatttgcataacactggctggaggagctggtgatccggatgtcgaacttcctacccgatcgcccgctccgcctcgggacgatgtgccaaaattatgcaaatgttttacaccaataatttatgcaaattacgatccgcaaaggatttggtgatcctgcgcagcggatgttacacgtagatgtcgccagcttcaaatcgaaaatgttttttaggggtttgctcaagttcagaatttctgcaaacgtttttttatatggtaatttttttttgcaatgggtcttaggaaatatttggcatttttaattgtgtttttttgcacgattgtaatgcagattttttgctcgattgtaattttaatttgcaaatttgggtttttattttttgcatttgaatggatttcgattcgattatttcaaaaaggacaggcagctgctccagcttgatatcctttttgcaacgcgccaatttcttaaaaatcatttcgattcccagttttgccgaaatttttgtgcacacaatttgcatagagatgtgaaggaaaagggaacaaagatgcgattctatactttaaacgttctaagatttgattatatttatggtaataggcgaataagattgccgatgccaatatttagtgtgagaaagtatttttgaaaatcttttttgaaatcgcttatgaaaaaaatactgtagacgtcgaaatatttaaaatattcatcttagaatatgtattttttgatagaatagaaaatatatagagataataacaaaaaatttaaaataattaactatacagtttcttgtgcccagataacttatttacccactttctgcacgtaactttgccgtaatttgccgtaatatctttgcaaattgcctgcgattttggataaaattcctctgctgatctgtgctcttctttcatttgctgtccctttctaacgcacgttggccatgcgggattccttcacaaatacacgctcctctttcgcatttttttttaccgaaaaacctctcttttctagataaatttacattaccgctggcgttttattggtcgagaaaagcgagcaaaaaaacggaaaccagccgaaaacaagctgggttttcccagagcattttcctgcgaagggtcggttaaaaaactaggggatgaaggtcgaaccaccaccaccaacggacttctcattttattcgttttttaagagagcgagagcggcgagatcggttttttaagagaaccggtggcgagagggttgcacttgggcatggatttgcgcaatttttgctatattagccggaggccgcggaagagttgaagcagtttgagcctcgcagccgaactttgaggatcgctgagacgagacgccgtgcaagaaagtcgatccaaaatccgaaattcgaaatccgtgctgtgatctgtgctgaatatagtgaagaaatcttaaagaattttcaaaaagaaatcccagtgctgtgctgaatatatccgcgaaagtgtgccacaaaaatgtccaaccaaatggagtttattatgcaactctacatgatgaacttgatgaagcagcagcagcaaatgcagctccagcttccgcagcagcaacagcagcagcagctggctggatacacttacacacagaacgaggatatctctagcagcacatccgtgcagcagcaacagcagcagcagcaggagcaactgcagcagccacagccagatctccgcaagacaagaacgcacaagcgcattagctcgcaaaacaccaactgtagtagtagccgtagttgtagtcccaatagtaatttgattgcttttcaaccacaacaatacccaggcgctacagcggcaactccttccactcccaacagccaccccagcaacctggtcaaccagatgctgctccaaagcctgccgccgctgacgcagctcatgttgcagcagcagcagcagcaacatttgctgaccacctccaaccttctactaacacccacccacacccccagttcgctgggcaagcaggatccactgcagcatccgttgttgctgggccagtttgccggctccgaacagatggccacaaataacttccttcaatcatccacagtgacctccacgcccatcgagagagagaaggcagccacaccagcaccctccgccggagcaactgccggcaacctttcggcggcccaggtcaagtttgagcaggagtccgccgacgacgatgaggacgatgataagccgctgtccagcctcaccagctgcagctcctcgggccacaccaacgccagctccgagaagctgctgttgtcgggcgtccatccgctggagtcaaccaccgacagcctagactcacccagcatggtaagtgatccggggatctagaaggatcttaacagtttcttttatctcgttttatcaccatcaattttaaagatactgtcacttgcagtggcaactacgtagtcaaaaagctatatattgcgcatttttgtattagtacatttgatttaaattctaaattcatcccaacagcttggttcgccatacttcacaaaccttttccagttgcaaaatagaccattttccaatttccaattcagaaagcactatatttgttccctattttgctttgtttttttttttttttggctatgtcccacgctctgttgctgtaatttgagaaaaaacgattcgtgatttttgagatttaagtgtgagagtagccagaaagctcgcgattccggggaaaagaaacagctgtgtcggcaacgcgtgggttctcttggtggctcgatcgctgcccagctgggcaccaggcagtctgagctggggatctcacagatgcatccgtgtgttggtattgactctaaagttcttccaccctctttttcccactgcagtatacgcccgtcaagcagccggcggactcatcgtacggactcatcacacccgtcgacagtgatctgacccccaacacacccctccaaccgacccaaacaatatccctgctgacgccgccgtcgagtgagcagagcaagagcctggtgagcctctcggcggccagcggcctggatgctctgctccagaacgaggaggtactgaagaacctgcggaaagtgtcctcctacctggagtgcgagaacagcctgtgcaggcaggagaacctgcgggagcacttccattgccacgaggagccctgccagggcaagatcctgagcaagaaggacgacatcatccggcacctgaagtggcacaagaagcgcaaggaaagcctcaagctgggctttgcccgcttctcctcctcggacgactgtgcaccagcctacggagagggttgcgcctacaactggaaacagacccactaccactgcgtctacgagcactgtcccaaggtgtatgtgagcaccagtgacgtccagatgcatgccaatttccaccgcaaggactccgagatcgtgaacgagggcttccggcgcttccgggcgcacgagacctgccgcatcgaggattgcccctttttcggcaagaagatctcccactaccactgctgtcgcgagggatgcacccacaccttcaagaacaaggccgatatgggtaagtctacttggaaagcttattagctgaacttagttaatatatcatatatgtatttctccttgcttagacaagcacaaaacttaccatctgaaggaccaccagctgaagatggacggcttcaagaagatcctgaagaccgaggtatgtcccttcgacgcctgcaagttctccaccgtctgcaaccacatccactgcgtccgcgagggctgcgactacatcctgcactccagcagccagatgatcagccacaagagaaagcacgatcgtcaggacggagagcaggcgtaccagcagtttaagatcaagcaggacgtggaggagtcctccctggatgccatgccccagcagcagcagcagcagcagcagcagcagcccaccagccttagtcaatcccagagcagcagctctgtatgcggcggcagcaacacctccactccactctcctctttgtccgccgagcacttcctggctcggaaacgcggcaggccacccaagaaaatcgtaagtttgtctgtatattttgggtaattttccgcgacattaaataggcatattttctcaatccaccacagcaactgccagccgacgctcagcagtcggaagccaagcgcctgaaagtcgaagacgagtcctctaatcccgccatgctcctgccccagtcccagccagcagccgctgtgcatccgctgacaagtggactctttcccggtctcctgcccgctgccgccgctcctggagtggatcccacagcccctaacttccagctcacccacctgatggccctcttccagttgcagaatcccctcttctaccagaacctctatccgggaatgacccagaattcctccatgctcggcaacctggcagcacttagcgccgcatcggcagcagcggcggcggcagcggcggcaaatggagccggagtccagcagccgaaggcagagtttagctttaagccagagtttaaggagtaggaaggatgcgtgtccttagggtattttgccagctacttagtttgaccgacggacgttggacattgtacatacgcgctttaagcaggtttaggtgggtttttttgtgggttcaggcagatccaggacaaggcatccttccctccacaaaaaccaactcagccacactttgagaacctagaagtcccctatacaaagtgtagctgaattggcttttgccaaacattttcccctttagcttagattctctcagtgccacattaatttttaaaattttcagccattttaaataaaaaggaagaactttctgaatttaagtttgactaaactgtgatgttttcattagagtagcctcttttaattgatagagcgagtgcaggctatgcaggatatgcaggacttaggagacttggattgtcaataacatagcgtctaagcattacattgtatgtgatatactaataaataatggctaattgtttttgctttataatttaagggaataatattataattctaattataaactttagtaaaatcagcattcttctataataaataagtcaacattacctgaataaattttattatgcctcagagcttattatttaaacacaaaatgcttgagttattgggggttactggaaaatacaatatataaagtaactaacatatatgtatacccaaccacacataaaacacttaaacatttgattaaataatttatgactttattttgttttcatgtaattgttggttttactcatatgctaacagaaatcagctacacaaactcaggacgcctgataaaaaccgtcccgctaagcaatatttaagtactttacacaaaatcaattattttttcctttgcttgtatttttgtattttttatagttcataatcgcatatatgtatatgtaaacaatcaatacaatccaaataccataatcataagcataacaaaagagatttcagaaagttgtatcctagtcaagaacaatgtacaagcaagtatcatcattttatacattaggtatttgcttttagtttacattgcaaagtgaaaccctgcgtgaaatgtacaaataaaggtaaactaaaaataacattaagaactaatggtctagaactcaagaaacacgaaaatcaacaagtaaacttctaagtaaattcgttaaatgttatgttaaaagtaggagaaaacttaaacaaactacagactcagtaatgccttttgattttgcctaaggttataagcttcgattttgatgcggtagccaaatttataaaaccttgaaaaagcagtatccaatttattcctataagcatctatactcgtctaattttttgggtcatcagtttataacgattgcataacttccggtgcaatatctatggcaacattttgtgcgcacatcgacacatacacacaatttgaaaacgaagtttaagtttgtatcttataggttgggttaatcgtatctaagccgcaacagaagaggttatgagtagcgttgggtttgaaagctgcccgttctgccggcgggccttaatcgcggtaaaatccgcgcagcagtttcccaataaatcagaaccgttagctgcgaccggt

SEQ ID NO: 3389 - DNA, 3679 bp, DROSOPHILA
cccactttctgcacgtaactttgccgtaatttgccgtaatatctttgcaaattgcctgcgattttggataaaattcctctgctgatctgtgctcttctttcatttgctgtccctttctaacgcacgttggccatgcgggattccttcacaaatacacgctcctctttcgcatttttttttaccgaaaaacctctcttttctagataaatttacattaccgctggcgttttattggtcgagaaaagcgagcaaaaaaacggaaaccagccgaaaacaagctgggttttcccagagcattttcctgcgaagggtcggttaaaaaactaggggatgaaggtcgaaccaccaccaccaacggacttctcattttattcgttttttaagagagcgagagcggcgagatcggttttttaagagaaccggtggcgagagggttgcacttgggcatggatttgcgcaatttttgctatattagccggaggccgcggaagagttgaagcagtttgagcctcgcagccgaactttgaggatcgctgagacgagacgccgtgcaagaaagtcgatccaaaatccgaaattcgaaatccgtgctgtgatctgtgctgaatatagtgaagaaatcttaaagaattttcaaaaagaaatcccagtgctgtgctgaatatatccgcgaaagtgtgccacaaaaatgtccaaccaaatggagtttattatgcaactctacatgatgaacttgatgaagcagcagcagcaaatgcagctccagcttccgcagcagcaacagcagcagcagctggctggatacacttacacacagaacgaggatatctctagcagcacatccgtgcagcagcaacagcagcagcagcaggagcaactgcagcagccacagccagatctccgcaagacaagaacgcacaagcgcattagctcgcaaaacaccaactgtagtagtagccgtagttgtagtcccaatagtaatttgattgcttttcaaccacaacaatacccaggcgctacagcggcaactccttccactcccaacagccaccccagcaacctggtcaaccagatgctgctccaaagcctgccgccgctgacgcagctcatgttgcagcagcagcagcagcaacatttgctgaccacctccaaccttctactaacacccacccacacccccagttcgctgggcaagcaggatccactgcagcatccgttgttgctgggccagtttgccggctccgaacagatggccacaaataacttccttcaatcatccacagtgacctccacgcccatcgagagagagaaggcagccacaccagcaccctccgccggagcaactgccggcaacctttcggcggcccaggtcaagtttgagcaggagtccgccgacgacgatgaggacgatgataagccgctgtccagcctcaccagctgcagctcctcgggccacaccaacgccagctccgagaagctgctgttgtcgggcgtccatccgctggagtcaaccaccgacagcctagactcacccagcatgtatacgcccgtcaagcagccggcggactcatcgtacggactcatcacacccgtcgacagtgatctgacccccaacacacccctccaaccgacccaaacaatatccctgctgacgccgccgtcgagtgagcagagcaagagcctggtgagcctctcggcggccagcggcctggatgctctgctccagaacgaggaggtactgaagaacctgcggaaagtgtcctcctacctggagtgcgagaacagcctgtgcaggcaggagaacctgcgggagcacttccattgccacgaggagccctgccagggcaagatcctgagcaagaaggacgacatcatccggcacctgaagtggcacaagaagcgcaaggaaagcctcaagctgggctttgcccgcttctcctcctcggacgactgtgcaccagcctacggagagggttgcgcctacaactggaaacagacccactaccactgcgtctacgagcactgtcccaaggtgtatgtgagcaccagtgacgtccagatgcatgccaatttccaccgcaaggactccgagatcgtgaacgagggcttccggcgcttccgggcgcacgagacctgccgcatcgaggattgcccctttttcggcaagaagatctcccactaccactgctgtcgcgagggatgcacccacaccttcaagaacaaggccgatatggacaagcacaaaacttaccatctgaaggaccaccagctgaagatggacggcttcaagaagatcctgaagaccgaggtatgtcccttcgacgcctgcaagttctccaccgtctgcaaccacatccactgcgtccgcgagggctgcgactacatcctgcactccagcagccagatgatcagccacaagagaaagcacgatcgtcaggacggagagcaggcgtaccagcagtttaagatcaagcaggacgtggaggagtcctccctggatgccatgccccagcagcagcagcagcagcagcagcagcagcccaccagccttagtcaatcccagagcagcagctctgtatgcggcggcagcaacacctccactccactctcctctttgtccgccgagcacttcctggctcggaaacgcggcaggccacccaagaaaatccaactgccagccgacgctcagcagtcggaagccaagcgcctgaaagtcgaagacgagtcctctaatcccgccatgctcctgccccagtcccagccagcagccgctgtgcatccgctgacaagtggactctttcccggtctcctgcccgctgccgccgctcctggagtggatcccacagcccctaacttccagctcacccacctgatggccctcttccagttgcagaatcccctcttctaccagaacctctatccgggaatgacccagaattcctccatgctcggcaacctggcagcacttagcgccgcatcggcagcagcggcggcggcagcggcggcaaatggagccggagtccagcagccgaaggcagagtttagctttaagccagagtttaaggagtaggaaggatgcgtgtccttagggtattttgccagctacttagtttgaccgacggacgttggacattgtacatacgcgctttaagcaggtttaggtgggtttttttgtgggttcaggcagatccaggacaaggcatccttccctccacaaaaaccaactcagccacactttgagaacctagaagtcccctatacaaagtgtagctgaattggcttttgccaaacattttcccctttagcttagattctctcagtgccacattaatttttaaaattttcagccattttaaataaaaaggaagaactttctgaatttaagtttgactaaactgtgatgttttcattagagtagcctcttttaattgatagagcgagtgcaggctatgcaggatatgcaggacttaggagacttggattgtcaataacatagcgtctaagcattacattgtatgtgatatactaataaataatggctaattgtttttgctttataatttaagggaataatattataattctaattataaactttagtaaaatcagcattcttctataataaataagtcaacattacctgaataaattttattatgcctcagagcttattatttaa

SEQ ID NO: 3390 - protein, 793 aa, DROSOPHILA
MSNQMEFIMQLYMMNLMKQQQQMQLQLPQQQQQQQLAGYTYTQNEDISSSTSVQQQQQQQQEQLQQPQPDLRKTRTHKRISSQNTNCSSSRSCSPNSNLIAFQPQQYPGATAATPSTPNSHPSNLVNQMLLQSLPPLTQLMLQQQQQQHLLTTSNLLLTPTHTPSSLGKQDPLQHPLLLGQFAGSEQMATNNFLQSSTVTSTPIEREKAATPAPSAGATAGNLSAAQVKFEQESADDDEDDDKPLSSLTSCSSSGHTNASSEKLLLSGVHPLESTTDSLDSPSMYTPVKQPADSSYGLITPVDSDLTPNTPLQPTQTISLLTPPSSEQSKSLVSLSAASGLDALLQNEEVLKNLRKVSSYLECENSLCRQENLREHFHCHEEPCQGKILSKKDDIIRHLKWHKKRKESLKLGFARFSSSDDCAPAYGEGCAYNWKQTHYHCVYEHCPKVYVSTSDVQMHANFHRKDSEIVNEGFRRFRAHETCRIEDCPFFGKKISHYHCCREGCTHTFKNKADMDKHKTYHLKDHQLKMDGFKKILKTEVCPFDACKFSTVCNHIHCVREGCDYILHSSSQMISHKRKHDRQDGEQAYQQFKIKQDVEESSLDAMPQQQQQQQQQQPTSLSQSQSSSSVCGGSNTSTPLSSLSAEHFLARKRGRPPKKIQLPADAQQSEAKRLKVEDESSNPAMLLPQSQPAAAVHPLTSGLFPGLLPAAAAPGVDPTAPNFQLTHLMALFQLQNPLFYQNLYPGMTQNSSMLGNLAALSAASAAAAAAAAANGAGVQQPKAEFSFKPEFKE

SEQ ID NO: 3391 - DNA, 5708 bp, DROSOPHILA
ggactggacggccgtttggccaggaccacgttcgttccacccggccagtgtgcctctgccactgcggcagggattcacggaacgcggagcagcagctccgtcgaagttcgccaatgcagagctgatgaagatacccaactttctgcacttgacaccgccggccatccgtcagcaatgcgaagccatcaagaagttctgcacgccatggccaaagggtctggagacagaggccaagtggcagcgccacttccccctggaggtcaccaccacagactactgccagagtttgcccacgatcaggaatccggaggccaggcgcgtcaccattaccctgaagctctctgacctgaagttcgatgcgcacgccagggataagttcctgcgcctggtgggcgatcgctacaacaaggacacggacctcgttaccttcgtcacggatcgctgtccgcagaagaagcagaactacgactacgccctgtatctgctcaccgcttgctatcacgaatcctttgtcaccgagccgtgggaggccaccaaatcggaggccgacatggaggtctatctgttcgagcgtaaccagtcgaaggtctccgccgagggaatcctcaactggaacgccaagaagggtgctccaaaagtggttcccagcaagtcattcgctgaatgcgtggagaaactgataaacgaaggcgaaaacgagtacaacttgggcaaatacaaggaggaggtcaagaagatgttgaacattgcctaggaaactggatagttgagtgaaccaataaagcgagaagttgttaaaaaataatcataacaagtatttgaatgttacaatatttatcttgttaataattttgaattgaaactgggcaaccatgtaatccccctttacgacgcccctccttcgttgtgaatgtccgaacagctgtttacaatgaaggcgtgcccgtgtgaatggcattagaacagcgccaagaacagaaccaaaaaaaccgaatttccgcggacgtggaagcaaacttttgttttgctatgctaattagtattttagtagttaataagtttattcaaccccgtttggatggagctttgagtagaatacagtcgtagagaggtgagaacaaactcctgataagaattcacctgctgatgacgtttcacctgattaaaattataaaatccggaattataaacaaagttagtcgctgaagtgtttctaagttatagtacattcattgacatatgtctgcgataaggtaactatccagcggatgttccttcagcgcagttaaatatcatttctattatcttaactttcgtattggtgaaaatgactcgccgcttatcttgtattttttgtatgtgcgacccaaaaagatacatatgtgcttacgtttctgaatttttctacttttctactattctctttcacccacagaccacgttgcagtgccgccagataaagagacaagccagcaaacatccgcagcacctgagctaacaaaccaatatcaccattaccgcgagatatacttcaccgacattaatggttgacgtagagacccgtagagcgcacacgtagccacggatatccggcaaagatgcggcgacccaatctcaagtggatagtgaaggcctcgctgctcttgttgatctcactgactctcttcgtactgataaccagctggatctcatctactccgtacaccaacaagccagtccatcatggcgtggagcccgtgcccgaaaaggctggcctttccggcgatgtcaaggtgaaggtgccagctataaagcaaccagaacctcagaaaccacaggaacccgacttcgaagaggatcctgagctgcagaagatcgatgagcccgaaccggtggaggaagaagtcgataatccgcatccggcggacgacgaaccgcaacagcagccccaggaggagctccaaatggctgcgccggcggacgcttcggtgaagaaggactggcacgactatactttcatggaaaaggatgccaagcgcgtgggcctcggggagggcggaaaggcatcgacgctcgacgatgagtcccagcgagacttggagaagcgaatgtccctggaaaatggatttaatgccctgctctcggattccatatcggttaaccgctcggtgcccgacatccgccaccctctgtgagttgttcatcaaaaagcacttagtttcgctaaatataggagtcgagataaggcagtggctcccaaaatgggcacttctctaatgtgacgctccaaatcagttttattttcaaagtcagataagaccattttgcttgcttgaaatgcttattattttatagtaggaagatattgaattaattatatcagtgcagtgatatctgttaacgaataatttattgccaattccaatttattttaatctattaattcaattgcagatgtcgcaagaaggagtacgtagcgaagttgcccacagtcagtgtgatcatcatcttttacaacgaatacctgagcgtgctgatgcgctcagttcacagtctgattaatcgctcgccgccggagctgatgaaggagataatcctggtggacgatcacagtgaccgcgaatatttgggaaaggagctggagacctatatagcggaacactttaagtgggtgcgcgtggtgaggctgccaaggcgcacgggactgattggtgcccgagcggcgggcgcaaggaatgccactgcagaggtgctcatcttcctcgattcccacgtggaggccaactacaattggttgccaccgttgctggagccgattgccctgaacaaacggacggcggtgtgtccctttatcgatgtgattgaccacaccaacttccactaccgggcgcaggatgagggagcccgaggagcgttcgactgggagttcttttacaagcgcctgccattgctgccagaggatctaaagcatccggccgatccgttcaagagtcccatcatggctggcggtctatttgccatttctagggagttcttctgggaactgggcggctacgacgagggcctggacatctggggcggagaacagtatgagctaagcttcaagatctggatgtgtggtggtgaaatgtacgatgcgccctgctcccgcattgggcatatctatcgcggacctcgcaaccatcagccgagtcccaggaagggcgattacctgcacaaggtgagtttagcagtagagaataaagagtaatctaaatggcgaatgggaaattgagccataaacgggtttcatccaacattaacagacactcccatttagtttcttaatttttttaagacctcataaaattcttttgtctctgaacttcgctagttcattttacaagtttttatttttatgtttttgtttttggcggataaacttggcgtgttggttctaattagaaatttatatgttgcctcttcgtggtatatctttatatctttgttttgtttactctggcatgtagctatccgaacttgacacattgttgtgaaaaatatttgcgcatatttaaaaaggggtttatggctttcgaagttaacttgattgcagccatggcaacaaattttatttaagatttcttcgccaacgatttcgcagtaattattattcttatcaaggcaatcaatcagttaattagacccatcgactaactcttgattactttgcagaactacaagcgagtggcggaggtgtggatggacgagtacaagaactacctgtacagccacggagacggtctgtacgagagcgtggatcctggcgatttgacggagcaaaaggccatccgcaccaagctgaactgcaagtccttcaaatggttcatggaggaggtggccttcgatctgatgaagacctatccgccggtggatccgccgtcctatgccatgggcgctctgcagaatgtgggcaatcagaatctgtgcctggacacgttgggcagaaagaagcacaacaagatgggcatgtacgcgtgtgccgacaatataaagactccgcagcgaacgcagttctgggagctgagctggaagcgagaccttcgcctacggcgaaagaaggagtgcctggacgtccagatctgggatgccaatgcgcccgtttggctgtgggactgccacagccagggtggcaaccagtattggtactacgactaccgccacaagcagctcaagcacggcacggagggcagaaggtgcctggagctgctgcccttctcccaggaggtggtggccaacaagtgcgacaccgacaatcggttccagcagtggaacttcggctcgttcaacaaaacagcgctggacaactactcgcaggacctcgtcctcagcctgtaaccgctgccctgcaatagtatcacttgccatgtacttagaacacttcgatgtaaataactaggctagataggttgtacggccgcttggccacataacaatttaccccgactcaagcgcacatatgcaacagaggatgcaacagagagtatctttaccttaaatatagtgcatctcaaaccaattccaaatgccacaaaaataatttgtagcgttacgtatgctttggagttttgtttggtttcaaacaggattccgaatatgctagtattagcctctaaattgtcataagtttgacaaccgtatgactttgtactccacaagaagtgttttccaataaagaatatttttaaataattatcagaagtgctggtatgggtatccccccgttgttgcaaatgaaaaatgcagtctggcgatcttaactttgttttcgttttatttaatattaatatctgtttgctttccatgcgcgtactttaaataaatataattacgtttttcatccatctcatccatccgcttcgtgcttcacaatctttatatacgttctcgggttgtatatcgttttacaatatgtatgtatctcgctatatcgtatctctatctgattctgcacccgaatgtcgctaagtcaggtgcgatatcttcgagctcttttctgatttctgagttctaatttctgatttcttatttccgcttattacttatgctgctcagtgttgagtgttaattggttttgtttctgctttatcatatgccaatatacgtatagtttatgtaaaaggtgtacgccgagcgccccgcgaaactcaaaagtcgttttggggtgtgtaacttaatgatggcaaaggatttgcttttatttgaaaatgataaaaaaagcatttacaaactataatagttgttgttggcttgcgtaatcagttaatcaattatcaattatcataagttatattaatatattatataaacatttaaatatttatcaaaacatgttttttcttgttgctcaaaagtcttcttcgctgccttacatttaaattacattacgtacagtttacatacgatctatatgtccgttcgtccaggatcatcaaggatcgtattatcaataaccgttttgcttatccttttcattccgctcttctgttttattttgtgcaaaatatatttatatgtatatgtagactaatttgatttgaaattcagttgcgctgccacatttgcattctaatctttaattgtatgttaccttttggatggatgcaaattattcattgagttttatacaacaattacaaatggttaggcaaataagtttagtattagttgttggttgtttagtgcttaat

SEQ ID NO: 3392 - DNA, 2769 bp, DROSOPHILA
cggacgtggaagcaaacttttgttttgctatgctaattagtattttagtagttaataagtttattcaaccccgtttggatggagctttgagtagaatacagtcgtagagaggtgagaacaaactcctgataagaattcacctgctgatgacgtttcacctgattaaaattataaaatccggaattataaacaaagttagtcgctgaagtgtttctaagttatagtacattcattgacatatgtctgcgataagaccacgttgcagtgccgccagataaagagacaagccagcaaacatccgcagcacctgagctaacaaaccaatatcaccattaccgcgagatatacttcaccgacattaatggttgacgtagagacccgtagagcgcacacgtagccacggatatccggcaaagatgcggcgacccaatctcaagtggatagtgaaggcctcgctgctcttgttgatctcactgactctcttcgtactgataaccagctggatctcatctactccgtacaccaacaagccagtccatcatggcgtggagcccgtgcccgaaaaggctggcctttccggcgatgtcaaggtgaaggtgccagctataaagcaaccagaacctcagaaaccacaggaacccgacttcgaagaggatcctgagctgcagaagatcgatgagcccgaaccggtggaggaagaagtcgataatccgcatccggcggacgacgaaccgcaacagcagccccaggaggagctccaaatggctgcgccggcggacgcttcggtgaagaaggactggcacgactatactttcatggaaaaggatgccaagcgcgtgggcctcggggagggcggaaaggcatcgacgctcgacgatgagtcccagcgagacttggagaagcgaatgtccctggaaaatggatttaatgccctgctctcggattccatatcggttaaccgctcggtgcccgacatccgccaccctctatgtcgcaagaaggagtacgtagcgaagttgcccacagtcagtgtgatcatcatcttttacaacgaatacctgagcgtgctgatgcgctcagttcacagtctgattaatcgctcgccgccggagctgatgaaggagataatcctggtggacgatcacagtgaccgcgaatatttgggaaaggagctggagacctatatagcggaacactttaagtgggtgcgcgtggtgaggctgccaaggcgcacgggactgattggtgcccgagcggcgggcgcaaggaatgccactgcagaggtgctcatcttcctcgattcccacgtggaggccaactacaattggttgccaccgttgctggagccgattgccctgaacaaacggacggcggtgtgtccctttatcgatgtgattgaccacaccaacttccactaccgggcgcaggatgagggagcccgaggagcgttcgactgggagttcttttacaagcgcctgccattgctgccagaggatctaaagcatccggccgatccgttcaagagtcccatcatggctggcggtctatttgccatttctagggagttcttctgggaactgggcggctacgacgagggcctggacatctggggcggagaacagtatgagctaagcttcaagatctggatgtgtggtggtgaaatgtacgatgcgccctgctcccgcattgggcatatctatcgcggacctcgcaaccatcagccgagtcccaggaagggcgattacctgcacaagaactacaagcgagtggcggaggtgtggatggacgagtacaagaactacctgtacagccacggagacggtctgtacgagagcgtggatcctggcgatttgacggagcaaaaggccatccgcaccaagctgaactgcaagtccttcaaatggttcatggaggaggtggccttcgatctgatgaagacctatccgccggtggatccgccgtcctatgccatgggcgctctgcagaatgtgggcaatcagaatctgtgcctggacacgttgggcagaaagaagcacaacaagatgggcatgtacgcgtgtgccgacaatataaagactccgcagcgaacgcagttctgggagctgagctggaagcgagaccttcgcctacggcgaaagaaggagtgcctggacgtccagatctgggatgccaatgcgcccgtttggctgtgggactgccacagccagggtggcaaccagtattggtactacgactaccgccacaagcagctcaagcacggcacggagggcagaaggtgcctggagctgctgcccttctcccaggaggtggtggccaacaagtgcgacaccgacaatcggttccagcagtggaacttcggctcgttcaacaaaacagcgctggacaactactcgcaggacctcgtcctcagcctgtaaccgctgccctgcaatagtatcacttgccatgtacttagaacacttcgatgtaaataactaggctagataggttgtacggccgcttggccacataacaatttaccccgactcaagcgcacatatgcaacagaggatgcaacagagagtatctttaccttaaatatagtgcatctcaaaccaattccaaatgccacaaaaataatttgtagcgttacgtatgctttggagttttgtttggtttcaaacaggattccgaatatgctagtattagcctctaaattgtcataagtttgacaaccgtatgactttgtactccacaagaagtgttttccaataaagaatatttttaaat

SEQ ID NO: 3393 - protein, 666 aa, DROSOPHILA
MRRPNLKWIVKASLLLLISLTLFVLITSWISSTPYTNKPVHHGVEPVPEKAGLSGDVKVKVPAIKQPEPQKPQEPDFEEDPELQKIDEPEPVEEEVDNPHPADDEPQQQPQEELQMAAPADASVKKDWHDYTFMEKDAKRVGLGEGGKASTLDDESQRDLEKRMSLENGFNALLSDSISVNRSVPDIRHPLCRKKEYVAKLPTVSVIIIFYNEYLSVLMRSVHSLINRSPPELMKEIILVDDHSDREYLGKELETYIAEHFKWVRVVRLPRRTGLIGARAAGARNATAEVLIFLDSHVEANYNWLPPLLEPIALNKRTAVCPFIDVIDHTNFHYRAQDEGARGAFDWEFFYKRLPLLPEDLKHPADPFKSPIMAGGLFAISREFFWELGGYDEGLDIWGGEQYELSFKIWMCGGEMYDAPCSRIGHIYRGPRNHQPSPRKGDYLHKNYKRVAEVWMDEYKNYLYSHGDGLYESVDPGDLTEQKAIRTKLNCKSFKWFMEEVAFDLMKTYPPVDPPSYAMGALQNVGNQNLCLDTLGRKKHNKMGMYACADNIKTPQRTQFWELSWKRDLRLRRKKECLDVQIWDANAPVWLWDCHSQGGNQYWYYDYRHKQLKHGTEGRRCLELLPFSQEVVANKCDTDNRFQQWNFGSFNKTALDNYSQDLVLSL

SEQ ID NO: 3394 - DNA, 5391 bp, DROSOPHILA
ataaaagcattataaaagcatatgggaaatgcattctttcgtaaaaatatgctttcggaaacgagttaatttgtgaatttacatcaaaatgaatagctttgaagataaatctagtggaagagaagaaaatgttaaaaagcggcattattctgttcgttgttcttccgttatcagcacaatgctatatatttttcaagaaaacgctgttatgtataattacattatatatatatatgttatatttatatttgctaaagcaaataaattactttggacggcattccacctagtgactaatcgcactaggagtgtgtgcgaatgcgactgctatatgtacatatatatatacacaattaaatgataagttctgtagttgtacgaacttaagaaatgtttatacttatgtatatggtaattcttaattttttgtcctattttgaaaaaaaaaaactatttaaacttattcgttttaaaattcaatgctgtgtagctattaaaattccttattaatattaaaatttttttaaatgcattaataaattgaaaagtcatgatcgtctggtaagtataaatataaatataaacaccaatcaaatttttttttaaatttatatgtatttagttgttaatatcaatctttttaccacacaccttttcaatttgattgcttttccaaaagttatctattttgtgtttactatgttgaacaaacagcttatcgtgccgttgttaatccctcaatcaaaagtgtccctattaataattattgcgtgtcaaaaattatggctaccgccctaattcattatcacgaagcgactaacaatcgtttattggccccaaatcttctggcgataccaaaaggcctttagacctacacgtcatcagtttagtgagtcaattcccactaggtagtccacaatagttatatttatcaattaccgacggcaataaagtactatgttaatagtacatcgattgcaagcaacaaacaaaaaataaaatgcataaagttcagataagctatcgaaggcataatcgggcgaaaattggtcaccgactaatctgcgaatgttacggcaaaccacagtctgtgcggcattgcgagcgagaacagttgggcggcatcatgtttctaatagccattgccattattttggccaccattttggtgttcaagggagtgaggatattcaactacatagaccacatggctggcatcatggagatgatcccaggacccacgccataccccttcgtgggtaatctgttccagttcggtctcaagccagccggtgagtactgaccaaatagcctgcctatatttatgaactcttcaacgtttaatgccaaaatcgtggctctgaccgaatcagcccgccgcaatcacctgggaattttgcagcgattcaatgcgttcattttccggtggtatcgagttgcacatttggatttcatctcggattgtgctgatttcctcgacttatttattgtaatatttgctacagctttcatcatcaggcgccgtgcacatttcccgagtgcctttccttgcacagctgaataaattcggtcctgttttccgcccttccctgctcgtgcctaaagtaatcatttcaaatgcacaatgcccaggggaaaagcgatggtgcactatactttcgatgatataattctgctccctgcccggctggggttccatttcaatatggattggcaagagctgcacattgttatggaattgttattatttgttatttttatgccagcttagattgctctgtcatggcttcaagaagacgttcgaaaaaatgtaaaattactcggatgcagagattgttgtttactgaccaaagctacaattagtaatatgatttccttaggccaaatataccgaggcaaaagtgcaagaaaattgattgcaactaccaaaattaacttgaagcctaatttgcggaatattcggtccaactgcagctgtaatgctccgcaaacgaggccgtaggggctggtagctaaagtgttgagggctcatcaactctatctgtctcccacagaataccccaaaaaggtcctgcaatattgtcggaaatatgacttccagggattccgctccctggtcttcctgcagtaccacatgatgctgagtgatccggctgaaattcaggtgagtcccccaccgcgcccatcatccaccagctcattgcgtttggcctgcagaacatcctgtcgagctcatcgctgctgtacaaggagcacttgtactcctttctgaggccctggctgggcgatggcctcctcaccagttccggtgcccgctggctaaagcaccagaagctctacgcccctgccttcgagcgctcggccatcgagggttacctgcgagtggtccaccggacgggcggacagttcgtccagaaactcgacgtactgtcggatacacaggaagtcttcgatgcccaggagctggtggctaagtgtaccctggatattgtgtgtggtgagtggtggtgcacttgtttattgaacctggcatcgcaattttgcagaacaattttacgtgcacagcaaaaaacgatgttacatatttaatatcatttcacgcaaatcaataccattatattatgactaataccttaaactttgaagttctaaaatagtaattattctattttcttcaaattctaggcacttttttggccagacagagtagacttataaatttgctctatgtgtacgattgccaaactttacacatttgtcaagtcgttttttcggccgtttattttttgtaatttattatgaacgttttataaaaaaagatttattgcataggaaatgggtacaagtgccgcagattgtgccggcagaaaagtttcgcggtcgaggcactcgcgctcattgatacacactctgctgcatcttgtggggcaaaggatttgagggatttttcagttagcctttggtaatttattgagatttttcgggattcgttcaggttcatttagtaagctcggatctgcaactcttcactctcacttaatttttttccgacagaaaacgccactgggcaggacagcagctcactgaatggagagacttcggatttgcatggagccatcaaggagtaagttcatctgaggagtcccgggactaagctcttaattccccctccctttctcagcttatgcgatgtggtccaggagcgcaccttcagcatcgtgaagcgtttcgacgccctcttccgcctcacctcctactacatgaagcagcgccgcgctctgtcgctcctgcgcagcgaactgaatcgggtaaattcagccaatatagggcgagaattaataaaactccaaagctgattacctcgcagattatctcgcaacggcgacaccagttggctgcggaaaacacgtgccagcagggccagccaatcaacaaacccttcctggacgtcctgctgaccgccaagctcgatgggaaagtcctcaaggagcgcgagattatcgaggaagtgtccacatttatatttacagtacgtagcacttaaatttattaaccttagctcatcagtaagtatgtaaaaaacatttctaaatgagttattacttgttgcatatgacaaatactataaatcaaaatttttatatagggtcacgatcccattgccgccgccatatctttcacgctgtacaccctttcccgtcactcggagattcagcaaaaagctgccgaggaacagcgacgcatctttggcgagaacttcgcgggggaagcggacttggctcggctggatcagatgcattatctagagttgattattagggagaccctgcgcttgtacccttctgtcccactgattgctcgaacaaaccgcaatcccatcgatatcagtatgtaatgaccgaaatgtgggcttcccataatataatatccgatttccttagatggcaccaaggtggccaagtgcaccacggtgatcatgtgcctcattgccatgggctacaacgaaaagtacttcgacgatccatgcacattccggccagagagattcgagaacccaactggaaacgtgggcatcgaggctttcaagagcgttccatttagtgcaggtccaaggcgctgcattggttagtgttaattgtgtcagatagtttattttactaatttatattattgttgcagccgagaagttcgccatgtaccagatgaaggctttgctgtcccaattgctgcgccgctttgaaattctgcctgccgtggatggacttcctccgggaattaacgaccattcccgcgaggattgtgtcccacagagcgagtacgatcctgtgttgaatattcgtgtcacgcttaaatcggaaaatggtatccagattaggcttagaaagcgatgaattaacattaaaggacccttttacttgattgtattatacttcatttactagccacgatataaaataaaattgtacttttactctttttttatgaacttcaaaactattttatattctacacgattcgcatttctgtgaccattataacccgtttcaaacagttgtcatcattatttccttgctaattatcaaagttgactttgcaaacatttcaagttaatttgcaagcatttgcttattaatattaattaatattcatttcgagcaccagcttgacttttattttattgccaaacggaattgagttcgcactactcataaaaatgggatgtgcagatcttaggcgcacagaaacacctgttcgatttgtccaatctattatgttccatgtttataaaaaaatgtttgccaaaatagaccactggattagttaactaatcatcaagtgtctgaaaaccatggatgaaatagaaagtgtcattcaaaattgttttattaataacgctgtaaaagcgtggcctaacaacttttacatgagaaaaaattataaaaaaattaaacaagagagagctataaagtctcgactattgaatacccgatataatcatgataacagctagtccattaacatcttcaaggatgtttttgccaactctctactcctagatttgaagtttatactagatgattgacaatgtgaagggtattgtataacaggtagtcgatcgttaaagccatgtttgcatcagggttttttttccagtgtaacgctctcaaaccgtctcattttggcaccgaaattctttcaaaaaaatggttattttaacttttttcttacaaatttctatcggtgtaccaccaacatttaaaccgagtaataataataataagtattcgaaaatttcactataccgttctttactgttcttttaacaatatgaagatgaagagtaaacgcaagcaattccaatccggttatattttgctcagccatgacttt

SEQ ID NO: 3395 - DNA, 1677 bp, DROSOPHILA
atgcataaagttcagataagctatcgaaggcataatcgggcgaaaattggtcaccgactaatctgcgaatgttacggcaaaccacagtctgtgcggcattgcgagcgagaacagttgggcggcatcatgtttctaatagccattgccattattttggccaccattttggtgttcaagggagtgaggatattcaactacatagaccacatggctggcatcatggagatgatcccaggacccacgccataccccttcgtgggtaatctgttccagttcggtctcaagccagccgaataccccaaaaaggtcctgcaatattgtcggaaatatgacttccagggattccgctccctggtcttcctgcagtaccacatgatgctgagtgatccggctgaaattcagaacatcctgtcgagctcatcgctgctgtacaaggagcacttgtactcctttctgaggccctggctgggcgatggcctcctcaccagttccggtgcccgctggctaaagcaccagaagctctacgcccctgccttcgagcgctcggccatcgagggttacctgcgagtggtccaccggacgggcggacagttcgtccagaaactcgacgtactgtcggatacacaggaagtcttcgatgcccaggagctggtggctaagtgtaccctggatattgtgtgtgaaaacgccactgggcaggacagcagctcactgaatggagagacttcggatttgcatggagccatcaaggacttatgcgatgtggtccaggagcgcaccttcagcatcgtgaagcgtttcgacgccctcttccgcctcacctcctactacatgaagcagcgccgcgctctgtcgctcctgcgcagcgaactgaatcggattatctcgcaacggcgacaccagttggctgcggaaaacacgtgccagcagggccagccaatcaacaaacccttcctggacgtcctgctgaccgccaagctcgatgggaaagtcctcaaggagcgcgagattatcgaggaagtgtccacatttatatttacaggtcacgatcccattgccgccgccatatctttcacgctgtacaccctttcccgtcactcggagattcagcaaaaagctgccgaggaacagcgacgcatctttggcgagaacttcgcgggggaagcggacttggctcggctggatcagatgcattatctagagttgattattagggagaccctgcgcttgtacccttctgtcccactgattgctcgaacaaaccgcaatcccatcgatatcaatggcaccaaggtggccaagtgcaccacggtgatcatgtgcctcattgccatgggctacaacgaaaagtacttcgacgatccatgcacattccggccagagagattcgagaacccaactggaaacgtgggcatcgaggctttcaagagcgttccatttagtgcaggtccaaggcgctgcattgccgagaagttcgccatgtaccagatgaaggctttgctgtcccaattgctgcgccgctttgaaattctgcctgccgtggatggacttcctccgggaattaacgaccattcccgcgaggattgtgtcccacagagcgagtacgatcctgtgttgaatattcgtgtcacgcttaaatcggaaaatggtatccagattaggcttagaaagcgatga

SEQ ID NO: 3396 - protein, 516 aa, DROSOPHILA
MFLIAIAIILATILVFKGVRIFNYIDHMAGIMEMIPGPTPYPFVGNLFQFGLKPAEYPKKVLQYCRKYDFQGFRSLVFLQYHMMLSDPAEIQNILSSSSLLYKEHLYSFLRPWLGDGLLTSSGARWLKHQKLYAPAFERSAIEGYLRVVHRTGGQFVQKLDVLSDTQEVFDAQELVAKCTLDIVCENATGQDSSSLNGETSDLHGAIKDLCDVVQERTFSIVKRFDALFRLTSYYMKQRRALSLLRSELNRIISQRRHQLAAENTCQQGQPINKPFLDVLLTAKLDGKVLKEREIIEEVSTFIFTGHDPIAAAISFTLYTLSRHSEIQQKAAEEQRRIFGENFAGEADLARLDQMHYLELIIRETLRLYPSVPLIARTNRNPIDINGTKVAKCTTVIMCLIAMGYNEKYFDDPCTFRPERFENPTGNVGIEAFKSVPFSAGPRRCIAEKFAMYQMKALLSQLLRRFEILPAVDGLPPGINDHSREDCVPQSEYDPVLNIRVTLKSENGIQIRLRKR

SEQ ID NO: 3397 - DNA, 10681 bp, DROSOPHILA
ataaattcaatagagtatgtcttaaaacaattttcatatgtagttgtataagtaatgcatttaaatccagcaacaacatttatgtagtaattatttctctgcgctgcgcataatagtacaataataatgacaataatctctgctatatgtataagttgaaaagttcaccgctctatccatcaaaacatttatataaactctgcactttttttttgtttgatttttctttgatattttgtcacatttttttttttttttgttgattttctgcgaaaatgatttttcaggtagggaaaacagttcagtggagcttttcgcaatgttgcatttaaaaaggacaccgagtgagatttactttttttgactatgcaaatgtgtcgtgtgtatagaggtttaaattcgctttgccatgtctttcaatatgttctcattttctggctcgtggtgggtgaatcgctagactgtcaccagttaagtaatagtttagtttcagttacagctttagcattagctttagtttagttttgtttgctgccaagggattgtcttggtacattcatggtacttgaaacatcgatatacaaatacactgattacataaatatatatatagtatatggtgtgtatattcatatatgcatgactgcgataaaatttgactaattacttcaacttaaaattcttgccgctccgcctgggatttttcatcgggggagtttattgaaattacagtttctttcacttaaatatacgttagttaattaccatttttctatatattttttatttgtacacctataaacatctatataagagtatctgtgctctgtggttcgcaacgcttaagttacacatcgataataaactttgtttccctttcagaatattttgatataattgcataactttcgggatagacacccaactcctcctgctcgctcatcggtttgacttgaaatatttttaaaattgaaacatctatatgtggccgacgaccctcttagatctcgtagttgcggaacttgttggccacatcggtgttctcgccgccccactcgcccttgcgactcccgtagtacaaggccgccccgccctccgaggcccgccggtgggcgggattgggggatgctgcggtcaggccaccgctgctgcatcctgcaccggttccaggtccctgggcagctgctccaccggtctcgggcagcatgcgatccttggtcttgggtgttacccagtgcatggacttttgtttggttgtttgttttggttggcgtagcgtgagtgggtgggaaaagcatttaattagatcaaattcccgcggtttcggtcgaggaccaaggcactttggttcggtgcattggtcctcctttgcttcgcatgcaatcacacacacgggcacacacagagttggatgaagaggcacatacaagataggtttgcattcggtggatatcattgggcactcaggagcgggcttatagagagacacagagaaaaaaaaggggtaagggaaaagggggttctaattggctatttattgtacacatctatcacatggaacactgacaagtgaggaataaagttccggagttggtgagctactggcagtttgggaattggtaataccaaacgaaaaatacgacttaataataataatggggtttcccaagaaaaaagttccaaggaatgaaagttcttaaggatattaaaagacacaatgacaaattttaattacaagacaaaagttgagacaaaagcacaccctcttcgtaatgaactaccttgaatgaaatttaatagaatccaagggactattctgttcccgtttttgctaggtgtccgagctgaaaattagaattgcaaatgcggatttggggcccaaaagccccgccgccttttgagcgccggacaatgtcagcagctgatggataacgacaatttccgcttcgctcggcagcggaaattaccatagagccttgtgggcgggaaagtgggtggctttcgggcgggtaatgaataatcgcgttaattgtgctacagcaaaaatgaactccggcttggcttacaaatttcattacgagcgcggcaaacaaaccaatgaaaagaaatttaaaaaacaaggccaagcgttgacgcagtgcagcgggacacaaggacgactttaagggatcggggctcccgccgtgccgaagtgaggaagtgagagggcagacagagtgagggagacggggcgactacttctctgtattcgctgagttcctggcccatatcgcatacctctttatccactttctcggcaatcgtgtatcttctcacctgaccgacatgctccttcatgcccagccactgtttgtagctcatcgagatgccgctgttgcgccacttgtcgtagatggccctcttttcgggatcgcacaaggtttccttggcctcctgcgaaacaaaaaaaaaacaagaaacattttaatcgtacttttatggcagagtcacgactctgagcaatcaaagttgtatctataaatttttggttttattagtagagcaatccggcaacgcaggaattcatcaagaccactctcaatctcaatatcttgtaaaccaattccaatgaccttctctttgatatttcattggaatttgttgttcacaaagtttggaatttccttacatgaataatctgccgcacagattcacggaaatttctcattttgcagcacaaactgtgtaagagcagctttaacgtattttcctcgaaagtgaacatgaaaggggcaccagcacaacacacacaacatccatgcccccgacgatgaagatcgccccctgaatgtcaggtttcggatttgctcaagtgcaaaatcaacagctgcccaggtttcgggtggcaacccccaagtccccaagtcttattttccgccatggttgggcctcctgcatgttaatcaatttcatatgccacactatagcacacttattggcgccccacacacacaggacacacccatgcacacaagtggggaatacccgcactcacacactctcaactgcagagaggctttcacatatttgcacgctcaagtgattttgatagcctcggctgggcctcgatatgtatcttgactacttttacgaccagacccaacatacacctatggccacaacggtagacaccgacacgctccaacggagttgaatacacacacaaaagggtacacggtgaaagttattggatgaatttatgcataatgagaatgtgtaattaaatcccatataaatatgtctaaaagtataccaatacatatcaaatttcatatttttgtacggccattatccattgtactgtcgcatacttttggacacgtttataatgaaaggcaatgatttgaagatgactagaacacactcgggtatatttttatctcagatagacagacatcgactgacacacatgctcaattgagagctctgagatttcatcgctggcctgctgttttattgttccgtcggcttttagggccctgtttacatgataatcaattatttcactacccactgattatgtgggtcagcaaacaaggttcaaatccccccccccccccctcttcctctgatccaaagcagctggaaaacctggaggcaactggtttgtttgtcttcaattagggcaatcgtttagctgtttttcatggtaatcattcgggccctttgagaacggcaattaacacttcggaagcggctgatctgcacatgaccagaatcagaacgcagttctatactctgatcctgcgccttcatccttgctgtcttgtttatcctcttttttttactgtaacatctaaccgtattgcttgacgtcccaaggcatttatcgggacagcttgacaagtgaaaattgtgttgtaagttgttaggcgaatgccatgctgatgaagtcccggctcatttgcatactgttcggcgaaaagctgtggaattcgcctaggaatcatcgcccctgaaaatctcaacatttcattttaaacgctccatgggcccacacacacggtttttgttttatggccagccataaaggtaagtcctcctgcatatcctgacatatttacgagcaccgcacacatgcacgtccgatattacgggccgtaaattgtacggcgcattccttttccggcggacagcgacagaggagcttccgaacggccataagtattattacgtctcggcaagggaaattgcccagtccagggcgaacggaccaaggaccctcatgaatattgaagggcgaggggctcgggtttcgccttaatttggtcctttgttatttctgtgtgttaaaacttcgtgttcgccggggaaatggaaaataaaatacatcagcaacctgtagggagctacaataaactcaattaggaacttaacccacctccacagatgaccgaaagcaccctatgctcatttaaatgcaattccacgaagcgctaatttaaatgtcaaattagttagctgattaaacttacaatgcaccttatgtgtacttccactttggaatatgaagcgggaaaaatcgcttttaagaaagtgcaacctttttacttactcccaattattataagttcagttaaataatctgataaaatctaattttattttcatattttccactctacaaaaagctgatcatcccccatcaaaaagccttgtttttactttaggcatcccactcttttccccttgacatcaatttaatttcgtttttagccacacgttaatgagttgtcaggttttcgacacgcccttttcgtcccccgaccccccccctttttggtcctttgatgagaaaaatcaataaacgttttcaaaaaatatattgcgtatgggtaatttattttatctcatcgttgccgccttgtttttcttttgtagcctggaaaattcaatttgaggatatgagggctgcgtgtgtgtgcgagtgtttgtgccactgaatagtgtgcctgtgtgtaagtgggttaagtgcatgtgtgtaagtgtgcgagtgcaaagggcagccattgtttaatgcagcttaaaacttttgccaactgacagacacgattttgaatagatgcgttcggttcgtagctaattaaggaaactatcaaactaacaaggaaaatgcctcccacagaccccaacaatttatcaagatcagaaacagaaagttttcaactgaacttgagccatctgtgcggctctgaaggtccgccaacttccgagaagttcaactttcacttcgctctgaatttccatatatattcgaatatataaagaacttggctgtcatattcttagtgccgtctatttaacgctaccaatactttaaacaataaatcggtgttgttttgaacattgttttaaaatgcgcttaaatattttcagacaccttaaactctcgaacttttaagacgaaaataaatgaatatccctttcaaatatggttcaatttaaaatgtaaatccctcataattctcatattccaaaagcaattcgtttggtgcggcttcgataattgtcccctgagctctctctcatatcagagatacattttggattaatttcgcccggggtatccaaacacattcgaagtacttcgcctgctgccaggatgcttaagcagagtaagtatcaagtttaaacatcttttaattttaagcttgctccggtaactttcatctcaacatgaacatattgccccaccggctgtcatattcacaatccacccgaattcgccgcgccccgaaagcagccacacgcctggaaacttcattaaatatgtaaaattccgaaacgcttgccattttctttatttcagccgctttcccttggatctttttccgtgttttctttcgccttttgcctacctttaactgctggaacttggcctccgcctccttgtcgccggagttcttgtcgggatggtactgaagggccaggactttgtactcggcctggatctgctcgggctgcaaaggaaaacggagaggaaaggcaaaattagtcgggcaagctaagtgaattgcgacgatgagttccctgccatacaaattaactaagtattttgtggcatacatttttaaaatgccctttccggcaaacaaattgtacatattccacgttacataatggcagggcaaacaaggacacaagcgatatgtgaacgtctcctgtggcatttagatttccaaggagaccgcagctcaggtaagctgtcactggcaaacaaatcccccgcaaaatggggggatcagcgcccctttccagacccgcagccacctccaaccaccgaatagcgaaataacaataagcaaacattaaaacttgacgagcaaaaacgttcgtgcacagttaagcaccacttaaagtaatagaaaagctgtcgctttttgccattactgcgtcgggttgggaaaactatgtactggcagaaagaaaagcggaaggattgctggcagcggcgaaaaactttgagggtttgaaatgctgctgccaaataaattcacttgtcagtgcccttgactttggcaaaaggcttttgacacttggcaaacaattgttattaattaagcccaagtgtctttcggccaaaagcaacaagttgacagctaccaacgatgatctgatactccctatcctcgggacctgaagtaaaaatgatgacgatgatgatgctcacagtgcactgtgcgcaaaactagggattcatgctgctaaaaaagtatactaacttatttatccaaacgctgacagagtttccacttcatttatagtagccggagctatgcccaaaaaatactcactttcgcccagtgttcaccgtacaaagctgcttgtttattgtcttgtaaatggaaatggcttttcgcgcaccatcggacggagcacaaaggatgaaggcagcagcacagaaaagagatgagaatgaccagtatgggtccctttttattccattcggtttcgagtctattgtacgcgggggaaacgtcaaaaagcagctgccatagagctaacatatttaggtcaccatggtattcggaatatacaatatatgtgttcctatgatgttgacagaattgatgctttgcattccccatagatgtttttctcttccagcagcagcaggtggattacttgcgtgcatttgctgtgccaacccatgctctgcaacggtgcgtatgattaatttcagctacaattaatattgctcatacgccagcgagtacggggccgaagcaaccgcagccttgggctttctataattagaccaatgcagtctgttctaaagacgttcgttgaatctcgaactactactttgtaggctgttccaatggaatgcgattcccaggggaaagttcagacacttcgtacttcaccttgtattacacaatcgaatggccccaattaatgccttgcaagccaataaattgtcaccgcaatcaacccaaccaatttcaatttccacttgattaattcccccatcagattgcacccggccaattaaaatggccagaatcgcttgcagatctcttctgcaaattagccctgaaaacatttcaaatttgtgtagctctggttagaggattgtttggcttgcgtatgcaaattctcacagactaatctgcatgagaatggaatggctgcattcttaagtgggaaatgggcgccaagtcgagataattgtcgggcagtatagatagtagccgatagagatggttcggcatacaatgacagagggggtcaggggtcagtggcaaaatctagggctacgtgataagggccggtccataatgcttagtgcccctctgcttctctgattttctccaagctctctacaaatatttgattttgtttacatgctcagccaaatcgatttcaggactcgactcccaaagctcctgcattattcaagagattccattcccactcagcctgatgcagtcgacagctcgcaaaaagtgtgtggttccctggcctcagtattttctgggccaataaatttgattagagctggcgttcttgcacctttcgcacctttcacatcaactgagccagaaaatgtgacagctcaggatgaatgtcagggctctggagtcgagtctgccgatgggtaaatgccattaagccgcccgagattgcctgccaaaaccaagctcgttaattctcttcagacagcagttggcacagcccacaatcgggtggcttagatggcctcttaacgctggtgaggatggtgagcccttggatctctggacctgtgactcaagctgcactcgatgctcgaactgcatctgctgcggcgggcggatcaacgccaattctgccaatctacgatggctgactgagtaattgaaactaattctcaaagcaaacctctcgccttcggggtacactgcaagaaaacttttccgaacttttgatactcgcagagctcacattggtatatggcaatatttaatagtgtattcttctcattgaccaaaataaaacaatacgtaagtactttttctttcagtgctcagtcgccgcacgaattgtatttgatttcatagatgatttcatgcgaaggtttctattgcctgcacgagaatttaataaggaatttgactttaaggcttataaaagctattaaattaggccaccgcatctcaaaactggtccgaactacgggccccaattcgattagtcgcacttttgaaagccacaattcgattagtccctaattaaattcgaaggaaaagttcgatgagcagagcgagtttggcagccctgaatagcaaaagttggtggaaacattttgaggatagcagttgactgaagttgggtggtcagatacatagatataaaaagtggtggcacgattggattggatggcaacttaccgatgagttctcatcgcaatggagcagaccgtagaagtcctcgttgggactgcgcttgtaattgattatagcatcaacggcgctcattgcgtcagttattcctgggatcggtcgggaatttatatatgtttttctgtatcggaaggaagtggcccaagttcagggacagcaattaatgaaatgatattttaaagaagatacaaagtttgttacttaaactttactttcaccagtccacaaagaatttcgggattactaattcacttttggttagcctatttgcacttatcattggttatattttccggaagactaacaaatactggtaactgagatttttaggctgaatcaaaaggcaaacgaaggcgatttcgtgaccttcgatttggaacaattagcagctaaaaataagttaatcacaaatgcacaaaaacgaaatcgccaagtaatcagctgaatgatctggttttgttttggtttttggtttgggtttttcgtttgttttgcctcggttggtggaagcactttcacttgttgtttttctagagcttcaacttttagtaaacggtgggaaaaacgttgtttatttattgcagcccgctcaaaatcaaatgcgctaaacaccaacttgactggcactagaacactctcagtttttgtgttgtttttttttttaagtaactcggactcccactctctgggaatcagcatatataatatatatacttcttggatatatactttgggataagcggcgctcacgatgtttctggcagcgcgtcgaaagtcgaactgatggttcgccacatcacgaaactcgcttcgctcgttttccacttcggattggattggtggagcttggagacgggagaaagttctctctggaaagctccacagcctcccaatcccagagtgagctgagctttttgagctttgtaagcggggttttgaaaatacgtgtttcttagaaccgcgggggaatcccacaatgtgctttagggtttacctgttggcagcgatgactcactatctttggtactgcggaatcccctcaagtaagagaaaaccaataatccaagatgttgtatctaaaatatttaaactgaatacaggaataatgtattaaaagggctatattgactttaggcggtgatatttaccgttttctttcgttcgttcagtttacattctcttaaaattgaaaattgcacttaaagcactaaagctgtgatggctgttggttgctgtcctcacaaaagcatcccggctaaaagcctattgaaaagcttttcaaatagagcttctgctataaaaaaaaacaatcgtaccataacttagcaatccttgaccacttgttgatccaacgggctgagcaaaagaagaccatcttcccactgcagaagaaagtttgttgaatttgttaaagggaaattaatgttccacccaaaaaagaaaactcatcaatctgcggccagctgctcgacaaaactttttccccaaatgaagtcaaatcgaacttcggacgaatgcgaatccgaactgaaaataaccgaaccagagcagcagagcattggttttcaaattaaaagagccagccgagtgtgaagcgaaagtttgcagcaaacggaaacgaaattgaaaactgttgcatacttcggggcggagtaggacctcaaaaaggaggcctagacctagcaccatcccctggaccacacagaaaagccgcactgggcgaaaaatgatttccgttcataaatcatcataatggc

SEQ ID NO: 3398 - DNA, 662 bp, DROSOPHILA
aaacatcgtgagcgccgcttatcccaaaaaaaacatatataaattcccgaccgatcccaggaataactgacgcaatgagcgccgttgatgctataatcaattacaagcgcagtcccaacgaggacttctacggtctgctccattgcgatgagaactcatcgcccgagcagatccaggccgagtacaaagtcctggcccttcagtaccatcccgacaagaactccggcgacaaggaggcggaggccaagttccagcagttaaaggaggccaaggaaaccttgtgcgatcccgaaaagagggccatctacgacaagtggcgcaacagcggcatctcgatgagctacaaacagtggctgggcatgaaggagcatgtcggtcaggtgagaagatacacgattgccgagaaagtggataaagagtccatgcactgggtaacacccaagaccaaggatcgcatgctgcccgagaccggtggagcagctgcccagggacctggaaccggtgcaggatgcagcagcggtggcctgaccgcagcatcccccaatcccgcccaccggcgggcctcggagggcggggcggccttgtactacgggagtcgcaagggcgagtggggcggcgagaacaccgatgtggccaacaagttccgcaactacgagatctaa

SEQ ID NO: 3399 - protein, 195 aa, DROSOPHILA
MSAVDAIINYKRSPNEDFYGLLHCDENSSPEQIQAEYKVLALQYHPDKNSGDKEAEAKFQQLKEAKETLCDPEKRAIYDKWRNSGISMSYKQWLGMKEHVGQVRRYTIAEKVDKESMHWVTPKTKDRMLPETGGAAAQGPGTGAGCSSGGLTAASPNPAHRRASEGGAALYYGSRKGEWGGENTDVANKFRNYEI

SEQ ID NO: 3400 - DNA, 3275 bp, DROSOPHILA
atcgaggcttcaacgtatgtatttactgtaaattggggaattctaatccacaaagaatgtgagggatgcccgcttggttcacccagagcattccccttcgatacatttggttagcacgattgcggcctgccaaggatttcaggtagtgggcctcccaattgtcctccccaccgagttccatccccttgctatgttggcgcgtgctggtggcccattgacgtcacaacgccagggagttgagttaagcgatggggctgaagaggaaaaatcaatacgcagcttgtttcattttcatttccattttcccaacacgcctctgctgcggcgctgttgttgctgttgctgttaccgccgcttcaattgttgccactctagctgttttgccacctcctgctcgggaagtcactcaagtcgcgttggtaatccgcttttggtcgagtcacttgagtcgcgtcactcccctagtcccccaacccagagtttgctttcttctctgcagtggcataaatgccttcgcacttcatcgtcatccccatcgccatcgccgtcgccagcccgctgtcctcgagctcttcggtggctcacgcggcgtatgcgttatattcctggcggatacacactaagcttgtgccacatagccaggccactgcattccagttggctgctgttttgcctcgcatgatggaagtcggtttcgtggtctgctgatctttggacccatgtatgccatctgcggtctcttgacgtcgttgctatgctgcacattgcagattgctgatgttgcttccggatattcgtgcagatgacacacataatattcgcattacacgaagctggaatatttcttcatttcggtatagtatttgccatcattgtttactattggataaatgtgcttatagttattgacaaacagatactttgcaaacgaaaaattgactatgatagagcattcgattttgaatatttagatattgcaccaatcacaaaacccctaattttaaaacgcgttcttgctggtggccgtacaatcatccaaccaagtgggcagatggacactaacgccgctgagagatgtacattcgctgcccagggagaggccactgttggacatgcagtcgctggaggtctcctccactttggccttcttcctggcactatcgttctgttccgatctggaaatggagggggtgccgcttctcgaagtaaggtcctggtcctgatcctggtcgtctggatcctccgccatctgtcggcgcagcggagacttcactcccatacgagcgcttcccagatgccggccagatttgtcctcctcgaaggacatcagttcaccaaagcgcagggcattcaggttgtcaatgtccataaggatgtcctccatgtacatgaacatcagactacgatggatcttcgtccacgaggacagggcggccagactccacagctggctggagtggcgggcaaaggtgccgacgttggtggttgccatgtggcccacacaattgatcagcatgtacgcgtccctgtacttggcaatggtgtcctcgtccagcatcttttttggggagaaaggtgcctcgtggcacaactgtgcgaatccccaaacgaatggcacaaactgaaacttatccagcgagtatccaccatgccagttggacgagttcacggaataggttacctgcaggcggcgcacaaagtgcaagtagcgatcgaatagaaccaaagccgaggcggccaggtcctgttccttatcgaggatctcggccttaaagagggcgcacacgaaaaacaggaagctcagctcgtgcccggtcccgtactcgattttggcggagctgccgaaggagcccgataaatacacgcccagctcgttgacgtgtctgcacttgctggagggcaccgccttctccacaatcttgtatatgtcccttagcatgccgtgcgcccagcgtctgtagctcttggttcgtgaatccatattggcacctagaacgagcggcgccggagaattggccacaatcatggagtccagctgttcgaagatggtcgtcagtcgcttgatgttcttactgattggaaacaagtcggtgttccggattccctgtatctcggcgctcacatcgttcaagtacgtgatcagtgtaaagtacgcccttgaggctagccaggcttccatgtccgaactggactgcacccggcacacgggtcctatgttgcttctccggaagaaggcggccacccgcttgggattcacctcactctgcggctccatctccttgagtttctacagtctgtatttgtgtcaatggttttcaggttgtcatgtgcttgaaaatcgagtgctataacaactgtttcaatagcctcacaaaactaaaacctattttacatacatttagggtaaatatttatctcatttttaaaactccttgataattgagttagatgccgtttttatttatattgatctttatttaaaaatgataactactacgctttagtacccatttaaagcttgaaatatattcttaaaatgtgttgaacccttttttttttaataataatgaagagaaaaggattttccaattaataataataaagagaataggattttcaaattaaattaaaaacaatagatatcattaaagtcatgttccccggctatcagatacccattactcagcactatagtggaagtgcgaacgagaagtttaaaaatttgtctaacatattgaaaggaattattgtacaaaatatctatatctctgaatctctgcatgcctaattccaactttatagcttttatagttcctgaaaggtcgacgttcatacggacggacagagggacatcccaagatcgactcgtctattgatcctgatgaagaatattaagtatagggtactttatagggtcgcttctttaactctaagagtaacgggtataaataagatatatatctataagatacgctcagtacgacgcagcaattgtgctgtatgtgatgcaagagtagcgagaagtttccccatcccttagcaagaacctttaatgaccacttacgataaataataaggtgcggatggagttgcccccttatataagcttacccttattctttggagtgaccctgtggatagttagggccatatttcatagctggcgactcgctattaagacgtcagaagtaacaacagcagaacaacagttactgcagttaaagctaattataatgctaagctgcgccaacgttcacaacaacaacaatgataac

SEQ ID NO: 3401 - DNA, 1275 bp, DROSOPHILA
atggagccgcagagtgaggtgaatcccaagcgggtggccgccttcttccggagaagcaacataggacccgtgtgccgggtgcagtccagttcggacatggaagcctggctagcctcaagggcgtactttacactgatcacgtacttgaacgatgtgagcgccgagatacagggaatccggaacaccgacttgtttccaatcagtaagaacatcaagcgactgacgaccatcttcgaacagctggactccatgattgtggccaattctccggcgccgctcgttctaggtgccaatatggattcacgaaccaagagctacagacgctgggcgcacggcatgctaagggacatatacaagattgtggagaaggcggtgccctccagcaagtgcagacacgtcaacgagctgggcgtgtatttatcgggctccttcggcagctccgccaaaatcgagtacgggaccgggcacgagctgagcttcctgtttttcgtgtgcgccctctttaaggccgagatcctcgataaggaacaggacctggccgcctcggctttggttctattcgatcgctacttgcactttgtgcgccgcctgcaggtaacctattccgtgaactcgtccaactggcatggtggatactcgctggataagtttcagtttgtgccattcgtttggggattcgcacagttgtgccacgaggcacctttctccccaaaaaagatgctggacgaggacaccattgccaagtacagggacgcgtacatgctgatcaattgtgtgggccacatggcaaccaccaacgtcggcacctttgcccgccactccagccagctgtggagtctggccgccctgtcctcgtggacgaagatccatcgtagtctgatgttcatgtacatggaggacatccttatggacattgacaacctgaatgccctgcgctttggtgaactgatgtccttcgaggaggacaaatctggccggcatctgggaagcgctcgtatgggagtgaagtctccgctgcgccgacagatggcggaggatccagacgaccaggatcaggaccaggaccttacttcgagaagcggcaccccctccatttccagatcggaacagaacgatagtgccaggaagaaggccaaagtggaggagacctccagcgactgcatgtccaacagtggcctctccctgggcagcgaatgtacatctctcagcggcgttagtgtccatctgcccacttggttggatgattgtacggccaccagcaagaacgcgttttaa

SEQ ID NO: 3402 - protein, 424 aa, DROSOPHILA
MEPQSEVNPKRVAAFFRRSNIGPVCRVQSSSDMEAWLASRAYFTLITYLNDVSAEIQGIRNTDLFPISKNIKRLTTIFEQLDSMIVANSPAPLVLGANMDSRTKSYRRWAHGMLRDIYKIVEKAVPSSKCRHVNELGVYLSGSFGSSAKIEYGTGHELSFLFFVCALFKAEILDKEQDLAASALVLFDRYLHFVRRLQVTYSVNSSNWHGGYSLDKFQFVPFVWGFAQLCHEAPFSPKKMLDEDTIAKYRDAYMLINCVGHMATTNVGTFARHSSQLWSLAALSSWTKIHRSLMFMYMEDILMDIDNLNALRFGELMSFEEDKSGRHLGSARMGVKSPLRRQMAEDPDDQDQDQDLTSRSGTPSISRSEQNDSARKKAKVEETSSDCMSNSGLSLGSECTSLSGVSVHLPTWLDDCTATSKNAF

SEQ ID NO: 3403 - DNA, 4938 bp, DROSOPHILA
atatatattcaaaagaaagtgaaaacaaatgttctaatgtccgcataatgaaataatcttatcaaatttgaaagcgggatttaccccttcaaatgcaaacacaccgagacacagacacagctaggattttcaaaatctttatttcaaataaaaataatgtactttaacaaatttaccttataatcaaaatatttacatcggtaattttcggtttaaagttataatttgcttcatttagtgccaagaaaattatttccaagtcacattagtttcgtagcgtgtaaaattgagatgaggaacacaagaaatcatattttttataggcattttaaaaagactagaacacaaagagtttgcacacacacacacacagagacccaccctcacaaaacaaacaaaacacaacccaaacacacaaagaaacaagaaacacaatcttttgggctcagcctgcgaaaaacacagttttatgctcagcttttaccactctcttcccctgaccctccagaaatcgaactttctactctctctccttgcctatatctaagatattttgatttttcgactttgtgtaaataaataagaatggaaattgacgaatagttatttatgcctttattaatacaaggaaacacttgaaaattacaacaaaatagatatatacacatttaatgatttatgcgttgcgaagcgatagtttttcaacgcgcattgtaaatataaagaaagaaatattatatatttaaaatagtttaaacgatttaaatgtggaaacgtttaaacgatggtgtaacagaagcggatcgcaaaattgtcaagcttacaaaaaaagtgtaaaatcaaaaatcaaataaaaaatggtaaacatttcaaaactacgactgctgttttaacccatgacatcttaacccattatgctactttaatttcgaacccacttcatcaaattcctgcccgctgactttccaaaagtgaatcccaattgcacaacaatcgacttaatttacataaaataatttattaagtaaacatattaatggatcattacatgcataaatagaatattaatgggcttagggttatttattatttattagttatttctaaactcctattcggcttacatgttacatgcttcacgagtttcactgtgctctatctgcagttttttgcatagaatgcgagcagcactggtctacatgaatcgcgtcaaattgcgctctggcatgacttgcaattagttaataattataaaagctgaatgtttaattgcacatttggccaacgcgaattggcaaagggatttcacatggacctgtgatctgggcttggtagcgtgataaatagccttttaattctgcttggttagggagctaacccctatatacaaacatattcgatatgaaagcaaagttgcttcagtctccgttatagaaaagcgggcataatacatacatacaaatttgatttcgtatctataactaattgtggaaatttttgagaaactgccagtgctcgtgcatattgtctatggtttcgagaactcatcatctacccgtgcagatcgggtgctatggttttggtctaatggctcgtgtggccaagtgagtattgggtctgtatatacgttctatatatggtaaatataaacaggagtattaaatagttgcagttaaaataatacaccgaaaagttagcttattctatggtgtcttaaatgatttgggtgtttcttataattttcgtgttcaagaacaatatccggcatagaatttaaatctgtatattaaaaatcgtagttttaaaaaccaaagatgaatacatttttgtgagatatcggaaccggcccgaaagatggtgaaaactttccgttgtgcagtgtaaatcaaatatttagttcctcagttcgaccgcaagggtatctcatcttcgtggggatccagaagatccaatttgctgcctccgattattttttctgttccgtaagcatgtctgaaccacatcacgcggagtctgtgcacgactagtgaatggctgtggttgcatccaacggttggctggccacccggccacaacatcattaggctccaaaataattaggcgttaaatatgctccagatattaattgccagccgagtcgcccctgccgccatctaaccagctaatccgacaactcctcacaatattccgcatttcttgagcactatctttcgctttcgggccacgctggagccatggcccttcttcgccggacggaggacgatggtgccgctgctggactttgtgaaggtcgggctgaaggcgctgatcgtgggcgtgctgctgtaaggcggatggctggagttttgctggtttccggccacctggtcgtagctctgggtcattagctgatggcacttggtggccaggtagcgaaacacggacgccacgttaatgtcctccttgacggaggtgcggatgagccggcagttgaggagcttggccagcgtctccacctcgtcggccgtaaccaccgcctgttcgataagatcgatcttgttctgcacaatcactgtgggtatctcgttgcactcgttctccaccttgcgcttccaatccttgatcgcgtcgaaggatgctcgatccgtcgtcgaaaagaccaggacggaagcctgggcgccgcggtagtacgcctttgtgatgcagtcgaactcctcctggccggcggtgtcccacagcatgatgcgcacatcctcgccgtcgatctcgatctgtcgctctaggaagtccactccaatcgttttcttgtagtccttcgtgaaaatgcctttgcaatagcgctggatcattgatgacttgccaacgccgccatttccaacaatgacctatggaaaataccagagttgttattagttcatatttcaaaacaaaagtcttacgttatgttttgctatttcaatcataagcaaaaaagcgttttgttattcaccagaaggagagaaaattaactgttcacaatatttatgtgctttctactggacatttaaaacggttagccatttaagttaattaagcgcgtaaatgtcaatcaaatttggcttgtctgcagaaagacacattcggaaataatcatataaatcaatttgaaacaattccagaaaaaccattagaaacaactttatttagggagaggagaaccctaattgaactagaatcttaattcgtgcagtttcgccattagcaacagacatttccatcggattttatcttacaggtgccattcacaacacttggcgagggaaaattacacagaaagttattatttagaactagttagaagtttataaaaatatatagaaaaactattagatgatctgatgctttaacatatggaagttgattaatatactaatattggaaagaagtcattccattttgggatatgcagaactcttcttgatacgatatataatcaattgtatatgtgggtttggtttaatagtagccatctttttttcttgcagtgcactcatttcaaccattcatcatccgaatgacagagattcacgcagccggctgggcaacttaccactttaatggccagctcgatatcatcttcacgcatgctggtgtagttgtactgcgcctgggagtgggtctgcagaacggacgcagcagcaccgccggttgccgtttggattagacgcatctaagccggcaggtgggccgccgctcgcccaggtgtttgattgtggctctggctccagctccagctccaactgcagctcctggccaggcaaatcggttggaggagcacgaaatctcaatccgcccaacgcaagtgtgttcaaatgtgtttgtttggttagccaagttttccgcagcttttcacttttcccccaactttgtctgaatctcgtttcactttctacgcattgatttcaccaaattcgatctgtggaaaaagagaaaaatccaactattcagcgacatcagttttaacatacggcaagtgctacagtcaaacttcgttagcttgaactaaagaaatatgaagtgaaaaagcaaatttgggggttttattatttgattatatattggaacaactatccatctatttttataaacctttgttttctggagatatctttgctttaaattgaaaaggcgcgagaagttgtaccaatatttcgactcaaattaatttcccttcccgaagcttgactgtaaatgcaaaaggttttctttcatttccacgtcaaccggttttcagcgctgtgtttctcgcttcttttggccaagtctgtttttcgtttcccctgtttttctttcttgtttttctctgtttctaccgactggcccaggggccaccgaatgcggcttctaataagacgcaacacgaacggccgggcacgcacggttatgttgttcaacaacaggtgcttccacacaccttacgcacaggtaacaggcggtggtcgggcggggggggggtgggattttggagttgggcggtggtctggtggttaggtgggacgacaggggccagtggatactggtcagcagagagatggagatggagcccgcatgacattagtattcgcattagcgcgtgcttatgaattctttgaaaattgtgctctttcttctggcctttcccccgtttacagttgcttactgcggcttcgtgggcggacggctgtgcggctaagtgggttcggaatatatatggagggtagatacaatatctgaccaaacggatggggcccacttggttacattgtgttctaaaggagatatattcgtttcgtaagcaaattagcttggtttcaaggttctcaaaatagatcggaagcttggtgctcgaaaaaacaataacaaaccaatcatcaattcgggttggattcatctaagcttcgaaagaagcattagatatatgtatagcctacagcgtttccc

SEQ ID NO: 3404 - DNA, 1564 bp, DROSOPHILA
acagatcgaatttggtgaaatcaatgcgtagaaagtgaaacgagattcagacaaagttgggggaaaagtgaaaagctgcggaaaacttggctaaccaaacaaacacatttgaacacacttgcgttgggcggattgagatttcgtgctcctccaaccgatttgcctggccaggagctgcagttggagctggagctggagccagagccacaatcaaacacctgggcgagcggcggcccacctgccggcttagatgcgtctaatccaaacggcaaccggcggtgctgctgcgtccgttctgcagacccactcccaggcgcagtacaactacaccagcatgcgtgaagatgatatcgagctggccattaaagtggtcattgttggaaatggcggcgttggcaagtcatcaatgatccagcgctattgcaaaggcattttcacgaaggactacaagaaaacgattggagtggacttcctagagcgacagatcgagatcgacggcgaggatgtgcgcatcatgctgtgggacaccgccggccaggaggagttcgactgcatcacaaaggcgtactaccgcggcgcccaggcttccgtcctggtcttttcgacgacggatcgagcatccttcgacgcgatcaaggattggaagcgcaaggtggagaacgagtgcaacgagatacccacagtgattgtgcagaacaagatcgatcttatcgaacaggcggtggttacggccgacgaggtggagacgctggccaagctcctcaactgccggctcatccgcacctccgtcaaggaggacattaacgtggcgtccgtgtttcgctacctggccaccaagtgccatcagctaatgacccagagctacgaccaggtggccggaaaccagcaaaactccagccatccgccttacagcagcacgcccacgatcagcgccttcagcccgaccttcacaaagtccagcagcggcaccatcgtcctccgtccggcgaagaagggccatggctccagcgtggcccgaaagcgaaagatagtgctcaagaaatgcggaatattgtgaagtttctcaaaaatttccacaattagttatagatacgaaatcaaatttgtatgtatgtattatgcccgcttttctataacggagactgaagcaactttgctttcatatcgaatatgtttgtatataggggttagctccctaaccaagcagaattaaaaggctatttatcacgctaccaagcccagatcacaggtccatgtgaaatccctttgccaattcgcgttggccaaatgtgcaattaaacattcagcttttataattattaactaattgcaagtcatgccagagcgcaatttgacgcgattcatgtagaccagtgctgctcgcattctatgcaaaaaactgcagatagagcacagtgaaactcgtgaagcatgtaacatgtaagccgaataggagtttagaaataactaataaataataaataaccctaagcccattaatattctatttatgcatgtaatgatccattaatatgtttacttaataaattattttatgtaaatt

SEQ ID NO: 3405 - protein, 268 aa, DROSOPHILA
MRLIQTATGGAAASVLQTHSQAQYNYTSMREDDIELAIKVVIVGNGGVGKSSMIQRYCKGIFTKDYKKTIGVDFLERQIEIDGEDVRIMLWDTAGQEEFDCITKAYYRGAQASVLVFSTTDRASFDAIKDWKRKVENECNEIPTVIVQNKIDLIEQAVVTADEVETLAKLLNCRLIRTSVKEDINVASVFRYLATKCHQLMTQSYDQVAGNQQNSSHPPYSSTPTISAFSPTFTKSSSGTIVLRPAKKGHGSSVARKRKIVLKKCGIL

SEQ ID NO: 3406 - DNA, 4324 bp, DROSOPHILA
cggccgtttacatggatgagctctgcttgtacgtgaaaaaagcgcagagaattccgcaatccattttgcctcttttcgctgttcacatggacgtgtggttatgctttctgctagtgggtctgctaggagccctagtctggcttattctgagagccgtaaatctaattcttggtatagaaggggtaccggatggttcacgggctacgcggattagttacttcggagcagcgcgacgcattttcgtcgacacatgggtcatttgggtgcgggtgaatgtgggtcgtttccccccctttcactcggaacgcatctttgtggcttctctgtgtctggtgagcgtgatttttggagccttgcttgagtccagtctggcaacagtttacataagacctctttactaccgagatgtaaataccttgagggaattggatgagtctggccagccaatttatataaaacatcctgcctttaaggatgatctcttctatggtcacaactcagaggtctatcgtcgattggatgccaagatgatgctggtggccgagggcgaggagcgacttattgagatggtgtcgaagagaggaggattcgccggcgtcacccgatccgccagtttgcagttgagtgacattcgatacgtgatgactaagaaagtgcacaaaatccccgagtgtcccaagaactatcacattgcctatgtgctgccgcgtccctcgccttatttagaggaggtgaatcggatcgtactgcgcctcgtggcggggggaatcgtcggcttgtggacaggggaggcgaaggagcgcgccaaatggagcatccaacggttccccgaatacttggccgaactagacgtaggacggtggaaggtgctcactttgtccgacgtccagctcgccttttacgccctcactattggatgtctactttcagctattgtttgcatggcggagattttgttgggccgtcaacgaagactgcatagtcccaagtaattaacccattaaattacgataattctattaaagtctacgtatagtgtaccgccaccggccttacctattttaaattcttgtgtcctccgatttcgacagagcagaacgccgtctcgtcgtcgctgctcacgggctgcagcctccgctgatgtggtgggtagctcgtcgtcgccaaagagacgctgcgtctcctcaagccagtcgctgatgcgcgcctgcgtggcagcctgtttttgttcgccaatgagcctctggagcaactggtccacgttgcgcggatgtcgagaagtgcccctaaccgctaactgaagtaaggagcggcgctttttagcgattaggtagaagatacggttcggataagtctgccagctcagttcgctgacgttaggcgtatcgatatcctggtcttgcacattttcttcgttttggttccggtcagtctgagggtcctgatcctcctcgtcgctgggctcttcagttggcgaactggcctcgctacacgtagatgtgtgtgtgctgcttttggagctgttctgattgtccacagtgctccaggactcaagctcgtgctgcaccaaagtgtcaaagaaggccagcattacctggtcctcgtcggtgctgcgggcactgaagtcctgcgacacatgatccgatgactcgcgatatagtgcgcgtgtgcagtagggcagggcttcggcttgggtaagggatccctcccagccctgctgggcaaagggactccacagctgtgttattgattttataattattaagagcaatttaggcctacccaaccaaccttaatgatcttctccacgccagaggaggcgagtaagcagcgttcgcgattgtatcgcacctggtttacgatggaacggtgaccagcgagaattacgggcgtagtctccatccactggttcttttcatccactgataagataacaacaataatttgaggaatctgcaagctgaatcccttagctaactcacagtccactccttccagccgccagataaacatgttgaagttgtccgagcctgagaccaccagctcgtcctgcggccccgcaaatgtgcagctcttcatagtgcaagagttgaagtattcgtcgtggtagaaagtggccaccggctcgggggctccaggactatacaggataggcggtagccggcggtgcagggtgagcagaagggtgccgttgcaattgaagcgcacgctcatgcagcttggggattccggaatgtagttgtactgacacagggccctggtgcacaatgagtgagtgagtaggactataaggcaaaaactaggataaacctactgctggtggtgccttagatcccagagcatggctccccttttcgcgttggcagtggccagaaaattaccattaagtgggtgaaactccacggcgttaaagggcgtcttgaacttggcgattgccagtggttcggactttcctgcccttagatcgtacactaggatctcaccgtgctccgtggccacgcttaagagatggccactgatcctgtctacacttaaaccataaacaggtccatcgtgcgaaaagtggttcaggattttccctctttgcaaagaagggatataaccagttattgtttagcataaataaattaactaaagaaatttaaatcataacagtcagtatgaaaatatcaagttgaatgtttagaatttatgaactcttagcaaaacctcattaatcgctttggaactcacgtttctaggtcatgctggatgaccaagtcatcgttgcccccggaaaaaatatatgagttttgggtgtcaaatcccaggcagaagatgttgctggcatgcttctcgttcatggaacggggttttccgagcttggatacaagctcgcggtcaatgttccatagtagaaccctcttgtcgtcgcctcctggtggccgaggaaagcaccgatcagctgggagggcggaaggatatcaacaggtatctccacttacctgaagccaggaactgaccgcccgagctgaactccagggcatttacacatccgtagtgaccagttaggttgcgctggtagagattctgagccgcacttagtcgctcgcgaaaaatggcagagggaaggtggccagccaccaatatgttctcacgctggctaagggccacgtccagattgcgggtctccagcgagcgcaggttccgccaaaggctcattttccgggctccgtcacctggttttctttgcacggaggtcgagatgctacccttgaaggggctgggactctgatttaggttctgttctgttctccagcagggcagtggtctaggttcacgcatatcgctctcacttcaatggggcttcgaactggaaccgcagtgcgcttctttgcatcaatgcaatcccttaattgcgcactcttaaagaccagaaaggcactttaaaatcttttacatgcagcttgttagattcagtcatgaaaaacgaacacaaatgtatgtactttatagagaacaactactcgttttgactggtttatcatcacttcgcatcgctccctaatcaaaactaaggcagaaagtatacaaaccgagaaaccaccgaacagctgttcgcccagccaggtacagtgggaccaaggcgatcgaaaaacggagagcagcggtggctcaaaaccgtgataataggcaacagtgtacactttttcaaatcattttaccttagagatttacattggcataagattgaattaaagtcacggtttgtcaccagttttcaaaatttatagtgatttttgggatccctagtggactgaagcgtttaacaatggccgacaataattcagcatcagagagcgaaaatataattcctggtaagaccgtaggtgttaaataatattaaattaaagctcctctctagtaatgccatgtacttagcatgtacatgtaacatttgaatatgctcaaaggtaaacttactccttcctgatttcctcccagtctttctaagtaatttcgatgaaaaggagcaggtgcgtcaactcagcttataccttcacaacctgcaagaccgtttgcggcagggcattcaggagcaccagaaggtaatgcagtcgtcggtgcagttgctcaaggaggtgggcgatgtgaacgacatgatgcagctcgcgaggtgtggccaccgcgccggggcctccaagatacagcgactgatcgtgggtttcgagacggttaatgctgtgaacgccccgcaaacctccgccgtggcgggcatgagtttgccttctgacctcaccgagattcaaggtctattggtggaatttgagcacctcaatgaaag

SEQ ID NO: 3407 - DNA, 1944 bp, DROSOPHILA
atgcgtgaacctagaccactgccctgctggagaacagaacagaacctaaatcagagtcccagccccttcaagggtagcatctcgacctccgtgcaaagaaaaccaggtgacggagcccggaaaatgagcctttggcggaacctgcgctcgctggagacccgcaatctggacgtggcccttagccagcgtgagaacatattggtggctggccaccttccctctgccatttttcgcgagcgactaagtgcggctcagaatctctaccagcgcaacctaactggtcactacggatgtgtaaatgccctggagttcagctcgggcgctgatcggtgctttcctcggccaccaggaggcgacgacaagagggttctactatggaacattgaccgcgagcttgtatccaagctcggaaaaccccgttccatgaacgagaagcatgccagcaacatcttctgcctgggatttgacacccaaaactcatatattttttccgggggcaacgatgacttggtcatccagcatgacctagaaacagggaaaatcctgaaccacttttcgcacgatggacctgtttatggtttaagtgtagacaggatcagtggccatctcttaagcgtggccacggagcacggtgagatcctagtgtacgatctaagggcaggaaagtccgaaccactggcaatcgccaagttcaagacgccctttaacgccgtggagtttcacccacttaatggtaattttctggccactgccaacgcgaaaaggggagccatgctctgggatctaaggcaccaccagcaggccctgtgtcagtacaactacattccggaatccccaagctgcatgagcgtgcgcttcaattgcaacggcacccttctgctcaccctgcaccgccggctaccgcctatcctgtatagtcctggagcccccgagccggtggccactttctaccacgacgaatacttcaactcttgcactatgaagagctgcacatttgcggggccgcaggacgagctggtggtctcaggctcggacaacttcaacatgtttatctggcggctggaaggagtggacttggatgaaaagaaccagtggatggagactacgcccgtaattctcgctggtcaccgttccatcgtaaaccaggtgcgatacaatcgcgaacgctgcttactcgcctcctctggcgtggagaagatcattaagctgtggagtccctttgcccagcagggctgggagggatcccttacccaagccgaagccctgccctactgcacacgcgcactatatcgcgagtcatcggatcatgtgtcgcaggacttcagtgcccgcagcaccgacgaggaccaggtaatgctggccttctttgacactttggtgcagcacgagcttgagtcctggagcactgtggacaatcagaacagctccaaaagcagcacacacacatctacgtgtagcgaggccagttcgccaactgaagagcccagcgacgaggaggatcaggaccctcagactgaccggaaccaaaacgaagaaaatgtgcaagaccaggatatcgatacgcctaacgtcagcgaactgagctggcagacttatccgaaccgtatcttctacctaatcgctaaaaagcgccgctccttacttcagttagcggttaggggcacttctcgacatccgcgcaacgtggaccagttgctccagaggctcattggcgaacaaaaacaggctgccacgcaggcgcgcatcagcgactggcttgaggagacgcagcgtctctttggcgacgacgagctacccaccacatcagcggaggctgcagcccgtgagcagcgacgacgagacggcgttctgctctgtcgaaatcggaggacacaagaatttaaaataggtaaggccggtggcggtacactatacgtagactttaatagaattatcgtaatttaa

SEQ ID NO: 3408 - protein, 647 aa, DROSOPHILA
MREPRPLPCWRTEQNLNQSPSPFKGSISTSVQRKPGDGARKMSLWRNLRSLETRNLDVALSQRENILVAGHLPSAIFRERLSAAQNLYQRNLTGHYGCVNALEFSSGADRCFPRPPGGDDKRVLLWNIDRELVSKLGKPRSMNEKHASNIFCLGFDTQNSYIFSGGNDDLVIQHDLETGKILNHFSHDGPVYGLSVDRISGHLLSVATEHGEILVYDLRAGKSEPLAIAKFKTPFNAVEFHPLNGNFLATANAKRGAMLWDLRHHQQALCQYNYIPESPSCMSVRFNCNGTLLLTLHRRLPPILYSPGAPEPVATFYHDEYFNSCTMKSCTFAGPQDELVVSGSDNFNMFIWRLEGVDLDEKNQWMETTPVILAGHRSIVNQVRYNRERCLLASSGVEKIIKLWSPFAQQGWEGSLTQAEALPYCTRALYRESSDHVSQDFSARSTDEDQVMLAFFDTLVQHELESWSTVDNQNSSKSSTHTSTCSEASSPTEEPSDEEDQDPQTDRNQNEENVQDQDIDTPNVSELSWQTYPNRIFYLIAKKRRSLLQLAVRGTSRHPRNVDQLLQRLIGEQKQAATQARISDWLEETQRLFGDDELPTTSAEAAAREQRRRDGVLLCRNRRTQEFKIGKAGGGTLYVDFNRIIVI

SEQ ID NO: 3409 - DNA, 4983 bp, DROSOPHILA
ggtgcctttgtcgcctttttgtgtcgtgttgtggcagtgattttcctgcctcgattttcccgccggggtaacgaggtcatttggcaatataccaacacaaacaaaaattatgttattggtcaatgtatttatgagtacgccaggctctggcccctaaaaacacaactctccgttatacggacagcagacaacggacaacggacaccgaataccggactccaaaggtacatatatatgtatgtatgtttgtatgtatgtatgcatgcatgccgctctgcgaaaattgcacgaaaattggaaatttattgccaagcccacacaaacacacactcgcacacacacacacagagacaaacacacacgcaaacagagacaaacagacacacacatacagacaaacacacacacacgcaagataacgagtgaaagaggagagcaaccaacatgcgctaatgacaatgtgctgtggtttgtcgccccctctcttccgagccacgcccacaatccgcccctcattttgcttcatgggtacgatttcgattggatttcctttgcgttccatctgcaacactgatgaaaaccacaaattctgatccagattccatcagtggaccgagccgtccacatcccgaattattgcgtcttgcctcaaacgaacgaaagttttgtaataatttgcattcatatttctgttactgtatacgagaaataggttattgctcatcaattaaatctacttactttgagaattgcttttgtaatcgaataacttgagcttcagaaattttccaacatgtttcatttgactttgtttgccggggaaataagaaaacctaatggaatattggcatacgaaatatacgtattcatgaagcatatgctaggtatcagaatggtcgaatactttgtgtttctgttgcgtggcctgacgaatttccaattagacacaccacctgacttggttgaaaaacatgaacaaagtaaatcagtcattgaaatcatgcacctaagctacctgacaatactcaccgccctgtttttccacctagaagctaacaaaaccgctgtcggtcgccttccaaagtggttggtaccgcttagctatcgcgtggacatcgtgacacggatcaatcaaccctatcagcccttcggcggtacggtggttattgatctgagatcggagagatcgacgaaaagaatagtgcttaatgcccacgatttggcgattggcaagcgaagggcggtgacgttgtctgacaagaatggcaactcagtgccggttagcagcatacagatggacattaagcttagtcgactgactgtgtcattaaagagaccactcaaggtcaacgtcacatactcaatgcgggtggcatttactagtgttttgagaaatgacaacactggattctatagcagcaattatgtggatcataatactactttaacccaatggctggcggccacccaattcgaaccgaatcatgcacgcgaggcatttccctgcttcgacgatcccattttcaggacaccattcaagatcaatctagcccatccgtatctgtaccgcgctctgtccaacatgcccgtccagcggaccattcgccagtgagtagaggggttccaaaatgaaactcaaatgtactgtaatgctatcgtcttaatacctgaagtgccagcctgaaggactacgtgtggacgcagttcgtcgagagccatccgatgcaaacgtacctggtggccttcatgatcagcaagttcgataggccgggtttcacgtccagcgagcgatcggattgtccaattagcacgtgggcacgtccggatgcactgtcgcagactgagttcgccaacatggtggtggcaccgctgctctccttctacgaagatctctttaacagtacctaccggcaaaagaagatcgatttggtggccctgccagatttcacctttaagtcgaaagagaactggggcttgccagcctttgcggaggaatcccttttgtacgatagccaacggagttccattgacgatcaacagggcgtggcacgagcggtggccatgatggtggtgaaccagtggttcggaaatctagtctccgtcgcctggtggcatgagatctggctgaagaacgtgtttgcactgtatctctcgcgttttggtgtgcactcactgcgtccggagtgggattaccaggagcggcacgccctgcagctctacctctcggtcctggactacgatgcccatgttaacacggatctggtgacggcatcggtgcccgatgagagccacatttgggcggcgtacaatgagattggggagcgcaaggcagccgtgctcttcgagatgctacaccgcgtcatgggcgaagaggcgtggctgacggcactgcgtcgctatctggttgtctatgccaatcgcaccgccacatcctccgacttttgggatctcttgcaactgcaggtggaccgtaatggacgcttgggcaagggtctgaacatcactaggatcatgaaatgctggctagggcaaccgggatatcccctggtcaccgtcacccggaactacgaccatcgcacggctatcgtaagtcaacagcgtttcttcataactccgcagtttcgaaatcgctgggccaggaatccgtgctggtgggttccgctcagctatacgtgccccagttgccaacattcggaaatcatctcctttagccggtggctcacctgtccgacctctaagccttcgagtaaatctaatactgttctactggaaaaactggaggcggagcctacggactggatactgttcaatgtccaacatacggctccattccgcgtgaactatgacctccgcaactggcagctgctcaacaaaacgcttgctgatcccaataagtttcgtctcatccatcgtgtaaaccgcgcccagttggtcgacgatctcttcagcctcgcctggagtggcgatatcgaatatgacatggccctgggcattctcggctatctggagcacgaggatgaattcgttgtctgggtagcaaccgagataagcttcgagcgtatcaacaacgtagcgaagagcaacccaaactacctgatttttaaggtgggtttatggggcttttggggtggatcttttaaaggcataaatcattgtgcttgctttgtctcagacctatatgcgtctcctgctggagcgccagttcaagcgggtgatatcctcggacttgaccagttcctcgggcaacatgacccatcgacccgttatcattaggctggcctgcgagtacgagctgcccgcctgtgtgagtctcgcccgtcgggaattcatgaagggaacgccggagaagggcggatggatgaccatccgagagcgggaaacggtcgtctgcacggcagtcaagttcggcacggaaggggaccgggatatggtcgagtcgatgtacaagcgctcgaattttgccgctgaaaaggaatcactgctgaccgccttggcctgctcgcggaatgtcttcgccctgcagagagtccttatatggacttttgagagctcgggagtgcgtaagcaaaacgccaggcgaacattcaaggctgtggtctccaactccatgggctatcgattggccaagaagtacgtgtccgtcaatatgcagaacatacgcaattagtaagtgcaggacaagtgttcgattttaaaatatttttcttctgactgcccaaagttgcagcaactcaaccgacaaggttgtaaatctgatgacaccgctaattgaatgtctgtccactccgaaggaactgctctactttagtaagttcttcaaggagatcctacgcgacatgaacggcagtgagcggctcatcaagatcctgctggaacggggcaacgataacatccactggcagcgcaccaagtttcgccccatgttgcaggccattcgggacataatcctgtggcggagtcgggcgaagcggatactcaaataaaagattgttatcccaatcccaatcttaaatgtcgtaactcaattgtcacacaatcaaaactatttttggatttccgaaaatcagcatgaaagcgacaagggtcttcagatctgtttataagccgtacaaaaaagtctttattttagctgtgcccccttttttggcccagttatggggtaaaatcccgttggattatatcagacatagacatcatatttattttgttctttttaaaatgaaaatacttgttccaaagtggaacatcatcatacatcgttgaattcgtaattttttgttgtaatttattgatgtacatttttcgccaattccccgtttcacattacaaatattttattttttcattaggcaagaagtttacggagcttgtagacattatagaaatgttaaaatattatattaatgataataatgtcaaatgattggtattggtgtcattggccttctgccgatctgcgccagctcgattaattggttaatccagtgactctgcagcgtcctcctcttcctgccaagatgtcaagctgaacgggttgtaatgtacacgacgatatgtatatatgtccattgccaacgagctaaatatgtcatatacattccttccacttttggcggaaacctcttcaaagcagattgactgacgatgggcatagttgaacccctgcgccatgctcacctggcgatggttcggatcatcacttttgttgcccaccagcaggacaattaccttatccggacacaggcgccgtatctccttcatccagccatcgatgttttggaaacttttggacgactgttatgtcgtagacgagcagtatgccatgggcactgcgacaatgggtcgccttcagcaatttgaagcgctcgtcgtcggaggtgtcccagacttgcagcatcctccccatcctccaatcggcaaactccacgctgcactcccttctatccatgcccagagtgctccggtgtcttgtggtgaattggt

SEQ ID NO: 3410 - DNA, 2796 bp, DROSOPHILA
atgcacctaagctacctgacaatactcaccgccctgtttttccacctagaagctaacaaaaccgctgtcggtcgccttccaaagtggttggtaccgcttagctatcgcgtggacatcgtgacacggatcaatcaaccctatcagcccttcggcggtacggtggttattgatctgagatcggagagatcgacgaaaagaatagtgcttaatgcccacgatttggcgattggcaagcgaagggcggtgacgttgtctgacaagaatggcaactcagtgccggttagcagcatacagatggacattaagcttagtcgactgactgtgtcattaaagagaccactcaaggtcaacgtcacatactcaatgcgggtggcatttactagtgttttgagaaatgacaacactggattctatagcagcaattatgtggatcataatactactttaacccaatggctggcggccacccaattcgaaccgaatcatgcacgcgaggcatttccctgcttcgacgatcccattttcaggacaccattcaagatcaatctagcccatccgtatctgtaccgcgctctgtccaacatgcccgtccagcggaccattcgccatgccagcctgaaggactacgtgtggacgcagttcgtcgagagccatccgatgcaaacgtacctggtggccttcatgatcagcaagttcgataggccgggtttcacgtccagcgagcgatcggattgtccaattagcacgtgggcacgtccggatgcactgtcgcagactgagttcgccaacatggtggtggcaccgctgctctccttctacgaagatctctttaacagtacctaccggcaaaagaagatcgatttggtggccctgccagatttcacctttaagtcgaaagagaactggggcttgccagcctttgcggaggaatcccttttgtacgatagccaacggagttccattgacgatcaacagggcgtggcacgagcggtggccatgatggtggtgaaccagtggttcggaaatctagtctccgtcgcctggtggcatgagatctggctgaagaacgtgtttgcactgtatctctcgcgttttggtgtgcactcactgcgtccggagtgggattaccaggagcggcacgccctgcagctctacctctcggtcctggactacgatgcccatgttaacacggatctggtgacggcatcggtgcccgatgagagccacatttgggcggcgtacaatgagattggggagcgcaaggcagccgtgctcttcgagatgctacaccgcgtcatgggcgaagaggcgtggctgacggcactgcgtcgctatctggttgtctatgccaatcgcaccgccacatcctccgacttttgggatctcttgcaactgcaggtggaccgtaatggacgcttgggcaagggtctgaacatcactaggatcatgaaatgctggctagggcaaccgggatatcccctggtcaccgtcacccggaactacgaccatcgcacggctatcgtaagtcaacagcgtttcttcataactccgcagtttcgaaatcgctgggccaggaatccgtgctggtgggttccgctcagctatacgtgccccagttgccaacattcggaaatcatctcctttagccggtggctcacctgtccgacctctaagccttcgagtaaatctaatactgttctactggaaaaactggaggcggagcctacggactggatactgttcaatgtccaacatacggctccattccgcgtgaactatgacctccgcaactggcagctgctcaacaaaacgcttgctgatcccaataagtttcgtctcatccatcgtgtaaaccgcgcccagttggtcgacgatctcttcagcctcgcctggagtggcgatatcgaatatgacatggccctgggcattctcggctatctggagcacgaggatgaattcgttgtctgggtagcaaccgagataagcttcgagcgtatcaacaacgtagcgaagagcaacccaaactacctgatttttaagacctatatgcgtctcctgctggagcgccagttcaagcgggtgatatcctcggacttgaccagttcctcgggcaacatgacccatcgacccgttatcattaggctggcctgcgagtacgagctgcccgcctgtgtgagtctcgcccgtcgggaattcatgaagggaacgccggagaagggcggatggatgaccatccgagagcgggaaacggtcgtctgcacggcagtcaagttcggcacggaaggggaccgggatatggtcgagtcgatgtacaagcgctcgaattttgccgctgaaaaggaatcactgctgaccgccttggcctgctcgcggaatgtcttcgccctgcagagagtccttatatggacttttgagagctcgggagtgcgtaagcaaaacgccaggcgaacattcaaggctgtggtctccaactccatgggctatcgattggccaagaagtacgtgtccgtcaatatgcagaacatacgcaattattgcagcaactcaaccgacaaggttgtaaatctgatgacaccgctaattgaatgtctgtccactccgaaggaactgctctactttagtaagttcttcaaggagatcctacgcgacatgaacggcagtgagcggctcatcaagatcctgctggaacggggcaacgataacatccactggcagcgcaccaagtttcgccccatgttgcaggccattcgggacataatcctgtggcggagtcgggcgaagcggatactcaaataa

SEQ ID NO: 3411 - protein, 931 aa, DROSOPHILA
MHLSYLTILTALFFHLEANKTAVGRLPKWLVPLSYRVDIVTRINQPYQPFGGTVVIDLRSERSTKRIVLNAHDLAIGKRRAVTLSDKNGNSVPVSSIQMDIKLSRLTVSLKRPLKVNVTYSMRVAFTSVLRNDNTGFYSSNYVDHNTTLTQWLAATQFEPNHAREAFPCFDDPIFRTPFKINLAHPYLYRALSNMPVQRTIRHASLKDYVWTQFVESHPMQTYLVAFMISKFDRPGFTSSERSDCPISTWARPDALSQTEFANMVVAPLLSFYEDLFNSTYRQKKIDLVALPDFTFKSKENWGLPAFAEESLLYDSQRSSIDDQQGVARAVAMMVVNQWFGNLVSVAWWHEIWLKNVFALYLSRFGVHSLRPEWDYQERHALQLYLSVLDYDAHVNTDLVTASVPDESHIWAAYNEIGERKAAVLFEMLHRVMGEEAWLTALRRYLVVYANRTATSSDFWDLLQLQVDRNGRLGKGLNITRIMKCWLGQPGYPLVTVTRNYDHRTAIVSQQRFFITPQFRNRWARNPCWWVPLSYTCPSCQHSEIISFSRWLTCPTSKPSSKSNTVLLEKLEAEPTDWILFNVQHTAPFRVNYDLRNWQLLNKTLADPNKFRLIHRVNRAQLVDDLFSLAWSGDIEYDMALGILGYLEHEDEFVVWVATEISFERINNVAKSNPNYLIFKTYMRLLLERQFKRVISSDLTSSSGNMTHRPVIIRLACEYELPACVSLARREFMKGTPEKGGWMTIRERETVVCTAVKFGTEGDRDMVESMYKRSNFAAEKESLLTALACSRNVFALQRVLIWTFESSGVRKQNARRTFKAVVSNSMGYRLAKKYVSVNMQNIRNYCSNSTDKVVNLMTPLIECLSTPKELLYFSKFFKEILRDMNGSERLIKILLERGNDNIHWQRTKFRPMLQAIRDIILWRSRAKRILK

SEQ ID NO: 3412 - DNA, 4205 bp, DROSOPHILA
ctgtggtggtggcagtggcagtggcagtggcggtggcagtggcggtggtcgccagaacaacccgcgggccaactttggacgtttcttcgacaacagcgaatcatattctacgttcttcgaggatatcgaaaacgattttgacagcgacgatgacgtcctgttgggtggaggagcgggcgcgcctaaacgtcgttgcgaacaacagtcaccccagtcaagcatcgaacatgtaatatacgttgctctggaggacattgccaacgggtgcaacaggcgcatgaagatctcccgggcttcgggtaggaacggcgttgatggggtacaatatgacagaattctcactgtcaagatacctccgggctgtaaggctggcaccaagatctgctttcccaatgagggtattcaactgcccaaccttgagcccgccaacgtcgtgtttataatccgggacaagccacacccaatctttcgccgcgatggcaacaatctgctgtacacagccgaaatctcgctgaaggatgctctgtgcggtttacacgtgatggtgccgacgcttcttggcaggccgatggaactcaagaccgacgtgggcgaggtaatcagtccgaaatccgtgcgccgcattctgggctacggattgcccgattccattaataattcccgtcgcggctccatcgtcgtcaggttctccatccagtttccagacgccatatccaaagaactcgcatcctcgctcgacagacttctgcaaaactgatcgaatggacacctggagatgttatccgtctttatgaacggatcaacggatcatacatacaacaaaaaatcatctgtgctccacataaaattacatattttttttctatgtgattcaataaagatcttataatctacctctaacaagcattgtccgctacaaatacctctaataagaatgaaaccagtgaagtacagtttaattatacgtataatgattaaacacaattgtgaggggtcaggtttaaacgtcggccggtttgaactgcggattgtgcgagcgtgccatcttggcgcgcagccactcgtccgcgtgacgctgcttaatgtggacatacatattggagcgggaacggcactccttggggcaatgcggacagttgtacagctgcaggcccgtgtggatggccatgtgctcgtccaggttgcgctgctgcttgaaggttttctcgcagaacgtgcactgcagattggtggtcagcttgtgggcatatttgacgtgaccgcggagcgctgtgcgcgatgtgcaggtcttgccacaatgcggacacacggtgtccgtgctgtcgtgtgtgaagcggtgcaggcgcaagctgtgctcgttcttcagccaaacacggcagatggggcactccacagccggggccacgacgccctggtgctccagcaaatggcgctcgaaggagggcttgaacttgaacttcttcccgcaaatgtcgcaaacgtgacgatgcaggtcttcgtggatggattggatgtgccttcgcaggcggtgtacattggcaaagctgtaacagataatttcatatcaaatactcaacttgcaagacagtttttttatcttaaaaaaattatttctttcttgctattctcgaaacagtgtgagtgcggaataagtagacagctatccctctcatttgcgtgtggaatgaataaagattactaattcaaatatggggcaagaattccaattcgatcagagaccctgctctattctcaccttttgcagcagatctcgcaggtgtgctccagttgatcggtgtcgtgcttggccagatgattggccatacggcgctcgctgctgaaggtgcgttcgcacttggggcacgggaacttgagcaccttgccgatttgagccaccttgttgtgcaccgtctcgatatgagtggccaagtagtcctgcgagttgagcgacttcttgcaaatggtgcagctatgggattttaaagtctatgtagcaacagacagaaccctcgggcttcaaactcacgtaaatagcttggggttgatatgtttgcggatgtggtccatcagcttggaagcgcgtgtaaagactttgccgcagcacttgatgtagtactcgcgctggtgcacctccaggaagtgggtcttcaattcggataggtagggagcactaaattcgcacaggtcgcagcttgcactcatgtagctagcaatggccttctcgtagctcttggccagctgagcacgggagcagcccttgggcttgcgctcgagaacggcctgtagctcggactcctgcgactcggtggttgttcgctggtcaggtgccttcctgcgccgacgcttgccaccatcgtcgagcagatctgcaagctcctgctgcagcgatatcggaccctgatccttggaggaacgtgccgaggttttgcgcttgggcttcattttcgatttcagacggaccaggggttcatctgcaatggaacaggaacttagttacggctaatccttgggaaacattaagataataaccatctgaggagtcagattcagattccggctgcccctcggtcacctccggttcgctatcactagcttgcaggcagggcttctcgtcctcctcctcctcgcagggcagctgctccttgatcggttccctgacttccacactgtccacattcacgtccagcacgcttcccagcagactaaggttgtgcaggtccaacggtttctcgtccatgtcgccagccgccagcggcagttcgtcgatgttgacgtccacgtccacaccgcccgtccacttcatggccgcacagtcgacgtccacggtaaggaactccttcttgagtgagcactgcttctgctccaccagctgccagaagccattgaagtcctccagatgctcacagcactcggtacagacgctggtcgagatgccgtcgtctggtaggatctgcatgggatggcttattggaattgttttgataccattggtatttgccagatacactcacctccagctgcagaaacttcgcaatcatcttgaccaggcgcgtctccgcaagcgtatcgtccgtctcaaagaggaagacagcgcttccgggactaagacatcgcaggcaaaggcgacaaatcatttcgcgcgaacagaaccacaacgcaaagtcaaataaataaaaaatttaaacagtttttcgttgtaaacaacataattcacctatcgtgaatcgataacagaatccaattgtgaatggcaaaacttcatctcaggagttttttgcggggtggccaccctgatcgttgagtatttctctttaatttctcttacaatttatggtctacgtttttaattgtctgcaaaatacgctgtaaacgattatccattaattaaaaatcgaaaatatgaaacttaatatatcgctggatacacatcaaaacgatggcattctgcggacggtcaggcagcacgccaatcgacccacacaactctggcaacgcttgccgtaaaatggcaaaaaaataatacatacgatttaaaactaatggacaattacgtattacgtgaaaagaacgcaacgcaaataatcaaaacaaataagaaacgcaactcgtgtgcgtgtgtagtgtgtgtgcagagctaaaacctagcgaaggaaaggcaaaaacccgtggaaaaagcgaattcaaacgggtttactcgaagcctcctcacccgataccattttccacctacacttgcaaaaaagcgacagcgcgcgagagggacggcgcgagtgagcggagagtgggagagcgcagtgcaagtgagtgggagcgagagcgctgacaaagccagcgcaacatagcgaaaatcgcaaccaaatcgaaatcgaaattcaaccaaatcgaagattctggcgaacaaaggcgactaacaacaacaactgcagcagcggcacgtctcgtcttggttgcgctctcttttgttttcgtcccgtgttttaacaagcggcgaaacgggcgctgagtaagcgccagaaagagtgcaaaaaaaaggcgaaggaaagaaagaagccaaggagcaacgaactgtgtttgcggtgtgtgctctgcgtgcgaaagggtaagctctatggtctctcatgctctcgctctggaagtaggccggaaccgagatttgtttgctaaattatgtttaattgcacagcgggtttgtaaatctgtgattt

SEQ ID NO: 3413 - DNA, 1817 bp, DROSOPHILA
gttgtttacaacgaaaaactgtttaaattttttatttatttgactttgcgttgtggttctgttcgcgcgaaatgatttgtcgcctttgcctgcgatgtcttagtcccggaagcgctgtcttcctctttgagacggacgatacgcttgcggagacgcgcctggtcaagatgattgcgaagtttctgcagctggagatcctaccagacgacggcatctcgaccagcgtctgtaccgagtgctgtgagcatctggaggacttcaatggcttctggcagctggtggagcagaagcagtgctcactcaagaaggagttccttaccgtggacgtcgactgtgcggccatgaagtggacgggcggtgtggacgtggacgtcaacatcgacgaactgccgctggcggctggcgacatggacgagaaaccgttggacctgcacaaccttagtctgctgggaagcgtgctggacgtgaatgtggacagtgtggaagtcagggaaccgatcaaggagcagctgccctgcgaggaggaggaggacgagaagccctgcctgcaagctagtgatagcgaaccggaggtgaccgaggggcagccggaatctgaatctgactcctcagatgatgaacccctggtccgtctgaaatcgaaaatgaagcccaagcgcaaaacctcggcacgttcctccaaggatcagggtccgatatcgctgcagcaggagcttgcagatctgctcgacgatggtggcaagcgtcggcgcaggaaggcacctgaccagcgaacaaccaccgagtcgcaggagtccgagctacaggccgttctcgagcgcaagcccaagggctgctcccgtgctcagctggccaagagctacgagaaggccattgctagctacatgagtgcaagctgcgacctgtgcgaatttagtgctccctacctatccgaattgaagacccacttcctggaggtgcaccagcgcgagtactacatcaagtgctgcggcaaagtctttacacgcgcttccaagctgatggaccacatccgcaaacatatcaaccccaagctatttacctgcaccatttgcaagaagtcgctcaactcgcaggactacttggccactcatatcgagacggtgcacaacaaggtggctcaaatcggcaaggtgctcaagttcccgtgccccaagtgcgaacgcaccttcagcagcgagcgccgtatggccaatcatctggccaagcacgacaccgatcaactggagcacacctgcgagatctgctgcaaaagctttgccaatgtacaccgcctgcgaaggcacatccaatccatccacgaagacctgcatcgtcacgtttgcgacatttgcgggaagaagttcaagttcaagccctccttcgagcgccatttgctggagcaccagggcgtcgtggccccggctgtggagtgccccatctgccgtgtttggctgaagaacgagcacagcttgcgcctgcaccgcttcacacacgacagcacggacaccgtgtgtccgcattgtggcaagacctgcacatcgcgcacagcgctccgcggtcacgtcaaatatgcccacaagctgaccaccaatctgcagtgcacgttctgcgagaaaaccttcaagcagcagcgcaacctggacgagcacatggccatccacacgggcctgcagctgtacaactgtccgcattgccccaaggagtgccgttcccgctccaatatgtatgtccacattaagcagcgtcacgcggacgagtggctgcgcgccaagatggcacgctcgcacaatccgcagttcaaaccggccgacgtttaa

SEQ ID NO: 3414 - protein, 581 aa, DROSOPHILA
MICRLCLRCLSPGSAVFLFETDDTLAETRLVKMIAKFLQLEILPDDGISTSVCTECCEHLEDFNGFWQLVEQKQCSLKKEFLTVDVDCAAMKWTGGVDVDVNIDELPLAAGDMDEKPLDLHNLSLLGSVLDVNVDSVEVREPIKEQLPCEEEEDEKPCLQASDSEPEVTEGQPESESDSSDDEPLVRLKSKMKPKRKTSARSSKDQGPISLQQELADLLDDGGKRRRRKAPDQRTTTESQESELQAVLERKPKGCSRAQLAKSYEKAIASYMSASCDLCEFSAPYLSELKTHFLEVHQREYYIKCCGKVFTRASKLMDHIRKHINPKLFTCTICKKSLNSQDYLATHIETVHNKVAQIGKVLKFPCPKCERTFSSERRMANHLAKHDTDQLEHTCEICCKSFANVHRLRRHIQSIHEDLHRHVCDICGKKFKFKPSFERHLLEHQGVVAPAVECPICRVWLKNEHSLRLHRFTHDSTDTVCPHCGKTCTSRTALRGHVKYAHKLTTNLQCTFCEKTFKQQRNLDEHMAIHTGLQLYNCPHCPKECRSRSNMYVHIKQRHADEWLRAKMARSHNPQFKPADV

SEQ ID NO: 3415 - DNA, 3373 bp, DROSOPHILA
tatgtccaacctgtacatcggtgttatcgtagtgctcgccctgaactttctcaccgaatacatcgccttcattcccaaggcggtgctggcagcgattattatatcggcagtgatcttccaggttcagtaccaggtcgtaacgcccatgtggcgcagcaaacgtgagttgagacttccttgattagtatttatattcctaagttaccttcaacgttgcaggttccgatctagtgcctggcatcctggccttcgtcacctgtttggtactgcccctggaaattggaattatggtggccattggtgtgaatcttctctttatcctgtactatgcagccaggccaaaggtcacgctggagcaactggaaacccaacaaggtatcagattcgtgaagatcacccccgacagatgtctgatctttccttcggtggagtttgttcgaaatatggtactgaagttgggcagcaaatccacattgccagtggtcatcgattgcacctatatctatgctgcggatttcacagccgccaaagtaatatcctccattgtggacgacttccgccggcgtcagcaaaagatcatattcttcaacttgaagcccagtgtagtgagtgtcttcgagggattgaacacgaggctggtgctttgctacaacacccatgccctcaaccaggaactccggcccgacgagccggatctttcgaggtccgtggactcactcgaccacgccgagtccggaaacggaactagtgaatgcgtgagcatggccagcactctttcactagctagaagttagtcttacaacgcccaaataaaattagctaagttatatctataccattacgaacattaatctagtagtttcacttgagtaaagtctttgtttttacactcctgtccttttctatcaagaatatactacaaaacttgtattatttatatcaactattatattcagtctgataatggagctttcaaatgttttaaaattagttatataagctatttccagaactttctgatggacatgttcttctcggagtccttcatcattaccttggagacggccatttcaaagtcctcctgggtgacatggacccgtctttccctcagagcatacattcccgcctcggtgcaaacacccttgacttcagcaccagaagcccccggcatttcttcagcaatcttgcgaagattgatgcctctggtgaggttcatcttgcgagaatgtatcttcaggatatccaatctggcctcttcgtttggtggcggaaactcgatcttgcggtcaattcgaccaggacgcagtaatgcctgatccaagacatcgatgcgattggtggccatgatcaccttaatgtttttagtagcctcgaagccgtccagttggttcagaagctccagcatggttcgctggacctccgaatcccccgttccggtttccagtcgagcggaaccaatcgagtcgatctcgtccatgaatattatggatggagcgtgttccctagccatcacaaaaagctcccttaccattctcgaaccctcgccgatgaatttctgaaccagttccgaccctgaaacccgtataaaagtgcactccgtgtgatgggctacagctcgggctaacagggttttcccagttccaggcggtccgtagaggagcactccctttggctgggtaatgcccaaggcgtcaaataattccggatgctttacaggcagctcaatcacctccttgatctcctggatctgcttgtccaagccacccaccatttcgtaggtggagtcgggcaccttttccaccaacataagggatactaatgggtccaccttattgggcagaattttgtgaagcgtgtagctctcgtttcgcagggccaccctgctgctgggtgtcacatccttaatattgatggtcttgtccacatccactacatacttgccctcgggatgaaccttcacaaggaccttattcttgtccatgggcttcacaacctccgcaatatagctcccctgctcctggagcaactgcagctcctcgcgcagcaagcgaactgtggataaggcaggataatcttataaaggatatattcattctaagaaccttacccttgaggttgagttcatttctctgagcctgcaaacggagcaagttcttttggcgttcgttcacagtgaactgaagctctgatattttctgcgtataatatgaatgaaagccttcggaaccctctgggattcctacgtctttgctcatctggtaaaattaatatttcttctggaaaaaaaaatcacttcaaaaaaggctagctagtaatttattacgttgaactgcaaattgttatttctttccttgtatagcgctcaacaacttcccgagctattgatataattttgcttatttttttgaacgaactgaatccggctgatgagacgacagtttttacgcagtgctgggaaattttgacaagttagggatggaaacttcatttcacactttaacttaagggttcttgaacagactaaaaattttaagataagtcgtattattgccacacgtttcgtaaatattattttattataggtgtcaaacatattcattcaatcttatctcgagtaatgctttcttgttattgatgccttcgaaccaaaaaatttacttcccacacgaagcaccaaataaaatcacagcatagtttgagattaaagacacccagaaatcatgatgttgtttagatataaagtctatcaatcttggaataaatctttaataaagccagtagttggtaacaacgtataatacctaatgagagtgttttatttccactttcttggccaatcaagtaaaactcttaacgccacttaactattttatatttacttgatttatttaagtacttatgctaaaactcgccgttcgctacccgaaaataatactatgttcagcggcaaaatcgcgggtgggaggagccctgactctggaattcacagcgtttcgccgttagaggccaaataaataatattgtgcagatatctgcgaagattgccacatcttaaatgctaattaaggtgagctgggctagccgtggaatggtaatggtaccttcaactaaggcgatgagcgtgggcagcccacatctagatttagtcgctggcctcggtggcaagactaagctagtactaggtctaggacagagactaagctacgaactagacttgggctaagactatcgcataacgaggttgcagcgttgttcccccttcggacttctttggatccctcagatcgggggcgacttctccgccagcttggcgtgcagggtgttaatatcgtatatgaccaccagatccttgttcagaccctcgaagacctgc

SEQ ID NO: 3416 - DNA, 1318 bp, DROSOPHILA
gaagttgttgagcgctatacaaggaaagaaataacaatttgcagttcaacgtaataaattactagctagccttttttgaagtgatttttttttccagaagaaatattaattttaccagatgagcaaagacgtaggaatcccagagggttccgaaggctttcattcatattatacgcagaaaatatcagagcttcagttcactgtgaacgaacgccaaaagaacttgctccgtttgcaggctcagagaaatgaactcaacctcaaggttcgcttgctgcgcgaggagctgcagttgctccaggagcaggggagctatattgcggaggttgtgaagcccatggacaagaataaggtccttgtgaaggttcatcccgagggcaagtatgtagtggatgtggacaagaccatcaatattaaggatgtgacacccagcagcagggtggccctgcgaaacgagagctacacgcttcacaaaattctgcccaataaggtggacccattagtatcccttatgttggtggaaaaggtgcccgactccacctacgaaatggtgggtggcttggacaagcagatccaggagatcaaggaggtgattgagctgcctgtaaagcatccggaattatttgacgccttgggcattacccagccaaagggagtgctcctctacggaccgcctggaactgggaaaaccctgttagcccgagctgtagcccatcacacggagtgcacttttatacgggtttcagggtcggaactggttcagaaattcatcggcgagggttcgagaatggtaagggagctttttgtgatggctagggaacacgctccatccataatattcatggacgagatcgactcgattggttccgctcgactggaaaccggaacgggggattcggaggtccagcgaaccatgctggagcttctgaaccaactggacggcttcgaggctactaaaaacattaaggtgatcatggccaccaatcgcatcgatgtcttggatcaggcattactgcgtcctggtcgaattgaccgcaagatcgagtttccgccaccaaacgaagaggccagattggatatcctgaagatacattctcgcaagatgaacctcaccagaggcatcaatcttcgcaagattgctgaagaaatgccgggggcttctggtgctgaagtcaagggtgtttgcaccgaggcgggaatgtatgctctgagggaaagacgggtccatgtcacccaggaggactttgaaatggccgtctccaaggtaatgatgaaggactccgagaagaacatgtccatcagaaagttctggaaatag

SEQ ID NO: 3417 - protein, 399 aa, DROSOPHILA
MSKDVGIPEGSEGFHSYYTQKISELQFTVNERQKNLLRLQAQRNELNLKVRLLREELQLLQEQGSYIAEVVKPMDKNKVLVKVHPEGKYVVDVDKTINIKDVTPSSRVALRNESYTLHKILPNKVDPLVSLMLVEKVPDSTYEMVGGLDKQIQEIKEVIELPVKHPELFDALGITQPKGVLLYGPPGTGKTLLARAVAHHTECTFIRVSGSELVQKFIGEGSRMVRELFVMAREHAPSIIFMDEIDSIGSARLETGTGDSEVQRTMLELLNQLDGFEATKNIKVIMATNRIDVLDQALLRPGRIDRKIEFPPPNEEARLDILKIHSRKMNLTRGINLRKIAEEMPGASGAEVKGVCTEAGMYALRERRVHVTQEDFEMAVSKVMMKDSEKNMSIRKFWK

SEQ ID NO: 3418 - DNA, 2610 bp, DROSOPHILA
attttatatggcaaataaaatttttgtttacgtatttatacacaaatgaaaaatatgctgttatttcctccattgaaaatcatgttattcgatatagtgaataaaccatcattttaagtgtacgtggaattttccattttgaattctgatggaattaaaagtatattaaaccctcgacttgtgctattcgagattagcttttattatctcgtagctttcaattcctcgttttgtttcattaatttctcgggattccttttttcttttgctaccactcggtctccctgtctctgggaaatttgttttgtatttccggctgcactgagctccaaatacttccggcgacttgcgcgccattcgaggcttaaatttatggagctagtttgcgagctgtttccgccgcatttgccacatggctgccacagcctgtggagttggcttaaggctgcactaaaatccagcgagtgggtggacctgaatgtggactcggatgtgggtgcggatctccagggggggttgggaatttaaagcgacactttgattgattatccctggacaaactcgcgcctgaatcctttgatgcggcttggaattcatgcgatctctaatgagatgcgtgtgcttgcatccatgtggctccaacaatcagcggtggaatgattgaaagcaataagtgtccacctaatcgtaactacccttgcctttaaaattgtcaattatcactttaagttactaaatcatctgttgtaaaatatgttaacaactaaactacatttaaaattagttatttaagttaccaaataatataattattttactttacgtaatatgctccagggtaaaaatattttcatagcttaaataagcaagttgaccacacttttgacacctggctgaaatgtttggttagcagctggacacacagtaggccttgactgcggttcgatactgacaaacattttcggcaaacatccgttcaaatttccagcataattataaaatggctgaaagtcaggtgagtggtcagccggtcagcggcttgattcgccaattaactttgacccttgaaaaaggaatccccgcaggattcgtcggtctcgtcacgcatcacgctcttcaaccaacaagctgagcagcataaaaactggatgatgataaacccctttgcccattacaacgtcaacgagatgcccaagaggacctttccagaggaggaatacggcagagctccgacgggcagtctttccgagcagagatccttgcaggccaatgtacgtgctctggaggagattctccaactgtgcgatttgatacagaaatccggtcgtgatgatcccattgatggccgaaaggtactagctttcgggcaactatttgaaacttacaacaatatctccgacaagttgcttgccactctgttgggtgcccgaaagtatgggttcgtagactttagcggagaaaccctttttcaaggtcgtgatgatacagaacccgtccgcctgcttcgccccttcgaggagctccaagccgaaatcatttccaaggtcgccgatctgcgctgcgatttcactgaaaaaccggaggaaccgactctgcttcgcgaggattaggtgatgttttctgcttaaaagtgggccagaaactgtcatctacctttgacccgtttcaaaaccacgcgcacgtgttcacctctgagcccttttgctaattgaattaaagtctgggttcccggccaaaaggcttttaaccaacagcgaaaacccgccaatcccatcacgtatacgacaagagggccctctcgcaaacacctgtcgctatggttttttaataacacaccgcaggggttttacctccaggaaataaacaaattatagccgacttagttgaattcctgcactcagctgacaaattatgttgaattattcgagtaaatgggaaagctgtaagtcatttggtttcttggcaattcactcgattggcaataagcgcattgtgaaaaagtataaaggtgttttttttcccccattaagatatatacctaacaatttgtgggtcttaaagttcctctttaatggtattacctgctggaatttattttaaattaaacgcgtcatgatgtttccgcccactgtttgaaggccgaaaattccgctggagcgtgggcggtcgtgtaatgtaccgctgatttgatttaacgatgaattgaacacgcccccagcctgcgccattgattcctcacctcaatcccggccagaaacatcaattttcgtgctctaaagcctcaataaattcgcacactggcatcaaatgattgaataatgaagagggaatggatgagctgccgctatttgtgacacataattatgatggagcgaatgaatgcgggcggaatagaaggaaatgatctaaaataaacatgtttccatgttttgaagcctggcgaaaagaagaaaaatcatggcgggggttaaatggaatttgttatgcaaatgtcatgactcggctcgttgcgcacaacatccgtttgccatttttcctactgccaactcgtggcggaaggccaaaatgtggagccacaaaagggccaaaaaccagaagccagaagccacc

SEQ ID NO: 3419 - DNA, 552 bp, DROSOPHILA
atggctgaaagtcaggaatccccgcaggattcgtcggtctcgtcacgcatcacgctcttcaaccaacaagctgagcagcataaaaactggatgatgataaacccctttgcccattacaacgtcaacgagatgcccaagaggacctttccagaggaggaatacggcagagctccgacgggcagtctttccgagcagagatccttgcaggccaatgtacgtgctctggaggagattctccaactgtgcgatttgatacagaaatccggtcgtgatgatcccattgatggccgaaaggtactagctttcgggcaactatttgaaacttacaacaatatctccgacaagttgcttgccactctgttgggtgcccgaaagtatgggttcgtagactttagcggagaaaccctttttcaaggtcgtgatgatacagaacccgtccgcctgcttcgccccttcgaggagctccaagccgaaatcatttccaaggtcgccgatctgcgctgcgatttcactgaaaaaccggaggaaccgactctgcttcgcgaggattag

SEQ ID NO: 3420 - protein, 183 aa, DROSOPHILA
MAESQESPQDSSVSSRITLFNQQAEQHKNWMMINPFAHYNVNEMPKRTFPEEEYGRAPTGSLSEQRSLQANVRALEEILQLCDLIQKSGRDDPIDGRKVLAFGQLFETYNNISDKLLATLLGARKYGFVDFSGETLFQGRDDTEPVRLLRPFEELQAEIISKVADLRCDFTEKPEEPTLLRED

SEQ ID NO: 3421 - DNA, 3793 bp, DROSOPHILA
atgaatctccgtcccaggtatcgcgccgtctccgtgaacacttccgatacgccagtgccgcgggagagcaagtcaaagaagcagccacagtatgtgcccacgatgccgaactccagccacctggacgcagtgccacaggccacgccaatcaaccgaaaccgagtgcacacgaagaaggttcgcacattcccgatgtgtttcgacgacacggatcccacggctagcctggagaatgcggcgcagaaggagtgcctggtgcccattcgactggacatggagctagagggtcaaaagctgcgcgacaccttcacgtggaacaagaacgagagcatgattactccggagcagtttgccgaggtgctgtgcgacgacctggacctcaatcccctgccctttgtgccggctattgcacaggccatccgacagcagatcgaagcctttcccaacgatccccccatcctcgaggagacctgcgaccagcgggtcattgttaagctgaacattcacgtgggcaacacctcgctcgtcgaccaggtcgagtgggacatgtccgagaagaacaacaaccccgaggagtttgccattaaactctgtgcggaattgggattgggaggagagtttgttacggccattgcctacagcattaggggtcagctatcgtggcactgtcgaacgtacgccttcagcgaggcccctctatcaacgattgatgtgcccttccggaatcccagcgacgctgacgcatgggcgccattcctagagacgcttaccgacgccgaaatggagaagaaaatccgcgaccaggaccgcaacacgcgcagaatgcgacgactggccaataccacaactggttggtgatcttccgccgatccagcaatgtgtcactaatgtaatcctcctattaagtaccattatgcatcccaaataaatgtgtgtctgtcgattttaaaacctattgtcttctacgcgctacttccaaaaaaaatagttccaaacgatgttacaaaataagctgatactctttactgcttacgctaaactcgaatccttattctacattatccaatactaactttctgccgaatcgggcttgtcttggtcctgatcgccgtcgtagaactcgttcttagcatcaaccagcttgtcctcatcggctacggatattcgcacgtcgggatcactcgcctcctcccggttgctgcgcagctcctccaagtccacatcaggcggggtctgcaccatttggacgctgggcgagtgctggcacatcttaaggttttcatacacatgcttaacgatgagttcaagatactgctttgagttagcattatcttggcgtgagttaatctctggatggagtgtaaagtcgggggcgaaaaagtcgtaatactcggtggcgggtaggtcattttcaatgtcttggtccaccagcagcgaggtctcgtgcgtccagcagcgggccacgttccgtaaggtgtagccaccgcctccgaccaccaatgtgggtacgttcagttccttcacaaatttgacacactcaccatgtcccttggtgctcagggagaagcaacctagtcgatctccagctagtgaatccgcgccacactgcaaaacgatagccgtgggccggtagaagtccataatggcagaaattatgggtttgaacacctgaaaatagctctggtcatcaatgccctcctttagcggcacattaacgctgtagtatcgtcccgattcggcgcctatctcgtacatgtctcccgtgccgggaaaaaagtagtttccgtatttgtggaacgaagccgtcatcactcggtccgtaaggtagaacgcctcctgcaccccgtcgccgtggtgcacatcgatgtcgatgtagagcacccgaggatggtacttaagcagctccagaatgccgatgacgatgtcattcacgtagcagaatccgcttgcctcgaacttcttggcgtgatgcagtccgcccgaccagtttatgcatatgtcgctgtggttgtggttcagcttctgggctccctccagcgaggcacccgtgtacattgcacagaagtcgaagaggccatcgaacacgggacagtcctcgcctacgctgaagtgcgccaggtacttcgtataggccacggcttaagaacagaaaattatcagattattctaaatgttattccaattgggcgacttcctcttcaactcacaattgcactgaatgttttgtggagtcacctgctgtaagtaggcgatgtactcgtcgctgtggaagcggagcatgtcctgcgcactggccctgcaaagaattccggattagtataatttacgcggcacagacacacctctccgccaactcacttgtacggcctgtagatcttcattttcttgtgcagtccgtagttcattaccaggctgtgagtgaccgccaggcgttgcggcttcatgggatgcccggctccatagtggaagttgcccacgtccgcgttgtagaagtacgacaccctacggtccgtcatcgcgccaacttctcaattggatcggttattgcagggacgccgtagtcccctagttgtggaccaaatcctcgccgggcagcaggtacgtcttcgcatacaggacaatcagcagaacggccacgatgaaaaggagtcgccgggttgtgtcgtattcgcccaacagcatgccgctcccgtggtcacctttgggtacctttgtttaatcgtgagatatcaatttgctaacttattgccaattgaagacaacttaaagcggcgtgcgccgatagtgtactaaaaatggacatagctagtgatgtacaaacgcacagtcacgtcacgagagcatccctatggtgatgctataatttttgttctgctcaattcacaagtctctctgtgcatgtggttttattttatttttggtcgatgtaaggaaggctagatgttgtaaaatatacgtgtgtcttttagttttcatttaggtttatttttaagcctaatgtattaaatgaaataaatacacgaacgtacgcttgccaaaaaaaaaacccgccagatatgaccgaaagccgccgggccggcagcactgtccagttagtttatcttctattttgattttctaattcgactctgctcgcgctaattttcgtgatagagaatattggaatattggaatacgcgtattggagtattggaattggagaatgcagtaatcaacaataaaagtcagtggacaagggaatgcagaaagtgtgtcaactggctaaaaacggcgaatcaggaagcgctcctttgggcaaccgataaatccgccagccgagcaaaatcggagccaattacgaaaccgccattgattttggttcccatcaatatgtaagttgtgccccggcttctgaattagtccccaaaaaactttgagtccgcggaggaagcagtacccaccagaaatctgcgatgttgaccctgtattacgtgagtgccaccgtcctgcagtcctggcgcattcaaaaggcgtgctccaagatcgccgagcacctcgcgcagccctcgagcatcgccttctataccctccaatcgggcagcgatgacggattcggtaagtggcggcgtcattggaaggcgttcacgcttatatagactgcctgcttcctccacagatcccgccctggccagctcggagttgtgctgcaatcggaacgcggccaaggtcacggacatcctgtggctgcacgccaaccagcggggttgctgcctgcgtccgctgcaaacgctacacatcacgccttggatcagct

SEQ ID NO: 3422 - DNA, 1662 bp, DROSOPHILA
ttagtacactatcggcgcacgccgctttaagttgtcttcaattggcaataagttagcaaattgatatctcacgattaaacaaaggtacccaaaggtgaccacgggagcggcatgctgttgggcgaatacgacacaacccggcgactccttttcatcgtggccgttctgctgattgtcctgtatgcgaagacgtacctgctgcccggcgaggatttggtccacaactaggggactacggcgtccctgcaataaccgatccaattgagaagttggcgcgatgacggaccgtagggtgtcgtacttctacaacgcggacgtgggcaacttccactatggagccgggcatcccatgaagccgcaacgcctggcggtcactcacagcctggtaatgaactacggactgcacaagaaaatgaagatctacaggccgtacaaggccagtgcgcaggacatgctccgcttccacagcgacgagtacatcgcctacttacagcaggtgactccacaaaacattcagtgcaattccgtggcctatacgaagtacctggcgcacttcagcgtaggcgaggactgtcccgtgttcgatggcctcttcgacttctgtgcaatgtacacgggtgcctcgctggagggagcccagaagctgaaccacaaccacagcgacatatgcataaactggtcgggcggactgcatcacgccaagaagttcgaggcaagcggattctgctacgtgaatgacatcgtcatcggcattctggagctgcttaagtaccatcctcgggtgctctacatcgacatcgatgtgcaccacggcgacggggtgcaggaggcgttctaccttacggaccgagtgatgacggcttcgttccacaaatacggaaactacttttttcccggcacgggagacatgtacgagataggcgccgaatcgggacgatactacagcgttaatgtgccgctaaaggagggcattgatgaccagagctattttcaggtgttcaaacccataatttctgccattatggacttctaccggcccacggctatcgttttgcagtgtggcgcggattcactagctggagatcgactaggttgcttctccctgagcaccaagggacatggtgagtgtgtcaaatttgtgaaggaactgaacgtacccacattggtggtcggaggcggtggctacaccttacggaacgtggcccgctgctggacgcacgagacctcgctgctggtggaccaagacattgaaaatgacctacccgccaccgagtattacgactttttcgcccccgactttacactccatccagagattaactcacgccaagataatgctaactcaaagcagtatcttgaactcatcgttaagcatgtgtatgaaaaccttaagatgtgccagcactcgcccagcgtccaaatggtgcagaccccgcctgatgtggacttggaggagctgcgcagcaaccgggaggaggcgagtgatcccgacgtgcgaatatccgtagccgatgaggacaagctggttgatgctaagaacgagttctacgacggcgatcaggaccaagacaagcccgattcggcagaaagttagtattggataatgtagaataaggattcgagtttagcgtaagcagtaaagagtatcagcttattttgtaa

SEQ ID NO: 3423 - protein, 438 aa, DROSOPHILA
MTDRRVSYFYNADVGNFHYGAGHPMKPQRLAVTHSLVMNYGLHKKMKIYRPYKASAQDMLRFHSDEYIAYLQQVTPQNIQCNSVAYTKYLAHFSVGEDCPVFDGLFDFCAMYTGASLEGAQKLNHNHSDICINWSGGLHHAKKFEASGFCYVNDIVIGILELLKYHPRVLYIDIDVHHGDGVQEAFYLTDRVMTASFHKYGNYFFPGTGDMYEIGAESGRYYSVNVPLKEGIDDQSYFQVFKPIISAIMDFYRPTAIVLQCGADSLAGDRLGCFSLSTKGHGECVKFVKELNVPTLVVGGGGYTLRNVARCWTHETSLLVDQDIENDLPATEYYDFFAPDFTLHPEINSRQDNANSKQYLELIVKHVYENLKMCQHSPSVQMVQTPPDVDLEELRSNREEASDPDVRISVADEDKLVDAKNEFYDGDQDQDKPDSAES

SEQ ID NO: 3424 - DNA, 4746 bp, DROSOPHILA
ggtagataaggagatcaaaaccagcaaaggtgtttattagctatcgaactttataattacctttaataataaacaaatacaccaattttttgtttggttttctgttttgttaagcattaaaagggatatgtttatttctcctcattgtaaatgtgtcccttttaatgtataaatctaaaaaaaaaaaatgaaaagaacaccttaaactaactcccacaacactacacagaaacggacgtaggcagaaagaaacacactcataatctataagaagcgttaagttgcacgtttacagtaccatataattgtatttatatagtatataaatgatgtattacgtattgaagccgagcaacacttactatactaaccgaaaaaaatcaaaatgatggacacttagatacgatactaggaaaaactaatcgaaacgaatcggctgattgtaagaattagggcaagaaaccaaattgcatctttagtactcagtactcgcctctgaaactgtttccataatcatatttcaacggcatgaaccgatttaatgggatgctaattaaaacaaaacagtataaactcaagagcagaatggactaaagcaacacgagcataaagaaaacttgattatggtcataagtacatatattttaaatgattagtgttttgtattaagtgaaatttgttaaacatttattacatttttatgttctaagttgcgaaataaatgcgaagagaaagcaaagcgcgcaatgtcattcatgccttctctcagtttccatttccgtttccgtttaccgacagcaatcaactcaaagtctaacttttatgccgcgagattttgtacggaactcaattttaaattatgtattcacaaagatgtattacatttgggaaattaatgttcgttacatccattaaattcagcgaaaatgaaacaaataaatcactttttaaaaccattacttttggcttccttacttacccacaaaaacaattcatggctaacagttttagacgtttaatgggttaaagataagaaaattccattagatggacacttttttacttaacgataataaatgcacttcgtgatccctgaaccaaaagcaggctagttaatatttaaaatataattttgtttgtaaatgcaacaactctctggtacgtttcgaaacatattccgttacttttctacttcctcgtcgacgaatgtaatcacggccgctcccttagcaacgttatcgcccgcggctcctccaatagacttaatggtggcgtcctttggagcttttagaatgtgttccattttcatggctaaaatgcaaaactgtttttaaaactatgtataatctaaatttatattttttttaccaataagcactgccaagttttcgcccttcttgaccttgtcaccgggctttaccagcaccttctctaaaatcccgggcatgggagccactatgcgagacccaactgcacccaattgatcgccctgggcacttaagaatttcggctgtcccacctcaaaatcgaccttgccactctggaaaagggaatcaattaaatacaaaatacaaaatgttatcaattgaaaagtagattcttacttccgaaaacaaagagacactagtgccatcaatactagcattatatgtggtgacgttgctattgatattggcacgaatttttagacgacttccatcctgaactctttcgacctttgcatcctgccagtcgccattatccacctgaatttgcatatcctcgccatcaaacttgacagccacagaatagactgaaagattaaataagcttaccaatttgattttaaatttatatatgtggtttacccttctcattggctttcaagtcatatctgcgaaccaaagagtaattcagacgagcgttaggggtggcaacaaatggatcctgatctttgtttccgttcctaaaggctgcctgcaactcgtttaagactagcgccaaagcagcttggctgacttgctgcggactgatgataattggcggaaatagagtatcgaactgctcatcgataaagccagtgtgcacattggccagctgaaactcaggatgcgacgcaaggtcgatgaggaaattaatgttagtgtccagaccagatatctaaaattggtttacctttagggaaatgtcttaaaggtacaaatttttaatgttctcacatgatattcacccaggcgggcaaccaatgagttaagcgcttgtgtgcggttttcgccccaaacgactagcttggcaatcatggggtcgtagtgcacagacacctcatctccttctcggacacccgtctccacgcgaacgttgtttgatggttggggagtagacaaatatcgcaggggtccggctccgggcagaaagcctccgcgaggattttctgcataaatgcgagcttcaaatgcgtggccacgccgcgtaatctcagattgcttcaggggtaatggctcaccggcggcaatgcgaatctgccattcaaccaaatcggtgcccgtaatcatttccgttataggatgctccacctgcaggcgggtattcatttccatgaagtggaaagagagatcttctttgtctagaatgaactccacggtgccagctcctacgtagcccacagctttcgctgcacgaacagcagcctcgcccagctcacgacgcaaatcttccgacaaacctggctgttgtataaatgagcattatttttaaaatagccgaagctcttgtgcacttacagctggcgcctcttcaataatcttttgatgacgtctttgcacggagcaatctctttcccacagatagacagcatcaccatactgatccgcaaatacttgaacctctacgtggcgtggagatcggacgtaccgctccagaagcacagagctgtcgccaaacgacttctcggactcggtgcgagctgagttcagagcggtgaggaagtcgtccggtttttctgcgattctcatgcctttgcctccgccgccgcggacggctttaatcatcaagggaaagccaattttgtcggcttctcgctgcaaacactcatctgactgatcatcgccatggtatccattgatgatcggcaccccagcagcggccattatggccttgctggtgctcttaatccccatgtcccggatggcggaactgggcggacccatgaagatgatgccctcacgctggcacaactcggcaaactcgacggactcggagaggaagccgtagcctgggtggatggcctgggcgcccgaacgcttggctatgtccaggatgcgttcaccgcgaagataggaagccgaggaggcagcttcccccacgcggtacgactcgtctgccaactgcgtgtgcatgctcttctcgtccggatccgagaacacggccacggtacgaactcccagcttgcgtgcggttcgaatcaccctgcatgcgatctcaccacgatttgaaataaggatcttgctgataggccgaacttttgggctggcttctgttgcaaagcacctgcgtcaagccaaaacaaattagcaaggtttatgtaatcgtcaagaacgaaattaagtcttttgatttagcggccttaacaaagaactgccgatcatttccctcacctggcgtttgcgccgaagtttcgcagcagtctggcgtacattattagtagaattaattgtaagaataaataacaaatatactttattcagagcaagtgtgcgatcgtcgcttatcacagctggaaaaacgcacacgcacaagatcgcaattgagatgggcgactcacgagatgcatggttgaaaatattaatgtttcatatatcttttggggattatcatatatcatcaatatcttttagggaaattgatattacgtatattgtgttttttttaagttgcaacccataaaaaatattaccgttatattattctggactatttatcgaactgttgacatccatccgaccgcgtccttacggttttctgcgctcgtgaagttcggtaacattgttcgcagaaactcgataaccgatagtttaacgtcgaagagcgataggccccaaaatatgcgcgtgaaaatagattgtgcgctataaaataaacggatttaggtagttggtgttgaggaagccagccacaaacatagtagaaattgtcggaaaagtgtcgcccgccgacagcttgtataattgcgtcggaagtcaacgcgcgtatcgctggaaaaccgtttgcatcgaaagcccctccggaaaggcgtgaaaagttgggcgccttttgcgcttgtcgcttggcgttgtaaaatttatcagttgctccgcggttgtttttattgtgaactgttaaacgtgcacttcgaaggactgccatttaaacttaaggacattcaagagcaaaaggaaaacaccaaacatgcccatttgcaagcgggaaggattcgacctgaatcagaaggagggcaagaacgaaacattccacgacaacgaccaggtcttctgctgctacatcactaagcgcatttttcgcgactatgagtaagtgcatcctgctaccattcctgcaactgccccttcccttctcctgccattaggtggacgctgcgctaaagtatacaacaaaagcgacgctgcaaaagcatttgcacacgatgtaccgtacatcaccattcagtgtgtgtgtgtgtgtgttcgcaggggtgcataagtgtgcgagtctcgtgggccaaaggcgaaaaaa

SEQ ID NO: 3425 - DNA, 2308 bp, DROSOPHILA
ataagcgacgatcgcacacttgctctgaataaagtatatttgttatttattcttacaattaattctactaataatgtacgccagactgctgcgaaacttcggcgcaaacgccaggtgctttgcaacagaagccagcccaaaagttcggcctatcagcaagatccttatttcaaatcgtggtgagatcgcatgcagggtgattcgaaccgcacgcaagctgggagttcgtaccgtggccgtgttctcggatccggacgagaagagcatgcacacgcagttggcagacgagtcgtaccgcgtgggggaagctgcctcctcggcttcctatcttcgcggtgaacgcatcctggacatagccaagcgttcgggcgcccaggccatccacccaggctacggcttcctctccgagtccgtcgagtttgccgagttgtgccagcgtgagggcatcatcttcatgggtccgcccagttccgccatccgggacatggggattaagagcaccagcaaggccataatggccgctgctggggtgccgatcatcaatggataccatggcgatgatcagtcagatgagtgtttgcagcgagaagccgacaaaattggctttcccttgatgattaaagccgtccgcggcggcggaggcaaaggcatgagaatcgcagaaaaaccggacgacttcctcaccgctctgaactcagctcgcaccgagtccgagaagtcgtttggcgacagctctgtgcttctggagcggtacgtccgatctccacgccacgtagaggttcaagtatttgcggatcagtatggtgatgctgtctatctgtgggaaagagattgctccgtgcaaagacgtcatcaaaagattattgaagaggcgccagctccaggtttgtcggaagatttgcgtcgtgagctgggcgaggctgctgttcgtgcagcgaaagctgtgggctacgtaggagctggcaccgtggagttcattctagacaaagaagatctctctttccacttcatggaaatgaatacccgcctgcaggtggagcatcctataacggaaatgattacgggcaccgatttggttgaatggcagattcgcattgccgccggtgagccattacccctgaagcaatctgagattacgcggcgtggccacgcatttgaagctcgcatttatgcagaaaatcctcgcggaggctttctgcccggagccggacccctgcgatatttgtctactccccaaccatcaaacaacgttcgcgtggagacgggtgtccgagaaggagatgaggtgtctgtgcactacgaccccatgattgccaagctagtcgtttggggcgaaaaccgcacacaagcgcttaactcattggttgcccgcctgggtgaatatcatatatctggtctggacactaacattaatttcctcatcgaccttgcgtcgcatcctgagtttcagctggccaatgtgcacactggctttatcgatgagcagttcgatactctatttccgccaattatcatcagtccgcagcaagtcagccaagctgctttggcgctagtcttaaacgagttgcaggcagcctttaggaacggaaacaaagatcaggatccatttgttgccacccctaacgctcgtctgaattactctttggttcgcagatatgacttgaaagccaatgagaaggtctattctgtggctgtcaagtttgatggcgaggatatgcaaattcaggtggataatggcgactggcaggatgcaaaggtcgaaagagttcaggatggaagtcgtctaaaaattcgtgccaatatcaatagcaacgtcaccacatataatgctagtattgatggcactagtgtctctttgttttcggaaagtggcaaggtcgattttgaggtgggacagccgaaattcttaagtgcccagggcgatcaattgggtgcagttgggtctcgcatagtggctcccatgcccgggattttagagaaggtgctggtaaagcccgccatgaaaatggaacacattctaaaagctccaaaggacgccaccattaagtctattggaggagccgcgggcgataacgttgctaagggagcggccgtgattacattcgtcgacgaggaagtagaaaagtaacggaatatgtttcgaaacgtaccagagagttgttgcatttacaaacaaaattatattttaaatattaactagcctgcttttggttcagggatcacgaagtgcatttattatcgttaagtaaaaaagtgtccatctaatggaattttcttatctttaacccattaaacgtctaaaactgtt

SEQ ID NO: 3426 - protein, 684 aa, DROSOPHILA
MYARLLRNFGANARCFATEASPKVRPISKILISNRGEIACRVIRTARKLGVRTVAVFSDPDEKSMHTQLADESYRVGEAASSASYLRGERILDIAKRSGAQAIHPGYGFLSESVEFAELCQREGIIFMGPPSSAIRDMGIKSTSKAIMAAAGVPIINGYHGDDQSDECLQREADKIGFPLMIKAVRGGGGKGMRIAEKPDDFLTALNSARTESEKSFGDSSVLLERYVRSPRHVEVQVFADQYGDAVYLWERDCSVQRRHQKIIEEAPAPGLSEDLRRELGEAAVRAAKAVGYVGAGTVEFILDKEDLSFHFMEMNTRLQVEHPITEMITGTDLVEWQIRIAAGEPLPLKQSEITRRGHAFEARIYAENPRGGFLPGAGPLRYLSTPQPSNNVRVETGVREGDEVSVHYDPMIAKLVVWGENRTQALNSLVARLGEYHISGLDTNINFLIDLASHPEFQLANVHTGFIDEQFDTLFPPIIISPQQVSQAALALVLNELQAAFRNGNKDQDPFVATPNARLNYSLVRRYDLKANEKVYSVAVKFDGEDMQIQVDNGDWQDAKVERVQDGSRLKIRANINSNVTTYNASIDGTSVSLFSESGKVDFEVGQPKFLSAQGDQLGAVGSRIVAPMPGILEKVLVKPAMKMEHILKAPKDATIKSIGGAAGDNVAKGAAVITFVDEEVEK

SEQ ID NO: 3427 - DNA, 5394 bp, DROSOPHILA
cggcgttcaacaaacttgattaacggtttatcgatttgccatcgcactcgcacaagcacgtgctttgtttgtcgctcctattgatttttacggcattgcttggatatgaaataaccgcacatttctacttcttccttttgtgcactccttccaatttcataacgttgtttatttgcatgtgtgtatcgcatgtacaaatgtccattgttgtgtgtggttgagtccacgtgtgttgtttttgttaatgactgtgattttcatatgtaaaactctttgttattattattcgatggaaggaggaggaaaacgaaacagatgaacatggcgtaaagttgatgaaacaccgagaggaaatagaattcatagtcgttgcgttttgcacactcgcaagataaccaactaacgacatttactaacaataaacaaaaacataactttacacgagaacacaaaaaacacaaaaaaaaaacaggaaaacaaaaggcacacacagtcacacactcacatctcttccagacaacttttgtcgcggtaacagcgcgaactgaaagtttgctcctggcttcattgactcgcaatttcgaactgagtctgatgaacaagaacaacagtgcgccgtgtggaaagcggcattttccaccccctaaaaagcgggccagcaacaacagcaacgacagtaacaagaacaatttgaaggtaacagaaacttttggggatgacacggaacagatgatgccgctatcggtgtcatcgatagacggcgataacaggagttttttaaccgctcagcaatatatttcaagtatatcatacacttgtgtatttcatttagaaagtattcaacaagatcagatatatttattttgttgataaaatcacgaaccaactccattgattcatttccgcacatcactattgcccaatttcgtttgtcggcatccttccaggcactggaagttcgttcttatacttttcgttcgcattctagttcgcgggttctctgaaaggctagatcgcgccattcgcttcaattcttcgtgtaacggtgctaggtgcggatgccagtgttatttttaattgttaatttaattgttaactatttataaaaatagaatttgtacaacagaagacgaacagcagaacaccggtaatatctcgattcgattttaactgtattagttgaaacatttatagtaacggtaatttgtcaagtgacgaaattaactaattaagcgcagcatgagaggcttttaaatcattaaattttaaacaaatatttaattttcatcagcttcatcacatttaattttgctcttttgcttcatttgcctttctactgcgccatcttgaattcgcaggtgcatattgtcatctcgctctgaagcccggcttgtatggagtcggttaataattggaatatatttgtattgcagcaaatttgctttaaaactattaaagttaaaaaaactatacaatagttaacataaaataagtaataaagcttagtatgcgcacttcttagtgaaacgacaatagatagcagttgaaaagtgattgtgaaggtcaaatagatcgaggtcagggccctcttctaactgttaattgtgcaatacttgtatttcaaagggaaaacatgacaaaaaaaaaatgaaatgaataaaatttaagtttctcgattccagagtcgccatggacatgcaagtgcagcgccccattacgtcaggcagccggcaggccccggatccgtatgatcagtatctggagagccgtggactctaccgtaagcacacggcccgggacgcctccagtttgttccgtgtgatcgccgagcagatgtacgacacccagatgctgcactacgagattcggctagagtgcgtccgcttcatgaccctaaaacgacgcatctttgagaaggtaggcctctaacaatcacacattttgtaaaaaaaaaagaaataattttatttatatcccaggaaattcctggcgatttcgatagctacatgcaggacatgtccaagcccaagacatatggaaccatgacagaactacgcgctatgtcctgcctatatcggtaattaatccttagttactattttctattaaattctacaaatatatatgatttctgtacgacttccagccgcaatgttatcctgtatgagccctacaacatgggcaccagcgtcgtttttaatcgtcgctatgcggaaaacttccgtgtcttcttcaacaatgagaatcactttgattcggtttatgacgttgaatatatagaaagagccgccatttgtcaatgtacgtagcctattaatatatccaattttgctttttgtatatgtacgttgctttcagcaatcgcctttaagttgctgtaccagaagcttttcaaattgcctgacgtatcctttgctgtggagattatgttgcatccacacaccttcaattgggatcgcttcaatgtggagttcgatgacaagggctatatggttcgcattcattgcaccgatggacgagtttttaagcttgatctgccaggggacacaaactgcatactggaaaactataagctgtgcaatttccatagcaccaatggaaatcagagcattaatgctcgaaagggaggccggctggagattaaaaaccaggaggagcgaaaggcatccggcagcagtggccacgaaccaaacgatctgttgcccatgtgtccaaaccgattggagtcctgtgtccgccagctgctagatgatggtcagtagaggtggtttcaaacatcaaatgcttacataatactctctttttaggtatctctccgtttccctacaaagtggccaagtccatggacccctatatgtatcgtaatatagaatttgattgctggaacgatatgcgcaaggaggccaagctttataatgtctacataaatgactataactttaaggtaaactgtgcagaacattggattatcgttagcacacatacacacgcacaccaacacacgtttcatgtcaaccacccatccaaattaacaccctttcattttcatctatacactggatacaccttatactttactatacatgtatgtcttgccttatccttcctcgtctcgtcgccgtgttatttgttttccaggtgggcgccaagtgcaaggtggaattgccgaacgaaacggagatgtacacgtgccacgttcaaaatatctccaaagataagaattactgccacgtctttgttgagaggattggcaaagagatagtggtacctcttctttttatctgattttctagacccttgcagagaaatgcaaaaatttcgattagaaacgattatcatatttaacaattagttaaatttgttaaagtttagttaaaagtatattaattgtggcccaatgaactggtatataagtctataaaataattgatctgcaagggctaaaaatgttcggtatccgaagctaattgtaactatttcgctttaatagagagcttactaatatacaaacatatctgttggcttaggtcccgtatgaatcgctccatcccctgccgccagatgagtaccgcccatggtcgttgccattccgctatcatcgccagatgcctcgcttgccgttgcccaagtatgccggtaaggccaacaagtcttccaaatggaagaagaacaagctgttcgaaatggaccagtattttgagcacagcaagtgtgatttgatgccctacatgcccgtggacaattgctatcagggtgtgcacattcaggacgatgagcagcgggatcataatgatcctgaacaaaatgaccagaacccgactacggagcagcgggatcgtgaagaaccgcaggcacagaagcaacaccagcgcacgaaggcatcaagggttcagccgcagaactcgagttccagccaaaaccaggaggtttcgggttcggctgccccgccacccactcagtatatgaattacgtgccaatgataccgagtcgtcctgggcatttaccgccaccttggcctgcatctccgatggctattgccgaggagtttccgttccccatttcaggaaccccgcatccaccgccaaccgaaggttgtgtatacatgccattcggtggttatggtccaccaccaccgggagctgttgctttatcgggaccgcatccatttatgccgcttccttctccaccgctaaatgttaccggaattggcgagccacgtcgttctctacacccaaacggtgaagatttgcccgtggatatggtgactttgagatacttctacaacatgggcgtggatttgcattggcgcatgtcgcaccacacgccgcctgatgaactaggaatgtttggataccatcagcagaacaacactgatcaacaggcaggacggactgtagtcattggcgccacagaggacaatttgactgccgtggagtcaacaccaccaccttcgccagaggtggcaaatgccacagagcagtcaccgcttgagaaaagtgcctacgccaagcgcaatttgaattcggttaaggtgcgcggcaaacgtccggagcagctgcaagatattaaggattcgctggggccagcggcatttttgcccactccaacgccatcgccaagctcgaatggcagtcagtttagtttctatactactccatcgccgcatcatcacctgataacaccgccgaggttgctccaaccgccgccaccgccaccgatattctaccacaaggcgggaccaccacagctagggggagcagctcaaggacaggtaggagtgatacatgcactaacaaattcaaaatattctataggcaatcgacactcgaccatttttagactccctacgcctggggcatgccagctccggtggtgtccccctatgaggtgatcaacaactataacatggacccgtcggctcagccacaacaacagcagccagccaccttgcaaccagctcccttatctgtccaatctcagccggcagctgtctatgctgcaacgcgtcatcactaaacaaagaaagaaaaaaaaaagggagcgggggcaaaaaacagatcacttgaaagagagaggccatacagatcgaaggcattacattccattgcaattaacggcttttaaaatttaatctcacttttaaatttgtagttaactttttataggccataagcgttggcgctctatcataaaccattcagcttctgtacaacaatcgattgcataacctaacgcaaatgtcaacccaacttcattttaaaaatgtaatttaacggtaattttatgcgaatttttttaaagttagccgtcacgaaatcaaagaaccacctatttatatgatttatttaaaacccttctaaccaaaaatatctacatactatctactatatata

SEQ ID NO: 3428 - DNA, 2967 bp, DROSOPHILA
ctgaaaggctagatcgcgccattcgcttcaattcttcgtgtaacggtgctaggtgcggatgccagtgttatttttaattgttaatttaattgttaactatttataaaaatagaatttgtacaacagaagacgaacagcagaacaccgagtcgccatggacatgcaagtgcagcgccccattacgtcaggcagccggcaggccccggatccgtatgatcagtatctggagagccgtggactctaccgtaagcacacggcccgggacgcctccagtttgttccgtgtgatcgccgagcagatgtacgacacccagatgctgcactacgagattcggctagagtgcgtccgcttcatgaccctaaaacgacgcatctttgagaaggaaattcctggcgatttcgatagctacatgcaggacatgtccaagcccaagacatatggaaccatgacagaactacgcgctatgtcctgcctatatcgccgcaatgttatcctgtatgagccctacaacatgggcaccagcgtcgtttttaatcgtcgctatgcggaaaacttccgtgtcttcttcaacaatgagaatcactttgattcggtttatgacgttgaatatatagaaagagccgccatttgtcaatcaatcgcctttaagttgctgtaccagaagcttttcaaattgcctgacgtatcctttgctgtggagattatgttgcatccacacaccttcaattgggatcgcttcaatgtggagttcgatgacaagggctatatggttcgcattcattgcaccgatggacgagtttttaagcttgatctgccaggggacacaaactgcatactggaaaactataagctgtgcaatttccatagcaccaatggaaatcagagcattaatgctcgaaagggaggccggctggagattaaaaaccaggaggagcgaaaggcatccggcagcagtggccacgaaccaaacgatctgttgcccatgtgtccaaaccgattggagtcctgtgtccgccagctgctagatgatggtatctctccgtttccctacaaagtggccaagtccatggacccctatatgtatcgtaatatagaatttgattgctggaacgatatgcgcaaggaggccaagctttataatgtctacataaatgactataactttaaggtcccgtatgaatcgctccatcccctgccgccagatgagtaccgcccatggtcgttgccattccgctatcatcgccagatgcctcgcttgccgttgcccaagtatgccggtaaggccaacaagtcttccaaatggaagaagaacaagctgttcgaaatggaccagtattttgagcacagcaagtgtgatttgatgccctacatgcccgtggacaattgctatcagggtgtgcacattcaggacgatgagcagcgggatcataatgatcctgaacaaaatgaccagaacccgactacggagcagcgggatcgtgaagaaccgcaggcacagaagcaacaccagcgcacgaaggcatcaagggttcagccgcagaactcgagttccagccaaaaccaggaggtttcgggttcggctgccccgccacccactcagtatatgaattacgtgccaatgataccgagtcgtcctgggcatttaccgccaccttggcctgcatctccgatggctattgccgaggagtttccgttccccatttcaggaaccccgcatccaccgccaaccgaaggttgtgtatacatgccattcggtggttatggtccaccaccaccgggagctgttgctttatcgggaccgcatccatttatgccgcttccttctccaccgctaaatgttaccggaattggcgagccacgtcgttctctacacccaaacggtgaagatttgcccgtggatatggtgactttgagatacttctacaacatgggcgtggatttgcattggcgcatgtcgcaccacacgccgcctgatgaactaggaatgtttggataccatcagcagaacaacactgatcaacaggcaggacggactgtagtcattggcgccacagaggacaatttgactgccgtggagtcaacaccaccaccttcgccagaggtggcaaatgccacagagcagtcaccgcttgagaaaagtgcctacgccaagcgcaatttgaattcggttaaggtgcgcggcaaacgtccggagcagctgcaagatattaaggattcgctggggccagcggcatttttgcccactccaacgccatcgccaagctcgaatggcagtcagtttagtttctatactactccatcgccgcatcatcacctgataacaccgccgaggttgctccaaccgccgccaccgccaccgatattctaccacaaggcgggaccaccacagctagggggagcagctcaaggacagactccctacgcctggggcatgccagctccggtggtgtccccctatgaggtgatcaacaactataacatggacccgtcggctcagccacaacaacagcagccagccaccttgcaaccagctcccttatctgtccaatctcagccggcagctgtctatgctgcaacgcgtcatcactaaacaaagaaagaaaaaaaaaagggagcgggggcaaaaaacagatcacttgaaagagagaggccatacagatcgaaggcattacattccattgcaattaacggcttttaaaatttaatctcacttttaaatttgtagttaactttttataggccataagcgttggcgctctatcataaaccattcagcttctgtacaacaatcgattgcataacctaacgcaaatgtcaacccaacttcattttaaaaatgtaatttaacggtaattttatgcgaatttttttaaagttagccgtcacgaaatcaaagaaccacctatttatatgatttatttaaaacccttctaaccaaaaatatctacatactatctactatatata

SEQ ID NO: 3429 - protein, 811 aa, DROSOPHILA
MDMQVQRPITSGSRQAPDPYDQYLESRGLYRKHTARDASSLFRVIAEQMYDTQMLHYEIRLECVRFMTLKRRIFEKEIPGDFDSYMQDMSKPKTYGTMTELRAMSCLYRRNVILYEPYNMGTSVVFNRRYAENFRVFFNNENHFDSVYDVEYIERAAICQSIAFKLLYQKLFKLPDVSFAVEIMLHPHTFNWDRFNVEFDDKGYMVRIHCTDGRVFKLDLPGDTNCILENYKLCNFHSTNGNQSINARKGGRLEIKNQEERKASGSSGHEPNDLLPMCPNRLESCVRQLLDDGISPFPYKVAKSMDPYMYRNIEFDCWNDMRKEAKLYNVYINDYNFKVPYESLHPLPPDEYRPWSLPFRYHRQMPRLPLPKYAGKANKSSKWKKNKLFEMDQYFEHSKCDLMPYMPVDNCYQGVHIQDDEQRDHNDPEQNDQNPTTEQRDREEPQAQKQHQRTKASRVQPQNSSSSQNQEVSGSAAPPPTQYMNYVPMIPSRPGHLPPPWPASPMAIAEEFPFPISGTPHPPPTEGCVYMPFGGYGPPPPGAVALSGPHPFMPLPSPPLNVTGIGEPRRSLHPNGEDLPVDMVTLRYFYNMGVDLHWRMSHHTPPDELGMFGYHQQNNTDQQAGRTVVIGATEDNLTAVESTPPPSPEVANATEQSPLEKSAYAKRNLNSVKVRGKRPEQLQDIKDSLGPAAFLPTPTPSPSSNGSQFSFYTTPSPHHHLITPPRLLQPPPPPPIFYHKAGPPQLGGAAQGQTPYAWGMPAPVVSPYEVINNYNMDPSAQPQQQQPATLQPAPLSVQSQPAAVYAATRHH

SEQ ID NO: 3430 - DNA, 3193 bp, DROSOPHILA
tcgccaaaacgaagagttgcgccatctgctgcaaaagttcaccgtctaggtgcgatattattcaattacagcctcaaccgcaatgcacatacataatcccaagcaattattgtccgatttcactgcaaacatgataaattataattgtgcctaggtcttgctctttgacattgacatcgaaatagtttagagacgtggggtccctgcacgggcgccatctgaaaaagcttgtttcattcaagagtcgtgcaataaaagtatattttgaacatgaaaaccttgtgattttaaatatttaaaataatggaacccctcaaagttaaatattactacgtctatagctcagtttgtcccgctctaaactatgaacagctctctgatatcattattagtgcctagcatgaaaagagctctttgataacatttgtgaggggtttccccttgagtccttaaattaatcttaataccatatctttgagataaatatgacttgtatttgcttcataaacttaaagtacccatccatcccctttagaaatattcccaatgccgtccatgccgctctctggtccaccaaactgtcgatctcagatgtttgatttgcttttcatttcatttcgaactttgagtccgtgggaactagttggcgttagatgatctctacgacggggaataccttcgatcgcttacctcccacagctaccatttcactactggaagccaaacgattagaacttgttgcacttgtgtcttatgtgtcttatcagggcaaaccgataaagttgagcggtagacaagaaaatggttatactacatatatatgaaaccacatatttagggtagtccacgaaagggatcgtccaattggctcaaagtgcgcaccgccagcgtttaaagtgcagaccgggctaatcattcatttatgggcaaactttatggacgacatttcgataaaataataatacaagagcaaccgcaacagcttgttctattgaatttcatggcaagcaactacaactgcgacctgtaataatatactacataattaaacacggcgtaatcttatcgacgctcgttcggactccattggcattgccgtctattttcctgcggtagcggaagtcttgatcgtcagttggccaaacaacagcagtccgaacggaagcggaggaccatcatgcgatccatagatcccgtatcccaaatggcaaacgccactttggcggacgacgatctgggtaactatgacgtttgcctcgaggatttgcaactgtttgcccaactggaggatctctccggagaaagattgccaatggagatggagctgctgaatccgggctcggaatacgatctattggaacttgtgaatggggtgagttgacggtccaaatggtaaattgcacactattaatgaatccataatcaatctccttcattcaggctctccagcagcgaaacaccacggaacataagccaacagacatgtgcaagcccaagcggacaccaaccactaaacgccaccgaacaactggcaaggatcacacctgcgacatatgcgacagaagattctcggaagcctacaatctgcgcatccacaagatgacgcacacggacgagaagccgcatgtgtgcgtggagtgcggcaagggattccggcaactgaacaagctacgcatccatgcagtgacccacacggcggagcggccacacaaatgtgatatctgcggcaagggtttccggtatgccaactacctaactgtccatcgacgcttgcatacgggagagaaaccatatccatgtttggccaccgactgtcatctctcctttcattccatccacgcgcggcgcattcacacaaagctaaggcatgcggcacaaacggatccggatcccgaacatccgctggcggagcaagagcaacgggatacatctgcgctcagcttcacctgcccggtttgcagccgggtcctaacggatcagtgctatcttagcatccacctgaagcggcactacaatcagcgcgacttcccatgcccacagccggagtgcggcaagagattctttagtgcctcggagctgaagcaccaccagattgcccacacccagcagcgaccatttgcctgtccactctgtccagcacgatttctgcgcaaatccaatcataagcaacacctcaaggtgcacgagcgttgacagctcgagagcactttgattatgttagtatacggtacgatttccctgtccattcgaatcgaattccaggcgaatccgagactcgccccaccctaagctgccccccggaagggggcttggtctgcgctttccattcaatataagtgtttatttatatatacgattctgtttgtctttatctgcatgcttgcatattagatatatgtatatatttgtatttatactttataaagttacgggtacggggttgctggttctctgtggttgtgtcctcggaggactgttgactgttgctgttgcatgttcgcctgcattgctttgtttcgtttaggcataacttaaggattacattacattatttgcgggcttagccggaaatacgaaaacaattgtttgattaaaaacagtgattagagccaattaacaaaacacaatctcgttcgcggtcgtttattcgattgattgacaatcaggactaagtgtcttagcactaaactgcacacgtgagaaacttaaaagcaacaaagggggcaaacaatagacaaaacttaaattaaagtttcgccggaaccagaggacaagtgcgctaggcaacactgcccgccacgcaccattcactgcccaacactggccaggcggtacagttatttttggtcgtaacagcgaagcaatgggcaaaaaaaaacaaaagaattaaaagaatcagcaaatattgacgtaaaaacaatttgaacttgaacttaaactggatttgggctctttaaacgttaagataagctagcgaattttgttacatatatagacttaagatctagacccaagaaaaacgtgcacttgccaagcaaaatccggccagcaacggcaaaccatattgcatattggttggttaagctatcgtttcaaatacgatgctgtaaaagaatcaagaatctctcatttggtacacaataaatgcagttctgaacaaaatggcaccttagatgggccagacctggcttgc

SEQ ID NO: 3431 - DNA, 1035 bp, DROSOPHILA
atggcaagcaactacaactgcgacctcggaagtcttgatcgtcagttggccaaacaacagcagtccgaacggaagcggaggaccatcatgcgatccatagatcccgtatcccaaatggcaaacgccactttggcggacgacgatctgggtaactatgacgtttgcctcgaggatttgcaactgtttgcccaactggaggatctctccggagaaagattgccaatggagatggagctgctgaatccgggctcggaatacgatctattggaacttgtgaatggggctctccagcagcgaaacaccacggaacataagccaacagacatgtgcaagcccaagcggacaccaaccactaaacgccaccgaacaactggcaaggatcacacctgcgacatatgcgacagaagattctcggaagcctacaatctgcgcatccacaagatgacgcacacggacgagaagccgcatgtgtgcgtggagtgcggcaagggattccggcaactgaacaagctacgcatccatgcagtgacccacacggcggagcggccacacaaatgtgatatctgcggcaagggtttccggtatgccaactacctaactgtccatcgacgcttgcatacgggagagaaaccatatccatgtttggccaccgactgtcatctctcctttcattccatccacgcgcggcgcattcacacaaagctaaggcatgcggcacaaacggatccggatcccgaacatccgctggcggagcaagagcaacgggatacatctgcgctcagcttcacctgcccggtttgcagccgggtcctaacggatcagtgctatcttagcatccacctgaagcggcactacaatcagcgcgacttcccatgcccacagccggagtgcggcaagagattctttagtgcctcggagctgaagcaccaccagattgcccacacccagcagcgaccatttgcctgtccactctgtccagcacgatttctgcgcaaatccaatcataagcaacacctcaaggtgcacgagcgttga

SEQ ID NO: 3432 - protein, 344 aa, DROSOPHILA
MASNYNCDLGSLDRQLAKQQQSERKRRTIMRSIDPVSQMANATLADDDLGNYDVCLEDLQLFAQLEDLSGERLPMEMELLNPGSEYDLLELVNGALQQRNTTEHKPTDMCKPKRTPTTKRHRTTGKDHTCDICDRRFSEAYNLRIHKMTHTDEKPHVCVECGKGFRQLNKLRIHAVTHTAERPHKCDICGKGFRYANYLTVHRRLHTGEKPYPCLATDCHLSFHSIHARRIHTKLRHAAQTDPDPEHPLAEQEQRDTSALSFTCPVCSRVLTDQCYLSIHLKRHYNQRDFPCPQPECGKRFFSASELKHHQIAHTQQRPFACPLCPARFLRKSNHKQHLKVHER

SEQ ID NO: 3433 - DNA, 16572 bp, DROSOPHILA
tttgcagggcagccggccagaataaacaaaaacagaaacagaaacagattttaaacccgttttagttggtgacgcaccgaatggagggaatttacgtgtggaacttcccccgattcccgcgactcaaatctgagtgccatttcgggactcaactaattgacactctgcggtttaggtataattcgcattaatcatggttacaattatttgcatgtaatcttgcacaaattagtacagtcgaaatggttctcgactgcgaatgattgattgccggggaagcttctaacattttatctccaacctcttgcgacacaatgttctcttatcgcaccttatcgggtgggaaattcggtctaattgaggcgagagttcgacgcattcacatccactttcagttcattttggaccacattaataacaactgccacaggcacttgtttcacactcggcggtcacaactcgatgaaaagttaattaatgtaactgcccaaagacaagcgactatctaaatcgaatcgccagtgtttgtcgttcattacacttcctcgacaagcaagcaaggttcattagctcgacatgaatcagtgggtaagttgagttggcggcgaagtacgcggcgtatgattaataataattattgagattctgccaagtgaagatgccacgccacctggtggtcaaccgcagatttgtggccaagtgggcatcggaattagaaccttgacacgcctccgccggcgtcacgtttctttaactgccacaaaataagcctcggatgctgatattggaggcgatcagaaacatctgaaatgtcggatttatgcaaatccagcgccatcaaaccgagagcggagagctcaaacctgttgctgccgtcgcattcatttcatttccattccatttcatatttagaagttcgcggtccgacattttagtttagttttaattgcgctcgtaaacggttcacttcaatccgatcagctctaacggacacctgtttctaaaagccattcaaatttccttttttgggctgtcaagattgtaaagaaatattcaattcaggtaaactttgccacatctagtgcccatcgcagtgtcgttgtaggtggtaatttttactctatcgcggtttttgcatttaaaaatcgaatagcagacatattgcaaataaatgtgaaaagctcgacacgaagcttaattaaaagtcataaagtgaacagtcaataagaaatttccatcaaatattgattgaaaaaattaatcagtcaggtgtagcgactaagggatgcccaatatggaatatgtgtgaactcaattaagccagaatgcgtacacttgtttgtcaaatgaattcaatcgctgctatttgaatccattgaatggcttatgttttttaaatgtttgattttcatattcgtcttcgggaagaatgaaggccaacgagattccatttttaattaattatgccagcaggatacgagccagttccttcggccgtaattaaccacatgtgtatttcattggcttccaccttgactatcttttcccacccacacttcgattctccggccattttccatggtggtcaaacatttttttaacgaattaaagcgggcccggaggcaaaagcccttttgcgaaagggaaaacattgaacgcaaatacgcatatctatagaaattaccttttaatttaattgaaatgcggctgagaaatgagagtgcatgtccaacccattttccgctagctatgtagattcggctgaataataaaataaattgaaaaccggaaactggtcaaaaccttaaccgccacaaggtatcgtttgaacttatagttttttgagcacgtgttctttaaaaggttattgccgaatagtagcttcaatccttgatttaagagtgcatatgcttggactctaattagcccctcctaattcaaagcaaataaaactaaataattgcattccgcagtaattggaatatagaacaacagccggttttgagaaagcgcagtaccgcgattccctccaattttttttttttaattttctttgtcctgggcggaaaacttataaaaatgctcggcggaagcgtgaaattgcgctgcaagcacacacgatgcgtgggcggaagtgggtggaagtgggtgattccacgcattactgcaactgattgttggtaaccagacaatgcagcttctgccaactagtgcaacttcgctcatcagcgatttcagcgttcagcgttcagcgttcagcatgtggcacctatttgtgttatcgttttgttagttaaataaattatgatgaatgtcgttcggggaagggcctttgtgctccgttggcataaattgcataattcgcaaactaagtacgtagctggcgccataacatcgagttaagtccgaccagcgaaacgtgagcgtgtcggggtacgagcggagttagtggaaatcatagagaaaattgcatcatcaagagccagcagcacttcccatgcattccatgttgatcgtgcatattttaccattaatacggaacccaacccttccataagcattctgccccattcgatgtcgtgttcgtggttgtttgctggcatctcaaccactagcaaagaatttccattaggctgcttctgaagttcagttcagttcagtattagttgcattgcagagttatgggaaatggaatccagatagccttcctttcagtccggaagacaataaattatagtcagaatggttaatcaaataggtcacaatggcatctgttcgagcttggaatctatattcataatacatatgctttgagatgctaggtagacaaataaagaccttgtctaggcgaaccaactttcaaaaacatctctcagtattcaaatcatttgttggcagtatttttaaacacaattaaatgatttttgttggtccgattttacatataaaaaagataatctacacttcggttatttgttttgattaccaggtccaacttagtgcattaaaggcttaagctgccgggctttgcacaaaaatgaatgctcagatttccgtaattcgatttccatacatgctggcccaaaaaagcaaactatttacacttgattacaaagttaagcatacgccctcaaacgcaactgccggaaaagtggaaaatcgagtacatcaacaagtgcacacacacattaagtgcagtgggcgaacggaaaatgcaccgcacactgcgccaaaagacaaggcaaccggaaaagggcggaaatgcgggagaggtgcggcggggaggcggctaggaggtggcagagcggaaatgagcggcaaacacgcagtcccaagcgtcccaccgatgaaaagtgaataaatatttaaagattgtcgtagctggcagtagggagccagcaagtgcatcagcgggtcaggacttgacatttagccccgtagaattggccacataaccggggcggctgggagtgtgtgtgccacttcatttccgtttccgtgcactttggagctgcgttatgagtgctccccacctggcttctggctcctggctcctccgcttttgtgtttcgcacattgttgctgcatcttgtcggcagtaaagcgtggaaattagttggggcggcgatggcaaaggcacctaagcttcagccagctgcataaacgtagccacaatgttgcagctgtgaggaaagagcttgggcaggatcaggactcattcggctccaaagttttggaaaatgctgctacttaagccattattgtttctagtacactcgttggccatttaatattatttaagcaattttataacatgttataacataacattttttaacatgttaacatttatatgactatctaagcgacagatccttgaaatttaccaattatagactgcatatttattttcaatttctgtgcaggctaaaattatctcattgaccatcaatcaaagtgatggatgcgccaatattcccatcaagcgatattcaacagagccagaactttacactttttttttgtcaaacttcccttgtgttggtagtctgataaattggcttaagtcgaattcaaagacaaattaagggctttaaaagtctgtctcaactctttaaaatcaaagtttaatttatttttaccatgctttattttttaactcgtgttctctttgcttctgttaaccggggactctcttacgctgttaagcggcgactgtgccgaacaggggaaattttaacagaactgtgaggttaacgaatcacggccatgttgcgttattaaagtgaaagtagaaatgatttgattgaacagggtcggatatatgtatgtacgtaaatatggtcgggaggggtggccaactcagcccacctacgatacgatgttattattgtcatttttattggtcccgaacttccgctggagtaatgaaaacgtttacgtttgcattacgccgctgtgcttatttttatatggccgaaattttaggccaaacttttgacgcactcgtccacataaaaccagtgtcgcgtcgaaataactggggcatcgtttagtggcggggtttggggttttccgggtttcaggttcccataaaaaatcctgcggggcctgatggcattatacatttataattgacatgctggtgaatggggtatttaatcgaatttaaagaacccactcgcctaaagcaactaagttggccatcatcaacgaaccagtaacctgaattatatcctattcagtgtaatcagtaaaatggcccaggtccattgttttcacttccccgaagcccgtgattatggtcgaaaggaattgctgcctggcagtgaatgaatcaagaacgagaatcagagattaggctgagtgggagttggattaatttcattcagatccaatcgacgacggatctggcattgccatgattgctcattatccctgcagagatacgacgtttaagcagtttttaccgaattaaatttcgtttttcgccatagctaggcctcactcactggccataaaccagttattccctagctcataagtgggccataaaaatacttcctggccggcggcaaggcgagatttatatacctaccgtgatggcccaggaataatattgtgttttatccctggccacgtggtagattttactccatcaggcaaactacatggcgctcttcacattttcggctgctttgttgcacgatgcaaagctttgccaaggggcataaaattcgaatgccacaatagtttcgcatcccgtggatccgctgcattgttaaccctttgacggcgccataaaggccaggtagtgtgccgactgtcaaagggactggatactgcattgtattcaaacctattgccgcggatgtcggcggaatcatatagttcgagacagcatcaaatcaaggctgtcacagcattgccaccatccattgttctcgccgaacacaggatttgatttggacgagtgtcaaaggttcccggctgttctgctgcctagtcaagtttgcctctattcctgtggaaaaacactcatttggccgttttggccggcttgctgcctaattaacaggcaaaactccagactccgcagccacataattgatctaaagttaattgcgaggcattaatgcctgacgaggccaacatgtgcggctaagtgccaagttgttccggccaggactcggcttcggccgtatttatttgctgtgtgtcagcgccataagtcaatctatttgtttggcccaagtccacagcatgtatgcgaattttccctttttttttggggcggtgattgattagttttggatgggcgcaaggtgcgtggggagtcgttgctccttttttgtgtaaacaagaacctcagcatatgccgaagtcgatttatcaaatctaaacaaatgtgaaacaaagttgaggaaatgcaaattgaagttttcagcggagatttatgtgctagcatccatacacttcaaatgtaaatatgtatatttaatttcgcacccatttcaccgccactgagtgactgtctgtcgtctgtcgggcaataatttaactaaattactggtcggcagcataaaaccgaacagaatcattgttatcaggccctgcccagtggactctttcgcattttatataaagccggaatggcctttaacgagccaacgtcatgtcctggggcctggttctgtttaatgctgtagtcctttgaaggtatggagtggcgttgcggagggtggtgtgcataaaaaacaaatggctggtcatttcggctgcgcccattttgatgattatgccagattttcatttagatgatgaacgatgatgctcctcgttgacccagcattaggtgaagcattctattggagcaccccttccctttaagctgtcaacaagccattgagagttcactttttgtgggccatgttctaaattgtaagtcacttccctgtctgctggccagctgataaagacagtgccgaatctgcatgtccctctgatttcggacttgagttatggggaagtgcacttgacactggccaattatgcatgcaagccaatggtgttcgtcccacactgcgtatgatgaatgttttcgctagtactctggtaattgtttctctctgatttacggctccgatttcgatggtcggggccttttcaaattgatggttgggctaatgacgaagtcaacttttggccaattaatttggccacgctccacggaacgccgcaaggtatgcaaaatcaatttccacttaaagccccgcggaggggggttaacgtttcaatcggtttagtgtaccaccagcgatttacattaagacaagacaattgccagggggtgcgggtgggcggctgtgcagctgtgcagccactcagaagttggcaaacaagcctttaacatcgtatcaaaggtgtaaaatttcataaagtgtcgttggcagggccaaaatcaaatacaaacaaagtcagtgaaacgtttttgggcattccacacacccacagttcggggcgtagacaggcataaattcctggatgtcagacggggttcgtgctgtgagggtgcccaaaggattataagttgcgagagtgtccttgaggcaaaagcatccccgagacttttcgggatatgtgtgtgggcgtggctggcgcttcgcaagcgggcttattgcaaaacccaaagctccgaaaatgtatggccgagacgaaaggcgatatgaataacttaaagctgattctgtggacttgagtgagcaatcaaagcagcggggcttcgaagggctcgtttttgtactcgaatgggttagaaattggcatatcagaggttctgaatgcgaaatattctcgtctcaataacccagttctgtttcagccaacaaagcgcaatttaaaacgtataaatgattatacaaatcgatgtagagcatcgattgcagaagtctagcgactgtatcatattatgttaatcaataaatataaaatcagtagcattgactatctgtaaaactgctaaatgttcaaatcgttttacattcgcttcctgaacttaaactagtaggaacaacaaagtcaaccaacgttaaacgggcttatattagctgggttccttacaacttacttttgagtttatttaggaaaatgaaattaataacacaaatactagtagctagagcacttgagaaaccataactcactgtcctacagaacagatatctagcgtgcagcgtgcaccatctgctttcatttttatatctcaattgtcgatccttaaaagaccatgtccctggacatccttctctacttgtctgcattcagctggaattcagctaacagaataccaaatgaccgctattgtgttctacagggcctgctgacccctgaccccgaactggacatggtttaccccagtgacacgtcggacgccaacaacgaggagctggcgctggagcacagtgttgcacatggcaatgtccacggtaacggcactggcactggtggtagctcacccgggacaacaactgctccgaacggggacaacaaagtcaatcagcgccattacgagccggccgagcgcttcatcatcaccaagaacgtggtcgtgataggcctggctttcatgattcacttcacggccttccacggcacatcgaatctgcagagctcggtgaacgcggataaggccctgggcaccaccacgcttgccgtcatctacggctcgctgatactgtccaacatcttcctgccgatgaccgtgataaggtgagtggacaatggtgggtacgagaaggcacacacataaaaaaaatatttgggttatgttttcagtgttaaatacgggtaaattgcccatcatttgatatatggattgttcataattcattgacaaaatagcaaaacacctcttaactatgtagaaacctagtgactccaacagacctagacacctcagcagagacaaatcggtttatatcaagttaatatatattctacagagtaaacagaacggcacactgaaagaataattaacacatcttgagaacatcatagtaaaaggctttgaagcaagaagatagagatctcaaatagtgaggcgaaatatcatattatctcatgaataacatacactgaacaatgccatcttcgatgaatttacaatgggccaaagaccgaagctgaatgtgtttcagaagatgatgggcttaggaaacaatcgaaagagtactcttagcaaaattgccataattttgtttcgcatttcgtgggcatcgcgagtggatgaggctcatctcgcgacgtgtggcatgccataaaagtttcggtgattgtctggtggtgtttttatggggattttatgcagatgtgacaacggcgaaagcgcagtcagcagacgccccgaaatgtgtgactccgagcgcatttggctgtaaaaatgtcaacaggaagtccttggattatcacaggtccttgtgccgccgtccctgttcccgaatgtatcccaaatcggggcggccggatagccaccgacgtctgacatttaaacaaatcgctaatttatagcgagccccgcttcacttggcttattcgaggcacgaactgctggctcaggcaactttaatcagttaactcgatttatttagatttatggccttggtccccgaaataaattttttttttttttttaatttttattatttattgaatcttccctttgtgttaagagactaacaataagtgttcaaatcttaatctaacttaattaactttcacttagtgatagttttttttttttcattaatgccctaataagtttattgctgggctgggaggtcgttgcggtgcagccggctttgactgcatactcggattagttttcttgcgaggggatttgtatgggtggtcagcttttcggttatacttcgtttttttctcagctattacttcgattactaatttgatttttaggtctctgtgtatgttttcgttccgaaggtaccacggcgctccagtgataattctcagaattcttgactgtgctcgctgaataatgtctatgttacttctggatgcgttgccccacagctcggagccataagtccagataggttttaagacggagttgtatagaagagctttgaactccagactaagtgaagagcgagcatttatgagccagtggaggttccttgctttaagtttaagatgtttcgatttgggcttctatatgtttgcgccaagtgagccgcctgtcccagatgaactcccaagatatgtacctcgtcggcttgtggaatgcatatgttattcaagaccagtgggtgggcatgtttgtttgtttaaggtaaaggtaacctgcttgcatttttgaacatttattgaaattctccagtcggcaagccatcgttctacagatgttaagtgtcgggataggagtgccgtggcttttattgggcatttggagcgactgagtatcgcggtatcatcagcgaacgtggaggttgttagattgtagtctatggggaaatccgcccgtatacagggtgtataagattggacccagtacactgccttgcggcactccagcttcgattgcgcaatcgcgtgaagtgcttgtatcgcatcttattgcaaacactctgttatataggtatgacttcagagcttatgtgtgttttggggcaacagcttgattattttaaacaaaagtccatcgagccacactctgtcaaatgcctgcgcgacgtctagaaaaatggctgtgcagtattctcgatgttcaaaagcagtaccgaatttctgccgtgattcggttgacctgttcgatggttccatgtttttctctaaagccaaattgatgtgttggaagtgtgttgtttattctaagatgagggctaatccgaggagtagcattttttcaaacagctttgaaagacatgttagtaagcttatcggtctatatgatgatggctgcgttttatcttttcctggctttggaatcattactatggtcgactttttccatttttgagggaagtatccaagcttggcgattgcgttgacaacaggcagatgtgaagaatagcacactttgggagttcaatgagcattcttggagttattaggtcgtagccaggcgattttcttgggttcagttgctctttgataacctttgctagttacatggtcggaattcaaagggttcttgaggatctagattggctgctattaaaggagggagaataaatgtgttggtagagggatttggtcggaatacattttgtaaatggtcagcgaaagcactggctctttcttcatcacttcgaaaccaggtgccagagggacttcggagtggcataattggcgctatttggagtctttaggtttctgtgagctctccaaagagggtacttagtgctggtgggagagagttgctcgatatatgaacgttggctgtttttttcctcttgtttgagagcattggaagcctgcgtgtggctatcttaagcatgtgctttagtaattggtgatctattagactgccaatcccttcgtaggcgtcgtttatctaataccagccgctcgatttcgcgattagttttgatgtagtttggttttgcatacgtcactggcggggttgaagcctttgcagcccgaaactaaaaatgttttcaagagtttccgttgacttgtctatatcctcctttgtagataatgcccgtcgttagttctatgtgtgaacagacaatacttttgataccttggccagtttgttctaaaatttgtgagtctatacggtgggtcgacgatgtgggggcgagttagcatatttagaaaaacaggtgagtgatctgatgataaatctgctagtgcttcgccggtgaccatgttgcgggggacatgtttagtaattgcaaaatcgatcaggtctgggatttttcttgggtctgctggccagtatgtaggcttacccggggatacatagtctagcttgttttctggcttcgtaagcgcattgtacaattgcttaccctttggcgtcacaagtcgagatccccaatggggtgtgcttggcgttatagtcacccgctgcgatgaacctgtcacctagtgtgttaaagaattccatgaattgatcctcagagattggaaagcgcggtgggcagtagactgcggctagagtcgttgaaccattgttgagttgtaaggctatggacgtagattgtaagtagtttttgtcaaaattgtttaagtggtggtgttttatgcgatttctgatgagtattccagtgcctccatgagctttaggtcgtagccaggcgattttcttgggttcagttgctctttgataacctttgctagttcacatggtcggaattcaaagggttcttgaggatctagattggctgcggatgatttgtaccatagaacaagtatcctggtatatgaaaattgtttttatttgtgaggtgcgtttctgatagtagcattacgtcgatgtttttttcgtaaatgaactgtgtgagctcttgtgtatgcccgtgaaacgccatttgcgttccacagagatatccgtagggaagcccattatggggattttgaagatacaagaagttgaatcaggatattttggtttttcatgagctcttgcaaagtattttgcatgaacgtcatgaagtctttcatgctttgctgtagggatagcatcatagcttcgatgccactttgttgtgtttgttggatgtttgtcggtgtatgttcggaatgagcagttcttgtcggtggggcgggcacttctagtccggattttagggcgctagcgaaagaaattgttggagtagtgcttgggacagttaggggtggttgaaaaatcggttgcggagagtagaaattgactttgttgtatgtatgtgctgtggcaatacgtttgtttaggcggctcttcaattctttgtacacccacacagcctctgtagtttgcagtatgtttttccccgcagtcctgcatttcttcacagacttatcgtccttgtttttggggcagtttgcggtagtatgaggttcgctacagacaacacataccggacttaagggtgcagtatgccttggtgtggcccgtattcttggcaattagtacattgaactggattgatccgtttgtgcggctcctcccggtgatcctccgatgtagcaagtactgtaaattgtatattgggtgcacttcgtttttctttagtgcctggagctctggttcgagttctattttgaatagtggctgcggaactttgtctttgtttaaaatattaatagctgtctttgcagaaaagtttttggccttcagagcctcaattatctcagctggtgtcactgttgcttcaatgcccttaagtactacctgtagccctttgcaactttttaattggatgtgtagtagtttttaccagccatcatttaggatttagtcactataccggtggtctgcttctgttggatctgtagttttatttcatgaatatttccttttttaagtgggataatgtggaacttgctgtcaccaatcaaagcaacgagtttatttacaagtgcatttgtactttgttctcgtatgaaaattggtggaggcctggtcttttttggttcccctaccgttttttcgttgggttgttcggtcgcagaatcagccaagatagcatatcggtttgaattatttactgcagagttttcattgccgttgttggttcgattgattttgggttgattacctgccttattgttttgagggctgagctttctttgatttggatgtagcgatcccatgccagtctgcacagtcgaaatcggacttctgcttttgttttgattcttctttacgtgcattattgttgttgcaaacggtcagtgctgctgaattatttacagctggcacagcgataattagttgggccgctgacgaagttgatgttgtggcagttgccagtgaggtcactgcactcgttattgcagtgttacagttacccgggacggtcgtttggcgctgcgagaggagcgggggtaggagaggcggtctcttcgctccacgacttgtgagccgaagcaggcagagagggagagcaagaacgcggtctgtcgttcgctgagggcaaaagtttcgagttagttgaaggtgaggttgctcgatcaccgatttgcggtgagacgaaagaaaagtatgcattgttgcgttgtaaagagagccggcgctcgtcttgttcacattgtcgctgagaacgtatgtcgttttgattcattgttctaagtccacatataacaattaccagaacaatatggaataattatttattttagtaaataattactatagtcaataattgttagttgtgcaaactgcactttacactttgtgtttaactttcactatactgttgtagtttttagaacttgctattcgtagcttgaaagaaacacgtctccacccgaagactgtggaatgccgaatgccgaaataaatgaccgcctgctaagcatgtgccacttgccactcggcgctcacccatcctctgtgtttcctatttttctacttttccatgtgcttgtttcatcaacagatggttcggttgccggttgaccatggcgctggccctcttcgcctacatgccctacatagccgcccagttttacccacggttcgagaccctaatcccggcggccctgatggtgggtttcggtggcgggccattgtggtgctccaagtgcacctacctatccaccgtctccgaggcacttacccaggtgcggggcaacaagtcgcgtaaggatgtgaacaccgtcaagttcttcggcctgttcttcatcttctaccagatggcccaggtgtggggcaacctcatatcctcctcggttctaaccctgagtgcccctgctgcccaatccgcggcaaatgattctttcgagctggaggtgcagcgggaactggagagaaacagggtggccgaactctgcggggcccgtttctgtcccggagtgggagcagaggccaatccaaacctagtgcccccagctccggagcagatccagctgctcaactccatcttcctcacctgcatggcagcggcggtggtcatgatgatcttcggcgtgagctccctcaaacggtaagtaaacgaatgattctgttttatttaactgatcaaattgaaatattaattagttatacagtaatactggcttgaaaatatatagcttccttccaaacttgaatcacctagtctttcaaggactaataataatatttatatattgatatttattcgctaaattaagatttttcgatttttcgaatgtttaaatatttaaatatgtaatataagcttgcgatctctaacacattttctccaattaatgatccacagctatggagtaaagcgcggagacactggcgacgggatgtcggggctaaagctcctcacggtgaccataaatcttctgcgcaaacgtcgccaaatcctgatgctgcccatcacgatgttcatcgggctggaggaggccttcctggccgtggacttcacccgttcgtttgtggcctgcggatgggggatctctagaatcgggttcgcaatgatatgctttggcgtggcgaatgcggtggctgccgggatcgcaggcgcgctggtggagcgcattggacgggtcactctggccgcactatgtgccgtggtcaacctctgtctgctcacctacatgtacacctgggaagcgcgagagggcgactatatgagctactgcacctttgcggcggtttggggcatctgcgatggagtctggctggttgtggtcaatggtgagtgaagctcgggttcaggtttgtcaccaagattgggtattaagctttggtatttacagctttttatggcattctgtttccgaaccatctgattgccgcttatagcaacttccgcctgtgggaaagcactggttctgttatcggctacgtcatcagttcgcagctttgcacctccacgaaattggtgattttgattatttttattttagtgggttgcgtggggtgagtttccagtttgaatttcacgtatttttaactgatgttcgtaaactttacttcaacagatatggcctcatcgagtaccgcttttggcagaagcaaaagaacttggaagtcatgctgagtgactgattagctcttcaaggctaattccatatcttgccattttcatttccgattaatttcagctatccccctaacttattttcgttaagggaataaggatataagaagttatcttatgtgatattgccaaatattgttaggaaattcgttgatttcgttactcaataaaaccaagtttgttttaattttttaaatagtattttttattacaatcatttaaatatttgttcagttgtagctgttttcttgctatataccatttaaatttcgtagttgaaatattttttttcgtttcttttccatcataatttttgtaagttgctacataatgttacttattctaaacacttgctgtcttttagcttgcttttgttctttttgagtgctaccatatagagttatcttagttttcgagtctgaactggctaaatactagggttataatttgttttataaatggttgaaatcagattcgtttcagtatacaagtttagccaacgcattaaatgcaaatattttaactcatcacttacgagctctacagaatttcttagactgtgggtcacacatagattttatgcagttttggtttaaatgtttttaaacatttagtatgtaatttgttaggtgtatgaactggtttgctttgttttctttttggaatggcacatcaatgtgataaaatttggcctaaaactgcacaagtctgctcttgggactttatactacttttaggctatttgggatatgataagtgttaagtagttacttagttggctaaatattcaattggattggggattggatttggtttcgggttgcggtttgcttgcgtaagccgatgtcctttgtaaatgctatgacacacagtattactttacatg

SEQ ID NO: 3434 - DNA, 1601 bp, DROSOPHILA
ctaaaagccattcaaatttccttttttgggctgtcaagattgtaaagaaatattcaattcagggcctgctgacccctgaccccgaactggacatggtttaccccagtgacacgtcggacgccaacaacgaggagctggcgctggagcacagtgttgcacatggcaatgtccacggtaacggcactggcactggtggtagctcacccgggacaacaactgctccgaacggggacaacaaagtcaatcagcgccattacgagccggccgagcgcttcatcatcaccaagaacgtggtcgtgataggcctggctttcatgattcacttcacggccttccacggcacatcgaatctgcagagctcggtgaacgcggataaggccctgggcaccaccacgcttgccgtcatctacggctcgctgatactgtccaacatcttcctgccgatgaccgtgataagatggttcggttgccggttgaccatggcgctggccctcttcgcctacatgccctacatagccgcccagttttacccacggttcgagaccctaatcccggcggccctgatggtgggtttcggtggcgggccattgtggtgctccaagtgcacctacctatccaccgtctccgaggcacttacccaggtgcggggcaacaagtcgcgtaaggatgtgaacaccgtcaagttcttcggcctgttcttcatcttctaccagatggcccaggtgtggggcaacctcatatcctcctcggttctaaccctgagtgcccctgctgcccaatccgcggcaaatgattctttcgagctggaggtgcagcgggaactggagagaaacagggtggccgaactctgcggggcccgtttctgtcccggagtgggagcagaggccaatccaaacctagtgcccccagctccggagcagatccagctgctcaactccatcttcctcacctgcatggcagcggcggtggtcatgatgatcttcggcgtgagctccctcaaacgctatggagtaaagcgcggagacactggcgacgggatgtcggggctaaagctcctcacggtgaccataaatcttctgcgcaaacgtcgccaaatcctgatgctgcccatcacgatgttcatcgggctggaggaggccttcctggccgtggacttcacccgttcgtttgtggcctgcggatgggggatctctagaatcgggttcgcaatgatatgctttggcgtggcgaatgcggtggctgccgggatcgcaggcgcgctggtggagcgcattggacgggtcactctggccgcactatgtgccgtggtcaacctctgtctgctcacctacatgtacacctgggaagcgcgagagggcgactatatgagctactgcacctttgcggcggtttggggcatctgcgatggagtctggctggttgtggtcaatgctttttatggcattctgtttccgaaccatctgattgccgcttatagcaacttccgcctgtgggaaagcactggttctgttatcggctacgtcatcagttcgcagctttgcacctccacgaaattggtgattttgattatttttattttagtgggttgcgtggggtgagtt

SEQ ID NO: 3435 - protein, 501 aa, DROSOPHILA
MVYPSDTSDANNEELALEHSVAHGNVHGNGTGTGGSSPGTTTAPNGDNKVNQRHYEPAERFIITKNVVVIGLAFMIHFTAFHGTSNLQSSVNADKALGTTTLAVIYGSLILSNIFLPMTVIRWFGCRLTMALALFAYMPYIAAQFYPRFETLIPAALMVGFGGGPLWCSKCTYLSTVSEALTQVRGNKSRKDVNTVKFFGLFFIFYQMAQVWGNLISSSVLTLSAPAAQSAANDSFELEVQRELERNRVAELCGARFCPGVGAEANPNLVPPAPEQIQLLNSIFLTCMAAAVVMMIFGVSSLKRYGVKRGDTGDGMSGLKLLTVTINLLRKRRQILMLPITMFIGLEEAFLAVDFTRSFVACGWGISRIGFAMICFGVANAVAAGIAGALVERIGRVTLAALCAVVNLCLLTYMYTWEAREGDYMSYCTFAAVWGICDGVWLVVVNAFYGILFPNHLIAAYSNFRLWESTGSVIGYVISSQLCTSTKLVILIIFILVGCVG

SEQ ID NO: 3436 - DNA, 3209 bp, DROSOPHILA
acaaattgaattattaataatatacaacacacgctgaattcattaaagcatacaagcgcgcctaaaaacatctgtgactaatgaaaaaaaaaaaaacaaaaaacaaaacatatataattgaaaatcacgagaaatcactgcaatcgaaaatgaaaatgaaaaactccaataaaataatcgtaaaatgcgggaggtacaagaaattgttgagcaacatatggcaaatacatatactagctacagtttaactaattattgataatggtacatacattctacatatgtacagccgacactcacactcacacacccacacccacacccacacacagacacatatacatacatatacagatataccagtacatgcaaaacttagttgtatttgtatgtgggatcatacttgagtagagattagaaaccaaaaaccgacaatttatacattagtatttatgcaacaagctacttttacttacacgccaatgtgtgtggtatatagtacgatatatatgtaaatatatattatatatatatacatatatatttatatatacaaaaaatatataggagacatttgacgaccgtaagcccgaacacagcaatttacttatataacaaaccaaaacaaaccaagtttctttaaaaactaaaaaaccaagaaaccaaaacaaaccaatcccgaaaatgcaaaagttttggtacgaaaaacgaagaacaattatgtaatcgcggcaaaagttgatggcgaagaccccatgaaatacaatatatatacacttatttaaaatatttaacaaaaaaaaaaaaaaacaaaaacaaacgatttatatatatacataccactaaatagtttaaatgtttatttattgtatttaaagaagatgaacgataatgaaaccaaatttaaataaaactaataactcaaaaaaccaaaacaaatcgattttcttcatataacttggatgcattttttatatttttattttgtcacttttcacattcacttaaaatttgcagcacaggcatcgatggcggcgttcaggtcgtcaaatccttggatggcattctcggtggacttggtggtgcagctggtggcatcggtagccacggcgggaacgctttttcgcaatctgatcaggtatcgcaacgaggcctgtccattggcaacgtacaggatgcccttggtggtaaacttgaccttgcatgtcttctttcgaatgctattagccttgtaactgttgcattcttttctcaattgatacagctgatagccatcgagggtcagttggagcaccgccttcttggtgtccagcaccagattgatcgacgtgacggcagcatcgcgtgcgcagcccagaaagtctagtgtggtggatgccaccaaatcggccgaactgctggtcacattgatggcacactcgcccgcatccaatgcccgtctctccacatcctccgccagcttctccagctccttaattggccacaggaagatctttagcagctggcgctccgtcagcagaatgatctccttggccagagctttcgattcggcgatgagcaagcgcaacgtgcgatccagaatggcgagctcgtccacatccaggatgccctcctcgggcagctcgtcaaccaggtctagtttcagtcccaagtcaaagtccagattcagttcgagacccagttgcttggccaattcctgcagagaaacatcctgttcaaccactggctcctccagttgcaaggctgagacctgaaaatcatgtgcattcaatttgatttgttatatctttgtggtaaacgctggtggatttcaatgctaactatggcaaatcacattaatcatacgcactgtggaccaactttaaaaatcttccttggcaactatacattttttcgtaagtttattgtttgcatttgaaatatattcgaaaagtagtatcactgttttctaaaatatgtttcaaacgcagagcaatattaaaacgataaggtttttatcagatatcgcgcatacgcactgttgatctgttatttcgataggcttgataaaatgaatcctattcttttttgccaaatcaaaactgttagttttgtttcatttttagaaaacttatatttttattggattttacatggcatatatctttaattttctactcacagccgccaaggcgaatgacaacaccaaaataatactcctcattgttggtttttgaatggatttagacgagatcttgctgcgaagtcactttatatatggatggacgacacacttggtgcgcattcagattgccatatcggtgcccccagttaattaaaatatattcaagagttcttttttatcggccaattggtatatttcccattatttggctaactttaatcgcaataatttccgtcttactttttttttgtccccaacgactccagagagagaaagaaagagtgagagagagagagagagagagagagagagagagagagagagagagagagagagagaaaagtgggctgaaaagagagggagactttcgataagatcacaaattatattatattgcgttgagcgataggaaacatctattactggattcgccacttcaaaatcgcactaatcgaagcatctaaataatgccataattatagaagataatgtcatataatttatgggactgcttatgccctcgattaaaagtcattgcgaagtcaggaaagaaaacagtggcaatccaatctatggaatcacttgagacattagacacacacgcgttaatgttgtttgccttttttgggtgttcccagttcaccgtttttttttttttttatattaaatttttaattgtgatatctgactggattttcctttgatttcttttgccagataaaccaagtggtgtaagatataatcatataaaaggattactttaatatgcttttatgctgtttaaaaaaaatgtgtaaacaaataataaattaaattgtatttacacatttagttcctacccttttcattcattaagtggcattgtacatacaagccattgttatgatgtttttaacattctttgtttgatcgttctaattttaatctaaatccaaatacgctaaactcaatgaatagcgtccgaatgtaaagttcactaatccaaccaaaccgtgagtgatttacaatggctgcaataaatttatggccaccaatccagattagc

SEQ ID NO: 3437 - DNA, 798 bp, DROSOPHILA
ccaacaatgaggagtattattttggtgttgtcattcgccttggcggctgtctcagccttgcaactggaggagccagtggttgaacaggatgtttctctgcaggaattggccaagcaactgggtctcgaactgaatctggactttgacttgggactgaaactagacctggttgacgagctgcccgaggagggcatcctggatgtggacgagctcgccattctggatcgcacgttgcgcttgctcatcgccgaatcgaaagctctggccaaggagatcattctgctgacggagcgccagctgctaaagatcttcctgtggccaattaaggagctggagaagctggcggaggatgtggagagacgggcattggatgcgggcgagtgtgccatcaatgtgaccagcagttcggccgatttggtggcatccaccacactagactttctgggctgcgcacgcgatgctgccgtcacgtcgatcaatctggtgctggacaccaagaaggcggtgctccaactgaccctcgatggctatcagctgtatcaattgagaaaagaatgcaacagttacaaggctaatagcattcgaaagaagacatgcaaggtcaagtttaccaccaagggcatcctgtacgttgccaatggacaggcctcgttgcgatacctgatcagattgcgaaaaagcgttcccgccgtggctaccgatgccaccagctgcaccaccaagtccaccgagaatgccatccaaggatttgacgacctgaacgccgccatcgatgcctgtgctgcaaattttaagtga

SEQ ID NO: 3438 - protein, 263 aa, DROSOPHILA
MRSIILVLSFALAAVSALQLEEPVVEQDVSLQELAKQLGLELNLDFDLGLKLDLVDELPEEGILDVDELAILDRTLRLLIAESKALAKEIILLTERQLLKIFLWPIKELEKLAEDVERRALDAGECAINVTSSSADLVASTTLDFLGCARDAAVTSINLVLDTKKAVLQLTLDGYQLYQLRKECNSYKANSIRKKTCKVKFTTKGILYVANGQASLRYLIRLRKSVPAVATDATSCTTKSTENAIQGFDDLNAAIDACAANFK

SEQ ID NO: 3439 - DNA, 4329 bp, DROSOPHILA
atacatgaagcgcatctcttcctcgtattccatgcaaggacgccaacgcagggccgcccgatctttttggatggcactgcgatgaaagtttcttagacgacgaacatggcgctgatatttatatcgcagcgccgaccaggatctcttgcagttggtcgcattcgttgccaggcggctggcgatttttttccattgtttctccctttgagcgacgtcgcggaatttcggatgccgggcgtcatacaatagcggctggcggcgtaccaaagcgatgagcagcctctctgccctataggtttgcagaatgccgccatcccgagatcccggataagtgcatctgctgaacggatttggggccttatcgtcatccacgccattcgtcttctgaccaattgtgtcagctttgaggaaaaaaaaaaacggaagttagttgaacggctgaccaggtgaccaactgtcggacttacaaacaattatctggcaatcattttcaatggcaacaggctcctcctccatgtcctagacacctgatagctccaatcttgacctacgcgcgcctttcccccacacaagccgtcgagaattctcggaacggagaaaccggtgggcaatccgatggaaccactgcttcactcttcactcttttgtagcataaaatcactcggaaatagtttgggaacaacttgcaactacaggattattaagtgcaagcgtatctacgtaaatatatctacgtaaataaggtttcttgcgacgccagatagtcggcggttgcaaacgcaaaatggttaaagagcgttatcgaccacggataccgttatcgaaacattcgattaatatttgagtgtgaaatagaattgtatagctaaatatttttgtttgtgttaagttaaacaaaaataagttgaaaaaacacgttacaatttgtaaagctacattctagtagctacccatttggatatcagtggagttatcgatagcagccaagcgctgagagcagaatatttcgttaagttctcccacttgcgagcactccaatttcttcgttctggcaacgctgcttaccagtcagctgtttagccggcaggtttttcaacgaatgttttcataacgcgttttccattcaaattcaattgaattgaattaatttacaaccaaatatcgctctaaaacatgtgggcaagaacaaactacctctggcgaagtgtgggacgtctgcgccgccaagtatgcacgacgatcgtttcaccagcgcgaatatttgcggaccgagagaatcagttcgcccatggaatcctgatggattctctcaaaccgtatgcaatactgcgtcctcgggactccgcctggcaggatttgcccgcatctgaaggctttatgcggccacagccagatgccagtgctgccgatctctatgcggactttttaggcctggtgaggcactgtaatcgcatggaactgaagatcagcgatagccgctacgaagcctttacccgctgcttctgtgagcagctgcatcgccttacggatgaacaacttcttggatcgcttagtgccttggccgagctgcccgtaccggaatcgcccaaagccaagaactacatggagatatggaataccctggacatcgagtgctgtcgccgcatcgagcgatggtccagtgaacaattgctactcgtgagcgatgcctggtatcgtcttggtctggtcaggataggcgagtacgtgtggctggcgctgaaaaagctcggccgcaagctgcgaaagctgccgccagaacagctcgttcactccatgttcctgtgcaatctactgcgccgacccgtcttcgagatgttcgatttcgagttgaatctggcccgctgcgtggatcaaatgacgctgtccgaattgggcgtaatggccatgggcttctttaagacacagacgcctatcagaaatccggagctgctaacgcaactctatcagcgattaggcagcgagctggacaccgtggaagacattgtcctggtagcgctgctcaaggtgctgcggtacagcagcaagctgccacaagtggagccgctaaagaagatgttaagcgctctagagtcgcaagtggatcgcgtttccctcctcacgtgcctgcacatggctcttctgggctgtgaactgcaaacgtgcaatgatgcactggtggagcgcatactgctgagattcgagcgtgagttagagactgcccgcctcaaggatatggagcgaatttgtctggtaatggcccttttcaatattacaactaagtcgggagtggaacgccggttggcggagagattgcccgatttgctgcgccagcgtatagaggagatactgcgccatcctcgttgtttctccaactgccttcagtttctcacaatgcgtggtgtttacgatcttgagcttttgggcgtggcactggagccgcgtttcctgaagcatgcgtacccaagcggattgcccgggcgtgagtacttccatttggatgggttcgcacgcctcctggggccggaataccagggagcactggttaccgagaagcaacgacagcagatgggccgcaattacacgcagtacatccccgatcgggacggacgcttcaagctgaataataccgatcgtattctagtggaaatacgggatgcgatcaccatgatccaccgtcccgtgaccttcaagcacatcctgccgcaatacgatcgatgcgatgtagtgttgtgctacgaccgccggcaacggaaggcgttgtccataaatggtgaggcctgtcaggattacagcggtgagattctcacccggaagcacttactgggtgagagaaaggctgcggatgaccagctggtcacagtggttatcgttattgccggctggaacaacgtaatccgcgataaggatcgtttcaccggccaaatggatatgaagctaaggcagctgcggcaattgggacatcagccactggtggtaagttttgctttatcctatgtaagctatattaaaatgaaaactttctcatccttcgaacagtatggtcaagcatatgaaattctctatctctttctattttaattgaatttacatcctttttattcacaagctctctctctctctttctctttttatacgaaacgcacctatttaaatgtaccaattgtgtatttcttcttagactgcgggttgtattattataattatttaattgtctaatcttttcctgcttttttccacagatctattggcacgagtggcgggaactggagaactcagctgaccgccaggactttctgaaacgccgccttagccaaattgcaaaaatttagcaggaaataaaaacggcaatagaattgatattagtcagtcattagcattatctgaacattgtacaggcacaacactacgatctattaattatctagaaaaaaaagcaataattatcgaatatttaataatgaccgcccgcggccgacaactactagcacagcgtcttgctcccggatccccgcaatcggaccgcagcggaccgttcgtcgcgatccattgtatggttgatgccgtcgtcagagggtggcgctcaacgctcgcttggtgtactcgtagaccacgaacagggtggccgtggctggaatggtgcgcaggacagatggcagcaggccgcgatagagtgccaggacaccttcgcgacggactatgtccgctcccacggcgaacatgctttcgttgaggttcttcacctgtatgcgactcttaattacgtctgcaggaaacgtcgacgtccagaggcagacgcctccaatggcgccggcgatcatcgtacgcagtggtccaatatcatctttggattgatcatccctgcaaaggaaaataagaattatgccaatgtaaataactatttaactttgtccaacatctttcatttgaatagactaacgaagatcgagttatctgtccagctaaggattttgttaagatattgttgaacaaattctgtaaatgactaaatataactatactgctaattagtatgataactgaagaagaacgattgttgttcactcgtaaacattaaactcattaatctccttctatggaatttgtttgtactcacctgcggagtaattcacgggttccctcgtagctgccgaagaaaaagaaatatccgggcatctcgcgcaggaaagtcgagctcaatccgcgatagaagcctctgatgcctgcggagaagagattaatcaacggattagaccaatggtagctaagaaaatagcgaagatggacacgtgaggatggggctatcaattaaattcgcattggaacatcaat

SEQ ID NO: 3440 - DNA, 2063 bp, DROSOPHILA
aatatttcgttaagttctcccacttgcgagcactccaatttcttcgttctggcaacgctgcttaccagtcagctgtttagccggcaggtttttcaacgaatgttttcataacgcgttttccattcaaattcaattgaattgaattaatttacaaccaaatatcgctctaaaacatgtgggcaagaacaaactacctctggcgaagtgtgggacgtctgcgccgccaagtatgcacgacgatcgtttcaccagcgcgaatatttgcggaccgagagaatcagttcgcccatggaatcctgatggattctctcaaaccgtatgcaatactgcgtcctcgggactccgcctggcaggatttgcccgcatctgaaggctttatgcggccacagccagatgccagtgctgccgatctctatgcggactttttaggcctggtgaggcactgtaatcgcatggaactgaagatcagcgatagccgctacgaagcctttacccgctgcttctgtgagcagctgcatcgccttacggatgaacaacttcttggatcgcttagtgccttggccgagctgcccgtaccggaatcgcccaaagccaagaactacatggagatatggaataccctggacatcgagtgctgtcgccgcatcgagcgatggtccagtgaacaattgctactcgtgagcgatgcctggtatcgtcttggtctggtcaggataggcgagtacgtgtggctggcgctgaaaaagctcggccgcaagctgcgaaagctgccgccagaacagctcgttcactccatgttcctgtgcaatctactgcgccgacccgtcttcgagatgttcgatttcgagttgaatctggcccgctgcgtggatcaaatgacgctgtccgaattgggcgtaatggccatgggcttctttaagacacagacgcctatcagaaatccggagctgctaacgcaactctatcagcgattaggcagcgagctggacaccgtggaagacattgtcctggtagcgctgctcaaggtgctgcggtacagcagcaagctgccacaagtggagccgctaaagaagatgttaagcgctctagagtcgcaagtggatcgcgtttccctcctcacgtgcctgcacatggctcttctgggctgtgaactgcaaacgtgcaatgatgcactggtggagcgcatactgctgagattcgagcgtgagttagagactgcccgcctcaaggatatggagcgaatttgtctggtaatggcccttttcaatattacaactaagtcgggagtggaacgccggttggcggagagattgcccgatttgctgcgccagcgtatagaggagatactgcgccatcctcgttgtttctccaactgccttcagtttctcacaatgcgtggtgtttacgatcttgagcttttgggcgtggcactggagccgcgtttcctgaagcatgcgtacccaagcggattgcccgggcgtgagtacttccatttggatgggttcgcacgcctcctggggccggaataccagggagcactggttaccgagaagcaacgacagcagatgggccgcaattacacgcagtacatccccgatcgggacggacgcttcaagctgaataataccgatcgtattctagtggaaatacgggatgcgatcaccatgatccaccgtcccgtgaccttcaagcacatcctgccgcaatacgatcgatgcgatgtagtgttgtgctacgaccgccggcaacggaaggcgttgtccataaatggtgaggcctgtcaggattacagcggtgagattctcacccggaagcacttactgggtgagagaaaggctgcggatgaccagctggtcacagtggttatcgttattgccggctggaacaacgtaatccgcgataaggatcgtttcaccggccaaatggatatgaagctaaggcagctgcggcaattgggacatcagccactggtgatctattggcacgagtggcgggaactggagaactcagctgaccgccaggactttctgaaacgccgccttagccaaattgcaaaaatttag

SEQ ID NO: 3441 - protein, 629 aa, DROSOPHILA
MWARTNYLWRSVGRLRRQVCTTIVSPARIFADRENQFAHGILMDSLKPYAILRPRDSAWQDLPASEGFMRPQPDASAADLYADFLGLVRHCNRMELKISDSRYEAFTRCFCEQLHRLTDEQLLGSLSALAELPVPESPKAKNYMEIWNTLDIECCRRIERWSSEQLLLVSDAWYRLGLVRIGEYVWLALKKLGRKLRKLPPEQLVHSMFLCNLLRRPVFEMFDFELNLARCVDQMTLSELGVMAMGFFKTQTPIRNPELLTQLYQRLGSELDTVEDIVLVALLKVLRYSSKLPQVEPLKKMLSALESQVDRVSLLTCLHMALLGCELQTCNDALVERILLRFERELETARLKDMERICLVMALFNITTKSGVERRLAERLPDLLRQRIEEILRHPRCFSNCLQFLTMRGVYDLELLGVALEPRFLKHAYPSGLPGREYFHLDGFARLLGPEYQGALVTEKQRQQMGRNYTQYIPDRDGRFKLNNTDRILVEIRDAITMIHRPVTFKHILPQYDRCDVVLCYDRRQRKALSINGEACQDYSGEILTRKHLLGERKAADDQLVTVVIVIAGWNNVIRDKDRFTGQMDMKLRQLRQLGHQPLVIYWHEWRELENSADRQDFLKRRLSQIAKI

SEQ ID NO: 3442 - DNA, 3268 bp, DROSOPHILA
aacaaaggcttagtccttggtcacttacagtcgttaaacggtattagaaaaaaagacattcaaaaagacagacagacgcaatgcgtaagtttcggttttaacctaagcctgatgttttttactttttaaggggatgtgggctatgacaattgacctttgccatatgcgttaagtgttccagtctgaaatgaatggcagagtaacgtcagtcaaatggatagacaagccgagacaatcgggcaggttagacatggctcaaagtcaaaaaacagatcgcagtggcacaatgccatagcagaaccatcaattttgaaacccaaaatcccagaactcagttcatccatctatcccttgtcaagtcatcgttttggaagctgccggctgactgttgtggctatagccacacaggctcgacatcgccctagccattgtataagccaaacaaccctaaagggacgtaccttgaatcatccttatgtttgtggccccagcctttgcaacttcgcacacgaaagttttagatcattgacgttttgcgccgccggtcgctgtcgctttgaataaataactggcgtgacgttatatacacacgtactaacgggtttcttacccccgtcatctttgacattctaaccgtctgttggattgtccctgttcaatcctgacgttgttaaccatgaccaagtattgtttaaaatttgcccgacttctacgtcacctttccgtaatgtagtacctctgattgctgttggaaatagacaaggctttatattctggtttgaaaactacctggcatgttgggtaatataacaaaacggaacaaattatctcgactatcttatacccatcatctctttgataatataaggatagttcaattttctaaaattaatatttaaggatggcgttcgagacctagagtaattcaagttgtattattatgtaatatataccctttactgtgtgctaattactaatgcttcccccgtttccttaatcagaccaccctatgcctgttggatacacaggccgcctgggcaaaaaagctaaatgcaagtcaagcttttgacgacacgtggaacacagcatccgatttggaaaatgaactggaagtaagtagttttggcttttctgttaacactgcacagaacattaaatccacaaatgcaactgctcattttcagcaacaaaagcgatcgaaggtccaaagtgcaggaggaggaggtggcgcgggcggtggacctggccagtggtcgtcctggtcagattggtcaacctgttcgcgcacctgcgacggaggcatcatgcatcaaatgcgtaggtgcggcagtcctggcagttgtcgcggggagagcacccgctaccgcatttgcaacatgcagccttgtccggagcagcaggacttccgctccagccaatgctccgcctacaacgatgttccatacgatggcaccctgtacaagtggactccgcattatgattacgtcgagccctgcgcgcttacatgcaggtgggtgtgcgttgtgcgttgcttataaaaatggtttgctatggagttctaaaatcttcagtcagctcaaacactttgccgcccattaagcttaagtctccaatgattcaaacagagtcggtgctggcatgttagttatggctaaactatactttaagctatttgcttgcattttgatgaataaaccgaaagtttgcaattaaaaataatgggagaattaacaaaaatttgggaattgtctcttccaatcgacaatgtttattcggtcttatggtctacgccttattacattgctacattaagtgactacaatataaactgactattttatttattcaaatattatatatagtattttaaaagtatttaaataattacgaatttttttaacacaactgttttgatattggtgggcatgccagaaactagtatagagagtacaaaacttcaaaaatgcaaataaacataatggaaaattccaacggattattattccctgattattattagtctttcttctcgcaagcgccgcattcccatccgataagtgaataatcataatgcaaatattttccattcgtagaggacatcctgcacatcttgtcgaagacatttcgcgggagactggagacggcaatgcagaggaggcggagcactacgacgagcagagcgtcattgtgcaattgtctgcgagggtgcaagacggaacccgttgtcgttccggcagcctagatatgtgtatccaaggaaagtgtcaggtgagacatatttgggcacagtttattgaaaacaaaagtcggggcgtcaagacgtcaggcagtcgatccctccttcctcttcaaatgccgcccatcgccttagcgctatgtgataaattaggtacacagtgctgtaggtggtcctgaagaattgggcgtaatcacgaagatgctacttactcttacaaggccttaccgatggaaagggcttttgcgtatttgtgcattatgcactatagacaaaatggtacctttttgtcgccaaaattaataacttcaaaacggagagagatatttagatatttctgttttttgtattaggttacactaggccatatcttttgtgataccacaaattgtgggcgtggtatttgcatgttaaattattttacaaacaataaccaccaaaataataaaaaaaataatgaaaagattcagcaacagccttgtttgacttccttttagctgaaattactctactttggtaaggcatttgggaacctgaagttgcgacctaaaaagtttaatatataacctttatattatgataaagttaggtgaatatcatgttatcatgtgtttaaatctctagttaaacagccacaagaaattcaacaattcaaaatcacaaacaccagcccctttcgatcccattatcacttgtttaataacaacttttccttgtttcttttttattgatttaaaagcgattgtgttgcttgtacggcactccgaacagctcttttaaacagctgatatcttaaccgtacgtgattttttaaatttctggcatgcaacaataaggtctaatcttatactaacataatggcataaaaaacttagtattacggacttttaaaaaatggctttttggccacaaaaaggtaccattcagcctatagtgatatgctccggcgtatacataaatcataaggagggcaaccaagaagagtgggtagggtaattcttgttttgctgctgccctcaaatttaaactatt

SEQ ID NO: 3443 - DNA, 613 bp, DROSOPHILA
gaccaccctatgcctgttggatacacaggccgcctgggcaaaaaagctaaatgcaagtcaagcttttgacgacacgtggaacacagcatccgatttggaaaatgaactggaacaacaaaagcgatcgaaggtccaaagtgcaggaggaggaggtggcgcgggcggtggacctggccagtggtcgtcctggtcagattggtcaacctgttcgcgcacctgcgacggaggcatcatgcatcaaatgcgtaggtgcggcagtcctggcagttgtcgcggggagagcacccgctaccgcatttgcaacatgcagccttgtccggagcagcaggacttccgctccagccaatgctccgcctacaacgatgttccatacgatggcaccctgtacaagtggactccgcattatgattacgtcgagccctgcgcgcttacatgcagaggacatcctgcacatcttgtcgaagacatttcgcgggagactggagacggcaatgcagaggaggcggagcactacgacgagcagagcgtcattgtgcaattgtctgcgagggtgcaagacggaacccgttgtcgttccggcagcctagatatgtgtatccaaggaaagtgtcag

SEQ ID NO: 3444 - protein, 178 aa, DROSOPHILA
MQVKLLTTRGTQHPIWKMNWNNKSDRRSKVQEEEVARAVDLASGRPGQIGQPVRAPATEASCIKCVGAAVLAVVAGRAPATAFATCSLVRSSRTSAPANAPPTTMFHTMAPCTSGLRIMITSSPARLHAEDILHILSKTFRGRLETAMQRRRSTTTSRASLCNCLRGCKTEPVVVPAA

SEQ ID NO: 3445 - DNA, 3410 bp, DROSOPHILA
acttggtgagagtggtggcaaattcagggccgcgtgccagcacgaagctcttggtggtcgtttcctggaggagcttgcgtttcttgaagtcggccacctccttggcaggcagctggtcaccctttcccagcgccacctgctgcagttgattgcgcaccacatccgtaatggtgtccaccttgcggcgcaccagcggcggcgtgacgctcttgtccaccaaaatccagccgtgcgacatggctttgctaaagcccactttggcatttgcgccaccggctgccattagagccgcctgggcgattccctccggcggaactaggtcgtagaccagtgcctcatgactgccattctccacgacggcgcgaccctcgtctgtgaggcccaaactcttgtgggtgaccgtttccgcggtgactagttcgccatgcgcctgtatgctcttcaatgagcccacaatcttctggtgatcctcggcaaagagtgcggccaggtccagtgtgtccgccttgtcggtggtctccaaatgctggagaatgcgctccgtgagatcgggatgcatagctggcggttcaatggttgtatctttcaaggaaattcggaatttcaataccggaatctcgtgttgccacaacgcagcctatcggagctatcgttcttcgataactgcgtctatcgttcgaaacgacgacggtggctaaaaaatagccaataagcttaaaatagctataattatatctagatattggaaatttgtataaatatttcagcgaatagtaagatatgatacttttgtcactaacatttcaaaagtaaatgaaataataataaagatgtctcatataaagaactggtttcaactcggtttatttttccgcttaccatcacagtggcacctccaataaaaacagctgttgacgccaagactaaaagtttgcgttccaattagaacggcgaatatattcgaaaaaaggagcaaatcctggggagcaacggccaggtgggagccgcaatcatgctcaagtccctcaagccggacacgtacgccggaatggcgaacgccaagtgcggcgagatctacttccagagcctgcacagcttccgcatcgactgtgcgttctgcgagatgaagagctttgtgttcggagacttcctgctccacgtccagaacattcacttcgagaacggcctgctgaagacggaggcaacggacgccggtgcgaatctcaagcaggagcgggatcgtgagcgggagcctaactcgccggtgcccattgtggcgcaggtgaatccatttgcctggtacgagattggtggcgatcacaacgaggacagcgacgatgagcgcgttgtcctggaaaagcaggatgaggacgaagatgagcggccaggcagaagcataatcaagtggcaggaccatcagtcgctgaccagcgaatctctacgtcaagtccgagccctcaaggtggactacaaggaggaagactccgagcaggaggagtgcggcatggagctggatctggacagcgaaggcaggcactctgccaagattccgcactcgtgtccgcactgcacaaaagtttaccagagccgcaaggtcctcgaacgccacataatgcgccagcacaaagacactctctcgccggatgtggacagcgaggacgcggactacgagccgcccaaggatgcgcccgtcaagtccgctgcccaggagtacaagtgcgagcactgcggcaagatctaccatggcaaatacagtctgcgtcagcatttaaagcgggatcatgacaacggcgaggaaggaggctccgccatcttcacctgcctggaatgcgaggcccaattgccgcgcctgcgcctgctggacgagcacatggtgcaggcgcatggcggcgctgcctgtgtggtttgcgggcggcgctacaagacgcgacacgaactgaaacgccaccagctcaagcacaccagcgaacggaacgtgccctgcccgcatcccggctgcggcaagcgcttcttcaccatccgtcatatgcgcaatcacggcaaggtgcacacggagcaaaagaacttcgtctgcgagagctgcggctacagctgccggaacaaggagacgctgcgcgtccacatcaggagccacacgggcgaacggccgttcgggtgtcaagtgtgcgacaaaagattcccctcccattccggcctgcgagagcacatggccatgcattccacggagcgaccgcatgtgtgcagcgtttgcggtgcgaccttctcccgacagaaaggcctctaccaccacaagttcctgcacgcggacaccaagcagttcgtgtgcaagctgtgcgggaatgcctatgcccaggccgccggtctcgctggacatatgcgcaagcaccggaacgacgagctcaacggataggatccggatcaccgaggtcgtagtctaagttgtacgttttgtatcttccaattccgacgtttaagttcaggaactcaggcataggctatatataggattaccatagaaatcaatggttttttgcattgctccggcatggagcgggtatcatgtgactcttcggtcctcgtttcacgggtttccatcgaatttatttgacacgcactgtaaataatatccctagttttagataaactgaaagtttgttaatctgtttcgagtgaacttagtttgaggcaaatttaattggctcgattgtaagtactaagactaaactacatttccatgaattttctaaactaccaactcaaataataactaaactttgttaaggtttaaactatacattaagcacacaatgcttccaagaaccaaatcgaacgccgtaatctcggcaaccggatgtggctagtattcgaatggttaacttttttgtattgataaatatacataacatgaatttgattcgcaaaagagagcccgcgtttaaaattagccaagcgatttggtacctttgacagcaattaatcggtcgactgctgctaaagcggccaaatgccaagatggtattggatggggtgcgtctaacaatagtgccgacgattagatttggcacacgcggaccgaccatgtcggcggaacgtccagctgccagctccgataatcggcgacttatgtgcgagttctgcggctatcggacgcgcatctattggaatctgcagatccatcgtcggcgacacaccggcgaaatgcccttcagttgccagcaatgccaggcgcgtttcccggccagctatcagctgaaaagccacttggagcggcacttggacgccggcgagcgacgccagcggcacatttgcaccgactgcaacgtgggtttctccagttcgcgggccctgtaccatcaccggacgctccacgaggatgggaagcgcttcaagtgctcccagtgcgacaagtc

SEQ ID NO: 3446 - DNA, 1410 bp, DROSOPHILA
ggagccgcaatcatgctcaagtccctcaagccggacacgtacgccggaatggcgaacgccaagtgcggcgagatctacttccagagcctgcacagcttccgcatcgactgtgcgttctgcgagatgaagagctttgtgttcggagacttcctgctccacgtccagaacattcacttcgagaacggcctgctgaagacggaggcaacggacgccggtgcgaatctcaagcaggagcgggatcgtgagcgggagcctaactcgccggtgcccattgtggcgcaggtgaatccatttgcctggtacgagattggtggcgatcacaacgaggacagcgacgatgagcgcgttgtcctggaaaagcaggatgaggacgaagatgagcggccaggcagaagcataatcaagtggcaggaccatcagtcgctgaccagcgaatctctacgtcaagtccgagccctcaaggtggactacaaggaggaagactccgagcaggaggagtgcggcatggagctggatctggacagcgaaggcaggcactctgccaagattccgcactcgtgtccgcactgcacaaaagtttaccagagccgcaaggtcctcgaacgccacataatgcgccagcacaaagacactctctcgccggatgtggacagcgaggacgcggactacgagccgcccaaggatgcgcccgtcaagtccgctgcccaggagtacaagtgcgagcactgcggcaagatctaccatggcaaatacagtctgcgtcagcatttaaagcgggatcatgacaacggcgaggaaggaggctccgccatcttcacctgcctggaatgcgaggcccaattgccgcgcctgcgcctgctggacgagcacatggtgcaggcgcatggcggcgctgcctgtgtggtttgcgggcggcgctacaagacgcgacacgaactgaaacgccaccagctcaagcacaccagcgaacggaacgtgccctgcccgcatcccggctgcggcaagcgcttcttcaccatccgtcatatgcgcaatcacggcaaggtgcacacggagcaaaagaacttcgtctgcgagagctgcggctacagctgccggaacaaggagacgctgcgcgtccacatcaggagccacacgggcgaacggccgttcgggtgtcaagtgtgcgacaaaagattcccctcccattccggcctgcgagagcacatggccatgcattccacggagcgaccgcatgtgtgcagcgtttgcggtgcgaccttctcccgacagaaaggcctctaccaccacaagttcctgcacgcggacaccaagcagttcgtgtgcaagctgtgcgggaatgcctatgcccaggccgccggtctcgctggacatatgcgcaagcaccggaacgacgagctcaacggatag

SEQ ID NO: 3447 - protein, 465 aa, DROSOPHILA
MLKSLKPDTYAGMANAKCGEIYFQSLHSFRIDCAFCEMKSFVFGDFLLHVQNIHFENGLLKTEATDAGANLKQERDREREPNSPVPIVAQVNPFAWYEIGGDHNEDSDDERVVLEKQDEDEDERPGRSIIKWQDHQSLTSESLRQVRALKVDYKEEDSEQEECGMELDLDSEGRHSAKIPHSCPHCTKVYQSRKVLERHIMRQHKDTLSPDVDSEDADYEPPKDAPVKSAAQEYKCEHCGKIYHGKYSLRQHLKRDHDNGEEGGSAIFTCLECEAQLPRLRLLDEHMVQAHGGAACVVCGRRYKTRHELKRHQLKHTSERNVPCPHPGCGKRFFTIRHMRNHGKVHTEQKNFVCESCGYSCRNKETLRVHIRSHTGERPFGCQVCDKRFPSHSGLREHMAMHSTERPHVCSVCGATFSRQKGLYHHKFLHADTKQFVCKLCGNAYAQAAGLAGHMRKHRNDELNG

SEQ ID NO: 3448 - DNA, 3265 bp, DROSOPHILA
ctgcagcttactgcagtgacgccagccaccgcggtcaacggatctgctgattctagcgtctacgacatgcccagtacctcggccacggccatggctcagttggagactcaccaggttacccccacagcagcagccagctcagcgtctccgacgatgcctgcagagaaggtaaccattgaggatttgggagcggacgcagacgaggatgatataccatcgacggccacggaggcagttagcattcccaactccgatgccgactttgaggagaactcctcggagctgggcgaactaaggaagcgccgtttgaagttccttgaagagcggaacaagtctgcagccactaatgaacgcacgacagcggaatagacgccctacaatctgatgtcaacactccaaaacaaaaaaaaccggcagcgacaactctcatcccaaaaaaaaaaaaaatgtgcttgcgtttatcacacttaattctcttggctggtattgatttcctttatacttcgctcttcatctgctgcaccttgtccttgacttctgttattttttctacgatatgggaatattacgacgatgacgacaaagacgactacgatgcctccgacttcacacactggaacgaaggatctgaacgtgaaacgcgaaatgcggcatccaaatccaatatgtagcaatacgtattgtgtaaaaactattttagagatgggaaactgatgatttgtatttaatattactatatgtgtataattaatgtgaaatataattaaaacgaaaagaacgaagaatgaattaagcttgtgcgacgaaaacactaaatagacctgctcctaaatttgtttctcaacggcttttagagccgcaattatactcggaacaggtctgagtctgagctacatactaaatgtaaataaattaattgacgcgtacactacacatagataacaacagtcgatcgacgagttccccgggcgtgaaaaatttgcatctggacgtcgccgcatcaaattctcgactccagctcccggaactcggcaggatccgtgaaacgtacggtcaaaatatagaacagtgtggggaagggcaccaagcacataaaggcatagtggtaattcagggaggtgaggccgtaggccaacaacatccagtgcacagctgggaaagtaagctgctggtatactttatgtatggtgaatgcgcactttgcttacctatgatgaccacgttttttaactcccacaccgacgagtgaaccaatgcctttagggtttgatccagtttgagggaatagtggatggcattggctaccatggatatggccacgctaaggtacggaaaggagtaatctgaaaaagaaaagatctcaagaccaaaatattagcaagcacttaagtactcacagatcaacccacatcctaacgcatggataaaggtgagcaggggcaggaagtaaagagccgagtaaatcggcgccttgcttctgccccccacatccataattttgctgactagcgggcgtatgagaaacatgttcaccaggcacagaaagtagaaaaccagcacgatggtttgcctggaaattgaacattaaagtgactattgtgaacacctggagccttgggtggctgggtcttacaatgggtaaactgcctcctgggtgcagtagactcgtgcctcataattggggctggggttgtaaaacaatgtgtaccagtcagtaagttttcgaacatcacaggcgtagaggcgcagctcccacatgggctccattagcaaggtggcgaggatggcagatatggcaacctcaacgaaagcgctggccgtcaagatcagctgcttccgcgaaaacctatgtgaattcactaagtaagttcttcttccagtttgattagttcactcacttgcgatccttggcgtccatgtcaatgaaaaagcagtgcatcataagtggcagcatggtcatgaatcccaggtatagccaggagtacgtgcttaactcgtcgcggcatggagagcatgcgtaactttggttcacctgaacaatataaaagtaaattattttccaggcgccgttccgaaggatgctagaacattaacccgagatcctctgggacagaccccgcagctgctccagctgttgtttcctagcggtgatcgcccacagtaggctcctgggcagcgttccaacgcgtcgtacattctcatgaaatcaaaacaattacttcgtattgtatattacattaaacaaaataaaaacaatactcctatcgatatcggacttatcgttatcagtaggaccactgaataaacgaataggttgttcgtgcacttaaattaatactaatttataaaatgataatacatcagaagcacatgcgaaatgtattaaaaataaggaaattattttctacagattatataatgggccctaagactgctttctaatttgatcaaattaataatactatatgtttttatatatttatttacaattaaacatgactagtagagtgtacattcttacagtgcatttcaatgatttgattttatttgaaatcccaattgccagaaatttaaatttagggtcccttatatgtaccacataaaccagttcgataggcgcgcttttggcatggcctgataactctggtaaaaagcaccgcgcgaaccggttcaattcataactagttcgcccgaactgcacaaccctagcaaaagaaatagcttaaatataatttatttaacgcgaattggacaacgagcgggtagaaaaaaccctgtggccgcaaccgcgacgctcgcaggatacgcagctcttcgccgtcgggcaggcaggtaaaaagcaatggcaattggagttgaccgcagaacaacagcaacggcagacgccattttgtctattggccggctgatttgtaagctcaatattcgcgaaatagttaccgcgactagcttcgagtggcgcagccaagtaagggctccccgctgtccagagcaaaggcgaaaggaagagcaatcgcccattttgaggcctgcgaaaagttgggactcggtcgtcagttcgctcgattccatttgcgaaaaataaatgtacgtgcgcgtgaggaagtgtgtgtgcgcgtgaaaaaacagtgaaaaataataaaaagccgcactggccgccgtccttgggtgacttccgttaatctcttacaacttttaaagctatagaaagaatgtgagcaatttaccgccctcgacacacccaatgaaccgctaattttggcat

SEQ ID NO: 3449 - DNA, 978 bp, DROSOPHILA
ataggagtattgtttttattttgtttaatgtaatatacaatacgaagtaattgttttgatttcatgagaatgtacgacgcgttggaacgctgcccaggagcctactgtgggcgatcaccgctaggaaacaacagctggagcagctgcggggtctgtcccagaggatctcgggtgaaccaaagttacgcatgctctccatgccgcgacgagttaagcacgtactcctggctatacctgggattcatgaccatgctgccacttatgatgcactgctttttcattgacatggacgccaaggatcgcaagttttcgcggaagcagctgatcttgacggccagcgctttcgttgaggttgccatatctgccatcctcgccaccttgctaatggagcccatgtgggagctgcgcctctacgcctgtgatgttcgaaaacttactgactggtacacattgttttacaaccccagccccaattatgaggcacgagtctactgcacccaggaggcagtttacccattgcaaaccatcgtgctggttttctactttctgtgcctggtgaacatgtttctcatacgcccgctagtcagcaaaattatggatgtggggggcagaagcaaggcgccgatttactcggctctttacttcctgcccctgctcacctttatccatgcgttaggatgtgggttgatctattactcctttccgtaccttagcgtggccatatccatggtagccaatgccatccactattccctcaaactggatcaaaccctaaaggcattggttcactcgtcggtgtgggagttaaaaaacgtggtcatcatagctgtgcactggatgttgttggcctacggcctcacctccctgaattaccactatgcctttatgtgcttggtgcccttccccacactgttctatattttgaccgtacgtttcacggatcctgccgagttccgggagctggagtcgagaatttga

SEQ ID NO: 3450 - protein, 242 aa, DROSOPHILA
MLPLMMHCFFIDMDAKDRKFSRKQLILTASAFVEVAISAILATLLMEPMWELRLYACDVRKLTDWYTLFYNPSPNYEARVYCTQEAVYPLQTIVLVFYFLCLVNMFLIRPLVSKIMDVGGRSKAPIYSALYFLPLLTFIHALGCGLIYYSFPYLSVAISMVANAIHYSLKLDQTLKALVHSSVWELKNVVIIAVHWMLLAYGLTSLNYHYAFMCLVPFPTLFYILTVRFTDPAEFRELESRI

SEQ ID NO: 3451 - DNA, 17384 bp, DROSOPHILA
gatctcaggaactataaaagctagaaggttgagatgcagatgaaaggagtaaatcttgaatttaatctttaattaattttaccaattctaaattgttcagacttcctgggcagacattttttcaaaattaaaaattactatatatatgtaatattcccatagtatttgaaattcgagtaagcttttcttaccttcttccgcactggatattactttgctttgtgactcgttataacctgctcgcctctagacagaatggcctgagtatgaaacagcggcagtttcgttgccaccgggtgtctgcttaagtttgttccttagttcccattctcacctcacgtgcttccttctcctgttaccatgcattttcaatgtgtttttttgtttttttgtacttctactttattaggctcaacaagccaaaacctcttttacgtaggggaacttatgaggaccgcttggggtgttaagtttttacgttactcaattgatttgtttaaagactttttctgaatggtatttaacgcctgctactgttagatttctttaaatttgggacaaccttagtgcaattaagagtaaaaggtataacaagttaacgtttatatccagtaaaacgggcaacgaaagaagaattatattgaatttataacaatgaagctgcggatgcatcgttacgcatacgccccgtggcacgacgcaacgcagacaatatgggaattggcatttgtatgcttgtaacgggcacgtggcactgcgatgtggttaaatgactgtgtgtgaagaaggggaatgtagggagtataggggactttagttggatttggcttttcgtttgtgagccacgtcactgaaaacatttgctaaggagaagcaaattttgtcatgttgcggctcatccattgtgatggcgaaaagaggcgtattgaaataatttaaaatgctcacggaagccacacctccctcttttaaatcacagtgttcggtttcctgcggacagggtatacaaatgcgaggcgtcgagtgcaaatcgacagacggcagcctgagcgcgaagtgtgatccacttacaaagccgggcagcatgcagcagtgctccaccggaattcattgcggcggatcgttgaacaaagttggtggcaccatcatcgtaggcagcagccggtcacttaacgaagtaagtccgtcagaaagcttagcgactctttttcaatcggctgctaaaacttccaacctagcgatcggagcgacagttggacagctcggatgcagatgaagacaacgaggacgaaaatgatgagggcgatgatgtggacgacctggaatcgggacaggatacagatgatggcgaaggattgtcatatgctgatcaacctttgctttacgctcatcgcacacagagtcgactgaatcaggaagccccagatgagccgcgcaccatgcatctaatgaacggaaattcaaacaataatttcaatcggggagaggacgagtcagagggaccatcacttgatcccacgtgagtatggggtgatttattattttaaggtcgattttcttgagtgccaggagtgctagtaagatttttccaaattttgttggcatagcgatagaaattggaaatattttgtttaaacttgccgaagttagatttttctaatatacaactaaaaatttgtgacctttagtatcattcattgattgtagtatcaatattgtacatgcttaactggtggcacgccttggtgtgattacttgtgtcctttgggacatgagatactttgcctacttggggttttagattggagcattatcttaaaggcaccacttgacatattccaactgtaaatttggctttgagcattattgacaccttaaattaagttaaaagagttctgaaccagaactggtgtagattgtacataagttcggcgagtgtccctaatgacaactaacgtgcacattgtatttattcgaaaacgatacaaattccagagttaagcctttccagacatattggagactcacctcaacaggaaagtacatattgtagtatacacagtatacatataattatttagcaaaacaaaggaaatcatttgtattaaatggtcaaagtcaagtgcttttatccgattattgccgcgtgcacatttctcaggcgatgtattaaatgacagctcatactatagatccctgttataccacttgattacgtaccaaagtggggtactaggtccatgaaaattgcgttggcgatttcaaatcttgaatcttgccttgattattattattattactagtatttctggcgatttgaatatttttaaaaatgaaaaaacaaaataaaaattttctaagcagcgagtttaatcgattttttttctaatttcttcggaaattagtagtattattaatataaatgcagaatgttgtacggaaagtagtatgtattacttttctccgataaaatgatacaatataataatttcataatatcttaaacaccgacgtgaccttttccaaagagtaacaaaaatgcggtgtacttatagttttccaaaattttcgcttagcttaaactgtgccaatctggcgccgccaaaaaggcgcgacattgtgccgccaccaaaaccttggcctctgatgccggttttgcaaaaaaaaggccgtaaaaagcttagagatggcagcgcgccagtcagccaaacaaagaaaaactagagaaagaatatcctagcctacgcgccgcgacgattacgaaatcagcactgagaaaaaataagaaacaaagatctctaagtaaatgtaataaaataaatcaatttagattttgagtagcacggcctataataacaaaaatgtcataaatgtaacaggcgctgaaaattcagtaacgccgagtgataaggaaaatatgaaaataaaataaattgatgcgtttttttgtacacactctctcagagagaacactatattcgcattcctcgactatcagataccctatatctaactagcaggagtgtgaacaagaagtttcaacattttattattttttgtccatggtccatggtattattttttgtctgcgcagcctggcccacttagggcatcatgctaagatgtctacatccagatggcaccgcatcgccattctgtccagcggatttgttagccgtattttgtaaccattagggcggtggaaccgaacggaagcttttccgactataaatatgtatatatttctgatcaagttcaaccgccgagtcaatctgacgatgtcagtccgtatcaacgcttcacggataacggaaactaataaagctagagatattatatctctagattagatattagatatgaagattccagacgcatatacgcagggcaagtatattatacccacacccaacggcttgagccagagccggattctaaagcgtgcacccgcaagtacaggttcccttcccttccatcaatttatttccttacacgttacaaacggcatcatgtcttttaggtgccgacgggcttcagcgaggttgttgtcgctaagcgcaacgatttggcgttgtaattttttatttactatattatttgttggtttttatttattaaagtttttagagtttacgagagttttcagggtataatctcttagataaacgaatatttaaaattttttaaattgaattttgtagtagttttattttattttaacttgttttaacttcttgtagtttttatttcgaataataagcctcaatgcttaaagaatattgtattgtaaacttggatccttaagtttagaagattcaaagagagcaggcaaagctgcttaggtcaggctttaggatttgtttacaagaacggctaagtgctgtttattagaatgtttattggaacgtatactgcgcatacgcatacttcattattcgaaataatgaattggccggtgtgggtggcgcaaaaatacgtcactatatactatatatatgtttatacccgttactcgtggagtaaaagggtacaatagattcgttgaaaagtatgtaacatgcaaagggaagcgtttccgaccatataaagtatatatattcttgatctggatcaatagccgcgtcgatctagccatgtccgtctgtccttttcacagttttgttagtcgtgtaaatttctatcggtttagcaaaaaaactttgaaacgctcactctaacgaccacaaaaaactgtcgcgcccacacttttaaaatatgatttgatgtttttcttgttagtctcgtaaatttctaacggtttgccaaaaaactttttgtcacgcccactctaacttctaacgtttttatagtctactatagcgcgctctgttgtataaaaatgtactattggaaggccgattcattaatactgtatatattttatttatttgatgattaacgggtatctcattcttcccagcggcatccttttttgatggtataatgtgaaattacctaaatatttatttttgattttctttttttattatacacagctacatcaaggacaatgagtggtccccatgtagcgttacctgtggggaaggaatccgccggcgcacctacaactgcaagattttccttgaatactctcgaacggtggccaccgttaatgattcgttgtgcgagggaaaaaagccacatgacgaagtagagcggtgtgtggaggatccgtgcatgctaccctcccacggctttgacgaccagttcccccgtgattccattaaagtgggtgtgtcggaaccgggtaagacgtatgtctggcgggaacagggatacacctcctgcagtgcctcctgtctcggcggtgtcgaggaactgataatcaactgcgttagagaagataatggtagggtggtgtcgccctttctctgttccccggaaaccaagccggaggccagggttcgtacctgcaacgaccgtccctgcccacccagatggaactactcagactacacaccctgctccaagagctgtggcattggcatcaagacccgcgaggtgcagtgcatccacgaggttacgcgcggaggggacaacacaatggtggtgccgaacagtatgtgcccacagccaccaccagcagatcggcagtactgcaacgttctcgattgccccgtacgttgggaagtcggtgagtggagcaagtgctcccatacgtgtggctatgggtttaaggatcgcaaggtggagtgcaagcagataatggcgcaagagcacaagatcgaacgacccgaatcgatgtgtccgagtgctaagccggcggacaaaaagccctgcaatgtgaagccctgcccgccggaagatcccaagccagtcatccagatcaacaactcaacacacatccagcacgaccccaagaagaccaagatcacccttaaagtgggcggcgctggacttgttttcttcggcacccaggtaaagatcaagtgtcccgtgaagcggtacaaccgcaccaagatcaagtggagcaaggatcacaagccgctgcagcgttcgcgaaagtacaaagtgtcgaagaagggagccctgcgtatacttgatattacgtttcgcgatgcaggggtgtactcctgccacgccggtctcagctccgcagaaataagcatcgaagtgaaggccaagccaggacagcagattgaggagctggaacaacaggaaactggttagttatcctatctggttttgatatactcttttggctaagtaacgcgtttatatcgctttttcagaacgattggtgcgtgagaaaagtggcacagaggctctcacctctgcggatatgaagtccgctgatggaactgggacttccactgcggtgggacctaatagccacgttaacgggtaagcaagcaatctgtcatggatcagtcggcaaagcttttttttttataattatgccctacttgtagagtaaaaggatatactcgttttgttaaacagtaacttacagatagaaggaagcctttccaagcatataaaatatatctggtcatgtccctcagcctgtgtatcacaggcactataaaagctagaacgttgtgactaggcaggcagattccagattggctggttggttttgccaatttcttcgtacttccactagataagtaatgggtatctaatggtcaggaaactcgaagagaacacgatgtggttggtagatagtgcaagaaatgaatagatgtcattcgacacaatttaatttaataaaaagaacacataaagggttcagctagtggaaatgtgaacgcgaaatttcatagtttctctgggatatcgatagatattgggcaataaaatacgaaagttcaaaagtgtgggcgtgcccgttttgggcgttttgtaggtgtaaggaggggcgtggccaaattgtttttagtataccgattgaaattcaaacaatataactgagaaaaatcaaaacacttttcaaaagtgtgagcgtggcagttttggtctgtttgtggacgtttttgcccaatcgatagaaatgtacaagactaataaaaatatgaaaaactataaaatgtcaaatgtgtgggcgtggcagtattcctgatcaaaaaaaaaaaaaaaaacgttatatacttttcaacgaattcagtacagaactttacgagtaaaggatatagctagggaaaaaagttttttttttgtggatttcccgatatcaagtctaacgacatggcttaaagacactagaataattctagaattctagtgtctttgcatttaccaagtaaatattttcagaaagcgtaccaatcgattaaattctttatattgtatttatatgtagacaagtaaaaaaacattttttattgcatcaacacttttttgatattaaaacttttggatgttgttttttacttagtcaaaagggtttgactataaaatatacacagggtcggcggtaacggaagcaaacgtaactattacatacatttcaaaaaaaaaagttttgcagtagttatacaaaatctgtaaaaaagtatttacatacaaacagattttcgagaaaatatggttacttaaatggtttgccaaatggtttgtacctcttaggtcagggtcacaagaaaagttggcttatcgtctaggttcacgttacttaatgaatgcgtcatccaagtgttgttgactggactttatgcaataaaattgtaataaccttttataaccgaaaataaaaaaataaataacctaaaaatgttgtttgtaaacaacaacaagacatattaaagccatacggcttgaagggtttaaacatattggttatattacatattacatacctaatgaatgtaaattggtaagtagtaaaggaaattcattttattttcgacgcaatcatttacttttcgttccggtcttgtttgctttctacaatataaagaaataattaccattttaaattaatattaatatatttaatatgttgacttacgttattttttattatttcttgttatacctttcaagctgtattgcttttaatataccttctatgctcgaaaactatagttcagaactgttttaaatattgcgatctcgtatatacccacttggccttgtgggttgtgcacggaaattcccatttgacatcttttacgtcaaagactgagctgtaagcctcgtctaatagcgtacatcttatgccgctttcctccacatttttccagttcggcacaacagcatggttcgcgtcgcaggcagcagcagtcggagcgattgcagaacgggagggaacggagccggagacccaagtccgatggagttcagcatgcggatagcagcattatggaagacgatgtgagtattggaaacgttatgattatcccactcgatcaacgtcattgccgggcttacgttttaaatatgttggaacgttgccccctttaatgtttacacaatttcgtcgtgtatgcactcaagtcggtttcttttgtcccgtgtcaacatcttcgtgatttcatagttttcctcatataaacgaaagaaatatctttgccaactgtcagatttttatgtggctgtctctgtatctgtatgactatatatatgaccatatagagataacgtttgcgtgagcgtaaactagactacaacaaaagctgaggtattaattggcaaaactttcttgctgtgtcaacctggtcaaatctctgtttgtctgctttactacttcatactcgtatattgttgtataaatgttaaagatatttatgcagacgtttatgtaaatatatctataatacatttgtttccgaacttaatgcattcgctttcaggttgaaccgttttaacagctccacagtattcccccgttcccattaacaaacctgacttcatctcgcccagcacaatctcccataatatattacgctcatatccataactttaagtcgaaacatattgctaataaataacgccgcacttaataactattctcgccatatttctttcttaacccaacccaatccccgtccaatacatatatatctacctgtgagggtggcatctgcagctttcgcaattagtgcaatccgaggacagaataccacagccggcgagtgccagtagcggcggtagtcgcaccaggacgctgctggctatgccatatttccaggctctgcttagcaatctccaggtgagacgcatccctttgcacccccagccttgcttgattcgattacttcagtatccggcaatactctgtgcgccatatttcgtttttatttgaccaatctcgcattttgatggcaactgtttttgtttagggtcatttcgttcattcgatgttttcggtacatttggtttgtttgctttgattgaatgaattctgcagtgcacacacattttggtatctgtaaatcacattaaatacatctctgtaaacccaccgcaaaaaaattatagcacgtcaaattttaaatacaccattcaatgcactacgttgtacatttttatttattgatcgacagatggtgcgactgtttaatcaaaatgtatttatttgtatgtgaaatgcgataaaaaataactttaataaaatctaacgttcagcaatgaaaaaacagtgaatgctttctaacgaaataaaacaaattcaaattttaccgggtacaagagagttaaccgccaattcgaccaaataaaattattaagccttaagtgatatatatattataaacacgatatgttttatcaaaggcttggcgtgctttcaaattatttttacgattcgttctgtgctttttagtgatgtttttatgtttcccactcttaacaataacttaccaactttgtctttctattttgaaaatcgtaacataaatatatttctttactgttccgttattcggggccctgtgaaaatattgtacaacacatacaacatctaaaaataacactacgggaaccattttcgaatataccgtaaacataacaaaaaaacgtaggtaaactttatacaattaccaccacaatgcctgattccactcgaaaacgagctttttactccactcccagcgcgtaaacagtttatctgaaactttatattttcttagcgttgaggaatttaattggtaccaaataattttaattacgaatttttttataataattttctcttctttctaataatctgaaaagagagaactttttgcgcgcttgtcatttaaggaatgcttatcttttgttttttgcattttttataccctttttttataattcccctgtcgttattatatataattaatgccactacttcatttcagtaattaatgattgtagaatttgtttatctttatcgatatgtgtaaaaacatatgttttatgggaaatgcattttatgttctatgtatttgttattttttaaacaaacaaaaaacaacccttaaaaattgtaattctgttctaattaagtgaagttcggtacttacaatgatcagaatatatattatttatcaaatatttagccacgtcatgaaaaacatcatacccagcttcagtcttaagaataaataacatttttatcggaaagtttgttttggtttttcatccttgcacgatataaatgcataagtcaacatgaatatattgatactttttaaacacataatttacaaaaataatttaaaaaaaaaacttatatttatacccaagctgatcgttagcttgctatagttttatatgccggcaacgtacattagtgtaatcggcaactgcccgtaaatgtttctgagctggctgtgccccaaactctcttttgttggtaaagccccatcactgtgcaacattttccgctttacgctttccgggtctgaatgccaattacaatattatttctcatatattctcacaatatgtttagtagcgccttggtaattgtgcaattaaaaatcacgacaaaatattaccacataacgaaagatgatcgcttaaaaagtcaaaatggcgataactttaatgaaaatcaagagacaaagttgtactcgaagtccccgactcaggtactgctagtgcaaatgaacaaatgcatgacagcattggtaaaccgatagaaattggcataataaataagaaaccggaaaaataaaaaaaaaattcatactttagaaaacaggcaacaaaaatctgctatctttatgggtcggagtacatcatactaacttatcatacgtacctacttataatacttatataatgctcatacgaatactacgaattacaacaatactaattattaccaaaagatatcgcagagagaaatataaaattcaatagaaaatttagcttcatttataagctattcaatgtaatgttaggcaattactttttcattgagaactgtcgcttgcagcgtgtcgaactttaaagcttatgaatattatactaatactaaggcgcctagaaatcaagtctgttcattaagtctagacaaaaattatatatttaacatagcaagggatcacctaaaagagtcacattaccactttaattagtgtgtcattgttctgggtgtgataaacggaatatgctgagtctagtatttacaaactgatggcgccattaaaaccaatttgccagcatattttatgagagttttcgcggcgaaccaccaaccgtataccacaaaaaatgttcagtgcttgaaatccaacagatacgcacccattgtgccacatatgccagctaatgggtgacaataaatcaatttgcgggcaagaatatgcggcgttttgcgaactggttaattgtaatatttatgagcttatatcttcagtgggctaggcatgtcaaatcttgctctgacctcttaaatatgaagcgtgtaagtcttggctatttgcacttttacatggtctagcaataaaaataattgtgaacgaagcgcgcccatagtgacgaagcgcgcctagttggtgcacttatatagcttgcctattaagtaagcttgattgtggtttgttgaggtcttttattgaataaagcgcaataaaattagtaggatacataaataaaaaatcataacaaaataatataaaaaaatcggctaaataagatattttcggttctgtcaatagatttgacttcctgttattgtattgttatccatggcatccgtgacccacctgttacaactatgaatgcaaattctatgcatttaattaagagctcatcctgtgacgaatggattaatggaaacctgaaacatggcacttgttcatttctctgataagctttggaatacaatttattgcctgggcaaaatatttaattttccttctattcattattaaaccgggactattggtcctgctaggaatgctcaacgacctgtattacctatattggccccagaaatttagaggacgtagggtctgcttggaaaggcgctagaccgcgatattacatttgcataaaccggagtccttttaagaactccagcatcctcttgattttgtttatttgcagacagtgcgctcagcacgacacatttgaagtgaaattgtatgtaatcctacatattttgacatcatagagtattgttgcccatggcatccgtggtcagccagagggtacttcagtaaaaaagtgacaggtttcgcatatcaggcgtaagaatttatatgtaacaatgtgcgcagtccgatgctagcttttcatatattaaaagtaagttaattcctgtgaccgaataggcaacgaagaacatttttagtataattctatatattattaatatttatatattaatacccaaattcaaagcttcagtgtatttccgaaaattgatatggtaatcccacagaatgtagtatgtaatattggcaagatccaaacaccagcagcaggaataacaccaacaattacgactgctgtgacaacaataaacattaactggggcgtcggtgagggcctacttctttggggcagcaaaagatgaagtggtgcagcaagttatagcgctgtatatgcagacaacaatgcagcaacgacagaagcaatgtacaataggtgcttttttcgcttgcaaatgacgcttggcaaatcatctttgtgcggccctgtcccagcaaaaccctttaattcccacccaactctgctgcgacaccgactcctggcaactgaaagtgccaacggccagagatatgacatgttgtttgacaaatgtttcactgggaactgcaaaagacaatttatgataagggtttcaggcacttaaaaatggaatttactgtgccgttcaatagttcaatggtttttcagttcgataattaacaaaagtaagagaactcttatcaagaaatcctgaacattatacagtaaaaattttagaggagttggcatgacggcaaagtactcacagaaaggggtaatcagagaggggatataggatatgctgactttgttcgcaagctcagtggataatcggactttgcaaatcagtgaacgtgaaccaattgatgatgttaatttaagtgagcatgaatgaaaccatacccattctccccgacccctacatccaaaaacatttaagcatttacgtacctcctcatagcgcctcatgcatagcgctgcagtagattcagtaaaccggaaacggaaacgcggtggctgtcgagcactgaagtttagcctggcatatggaacaaataaaatacgattggcttgggcccgtgaactacaatacgttttccaatgtcaaaaccaatgatatttcgcccacagttgctatggccgctgcagcgctttaaagactctcgtggtcagcacttgcttcaaggcgaggcgcttaagttcggcattgatttaagcggcaaagactttgaccaggacgagtcggagcgtgttccggcagaacagcttcccccagaagtattgcattcgccatcggacccagagtaccatgagccgtcgaagtccggtccggaagcggatgttccgcatgttccgccacacatgccacacgctcgatgggaaacgggagctgcagcttcgactacggcggtgccaagccttccgaacgacggtttcgtctacagatggatgttgggcgaatggtcccagtgttcgcaggagtgtggagcagccggcagtgggttgcaggtaagtgaaatgggtgcagtggctgtcaggactgttaaatacccagcactagaataccaatacaagaataagaagatgcgtaacggccatacattgtttttgcactatgcagccactttttttggtgacggccaaaattgcgctctgtccgctggcgtacgctgagagcgtaaggaatctataaatcgaatttgcttgattgtgtgagtaaaaagaatagactgaaacaatacgtgtgatatatgtgatttcaagtctaagaacttctaaggtgaattgcatattttgtcaaatttacaatgcatgagcatacgtgtgaacacatagagttgtcggcttttcgctgtagagctctccgctctctcgctcttgaacaaaaattcgagagagccaggggagctacctctagagccaccccgaaaaaatcgtgtgcaaaaaaatcgtgtggcgttacacatcttgttattctagtgtctttgttaatacccttgcaactagtcagccagtaacatggctatgcatgaaacttttccctaacgtttctcgcttttgcaggtagatatgtaggtcgccgatggctgaatcagaccaataaataatatagctcttataagaataatcgaaaaataacacgagagaatgctgtagtcgcgttctccgactttcagatacccgttactcagcttgtgtgaatgcgaacgcgaaatttcgtcatttttctgggatatcaatagatattggggaataaaatgaccaaaaatttaaaaatggtttaaaatcgttaaaattgtttaaaggtgtgggcgtgaccgttttggtcgttttgtacgtggaaagaaattacaagactaataaaattatgaaaaaatagcaacacattttcaaatgtgcgggcgtggcagttttggtcggtttgtgggcgttagaatgggcgtggcttcatgggtcaacaaactttcgctgcgtctatgtctctagaatcgggtttccttaaatcttgacgttaatacggacagacggatggacagtgccagatcgacttggctattgatcctcatcaggagtatatatactttatacggtcggcttcaacgaaactagtatactcttttactctacgagtaacgggtataaaaataacagtcgtcaaaaaagaaaaacacgtctttagtaagcggcattaaaaaagggaaacagctatatagtctgatgtatatcaaataaaaatttaaattattattattactgcttctgcttctgtatataaatatgtcgaacataaaatattattggatatttagccgactaatttcaagcaaaactattgtatataccactgcagtaaagatatcataaaacaggaacgcgtcccaagatcgcttaagcaataattatcacattgcacagtactctgaaatccaccgccaaaggcctcctaaattaagcaaaattatatacagcaaaagtcacaagaccccatcccgtgccaaaatgctttttatttcattgtcgggaggaaacaataaagatataaaagtcattcttcctctactcccaaagcggcgcacggtgagctgccagagagctgcaaaagccacgagctccggcagtactagcgacaccgaaaacaatgtcgtggataattcagaatgcttcgcgcacggcctggagctgcccgaatttttccagagctgcggcaacgaggcatgcccgcagtggagcaagggcgactggactccctgccagcgatcccactgccacggaaggaatacggccatgcagcgccgcgaagtgacgtgccgctaccccaacggtacggaaggaagcatctgcgacgagtacgagcgacctgcgatgcgacaggaatgctacaatgagcgatgcgagggagtgtggcgcgtggagccttggtccgaggtgggtcctggatcacctattagccgtgttaaatattaatgcctcctttactcctaccagtgcaatgcgccgtgcggccgtaagggcatcaagtaccgcatcctgcagtgcgtctggtacggaagtcgccgcccagccggcaatgtgtgcaagcaccagccacgcccggcggttatgaaggtctgcaaaagtccggcatgccaggcgcagcgtgagtatcgaaataacggtcgaaatggtagagttactagtagaattaaagttttaaagtaaaagagtatactaaattcgttggaatgtatgtaacaggtagaagaaagcttttccgaccctataaagtaaaaacatacatatatttttgatcaggatcattaaccgagtcattttggccatgtctgtctgtctgtccctcagtctgttatacttgctatacttgcccgacgtgctaaactaacaaattgttgtgcatctaaagaaacaatataataaacaataaaatacaataataatagcaacgcaggtaaatccatgtgaatgaaaaacgaatgtactgaatgtacaatggctactttttccactatgatgtgacctgatacgccgcttttctgttcatacgttttacaatgttttgaaaatacgctgacggatccttttctcatccgcagtgtcgtcctcgccagcccagctatgtcgggattcctcacgttattgccgtaatgccagggccatgggcttgtgtcgacttcatcgctacaagctgaagtgctgcgggtcctgcgagcagcaacctaatcaacatcttattctctaactccgctgcggcttaccaaaatagcaaggatattttaagaactcaacaagcaattaccctaggtaccgtaataaacgtttaagcgtatataacttatccatatgtatgccacatccgcacttacatgaatttagcttaatatagtgtcaaaggccaattaaaagcacttgtatctgaagtaagcttaaagaagcttaagcttaaataagatctgctgtgacctgttctcgaaagggtcatcgattacacattatgcattacttcataactatgaagcactgaagcacagatgaaatcactaaaaagaaaaagagaagtccgcactattacctggtgccattgaaaccgtatataaatgtgtaaatatagagaaggacaaatgacatccattgtcggttcatagcactgaaattagcttcgattaccacttagaattttgtaaataaatcggatttctttctaaatcaacacttcatttaaaggcaagtcaggtaattaaatgaacgtcgaactatttggaatacttataaacgcctaattgtaattagttttatatggaaatattgtttttatatatacaacttaaatagaaacactagataaactctaaataatactgcaagatactatagctaactatcgccgaatatatcgcaattgttaaagcgtaactaaatatataagctgttaagggaaagttattattaatgagcccacgagtaaatgcaacagtaaccaatatcaaacgcctacagaccgaagcaaaactaaacactatcgcagctcaaaaaattgcatagctcagcaaggatataacaaatttgagatgcattgtacaaaaattggaacatgtttggaataaatatttattaaataccaaaaaattaaacgtatttttcttgttggttgacttgccagataaacaattccctaattattattttttgtggcgttataatgaaaacaagagagagtgctatagtaaaatttcccgaatatc

SEQ ID NO: 3452 - DNA, 2586 bp, DROSOPHILA
ggtatacaaatgcgaggcgtcgagtgcaaatcgacagacggcagcctgagcgcgaagtgtgatccacttacaaagccgggcagcatgcagcagtgctccaccggaattcattgcggcggatcgttgaacaaagttggtggcaccatcatcgtaggcagcagccggtcacttaacgaacgatcggagcgacagttggacagctcggatgcagatgaagacaacgaggacgaaaatgatgagggcgatgatgtggacgacctggaatcgggacaggatacagatgatggcgaaggattgtcatatgctgatcaacctttgctttacgctcatcgcacacagagtcgactgaatcaggaagccccagatgagccgcgcaccatgcatctaatgaacggaaattcaaacaataatttcaatcggggagaggacgagtcagagggaccatcacttgatcccacctacatcaaggacaatgagtggtccccatgtagcgttacctgtggggaaggaatccgccggcgcacctacaactgcaagattttccttgaatactctcgaacggtggccaccgttaatgattcgttgtgcgagggaaaaaagccacatgacgaagtagagcggtgtgtggaggatccgtgcatgctaccctcccacggctttgacgaccagttcccccgtgattccattaaagtgggtgtgtcggaaccgggtaagacgtatgtctggcgggaacagggatacacctcctgcagtgcctcctgtctcggcggtgtcgaggaactgataatcaactgcgttagagaagataatggtagggtggtgtcgccctttctctgttccccggaaaccaagccggaggccagggttcgtacctgcaacgaccgtccctgcccacccagatggaactactcagactacacaccctgctccaagagctgtggcattggcatcaagacccgcgaggtgcagtgcatccacgaggttacgcgcggaggggacaacacaatggtggtgccgaacagtatgtgcccacagccaccaccagcagatcggcagtactgcaacgttctcgattgccccgtacgttgggaagtcggtgagtggagcaagtgctcccatacgtgtggctatgggtttaaggatcgcaaggtggagtgcaagcagataatggcgcaagagcacaagatcgaacgacccgaatcgatgtgtccgagtgctaagccggcggacaaaaagccctgcaatgtgaagccctgcccgccggaagatcccaagccagtcatccagatcaacaactcaacacacatccagcacgaccccaagaagaccaagatcacccttaaagtgggcggcgctggacttgttttcttcggcacccaggtaaagatcaagtgtcccgtgaagcggtacaaccgcaccaagatcaagtggagcaaggatcacaagccgctgcagcgttcgcgaaagtacaaagtgtcgaagaagggagccctgcgtatacttgatattacgtttcgcgatgcaggggtgtactcctgccacgccggtctcagctccgcagaaataagcatcgaagtgaaggccaagccaggacagcagattgaggagctggaacaacaggaaactgaacgattggtgcgtgagaaaagtggcacagaggctctcacctctgcggatatgaagtccgctgatggaactgggacttccactgcggtgggacctaatagccacgttaacggactgagctgtaagcctcgtctaatagcgtacatcttatgccgctttcctccacatttttccagttcggcacaacagcatggttcgcgtcgcaggcagcagcagtcggagcgattgcagaacgggagggaacggagccggagacccaagtccgatggagttcagcatgcggatagcagcattatggaagacgatcggcgcacggtgagctgccagagagctgcaaaagccacgagctccggcagtactagcgacaccgaaaacaatgtcgtggataattcagaatgcttcgcgcacggcctggagctgcccgaatttttccagagctgcggcaacgaggcatgcccgcagtggagcaagggcgactggactccctgccagcgatcccactgccacggaaggaatacggccatgcagcgccgcgaagtgacgtgccgctaccccaacggtacggaaggaagcatctgcgacgagtacgagcgacctgcgatgcgacaggaatgctacaatgagcgatgcgagggagtgtggcgcgtggagccttggtccgagtgcaatgcgccgtgcggccgtaagggcatcaagtaccgcatcctgcagtgcgtctggtacggaagtcgccgcccagccggcaatgtgtgcaagcaccagccacgcccggcggttatgaaggtctgcaaaagtccggcatgccaggcgcagctgtcgtcctcgccagcccagctatgtcgggattcctcacgttattgccgtaatgccagggccatgggcttgtgtcgacttcatcgctacaagctgaagtgctgcgggtcctgcgagcagcaacctaatcaacatcttattctctaa

SEQ ID NO: 3453 - protein, 858 aa, DROSOPHILA
MRGVECKSTDGSLSAKCDPLTKPGSMQQCSTGIHCGGSLNKVGGTIIVGSSRSLNERSERQLDSSDADEDNEDENDEGDDVDDLESGQDTDDGEGLSYADQPLLYAHRTQSRLNQEAPDEPRTMHLMNGNSNNNFNRGEDESEGPSLDPTYIKDNEWSPCSVTCGEGIRRRTYNCKIFLEYSRTVATVNDSLCEGKKPHDEVERCVEDPCMLPSHGFDDQFPRDSIKVGVSEPGKTYVWREQGYTSCSASCLGGVEELIINCVREDNGRVVSPFLCSPETKPEARVRTCNDRPCPPRWNYSDYTPCSKSCGIGIKTREVQCIHEVTRGGDNTMVVPNSMCPQPPPADRQYCNVLDCPVRWEVGEWSKCSHTCGYGFKDRKVECKQIMAQEHKIERPESMCPSAKPADKKPCNVKPCPPEDPKPVIQINNSTHIQHDPKKTKITLKVGGAGLVFFGTQVKIKCPVKRYNRTKIKWSKDHKPLQRSRKYKVSKKGALRILDITFRDAGVYSCHAGLSSAEISIEVKAKPGQQIEELEQQETERLVREKSGTEALTSADMKSADGTGTSTAVGPNSHVNGLSCKPRLIAYILCRFPPHFSSSAQQHGSRRRQQQSERLQNGRERSRRPKSDGVQHADSSIMEDDRRTVSCQRAAKATSSGSTSDTENNVVDNSECFAHGLELPEFFQSCGNEACPQWSKGDWTPCQRSHCHGRNTAMQRREVTCRYPNGTEGSICDEYERPAMRQECYNERCEGVWRVEPWSECNAPCGRKGIKYRILQCVWYGSRRPAGNVCKHQPRPAVMKVCKSPACQAQLSSSPAQLCRDSSRYCRNARAMGLCRLHRYKLKCCGSCEQQPNQHLIL

SEQ ID NO: 3454 - DNA, 3653 bp, DROSOPHILA
atatagaaagaggaaatactctgttagcgcagagtactccatatttatacataaaagaaaaaaaaccctacagtcgttttctccgtaaatcacataccacttattctgctagtacgaaaattgtgacgaaatagatttacaattggtcaaaaataaactgaaatccaaataaaaacaagagccattactcagcaacatgggtcaacttccgctgcgtcaatgtctctagaatctgtatgctaaaccttatagcttttatagttcctgagatcgagacgttcatatggacagacggacatggccagaccgactcggctattgagtctgattaaagtatatatattactttatggggccggaaacgcttccatctgattgttacatacatttttaaacgaatctagtatacccatttactctaaatataataatataatataaaataaaataaaaagtataataaaattttcttcagcacttaggtcgcgaaaagtatttggagacaggttctgcggcaaattctaccaaaaccattttgtgctgcgctaacgtctttagagtctggttggtcaatccaacctgcatacctttttaagtgcccgacatggcctgattgggaatgaacatgtatatagagtcggaaatgcatccttctgccatttacttacgtttcatcgtatttagtatactctactagtagcgggtacgataataccattcccacaagtttgcaaaacttcatagattttactataaattctctaagatatttaaaatatgtatatcttaagttatatactcgtttccctgaaaagcaaattgagatgaggaagaggaaccctcacaaaagtggggaaaaaaaaggcactgcaactggtacaacaggtgtagcttagatatatctagaggtcttttagaatttgtattccaaatttcctataaagtatgctgtgaatgcccactccgagctgaggatgtcgggttttagttagtctacactcagtccttggcctaacataacatattttcgactattttcggctttgtaaaacaaaatttggtaaaaaggttcaatatgttgcgaatgttgcgtcagaaatgtcgttccctcgtagatcggagcatgccgtgcctggagtctttggtaaatgcctgttctctattcaaggtcgattggtccaagaatctgagccaaatcaaaaccccggccgactgcgttggctccagtgtgctccggcagcacctgttacgccgcaactacagcagtcagtcttccgccgatgattgcgggcggccaaaggattgcgatcaggtatcgacctccaagggctgtggtcctgctcggttcaagggcaccatttgcgatgcagtcaagggcggtaagcgcaagaagaaggaagagcccaagaaggaaaagtccaacaagccgaagctgccagcaaagatgaggtccatgtggtatatacccgactgcgagtacgtgccaaagtgcgatgtgccagtgcggtacgacatccagcactaccgcatatcggacaaagaggcccgccagtaccaggtgacgtggaacgagtgcccccggttggtgatcaagcccaagaaggtgtgcatccacgcaaagcgaccgcgtccgaagccctgccgccgtcagcggaagacggtggtggccacagcccgtcccacgatgcccatgcttaatcccatggagtgcaagaaggcagaggactcctcaccctgtccgcgctggactcttccctgctgcaagcccgcccgtattccgcccagttgccaccgagaacgccgacctaccgactgtaccaagcgcccggcgccgtatcccagcttctcagaatgcaagcgggaggagctcactaacgcaccacctacagagtgcctatgccttcgagttcccatggcctgcgagatgtgggcggagctgaggcgaaggatcgcccgtggcaagggggcagtccttaagtgtggcgaaacgtaggcggcggcgaaagcacagtcattcgacatctggccacaacattccggtcacttttccaactcacaatccaccaaaattacagttttccaaaatagccaattcattccattcgcactccacaatccacaatccacaatccacactttccaaattcaaaatgctgttaaaacgctgcgggaaaaccctaatgccagtcgtcgtccgattggccagctgtgccagctccaagggcggcacctcggactccaagtgcaactccaattcgaaggataaatgcaagccggagcccagctgcaagcgctccgcgaagaggaagaactgctccaaggtcccaacaccattcccgagctactcggagtgcaagcgaaaacagactgaccctaatccttccaaggagtgcgattgctgggactttgacaagtgctgatccccggcaatttggataccggagctccggggatgtctctcgcttatggccctcccacattttcattccataagactgaggactctgtactcataatcccgttggtggcactgggagcctaggtgttttgtccatgtccaacctttgcagttatcctggacgcctattataaagctttaatccacgtcaaactgaccgacgttgaacgaaatacaagaactaaaaaagtttcaatcattgatttttaattaactggatgggcaatagggttccatcaaagatattagaatttctagtgccttcggttccatactcgaatcgatatttaataattccatatttaagctgctaatgcaacatcatttatgtactaaggagtttaatttgcaggcggcgaccgattggtcccgaaaggcatattcttgttacttttttaatttttgaaaaaatagttttccgataatccgaaaaccacatgggtattcgacagatcgagtaggcaaaccgtcgacaatcaccaaaaaccatgtgcgtatttgaaagatcgaattttaaatctatctagtaagccctgcattttcatttccccactagtttttcccaatactttcattttcattcttggctttcacacataacaatctatatgttccggtctacaaaatttaatatatgtttattatctcttctgaaaacttgtagtttacttaaaaactaaaaaaaatcaaaatcataaatcaaatcaaaataaatcatattgaaacacaatgaattcgacaaaagctttgttaagcagcaggatagtggccttcggacttgaaaatctggtgacgcgtcgcggaatgaagcagttacgtttggatgaaattcactacaaactcaactccaatcaagagcgaaaccaccagagaacttggccacaatcacagatgcagccgcagattgaggagcgcatggatgacaccaaatacaggccaggtcgttggacggagcggaaatatcaggccacctggcgggaagctgtcatcccaaatgaggaagcccataaggaggcgaaggactcgcgttcacaggaggagcgaccccacattcgtgaactccgccgaactaccgaccccaataggcgcctccagaggatcgcaatgcctgctaaacaattcatctcgcagtttatctccacccaaagcaaaaacaaaaggcgttacgtagaagctgcatcagatcgaatggcgt

SEQ ID NO: 3455 - DNA, 1436 bp, DROSOPHILA
cagtccttggcctaacataacatattttcgactattttcggctttgtaaaacaaaatttggtaaaaaggttcaatatgttgcgaatgttgcgtcagaaatgtcgttccctcgtagatcggagcatgccgtgcctggagtctttggtaaatgcctgttctctattcaaggtcgattggtccaagaatctgagccaaatcaaaaccccggccgactgcgttggctccagtgtgctccggcagcacctgttacgccgcaactacagcagtcagtcttccgccgatgattgcgggcggccaaaggattgcgatcaggtatcgacctccaagggctgtggtcctgctcggttcaagggcaccatttgcgatgcagtcaagggcggtaagcgcaagaagaaggaagagcccaagaaggaaaagtccaacaagccgaagctgccagcaaagatgaggtccatgtggtatatacccgactgcgagtacgtgccaaagtgcgatgtgccagtgcggtacgacatccagcactaccgcatatcggacaaagaggcccgccagtaccaggtgacgtggaacgagtgcccccggttggtgatcaagcccaagaaggtgtgcatccacgcaaagcgaccgcgtccgaagccctgccgccgtcagcggaagacggtggtggccacagcccgtcccacgatgcccatgcttaatcccatggagtgcaagaaggcagaggactcctcaccctgtccgcgctggactcttccctgctgcaagcccgcccgtattccgcccagttgccaccgagaacgccgacctaccgactgtaccaagcgcccggcgccgtatcccagcttctcagaatgcaagcgggaggagctcactaacgcaccacctacagagtgcctatgccttcgagttcccatggcctgcgagatgtgggcggagctgaggcgaaggatcgcccgtggcaagggggcagtccttaagtgtggcgaaacctgtgccagctccaagggcggcacctcggactccaagtgcaactccaattcgaaggataaatgcaagccggagcccagctgcaagcgctccgcgaagaggaagaactgctccaaggtcccaacaccattcccgagctactcggagtgcaagcgaaaacagactgaccctaatccttccaaggagtgcgattgctgggactttgacaagtgctgatccccggcaatttggataccggagctccggggatgtctctcgcttatggccctcccacattttcattccataagactgaggactctgtactcataatcccgttggtggcactgggagcctaggtgttttgtccatgtccaacctttgcagttatcctggacgcctattataaagctttaatccacgtcaaactgaccgacgttgaacgaaatacaagaactaaaaaagtttca

SEQ ID NO: 3456 - protein, 372 aa, DROSOPHILA
MLRQKCRSLVDRSMPCLESLVNACSLFKVDWSKNLSQIKTPADCVGSSVLRQHLLRRNYSSQSSADDCGRPKDCDQVSTSKGCGPARFKGTICDAVKGGKRKKKEEPKKEKSNKPKLPAKMRSMWYIPDCEYVPKCDVPVRYDIQHYRISDKEARQYQVTWNECPRLVIKPKKVCIHAKRPRPKPCRRQRKTVVATARPTMPMLNPMECKKAEDSSPCPRWTLPCCKPARIPPSCHRERRPTDCTKRPAPYPSFSECKREELTNAPPTECLCLRVPMACEMWAELRRRIARGKGAVLKCGETCASSKGGTSDSKCNSNSKDKCKPEPSCKRSAKRKNCSKVPTPFPSYSECKRKQTDPNPSKECDCWDFDKC

SEQ ID NO: 3457 - DNA, 4675 bp, DROSOPHILA
ccttgcgtgccaatttctgtgtttctgtttgcttgttactcacacacctacacaatctataccaaagaaactcgactggctttcactgggcaaaaacaaatagaaaaggattcgattggcttgcaaagcattcggcgattaaaagcgtcgatatgtcagattgcactagtccgacgaacttatctagccccataaattgagttagtaaccaaaaacatcagcacaactgttaaatatttcacaaactataactgcaaccacaatcaaattaacgcccgattctattcgttcaaaagcaagtcatttcatttaaaatgccaacaaaatgaccccaatcaggtattccaacaagttcctttaaatgtcctttgtcctggaatacctcaaccttacacaattataattaaagctttgctcaattgcccaaaatttataataaaaagtggacaaaaacctttagcaacatgctaagctatccctacagcgttttggtaaatcctattatgcttttaagatatactgcacctgcacctgaaaggatcgaaaggataacggcggcgaactgttattacgagtagtgtttattctgtgtttaatcgcgctcacagcttgccgaagttcgtgccacggacagcgtctaaaactagattatttaaaaaaatttgggaacagtggcgagggggttgagatactcaaaattgtcattcgcaagggggtggacagcacaacataaatacaaaacaaaaggggaggccacagagcatgaaacaccgaaccgccaacagagtctagtgttggatcgtgtccgggctgcgacttacggctacgaagggggagctaccactgcttgccttattggaaagtattgggatctgttgggatataaaagggaaagcagggcaggattacatctacattatttgcggcttttgtcttaaaatactagttatatggagtagtagttaaataaaggtgtttacggctcctgaatgggcccaatctactgcatcatcacctcctggctggtgtcatcgatctccatggcggccggatcgtccttggcggcctcttcggtggccattgcgccggcattggcgctttcggccattaccacctcctcgacggtggccgacggcgagacgcgtgcctcctcctcggctggagtatcctccatgggctggtcgttgagggccaagacaggcggagttacagcggcgaccaagggcgaagcctgcgagtcatcgcctgtctcagcaggcggcgtctcagcagcggaatcggcagcgcccaaaggagattgcggtgtggttgcagctgccagatcttccacagcaggactagaagcatcctcaaccggcgacttctcgactgactcctgggctgcctcggtcgctttggaagtggtcaagtcgttcctattctcgctttctgcattcggctcggcagcctgcttttcatccgaaaccgacttctcggccgcctcagtttcagtcttttccggttggctcttcttggtctcggcctctggatcgtcctcagatttggtcttcggtttcgattcggaggaagctatcttttcttcagcgggtttttctgctgatggggcatcgtcagtctcagtagagtcgatatcgtcctgcttttcagttttaattggtgcatgttttttctcctccttttcgttttctgccttgactttgacaggctcctggttttccccatcggcaggcggtgtagatttcttgacaactgccttgtcgcctaactgtgccacctttccgtccggtttatcagactcgacgacctcttccttctttacaatctcttcttttggctcgattgccacctttttgtcctcctccctcttcttttcctgagcaacaagttctttctcagcttctatggatttgctcaccattgggtcctccgcctcgtcatcggcagatgatgggaaactttcctcctgctcgccctccttctgactgccgtaagcaggctgcttggtggtcttggtctcctgatcagcctcatccacctcttcatcgggctcctcgatctcggcagcctcatgcggcgaatcagtctcatcgttgtcattcttctcatccttttcatttttgaccctggttgccacttctgtgtccgtttcatcgctcgcttccgaacgctcttcaccatcgatctccagttttgccttcttggccttgggctgatcattgtcgtccgaacgcgggcagcttgccttctgggcacaacctgccgaaccggcgccgggagatgagccctcatcggcgttaccgttattattctccatttcaatgtcaatgttcacctccatggagaggtccccgttgaccactgagtccagcgagtcgccattctcactttcggtacgcttgcgtccaggatcgattgtgctaaccactgtaaaattaagaatctttaatacatagtaaatagttagttttaggaatgagacctgcctaaaatattcttttccaaagcacgcataaacttatcgatgcgcgagtactgcttccgaggatcgattagtagctcgcacaaccgctgcacggtaaaaggagctgcattgaaaaggtccaagcgctccagcaacgaggacttcatggtctcgtagttgaaagggtccacattcggatagttgggaatctctgcaagcagttaagttcgtcttcggttatttctgttcctaatatccctgagtggaattgcatttcggattatggttcaacctgacaccaaacctaacaggacaacctgaaaactcaccctccaaacgcggcgaatcctcattaaagtgcttgatcacgctgagcagcttctcgcggaacaagtacttcaggctggaccacttgaagatggtgtcgccggtcttggccacatactgtaggtactcctccagctcctttgggatctccttttgtttaagatccgtaaagcgctctaggatctgcattatctcgtcgctgttttccatggtgaccatttaggcgatcgctgagcggaggggaaagctatgatcatgatttggggggaaaaagtggtgagcaaagaaaggagatcaaaaaccggccggcaaagttatgaacattttccacctcgaggtagacacacaaaaaacgagagagcaaatgagcaactgcaattgtgtgcaggtaggtatgcgcaagaagcggacataatacatcttgcatctgccagctgtcagacatttctctctgtccctctttctcttttcgtggatgattcgcaggagaaaactagttatgttgcacacaagcacacattttctacaattcgcaaaagctgctcacagcttctgcatgtctggctgcgtgtgtatgttagcggctgcaactcttgttgccaagtcatagttgttgttgtaactgtctgcgccagaaggccaaaaaaaaagaaaaatatacacgacgccctgcgaatttccatcacgaaactggcccacctcaacattttcaggtcacagattttctcgctctccattttttgaacctacttttttttgtttgttgtttttttgtttttgttattctacttgtttttatcacaactacgcttttccgattgcaaagtttatgcgagaacttgctcaattttttgcttatcaattaatattgagagtgatgtgaccgtttgatgccggcagtgatgagcgacccccgatggcaactatcgtatgagcgcagctagcaatcgatgatttttgagtaaccatggcactgagcatggcggtaaatatcgaaagtaatcggttcttgaattcaaaacttgttatgtcccactccctttttaaagttatgcagcgaaaatattgttgtataagttaaccaaaatcagaccaatagaaaaactaaaagaaagggcgttaggctataaaatctaaatcgaagcataaataaatagtaagcatatagtaatcgtagcagtgttgttcaaattaagcaacattctgattggaacaataccttttacaattcgattaaattttcgaaggagttgcacttgttcgtctgtgtacgtaaaacatttggagtaaaaaaccatgcctaaagactactacaagatactgggcatccagcgcactgccaatgatggcgaaatccgcaaggcatatcataagcaagcgctgcgctaccatccggacaaaaacaagagccctcaggcggaggagatctttaagcaggtggccaaggcatatgaagtcctatcagacaaaaagaagcgcggatcgtacgactcccgcaatgacaagggtacccgacgcaataccgcgaatcaaggtagcggtttcggcgatggaacggcatttggtagctgtggtggtggcagtggcagtggcagtggcggtggcagtggcggtggtcgccagaacaacccgcgggccaactttggacgtttcttcgacaacagcgaatcatattctacgttcttcgaggatatcgaaaacgattttgacagcgacgatgacgtcctgttgggtggaggagcgggcgcgcctaaacgtcgttgcgaacaacagtcaccccagtcaagcatcgaacatgtaatatacgttgctctggaggacattgccaacgggtgcaacaggcgcatgaagatctcccgggcttcgggtaggaacggcgttgatggg

SEQ ID NO: 3458 - DNA, 1995 bp, DROSOPHILA
acggtcacatcactctcaatattaattgataagcaaaaaattgagcaagttctcgcataaactttgcaatcggaaaagcgtagttgtgataaaaacaagtagaataacaaaaacaaaaaaacaacaaacaaaaaaaactttcccctccgctcagcgatcgcctaaatggtcaccatggaaaacagcgacgagataatgcagatcctagagcgctttacggatcttaaacaaaaggagatcccaaaggagctggaggagtacctacagtatgtggccaagaccggcgacaccatcttcaagtggtccagcctgaagtacttgttccgcgagaagctgctcagcgtgatcaagcactttaatgaggattcgccgcgtttggaggagattcccaactatccgaatgtggaccctttcaactacgagaccatgaagtcctcgttgctggagcgcttggaccttttcaatgcagctccttttaccgtgcagcggttgtgcgagctactaatcgatcctcggaagcagtactcgcgcatcgataagtttatgcgtgctttggaaaagaatattttagtggttagcacaatcgatcctggacgcaagcgtaccgaaagtgagaatggcgactcgctggactcagtggtcaacggggacctctccatggaggtgaacattgacattgaaatggagaataataacggtaacgccgatgagggctcatctcccggcgccggttcggcaggttgtgcccagaaggcaagctgcccgcgttcggacgacaatgatcagcccaaggccaagaaggcaaaactggagatcgatggtgaagagcgttcggaagcgagcgatgaaacggacacagaagtggcaaccagggtcaaaaatgaaaaggatgagaagaatgacaacgatgagactgattcgccgcatgaggctgccgagatcgaggagcccgatgaagaggtggatgaggctgatcaggagaccaagaccaccaagcagcctgcttacggcagtcagaaggagggcgagcaggaggaaagtttcccatcatctgccgatgacgaggcggaggacccaatggtgagcaaatccatagaagctgagaaagaacttgttgctcaggaaaagaagagggaggaggacaaaaaggtggcaatcgagccaaaagaagagattgtaaagaaggaagaggtcgtcgagtctgataaaccggacggaaaggtggcacagttaggcgacaaggcagttgtcaagaaatctacaccgcctgccgatggggaaaaccaggagcctgtcaaagtcaaggcagaaaacgaaaaggaggagaaaaaacatgcaccaattaaaactgaaaagcaggacgatatcgactctactgagactgacgatgccccatcagcagaaaaacccgctgaagaaaagatagcttcctccgaatcgaaaccgaagaccaaatctgaggacgatccagaggccgagaccaagaagagccaaccggaaaagactgaaactgaggcggccgagaagtcggtttcggatgaaaagcaggctgccgagccgaatgcagaaagcgagaataggaacgacttgaccacttccaaagcgaccgaggcagcccaggagtcagtcgagaagtcgccggttgaggatgcttctagtcctgctgtggaagatctggcagctgcaaccacaccgcaatctcctttgggcgctgccgattccgctgctgagacgccgcctgctgagacaggcgatgactcgcaggcttcgcccttggtcgccgctgtaactccgcctgtcttggccctcaacgaccagcccatggaggatactccagccgaggaggaggcacgcgtctcgccgtcggccaccgtcgaggaggtggtaatggccgaaagcgccaatgccggcgcaatggccaccgaagaggccgccaaggacgatccggccgccatggagatcgatgacaccagccaggaggtgatgatgcagtag

SEQ ID NO: 3459 - protein, 606 aa, DROSOPHILA
MENSDEIMQILERFTDLKQKEIPKELEEYLQYVAKTGDTIFKWSSLKYLFREKLLSVIKHFNEDSPRLEEIPNYPNVDPFNYETMKSSLLERLDLFNAAPFTVQRLCELLIDPRKQYSRIDKFMRALEKNILVVSTIDPGRKRTESENGDSLDSVVNGDLSMEVNIDIEMENNNGNADEGSSPGAGSAGCAQKASCPRSDDNDQPKAKKAKLEIDGEERSEASDETDTEVATRVKNEKDEKNDNDETDSPHEAAEIEEPDEEVDEADQETKTTKQPAYGSQKEGEQEESFPSSADDEAEDPMVSKSIEAEKELVAQEKKREEDKKVAIEPKEEIVKKEEVVESDKPDGKVAQLGDKAVVKKSTPPADGENQEPVKVKAENEKEEKKHAPIKTEKQDDIDSTETDDAPSAEKPAEEKIASSESKPKTKSEDDPEAETKKSQPEKTETEAAEKSVSDEKQAAEPNAESENRNDLTTSKATEAAQESVEKSPVEDASSPAVEDLAAATTPQSPLGAADSAAETPPAETGDDSQASPLVAAVTPPVLALNDQPMEDTPAEEEARVSPSATVEEVVMAESANAGAMATEEAAKDDPAAMEIDDTSQEVMMQ

SEQ ID NO: 3460 - DNA, 4353 bp, DROSOPHILA
aaagatggcacggtgtgcatggaaaagttgccgttgaatgggaaattgctgcgacacgtttttgccttggtctgctgggatgggatctgtgaccggtctgagtcggcggtggtccggtgtctatgtctcagccccaggtttgttttccgcataaaaagacacattcatgctggcattctgcagccaactttagcctttgggtgctaaccggctaactcggctggcttatgcaaaactccacatcctcagctattccgcgacgatgtaccttgtgcaacaccccagacactatggagtctgaccagtttatccacccgccatgtggtcatctaggtgcaccgttctcgaggcgcggtaaaagtaaaagttaatgtgtgtggccggcgcgtgaagaatggcaattacagatcgatgatcgccgtgaaccagctggctcatttagcctccttaattatgccacgatttcgctcatccaactcatctgctttctggccatggaggtgccccattgtgcgacttactttgctattttgtgtttctctggccaaaatacggaaagtggcaaggcagaaaacataaatgattttacgggggtctaaatgagttaattaggtttgcagtcgagaggtcttaaccaacacgagttggccatggcaaagccaatgaagatatcagagaaggggtaatatgtaggtggatggatacatttgtactacatgaaccatgcaaccctaaaggctttgggttttgttgagttattttggaaatctgtttttctccatcattagctaagattaagcgtttaaaagataatatatctattaggaatcatgatttaataagaaaagataatacatatttaaaaaaaaaaattattccacagaccattgctgaaaaatttgaataaagcttaatgtaatgcgtagtgaataactcgcacctttataacatacaaatacggtctcttggtcatgagactctggctgtacgtatccctgattcaaagctcgttatggatatgcttggaaatgtaaacagtgagatcctcaggcagcccaaacatatccaactccttggctaatgcgaagtaccgccgcctaagaatgtgagccacttctttgggttgtcggttccttgtaaagactccctttttgttgccgcccacgcgggtaatagctgcagaggataattttaattgggtttgactcttgttcaaaagcgtttgaaatacagactctgcgcggtccgaaaatcggcgaagttccaaacaaactctccaataaaccatcctcttccgcgtaactcgtcgaaagccttgaaatggcgagagaagagctcaacctggtattcctccgaccaaataaaggcgggaagctttggggaaagtccgaattagaatcaattataggcctgaacagggttccttactgagtgcatgccctccatagtgtcgccgccgtactcaaattggatgacaggctttccgaacctatcccgccaactctgggcctctatcgtcaacaggttaagtatcatgtcagtacggcccgagttctgataccaagagttatagcgattgaaacccacgatgtccagaaactgcgccaaatggcaactggaagagttggcatttatagccgcggttagaggtcgtccgtgagctatttctcttacatagtttaccaggaatctaaaggtaagacatccgcgttaaatttttgatctaagatgtactttctactgactcaaagtatttaagggctccctgcttgttcgatctcggctcgttggctaccgaccatgcaacaacacttggatggtttctgtcccggtggatcagttgctccagcgaggacatgtgattctccagtagctgcggctcgaagatatctatattgacagcagggcattcgtcaataatcataataccatgctgatcggcaaactgcattgactcttcggaataaggatagtgagaggtgcgatatgcattggctccagtccacttcagcaggttaaaatctctagcaagaagcgcattatccaatcccttcccgcggatctagaataaagattttgataagcttaatgaccagatttacccaacaatcaagctcacatcggagtcctcgtgccgtccaaatccccgcagatagaggggttttccattcagcagcaggctgtcgttgtcccaacttaagctacgtatgcccactgggaggcggtaggtatcctgcagagattccaactccttctcattgctggccacaaacagctcgaattgaagattatacaggtagccgggatcggaatgcattaggtagggccaccagggagttgcatttggcaccagcagagtaccatggtagaccgccttgttgatctgctgggcggccacatgaccatctttgtcccttagttgcacccgaagttggatgggctggatttggaggccctccttgctagcatccaaccacacgcggtagtctatgcggcccaatccttctttagttagttgggtggtgacctccaaatcgcttatgtgcagcagcggggtcgtgtacaagtgtacactccggtggattcccgcgtagttaaaaaaatcgaaagtgtaactctggatgggcacggtgccgtcatccgtagccaccttgtaaacagaaccctgaggaatggtgcggttgctcaaacgattgtcacacatcaccgtgatcctgttatcgccgccaaagctgagcagtcccgagatctctgactcaaagggtaggtggccaatggagtgacttgtggcgttccttccgttgatccataccacggccgaatagtgaacgctgctaaatcgcaaccaagtgcgttgcatagtcttccaggagcgcggcacaaaaaaagtacgctcataccatacggttccaacgtgatctcgtaagttatctgtagtgatgtcgttataggaggcaggcactggcatcgaaataatctcccttccggtttttctcaaggcatccataaaccacttttccctaattccctgtaaggggtcatatggatcactcctaaccagttgccacattccatccaagctccgcacttcacgggtctccgaatccctggggtacaacaatcccttggttggtgtgggctttctgacattatcatattcaaacaaaggggaatcagttagttctttgcgattggcgttcaccaagaagtcgttttcggtgtaagccaatagaacctggagactgccaagcagtaagcaggtgacgggcatccaatgacttttcatctgaaatcagaatatttctatcgagttacaatttaatggttatcaaacatttgtgaaccatcttcttcttcacccggcctttgataagagcagtgtgaccagcgcaaatatagtgaacaaaatccatctattatttaatatgaaatttttttacataaacttaaaattgtaaacttaaaagaatttaggtttaggtttggccttctactcatgataaaaaaaattgtttaccgtgaaacatcattgtttggaatctgcgtttgaaggatctactcaagaggttaaaataatttgcaaatatctgtgtatatctcccgcttaatgttctttcaaacttggtcacaatcattttattcaattacatttatttgaaaattgaaatagtccgtgacatgggaatccgtgagggcaatcgatggtttggtagaaaaaatcggtgctgtcatataatatcgataagataattcaccatctggtagcacgactaagttcatacgtgtaattatcggtagttaaaaataaaaatattaatacgccttgatagaggcaaccctcagtttcagagttgaaaatctcgatggcaatgcaaacaacttcgttcggctaacaaaacccgactaaattccaacgtcaacgagagcatagacgatattttcggtttcttcccaagtgataccgattccgagagctacggccttatatgtagagtgggggcaggcagagatcccggccaaaattaacatattcctggagactatcagccagctggcggccctggcgacctcgaccggcatcatgcagctgctcttatcgtccgtttgcatggcgctgaccagcgcggtgattggatttgcctactaccaaaagcagcagttctatcctgcggtggtctacatcaccaaatcgaacgcctccatgggggtgagtaaatcctatcatacaatccagtcccatgcctaagccttgttttcgtttgcttccaggtcatatacatacaattctttgtaattgtcttcatgttcggcaagctgctaagcaaggtgacaatcagcaagagtaccttgcac

SEQ ID NO: 3461 - DNA, 2128 bp, DROSOPHILA
aagaagatggttcacaaatgtttgataaccattaaattgtaactcgatagaaatattctgatttcagatgaaaagtcattggatgcccgtcacctgcttactgcttggcagtctccaggttctattggcttacaccgaaaacgacttcttggtgaacgccaatcgcaaagaactaactgattcccctttgtttgaatatgataatgtcagaaagcccacaccaaccaagggattgttgtaccccagggattcggagacccgtgaagtgcggagcttggatggaatgtggcaactggttaggagtgatccatatgaccccttacagggaattagggaaaagtggtttatggatgccttgagaaaaaccggaagggagattatttcgatgccagtgcctgcctcctataacgacatcactacagataacttacgagatcacgttggaaccgtatggtatgagcgtactttttttgtgccgcgctcctggaagactatgcaacgcacttggttgcgatttagcagcgttcactattcggccgtggtatggatcaacggaaggaacgccacaagtcactccattggccacctaccctttgagtcagagatctcgggactgctcagctttggcggcgataacaggatcacggtgatgtgtgacaatcgtttgagcaaccgcaccattcctcagggttctgtttacaaggtggctacggatgacggcaccgtgcccatccagagttacactttcgatttttttaactacgcgggaatccaccggagtgtacacttgtacacgaccccgctgctgcacataagcgatttggaggtcaccacccaactaactaaagaaggattgggccgcatagactaccgcgtgtggttggatgctagcaaggagggcctccaaatccagcccatccaacttcgggtgcaactaagggacaaagatggtcatgtggccgcccagcagatcaacaaggcggtctaccatggtactctgctggtgccaaatgcaactccctggtggccctacctaatgcattccgatcccggctacctgtataatcttcaattcgagctgtttgtggccagcaatgagaaggagttggaatctctgcaggatacctaccgcctcccagtgggcatacgtagcttaagttgggacaacgacagcctgctgctgaatggaaaacccctctatctgcggggatttggacggcacgaggactccgatatccgcgggaagggattggataatgcgcttcttgctagagattttaacctgctgaagtggactggagccaatgcatatcgcacctctcactatccttattccgaagagtcaatgcagtttgccgatcagcatggtattatgattattgacgaatgccctgctgtcaatatagatatcttcgagccgcagctactggagaatcacatgtcctcgctggagcaactgatccaccgggacagaaaccatccaagtgttgttgcatggtcggtagccaacgagccgagatcgaacaagcagggagcccttaaatactttgaattcctggtaaactatgtaagagaaatagctcacggacgacctctaaccgcggctataaatgccaactcttccagttgccatttggcgcagtttctggacatcgtgggtttcaatcgctataactcttggtatcagaactcgggccgtactgacatgatacttaacctgttgacgatagaggcccagagttggcgggataggttcggaaagcctgtcatccaatttgagtacggcggcgacactatggagggcatgcactcacttcccgcctttatttggtcggaggaataccaggttgagctcttctctcgccatttcaaggctttcgacgagttacgcggaagaggatggtttattggagagtttgtttggaacttcgccgattttcggaccgcgcagactattacccgcgtgggcggcaacaaaaagggagtctttacaaggaaccgacaacccaaagaagtggctcacattcttaggcggcggtacttcgcattagccaaggagttggatatgtttgggctgcctgaggatctcactgtttacatttccaagcatatccataacgagctttga

SEQ ID NO: 3462 - protein, 686 aa, DROSOPHILA
MKSHWMPVTCLLLGSLQVLLAYTENDFLVNANRKELTDSPLFEYDNVRKPTPTKGLLYPRDSETREVRSLDGMWQLVRSDPYDPLQGIREKWFMDALRKTGREIISMPVPASYNDITTDNLRDHVGTVWYERTFFVPRSWKTMQRTWLRFSSVHYSAVVWINGRNATSHSIGHLPFESEISGLLSFGGDNRITVMCDNRLSNRTIPQGSVYKVATDDGTVPIQSYTFDFFNYAGIHRSVHLYTTPLLHISDLEVTTQLTKEGLGRIDYRVWLDASKEGLQIQPIQLRVQLRDKDGHVAAQQINKAVYHGTLLVPNATPWWPYLMHSDPGYLYNLQFELFVASNEKELESLQDTYRLPVGIRSLSWDNDSLLLNGKPLYLRGFGRHEDSDIRGKGLDNALLARDFNLLKWTGANAYRTSHYPYSEESMQFADQHGIMIIDECPAVNIDIFEPQLLENHMSSLEQLIHRDRNHPSVVAWSVANEPRSNKQGALKYFEFLVNYVREIAHGRPLTAAINANSSSCHLAQFLDIVGFNRYNSWYQNSGRTDMILNLLTIEAQSWRDRFGKPVIQFEYGGDTMEGMHSLPAFIWSEEYQVELFSRHFKAFDELRGRGWFIGEFVWNFADFRTAQTITRVGGNKKGVFTRNRQPKEVAHILRRRYFALAKELDMFGLPEDLTVYISKHIHNEL

SEQ ID NO: 3463 - DNA, 6749 bp, DROSOPHILA
cagttttcccaagttcacttgcaaggtgtgtgtggttaagcccttggccaaactcactgccaattgatcgaaccaggttaagtgcttcaaatccttcctctcatcgtcaggccttgtagcgttatcagtactattcggagcagccaccaggcgcactccatcgtaaatggaaatctctggggaagacatgatgccctcgaagatgtgcaagcttcttgagcggaagcaggaccacagactttggtgtattccagactgatagcagtctcgaagatcactgcgtagctttttcatctgggatatccacgatttgtctgctagatcttctccagccgcgtaacgatcaactaggatcactcccagtaggaatgtaaccagaaccgacggaacacgcattgttcgcccttcgaaagccaaaatgaaactgcatccaataagttgccatcgatgcactttttataacccatcgctgaccagtgatcggcgaccgatctcgtccagtgcacccggtcattggggcagatgtggaaaccctcttctgggatccctaacggtttcttttagcggtcatggtcggcggacagcattgttgatgacttcgaaaccgagtctgggcaacccagaaaagcaaatgggcagtgctaaaataaacttgtcaacagcgatttgcaaatgcccaccatcgcacaattctaatcagatgcgtttcgaccctgtttagtggcaattggccatgaattagacgctcgattgagttggcaagcagtttccatggggcgtgttcttttatctgtgggctagtttcaatgggagtaggaaagtgggcttgacgttgttttctaaattgatttcaaaagatttacgaaggcataagctcgttgaaatggtaagggaataaaataataaaatatagtgcatacaaaaacagttgttttgcttagcaattaaaagcccaacccaaaaacctttaggagtgacaactctctttccgaaaatgcgattgtttttaatattgacttttatttaattattcattattagctaagaggtcattcattgcatttcctttgcttgataattgttttgaacaaattcgtactaagattaaaaggttttatcgctttaatagttacattgagtgcaaaagttgacgttcagtgattggttgatgctctagactttaaactagttaacaaagtttacaaaaacagttctacacttgcctaaatatatacgcaccatggccaaaatcgatattctatactctcaaatgggcttttctttacttttctctaggtttttcctgtgtgtggtaaaaacagttgctcagagctgggtgcccaggaacccggctgttcagatacaatagtactatagatacggcgctgctcctccctgatcctcgttaaaaatatactcagtgcttctgtgtgtttgtgtattttgtgtaaacgcgtcctagcaaaaaatatatcccatatctaattccaccggagcccaatcccgccaatcccttctgcattccgtagactacgtggcgcttggcaggcggtggcgccaatataatcaggatcccgtggccgtcgagggcgaggcagcggttactccgcgtccaaatcgcggcagatacaacccgaacttggactccactcccgccagaagaggaactgccgcccggtagccaccaatgtggtccacgttttcggtggtcaccgacgcagccgcctgttccaggggagtggtgatcttgtgcgcctcggatcccttgggctgagtgcctccgaagtccacgtagaagaggcgctgtagcagttcgtaggtcaccagggtcacaccgaactgtggtgaggaacggaacactcgagctgtggaatgggttataagacattaatagagatcccctaaggaagattgtcccgacttaccggctgtgcccttccagaaggctctgggtccctcctcggccatgatcttcttggtggcatcccatacgccggtgtaggtggtctgtccagatcgggcaaccacctgaaggcgggtcttgatgacgtcggcgggcgtgacaagggaggcggccggaacaccggcgatggcaccggcggccagcagggtgagtggatgattgtagccgtccttgtcggccatcatggccttggtgtgggcgtaggtcgggaagtagatggccgagaatggcacatcgcggaggagacatgctctggctcccttgtagaggccaaagagtcccagttcccggaccaccgaccacgcgcggatcttgctcccactagcgatttctcccgccacctggagacggatcttcacaatctccaggggattggtgaacaccacctgcgacgcaccggcacatccaccagccagaacttccgcccatgtgggaatgttgcccttcttgtcggtgagtttgtccctcaccaaatcattcaccgtcagtttgatggctttctcgggggccacgcccattagctggggcaggagacctctgtagagacccatgaatccctcgtggcgaaccacctgtggattaaatcatcaggattgtatcacttcagggaatttatgatcaggcttacctttttgaagcagtcccatgagtttcgataggcaacttcaccaatataggaacccgctcgctggttctgcattcgagtcttgactagatcgatggggtagaccacagtggcgcccacagctaatggtacataatatatagataggtgaactacctaagaggacaaagtgcatcctaacttaccgccggcaaaggaaccgagagtgaaacggtaagagctctccaggacctgaataaaggcagatcggtccgcaggactctccaccgccttgatctccgccagacgatgtgtcatatgcttggtgtaatgctcgggtgcgatgttgctcaggtcactatagtcgatgcggctggaggaatgggaacataagatccggattagtttcgatcagcacatagtatgtatgggtaagggaaactaagagacaccaactgagttaggtttgaggggacgggattctaggagtggattcataaacgaacaaaaagcagaaatcaggccaaggaaggacgagatcacttgcctactcggaggtatctttctcctgcgcttccaccagctttgagagtgagaattgcgagtgcagcgcagagaagaggggaaataaagagaaacacacggagagaaaaatgatacaaacaagaaaaaattagcacaagacacttgacactcgtttttggggatttccctaggttgatcgcccacgtaaaagatttagacgctaatacaatcggactaagccattgccaagtaaagccataaatacaagtctcctcttttcatagttttagctgtatacttataatgacacctaaacatatatcatttagtcaactgattttctattatgtcaaaatttcacttaaaacaggcaaacctgtgagagctttcatattagaagtcttcgaaaagtaaaggttgctaagttttgcaatacattacacgaacgataagctaaactgaataacatataactcctacaatgaacagtaagaaaaacctaaattagcaaatgattacatcactttaacttataacacaaatgaaatgctagtttttgctaatccgaatccaaagttggcaacactgaacccaaggttatgaccaaagactcaccctgcttgatggacggcgcccgccaggtggaaaagtatgtcgatctccagcggcgtgatttggctcatcgtttgggcggcgaggaggatctgatccttggtgatcatatccgtgcgactgccctcggtggcgtgcaggtagacttgtttgatcagttccatgttgttcagcagcgaggtaaatgcgatgaaatacgggaagctcactttgtgaccctcagttacctagtcaggttgaaaatattatccttagaaggatgatccacaatgatgacaactgcaatagctaccgaaactagattgtccctgacgccgggggtcagtaaatgccgcttaacattaactatgatgtcctggaagtccaatggcgagatgaacccagtgccagctggatccttgctgcggaaggcctccatcgcgtgctcctcgtgaaagtcgtgcagcagctgcgtgaactcagcatagttgataaggcgttgcttcttctacagttcggaaaaatcggtatacattataatcattgaataatcgtatgattgcagtgcacttacatcaccaaagtagcgcttgataaaggggccatctaagctaaaaggtatctttgagtgcagttcagttttttgtacgacatcagcgaagtcagctgttaattggatagaatttgtactagtttattagcatagaaattagtattttctcaccataggaaacagtgccgttgcccttgcggtcgaacagctggaaagcggtcctgtagagggcatctggagtgcagagcagaccctcgaacgcctggaactccgagaaggagatgagtccatccttgctcgtgtccgcaatgttggccagcaggcgcaccgattcctattcgaaatataatgttggttgattaaatgtactgttttaaataacttcagacatgtgatggggaactagaaagtcactaaaagcaattcatttatggtatttcttcgagtgacaggttaatctctttcgagtggacattagacattagacattaggtagttactctctagtggggtgataaacggggagccgtaaaagaaactgcccccgcagacttcggcacctgattgaatcagttccaatttgcggggcacctacgatccgcgatcaggttcagttcggttctcagaccataaagctgataagcggacccattaaaatagaatctgtgacgttggcggttagacacgaggcagccaagtgattgccgggttatttggtttatgggtttactacatgtttgcgggtgggtcaaggtcaacccgtgaatcacagtggctagtggttagttttacggctctgatttatgtttatagtcaactatgtatgtgccgccgccaacgggggcgctatctggcgataagatatgtccggtcttatcgggcggctatgcaatataaccttgcaatgacccgactgcagacaaagtactcacgtcattaaatgcagattcggaaaagagtcccaggaactttcgcacgaagtcctcgctggtcatatagtgctcgccattcttctggatggatgcgtacttcaggaacacctctcgcaacttttcggtgccggcgcgcttcaaaagcgacggagactgcaagaagaattgcaaagtaaataattagttgtggtaaagggttgcttcattggggtttcttctcctctacttgattattttgaatatctttttgctgtatatatgaacgtatttacttatacttttatctttatgggtagttcacaaacaacccttcgctacccgccactgtctcagtcgcactctcatttctgcgctctcccgcctgacagtcaattgcaaaagcaacacgtgtcagtcgcttggcaatcgcagctgaaacttacatttggcaaactcttggtcaacggcattcctgttttttagctttgactgcttctggttcagtgttgtttccgcgagcaattcccgcgtctaattagctcatcaatgcaagccgatctaatccaatccgcccgagtcgaaaccacctcgtcctcgttccgcgattaactaactgcgagtggagcgtactggcgagcgaagaaccgccggaatcagagcccccaacatgagcagaaccgctgggagagagtctgggagagctgagagtgaaattttctgtctaccaaactcttatttgctcagctcgtttcaatgtcaataagctctcttataacgactctcttatgatcgttatgctgggagagggtggggttatatgttctttacttctataatattactcccttgtaaacaaaatatatcataacattctattatgtttgaaaaaaaaaatattttggttcaaaaaatgttttattaatttcctcagaatgtttgcttatctttcaatccgttgcatatatatttttatttatttctattaagtttactaaataggtaactattttaaatagtattacactgcttgtctgagttgtatgtagatcagctgtggtgcacagcgaagcaatctcaaccatgagcaaacactttccctacaagtattgagtaccgggtagccgatagtcgaatatataataccctgtttcgtatctctgccacttgtttactcgctctcgctacaattccgcctgagtaatcacccagaggtcagcagctccgtcaacaacaggttcaacttcgatgacaatacgtccgattcgaattcgattccctagcatttatcaattgcctcattgacgtaatacgattagcacgcgatgaaattgtaatttccccgacaacaattctccctcccactttcttttctttctttttttactgggggtccctcacattctcggatgcgcttgtttgtgccagagaattgcgaaaaacaaaagcagatttcataataaaatcagcgaaaacacgacagcatttatggagaaaagttaagccaaattcagaagtatgattgaagttaaataccctggggaataaagcaattgattgaaattgataacatcagatagcttctgattaaaattataataatgg

SEQ ID NO: 3464 - DNA, 2747 bp, DROSOPHILA
cggaacgaggacgaggtggtttcgactcgggcggattggattagatcggcttgcattgatgagctaattagacgcgggaattgctcgcggaaacaacactgaaccagaagcagtcaaagctaaaaaacaggaatgccgttgaccaagagtttgccaaattctccgtcgcttttgaagcgcgccggcaccgaaaagttgcgagaggtgttcctgaagtacgcatccatccagaagaatggcgagcactatatgaccagcgaggacttcgtgcgaaagttcctgggactcttttccgaatctgcatttaatgacgaatcggtgcgcctgctggccaacattgcggacacgagcaaggatggactcatctccttctcggagttccaggcgttcgagggtctgctctgcactccagatgccctctacaggaccgctttccagctgttcgaccgcaagggcaacggcactgtttcctatgctgacttcgctgatgtcgtacaaaaaactgaactgcactcaaagataccttttagcttagatggcccctttatcaagcgctactttggtgataagaagcaacgccttatcaactatgctgagttcacgcagctgctgcacgactttcacgaggagcacgcgatggaggccttccgcagcaaggatccagctggcactgggttcatctcgccattggacttccaggacatcatagttaatgttaagcggcatttactgacccccggcgtcagggacaatctagtttcggtaactgagggtcacaaagtgagcttcccgtatttcatcgcatttacctcgctgctgaacaacatggaactgatcaaacaagtctacctgcacgccaccgagggcagtcgcacggatatgatcaccaaggatcagatcctcctcgccgcccaaacgatgagccaaatcacgccgctggagatcgacatacttttccacctggcgggcgccgtccatcaagcaggccgcatcgactatagtgacctgagcaacatcgcacccgagcattacaccaagcatatgacacatcgtctggcggagatcaaggcggtggagagtcctgcggaccgatctgcctttattcaggtcctggagagctcttaccgtttcactctcggttcctttgccggcgctgtgggcgccactgtggtctaccccatcgatctagtcaagactcgaatgcagaaccagcgagcgggttcctatattggtgaagttgcctatcgaaactcatgggactgcttcaaaaaggtggttcgccacgagggattcatgggtctctacagaggtctcctgccccagctaatgggcgtggcccccgagaaagccatcaaactgacggtgaatgatttggtgagggacaaactcaccgacaagaagggcaacattcccacatgggcggaagttctggctggtggatgtgccggtgcgtcgcaggtggtgttcaccaatcccctggagattgtgaagatccgtctccaggtggcgggagaaatcgctagtgggagcaagatccgcgcgtggtcggtggtccgggaactgggactctttggcctctacaagggagccagagcatgtctcctccgcgatgtgccattctcggccatctacttcccgacctacgcccacaccaaggccatgatggccgacaaggacggctacaatcatccactcaccctgctggccgccggtgccatcgccggtgttccggccgcctcccttgtcacgcccgccgacgtcatcaagacccgccttcaggtggttgcccgatctggacagaccacctacaccggcgtatgggatgccaccaagaagatcatggccgaggagggacccagagccttctggaagggcacagccgctcgagtgttccgttcctcaccacagttcggtgtgaccctggtgacctacgaactgctacagcgcctcttctacgtggacttcggaggcactcagcccaagggatccgaggcgcacaagatcaccactcccctggaacaggcggctgcgtcggtgaccaccgaaaacgtggaccacattggtggctaccgggcggcagttcctcttctggcgggagtggagtccaagttcgggttgtatctgccgcgatttggacgcggagtaaccgctgcctcgccctcgacggccacgggatcctgattatattggcgccaccgcctgccaagcgccacgtagtctacggaatgcagaagggattggcgggattgggctccggtggaattagatatgggatatattttttgctaggacgcgtttacacaaaatacacaaacacacagaagcactgagtatatttttaacgaggatcagggaggagcagcgccgtatctatagtactattgtatctgaacagccgggttcctgggcacccagctctgagcaactgtttttaccacacacaggaaaaacctagagaaaagtaaagaaaagcccatttgagagtatagaatatcgattttggccatggtgcgtatatatttaggcaagtgtagaactgtttttgtaaactttgttaactagtttaaagtctagagcatcaaccaatcactgaacgtcaacttttgcactcaatgtaactattaaagcgataaaaccttttaatcttagtacgaatttgttcaaaacaattatcaagcaaaggaaatgcaatgaatgacctcttagctaataatgaataattaaataaaagtcaatattaaaaacaa

SEQ ID NO: 3465 - protein, 682 aa, DROSOPHILA
MPLTKSLPNSPSLLKRAGTEKLREVFLKYASIQKNGEHYMTSEDFVRKFLGLFSESAFNDESVRLLANIADTSKDGLISFSEFQAFEGLLCTPDALYRTAFQLFDRKGNGTVSYADFADVVQKTELHSKIPFSLDGPFIKRYFGDKKQRLINYAEFTQLLHDFHEEHAMEAFRSKDPAGTGFISPLDFQDIIVNVKRHLLTPGVRDNLVSVTEGHKVSFPYFIAFTSLLNNMELIKQVYLHATEGSRTDMITKDQILLAAQTMSQITPLEIDILFHLAGAVHQAGRIDYSDLSNIAPEHYTKHMTHRLAEIKAVESPADRSAFIQVLESSYRFTLGSFAGAVGATVVYPIDLVKTRMQNQRAGSYIGEVAYRNSWDCFKKVVRHEGFMGLYRGLLPQLMGVAPEKAIKLTVNDLVRDKLTDKKGNIPTWAEVLAGGCAGASQVVFTNPLEIVKIRLQVAGEIASGSKIRAWSVVRELGLFGLYKGARACLLRDVPFSAIYFPTYAHTKAMMADKDGYNHPLTLLAAGAIAGVPAASLVTPADVIKTRLQVVARSGQTTYTGVWDATKKIMAEEGPRAFWKGTAARVFRSSPQFGVTLVTYELLQRLFYVDFGGTQPKGSEAHKITTPLEQAAASVTTENVDHIGGYRAAVPLLAGVESKFGLYLPRFGRGVTAASPSTATGS

SEQ ID NO: 3466 - DNA, 4229 bp, DROSOPHILA
ggaaatcgatccaaatgccggtctcaacgagctgcccgaggagtacttcgatggcgaaaatgaggcgctgcgcgtgagcaagggcgtcatgcaggagatgatcaacgccctgcccggcatcgacgaggcgatgagctatgcagaggttatgaagctggtcaagggcatgaacttctcggtagtcgtcttcgacacggcgcccacgggacacacgctgcgtctgattgcatttccccaggtggtggagaaggggctgggcaagctgctgcggctcaagatgaaggtggcgcccctgctgtcacagttcgtctccatgctgggcatggctgatgtgaacgctgacacactctcccagaagctggacgacatgctgcgcgttatcacccaggtcaacgagcagttcaagaacccagtacgtagaaacatgtatttagctcgtacaacgcctaatccgcattcgtccttcggcaggatcaaactacattcgtctgcgtgtgcatagcagagttcttctcgctgtacgagacggaacgacttgtgcaagagctaaccaagtgcggcatcgacgtccacaacatcattgtaaaccaactgctgtttctgcagaactcgcacgactcgtgcagcatgtgcgcctcccgcttcaagattcaggagaagtacctggaccagattgccgacctgtatgaagacttccacgtaaccaagttgccgctcctcgagaaagaggtgcgcggtccagagagcatccgttctttctccgagaaccttatgaagccctacaaccccaagggcgagcccaaggaataggatagcccgtccaaccctttacccatccgtttgtaagtttcttccttagtttgtgtgaacagaaagtgcgtaaaataaattaaagttgaggcagcgatccccgaagggatctgcttcgacgtgtaatgcgtagacaacgcttaacggatgcagtattccaaactggagagggttacaacgaatgatactttcaaagaccgcccccggcacgctccatttgcattacggtgggaaagttgctgccttgcatctgccttttgtggtccagatacagccgtgcgtaccgcaggtactcggtgttgccctgcacaatagccgacatgagcagaaggaactcatacaggttcaccttgccctgggcatggacatcaatgtcccgcaggacatcgtgcatcaggtcgacgggcacctcctttacgcccatcgttttcattgccttgcagcagtctgcaatcgacacgtaccccgtattgttatcatccatttgcctgaactgcccggcaaacttgcgcacttggcgcacgctcatcttaatgggaatgctcatctgcgaagcgctctccttggtcagctggcccatctgggagttaagaaaagttcgcgtctggcggatctgctttttaatttgatctcgcgaccagttcagctccttggccatgatgttggccacttgcggcagtatctcctcggccacctggacatttaaaaaggccactcgcagtcgccgcgccaccatgtcctccagcgtgcaagcaaagtctcggacgccctgttttacctccgcctcaatatacgggaactccgagtggaggcgcttacccacaatgggccatgcctttccactgctgtccgcactcacggccactttgaaggcattcgatccgtacgtgttcgacaggtgctcagccacgtcccgctccattccgaagtcctgcaccagccgtatgaacatcttcggactccagccactggctccgtccagtttgcaggactctgcggtcaccgattccttacgcagcggtgaaagatctccataccggatggctgcattcacggttttctcagccagaacccgaaacgacgaccacgtgccaccaacgatggaaagcatgtttcgaggtcctagctggattacatggttcttgaaacgggtatggtgcagtgtatcggactgcacgggcagaggtttgtaaccaccccaaacggccagcacatcgcatcttcgcacatcgaagttgggcgttacaaagtgcttaacgcaatccagtagggactgcacatccgtctccgtgggctgcgtgtcctgctcgggcagattgagaggctcatcgctggacccgactagcgtatgcccctgccagggcagaaaaaagatggatcgtccagagggcgtgtgcgggtcgaagacgcccacctcctccggacagtagaagcggggcatgacgatgatcgaggaccagctgcgcgtgcagagcggcttggcttccgaatcctccatctggcggaggctgtcgctcatgtggccagtggcgttgaccaccaccttcgcccgtatgctatacttcttgcccgtcagctggtccaccgcctccgcgcccgccacattgccatccttgttcttgatgagtctcgagaccttcatgtggttgcagatatctgctccgtaacgagccgctgtaagggcaaccgaaaggcacatcctggcatcgtcgtgctgaccctcgtagaagacgaaggcgccaaacagctcctggcgtcgcagcatcggaaatacttccaacgcgtcgtcggcactcagatactgaaaactcctggtggccttgggcgccatcaggtggtaaatctttagcttcatgtagtagagcggagcctgccaccagtggtggacgggcagcaggatggggaccggctggctaagatgcggcgccagcttgccaatgtggctgcgttcctgcaaggagcagcgaacacgccgaaaggcagccacgtccagacgcgagatggcctgctccagatccctgaggccgccgtgcaacagtttgctcgatttggaggaagtgccgctgccaaagtcattcgcttccaccagggcggtcttcaagccccgcgtggcagcatcgagagcacagccggaacccacggcgccgccgccaatgatgaggatgtcgtagtgggttcgcttaaaggcctccaggcacatctttcgcgtgggcagctcccgtttcatctgtggcactggagtcgagtccgcttgcctttcatcgaatccaaaagcgccgtggcccagcttggagctgcccagcatcaccgccatttgaatgatcttggccatggtattaccccctgctttacacaccaaatttggactatttttgcgtgggtcaacaatatatctgacatctaacgaaagcacaaaaatttggacgggtgtttgcttgcttttggaaatatgtttaatgtacatacatgcgaataaaaacttatcgttttcgttccgtgcctcaaatgttggaatatcaatgggataaattacttttagagtctagaaccgccgtctgaaggaattacacgtgtagagggttgtacaaaaacgccaaatgccaaaaattatcgttaaaacttagcacaaatttactataaaaagctttcccgctccactgtcccgctcctcatgtgactctcgggctctccgtttgttgattaactaagcgactccggagcgggctggaaagtctctgctgggcattgtggctcctcctattgcttggcaccgccaaagaagaacttgtagaagagcgtggccaccaagcacaggacgaggggcaccagccacgacttcacagaactctcctcggtttgctgttccgtgctccaggtcggctccgacttctgggccacgcttgtcctttcgctctccaccagctcaccgattttgtacttcttcatcatgtcgcgggcatcgttgctgtggccaacgtcctcaaagttctccgtggcatctttgccggcctgctcgatgagcacctcttcgccaccgggatgctgtcgtgaaggaaaagagacagattaatatattcgcataaataactgttggctgatcttggataaatgctaatggacgtctgaccctgaatttcatggaccagacagcagagggtatggtatcaaggtataaagtcgggaatgcttcgaaacattcgtttatgcggaagctttatggtaatattttatacttccgttgcgttgaaagtaaaaatatcacaactaatttcagttacagatttaatttggcacttataagccaataaagttacagaaactttgatcctaagaactcgagcgaagttacgttttgattgtaccattataataatgttgaaactttgtactatagcttagagtcatgctgaaaaagccgc

SEQ ID NO: 3467 - DNA, 2229 bp, DROSOPHILA
atttttgtgctttcgttagatgtcagatatattgttgacccacgcaaaaatagtccaaatttggtgtgtaaagcagggggtaataccatggccaagatcattcaaatggcggtgatgctgggcagctccaagctgggccacggcgcttttggattcgatgaaaggcaagcggactcgactccagtgccacagatgaaacgggagctgcccacgcgaaagatgtgcctggaggcctttaagcgaacccactacgacatcctcatcattggcggcggcgccgtgggttccggctgtgctctcgatgctgccacgcggggcttgaagaccgccctggtggaagcgaatgactttggcagcggcacttcctccaaatcgagcaaactgttgcacggcggcctcagggatctggagcaggccatctcgcgtctggacgtggctgcctttcggcgtgttcgctgctccttgcaggaacgcagccacattggcaagctggcgccgcatcttagccagccggtccccatcctgctgcccgtccaccactggtggcaggctccgctctactacatgaagctaaagatttaccacctgatggcgcccaaggccaccaggagttttcagtatctgagtgccgacgacgcgttggaagtatttccgatgctgcgacgccaggagctgtttggcgccttcgtcttctacgagggtcagcacgacgatgccaggatgtgcctttcggttgcccttacagcggctcgttacggagcagatatctgcaaccacatgaaggtctcgagactcatcaagaacaaggatggcaatgtggcgggcgcggaggcggtggaccagctgacgggcaagaagtatagcatacgggcgaaggtggtggtcaacgccactggccacatgagcgacagcctccgccagatggaggattcggaagccaagccgctctgcacgcgcagctggtcctcgatcatcgtcatgccccgcttctactgtccggaggaggtgggcgtcttcgacccgcacacgccctctggacgatccatcttttttctgccctggcaggggcatacgctagtcgggtccagcgatgagcctctcaatctgcccgagcaggacacgcagcccacggagacggatgtgcagtccctactggattgcgttaagcactttgtaacgcccaacttcgatgtgcgaagatgcgatgtgctggccgtttggggtggttacaaacctctgcccgtgcagtccgatacactgcaccatacccgtttcaagaaccatgtaatccagctaggacctcgaaacatgctttccatcgttggtggcacgtggtcgtcgtttcgggttctggctgagaaaaccgtgaatgcagccatccggtatggagatctttcaccgctgcgtaaggaatcggtgaccgcagagtcctgcaaactggacggagccagtggctggagtccgaagatgttcatacggctggtgcaggacttcggaatggagcgggacgtggctgagcacctgtcgaacacgtacggatcgaatgccttcaaagtggccgtgagtgcggacagcagtggaaaggcatggcccattgtgggtaagcgcctccactcggagttcccgtatattgaggcggaggtaaaacagggcgtccgagactttgcttgcacgctggaggacatggtggcgcggcgactgcgagtggcctttttaaatgtccaggtggccgaggagatactgccgcaagtggccaacatcatggccaaggagctgaactggtcgcgagatcaaattaaaaagcagatccgccagacgcgaacttttcttaactcccagatgggccagctgaccaaggagagcgcttcgcagatgagcattcccattaagatgagcgtgcgccaagtgcgcaagtttgccgggcagttcaggcaaatggatgataacaatacggggtacgtgtcgattgcagactgctgcaaggcaatgaaaacgatgggcgtaaaggaggtgcccgtcgacctgatgcacgatgtcctgcgggacattgatgtccatgcccagggcaaggtgaacctgtatgagttccttctgctcatgtcggctattgtgcagggcaacaccgagtacctgcggtacgcacggctgtatctggaccacaaaaggcagatgcaaggcagcaactttcccaccgtaatgcaaatggagcgtgccgggggcggtctttga

SEQ ID NO: 3468 - protein, 713 aa, DROSOPHILA
MAKIIQMAVMLGSSKLGHGAFGFDERQADSTPVPQMKRELPTRKMCLEAFKRTHYDILIIGGGAVGSGCALDAATRGLKTALVEANDFGSGTSSKSSKLLHGGLRDLEQAISRLDVAAFRRVRCSLQERSHIGKLAPHLSQPVPILLPVHHWWQAPLYYMKLKIYHLMAPKATRSFQYLSADDALEVFPMLRRQELFGAFVFYEGQHDDARMCLSVALTAARYGADICNHMKVSRLIKNKDGNVAGAEAVDQLTGKKYSIRAKVVVNATGHMSDSLRQMEDSEAKPLCTRSWSSIIVMPRFYCPEEVGVFDPHTPSGRSIFFLPWQGHTLVGSSDEPLNLPEQDTQPTETDVQSLLDCVKHFVTPNFDVRRCDVLAVWGGYKPLPVQSDTLHHTRFKNHVIQLGPRNMLSIVGGTWSSFRVLAEKTVNAAIRYGDLSPLRKESVTAESCKLDGASGWSPKMFIRLVQDFGMERDVAEHLSNTYGSNAFKVAVSADSSGKAWPIVGKRLHSEFPYIEAEVKQGVRDFACTLEDMVARRLRVAFLNVQVAEEILPQVANIMAKELNWSRDQIKKQIRQTRTFLNSQMGQLTKESASQMSIPIKMSVRQVRKFAGQFRQMDDNNTGYVSIADCCKAMKTMGVKEVPVDLMHDVLRDIDVHAQGKVNLYEFLLLMSAIVQGNTEYLRYARLYLDHKRQMQGSNFPTVMQMERAGGGL

SEQ ID NO: 3469 - DNA, 10110 bp, DROSOPHILA
cagttttcccaagttcacttgcaaggtgtgtgtggttaagcccttggccaaactcactgccaattgatcgaaccaggttaagtgcttcaaatccttcctctcatcgtcaggccttgtagcgttatcagtactattcggagcagccaccaggcgcactccatcgtaaatggaaatctctggggaagacatgatgccctcgaagatgtgcaagcttcttgagcggaagcaggaccacagactttggtgtattccagactgatagcagtctcgaagatcactgcgtagctttttcatctgggatatccacgatttgtctgctagatcttctccagccgcgtaacgatcaactaggatcactcccagtaggaatgtaaccagaaccgacggaacacgcattgttcgcccttcgaaagccaaaatgaaactgcatccaataagttgccatcgatgcactttttataacccatcgctgaccagtgatcggcgaccgatctcgtccagtgcacccggtcattggggcagatgtggaaaccctcttctgggatccctaacggtttcttttagcggtcatggtcggcggacagcattgttgatgacttcgaaaccgagtctgggcaacccagaaaagcaaatgggcagtgctaaaataaacttgtcaacagcgatttgcaaatgcccaccatcgcacaattctaatcagatgcgtttcgaccctgtttagtggcaattggccatgaattagacgctcgattgagttggcaagcagtttccatggggcgtgttcttttatctgtgggctagtttcaatgggagtaggaaagtgggcttgacgttgttttctaaattgatttcaaaagatttacgaaggcataagctcgttgaaatggtaagggaataaaataataaaatatagtgcatacaaaaacagttgttttgcttagcaattaaaagcccaacccaaaaacctttaggagtgacaactctctttccgaaaatgcgattgtttttaatattgacttttatttaattattcattattagctaagaggtcattcattgcatttcctttgcttgataattgttttgaacaaattcgtactaagattaaaaggttttatcgctttaatagttacattgagtgcaaaagttgacgttcagtgattggttgatgctctagactttaaactagttaacaaagtttacaaaaacagttctacacttgcctaaatatatacgcaccatggccaaaatcgatattctatactctcaaatgggcttttctttacttttctctaggtttttcctgtgtgtggtaaaaacagttgctcagagctgggtgcccaggaacccggctgttcagatacaatagtactatagatacggcgctgctcctccctgatcctcgttaaaaatatactcagtgcttctgtgtgtttgtgtattttgtgtaaacgcgtcctagcaaaaaatatatcccatatctaattccaccggagcccaatcccgccaatcccttctgcattccgtagactacgtggcgcttggcaggcggtggcgccaatataatcaggatcccgtggccgtcgagggcgaggcagcggttactccgcgtccaaatcgcggcagatacaacccgaacttggactccactcccgccagaagaggaactgccgcccggtagccaccaatgtggtccacgttttcggtggtcaccgacgcagccgcctgttccaggggagtggtgatcttgtgcgcctcggatcccttgggctgagtgcctccgaagtccacgtagaagaggcgctgtagcagttcgtaggtcaccagggtcacaccgaactgtggtgaggaacggaacactcgagctgtggaatgggttataagacattaatagagatcccctaaggaagattgtcccgacttaccggctgtgcccttccagaaggctctgggtccctcctcggccatgatcttcttggtggcatcccatacgccggtgtaggtggtctgtccagatcgggcaaccacctgaaggcgggtcttgatgacgtcggcgggcgtgacaagggaggcggccggaacaccggcgatggcaccggcggccagcagggtgagtggatgattgtagccgtccttgtcggccatcatggccttggtgtgggcgtaggtcgggaagtagatggccgagaatggcacatcgcggaggagacatgctctggctcccttgtagaggccaaagagtcccagttcccggaccaccgaccacgcgcggatcttgctcccactagcgatttctcccgccacctggagacggatcttcacaatctccaggggattggtgaacaccacctgcgacgcaccggcacatccaccagccagaacttccgcccatgtgggaatgttgcccttcttgtcggtgagtttgtccctcaccaaatcattcaccgtcagtttgatggctttctcgggggccacgcccattagctggggcaggagacctctgtagagacccatgaatccctcgtggcgaaccacctgtggattaaatcatcaggattgtatcacttcagggaatttatgatcaggcttacctttttgaagcagtcccatgagtttcgataggcaacttcaccaatataggaacccgctcgctggttctgcattcgagtcttgactagatcgatggggtagaccacagtggcgcccacagctaatggtacataatatatagataggtgaactacctaagaggacaaagtgcatcctaacttaccgccggcaaaggaaccgagagtgaaacggtaagagctctccaggacctgaataaaggcagatcggtccgcaggactctccaccgccttgatctccgccagacgatgtgtcatatgcttggtgtaatgctcgggtgcgatgttgctcaggtcactatagtcgatgcggctggaggaatgggaacataagatccggattagtttcgatcagcacatagtatgtatgggtaagggaaactaagagacaccaactgagttaggtttgaggggacgggattctaggagtggattcataaacgaacaaaaagcagaaatcaggccaaggaaggacgagatcacttgcctactcggaggtatctttctcctgcgcttccaccagctttgagagtgagaattgcgagtgcagcgcagagaagaggggaaataaagagaaacacacggagagaaaaatgatacaaacaagaaaaaattagcacaagacacttgacactcgtttttggggatttccctaggttgatcgcccacgtaaaagatttagacgctaatacaatcggactaagccattgccaagtaaagccataaatacaagtctcctcttttcatagttttagctgtatacttataatgacacctaaacatatatcatttagtcaactgattttctattatgtcaaaatttcacttaaaacaggcaaacctgtgagagctttcatattagaagtcttcgaaaagtaaaggttgctaagttttgcaatacattacacgaacgataagctaaactgaataacatataactcctacaatgaacagtaagaaaaacctaaattagcaaatgattacatcactttaacttataacacaaatgaaatgctagtttttgctaatccgaatccaaagttggcaacactgaacccaaggttatgaccaaagactcaccctgcttgatggacggcgcccgccaggtggaaaagtatgtcgatctccagcggcgtgatttggctcatcgtttgggcggcgaggaggatctgatccttggtgatcatatccgtgcgactgccctcggtggcgtgcaggtagacttgtttgatcagttccatgttgttcagcagcgaggtaaatgcgatgaaatacgggaagctcactttgtgaccctcagttacctagtcaggttgaaaatattatccttagaaggatgatccacaatgatgacaactgcaatagctaccgaaactagattgtccctgacgccgggggtcagtaaatgccgcttaacattaactatgatgtcctggaagtccaatggcgagatgaacccagtgccagctggatccttgctgcggaaggcctccatcgcgtgctcctcgtgaaagtcgtgcagcagctgcgtgaactcagcatagttgataaggcgttgcttcttctacagttcggaaaaatcggtatacattataatcattgaataatcgtatgattgcagtgcacttacatcaccaaagtagcgcttgataaaggggccatctaagctaaaaggtatctttgagtgcagttcagttttttgtacgacatcagcgaagtcagctgttaattggatagaatttgtactagtttattagcatagaaattagtattttctcaccataggaaacagtgccgttgcccttgcggtcgaacagctggaaagcggtcctgtagagggcatctggagtgcagagcagaccctcgaacgcctggaactccgagaaggagatgagtccatccttgctcgtgtccgcaatgttggccagcaggcgcaccgattcctattcgaaatataatgttggttgattaaatgtactgttttaaataacttcagacatgtgatggggaactagaaagtcactaaaagcaattcatttatggtatttcttcgagtgacaggttaatctctttcgagtggacattagacattagacattaggtagttactctctagtggggtgataaacggggagccgtaaaagaaactgcccccgcagacttcggcacctgattgaatcagttccaatttgcggggcacctacgatccgcgatcaggttcagttcggttctcagaccataaagctgataagcggacccattaaaatagaatctgtgacgttggcggttagacacgaggcagccaagtgattgccgggttatttggtttatgggtttactacatgtttgcgggtgggtcaaggtcaacccgtgaatcacagtggctagtggttagttttacggctctgatttatgtttatagtcaactatgtatgtgccgccgccaacgggggcgctatctggcgataagatatgtccggtcttatcgggcggctatgcaatataaccttgcaatgacccgactgcagacaaagtactcacgtcattaaatgcagattcggaaaagagtcccaggaactttcgcacgaagtcctcgctggtcatatagtgctcgccattcttctggatggatgcgtacttcaggaacacctctcgcaacttttcggtgccggcgcgcttcaaaagcgacggagactgcaagaagaattgcaaagtaaataattagttgtggtaaagggttgcttcattggggtttcttctcctctacttgattattttgaatatctttttgctgtatatatgaacgtatttacttatacttttatctttatgggtagttcacaaacaacccttcgctacccgccactgtctcagtcgcactctcatttctgcgctctcccgcctgacagtcaattgcaaaagcaacacgtgtcagtcgcttggcaatcgcagctgaaacttacatttggcaaactcttggtcaacggcattcctgttttttagctttgactgcttctggttcagtgttgtttccgcgagcaattcccgcgtctaattagctcatcaatgcaagccgatctaatccaatccgcccgagtcgaaaccacctcgtcctcgttccgcgattaactaactgcgagtggagcgtactggcgagcgaagaaccgccggaatcagagcccccaacatgagcagaaccgctgggagagagtctgggagagctgagagtgaaattttctgtctaccaaactcttatttgctcagctcgtttcaatgtcaataagctctcttataacgactctcttatgatcgttatgctgggagagggtggggttatatgttctttacttctataatattactcccttgtaaacaaaatatatcataacattctattatgtttgaaaaaaaaaatattttggttcaaaaaatgttttattaatttcctcagaatgtttgcttatctttcaatccgttgcatatatatttttatttatttctattaagtttactaaataggtaactattttaaatagtattacactgcttgtctgagttgtatgtagatcagctgtggtgcacagcgaagcaatctcaaccatgagcaaacactttccctacaagtattgagtaccgggtagccgatagtcgaatatataataccctgtttcgtatctctgccacttgtttactcgctctcgctacaattccgcctgagtaatcacccagaggtcagcagctccgtcaacaacaggttcaacttcgatgacaatacgtccgattcgaattcgattccctagcatttatcaattgcctcattgacgtaatacgattagcacgcgatgaaattgtaatttccccgacaacaattctccctcccactttcttttctttctttttttactgggggtccctcacattctcggatgcgcttgtttgtgccagagaattgcgaaaaacaaaagcagatttcataataaaatcagcgaaaacacgacagcatttatggagaaaagttaagccaaattcagaagtatgattgaagttaaataccctggggaataaagcaattgattgaaattgataacatcagatagcttctgattaaaattataataatgggatagagttccctaatgacctgctctggaaacatttgaatacttgaaaaaatgggtacctaacacctcacatctattcatacatagatctttcactttagtgcccttatattgattgcttcactgtttttgagatttcgtatggtggaaattggatttattgaatggggttttatccccccacccactttgattgtagtagtctgtcggatccgtaaaagtgtcgtattgtcctttgcgaatcgattggcagaggcaataaatgaattcgttcgccagcaatttgctgcacaatttgcgatgccatcaagaattcatgggaagcagcgaaacacgaaaattgaattgttcacttgatgaggatatataattcatattaaagcagggatgtgtatattaactttcatttgaactcaaaagtaattaaatggccatgtttgcgatgcgactgtttattaatgcgtgtcgtttgttcatttactttgatatgaatgaaaatgctggtcagtaaacagggatatattgaattttgaatattacttttccagaatccccctttaaaaataaatatgcatattaagacattgacttttgacagattcactgggtgtgaaataaaccaaatcaaaggaagttccgcttaaaccccggttcaatttgttgccactgcagactgaacttgtgaatccctagctgtacttgtatgctgttttatatattcatgcccagcaaaagctgttttttatccccctttttattcgggcagcgcaaacaagcggaaaatgttacacatacgccccgtgtgacggcagacagaacgatttgtttgtttgtttgctcgggttttgtggcccctcccccgtgctcgcctacccctttccatgacttctgctttgttgcatttgcataatgagttcttcttggccacggtcgtccgaccaagccaaaggttgcaggcacaggtcgcttttccgccggttttcccagattttccccgccttttttaccttcagctgcctgcagcgagtggcacgtgcatgtcactgttactatatctttgtatctgtatcgatgggcacggagaagatacaaagggaaaatatataacttaactacattttgtaggcgaaaatattattatttaatttcacttttccatttagttcttttaaaaaacaaaactatttaaactatgaaaaatgtccaattaattgctcgttaatttttttctctgtcattgccatggaaatttgttgcgcgagcggcaaagttttgtttttgtttgcaatttccgtcaaggtcaaaccggctgttcattatcgctgtggttgtggttgtttcggtgcccgaatggggttattccagccacccccccaaccaaactgaagtcatatacagtgaaatgagcaactcgaagctcgagaaattccaccgaaaatatccagacttttgtaatagtgaattccgttgactttcgcactggtttacgcctcttctaactacccaagttcaacaattttcggttggagggtgctataatggggactcagcgacagctgcaccactggcccattacgtatacgcagggtgagccatgggaccgcagtcagctggctaattgacgacagcaggcaaacaaaagagagattccaaaggcgagagacgtgtgcatatatgtagaaagagaccatatagaacaagtggctggagcgatcggtgactgtcaactgagaatcggggaatctcggcctgagatggcggtgacttttccaaagtcgtgagcagagaaaacctggccacaaatccgtgggactgaaggtgattcgctggatgctcgcaaagctctcaaatgatattgttttatttctttatataattgtttggcctgcgagctttccgagatatccagtatttatctttcgactatttcgtaatgccctctatcactccttattgatattaattagtccggtctggaggcacttccgcaatcggtcagttatcagatcaatagctaattagtttcctgacgaaacgttacctcatccttatcgtgcatattcacttatacgtatgaacacaattgaagtctgtgaatctttgcgaaattcaggcacgttcgcactatctgtttgagtgttcgtttatcggagacttcggcttaacttgatctaactattggttaaatatgcttttaatgatcactcgcgagtcgttgtggctttttcaatactttaaaggcttgctggttagtataaataatatactttcactgcccgaaccggatatatttattgccaacttgtgatttttatatctgagggacgcgcgcgattttctcggctgtcatccgctggcgtcgcgctacttttccattctgaactgtcggaatgatagaagcgagagcttttcccgctttcagtaacttttgcgaccgagagagcgccgcaaaaaataataaataaaagagaagccctcggcgattgcatttcagattcatattaattttgattctcaagtcagtttgttattgtttttttttttttttttttgcccgggctgtgctctgcctctttccactgcccaataaacaatgccatctgtgcaactactattcataagaaggggtctaatcagggtgttggtgtgatgtgggctgaagtgggctttccctaaggccaaacataaaacacatttgataattgagaactgcagtgcgaatcaggggtgcaatgtgttcacggaagtaatttcgttctaagtggccttaaggtgcgaccattggcttcgtgtctcttcatctcatctcttacaatcaaggctaagttgtcagggatttaagattaatacaagaacatgctttgaaatatctagataaaggattcacttaacattaggagctccaatagatcgatctaactgtaagtcatacaatgtatttacgaagaataggtacaaatcctttaattaaacaaattcatgtttctaatctacattttcgagttccaattagatagttctattcgtgtgacccccgctgttcattcattcacatgcatgtctggcaaggtcgcaattttcgagcgtgccaagtggttgacgatttcacgttgtgcaaatgttcttaaatttggttgcattcattcacagctgctcgagtttctctgtttacaatgtaaacacgtgctgtgcgaaataacacaccgaaaagagcgaaagagaggtcaattcggtgagagcaaaggagagaagatagcgcagagacattgcgtatacgcatcgttggccatctgcggagggcacgtgaatgaagcgtgttttgggcgggtataaaaatagccaggcaggcgagaaaattctgt

SEQ ID NO: 3470 - DNA, 2909 bp, DROSOPHILA
cgacgccagcggatgacagccgagaaaatcgcgcgcgtccctcagatataaaaatcacaagttggcaataaatatatccggttcgggcagtgaaagtatattatttatactaaccagcaagcctttaaagtattgaaaaagccacaacgactcgcgagtgatcattaaaagcatatttaaccaatagttagatcaagttaagccgaagtctccgataaacgaacactcaaacagatagtgcgaacgtgcctgaatttcgcaaagattcacagacttcaattgtgttcatacgtataagtgaatatgcacgataaggatgagtctccgtcgcttttgaagcgcgccggcaccgaaaagttgcgagaggtgttcctgaagtacgcatccatccagaagaatggcgagcactatatgaccagcgaggacttcgtgcgaaagttcctgggactcttttccgaatctgcatttaatgacgaatcggtgcgcctgctggccaacattgcggacacgagcaaggatggactcatctccttctcggagttccaggcgttcgagggtctgctctgcactccagatgccctctacaggaccgctttccagctgttcgaccgcaagggcaacggcactgtttcctatgctgacttcgctgatgtcgtacaaaaaactgaactgcactcaaagataccttttagcttagatggcccctttatcaagcgctactttggtgataagaagcaacgccttatcaactatgctgagttcacgcagctgctgcacgactttcacgaggagcacgcgatggaggccttccgcagcaaggatccagctggcactgggttcatctcgccattggacttccaggacatcatagttaatgttaagcggcatttactgacccccggcgtcagggacaatctagtttcggtaactgagggtcacaaagtgagcttcccgtatttcatcgcatttacctcgctgctgaacaacatggaactgatcaaacaagtctacctgcacgccaccgagggcagtcgcacggatatgatcaccaaggatcagatcctcctcgccgcccaaacgatgagccaaatcacgccgctggagatcgacatacttttccacctggcgggcgccgtccatcaagcaggccgcatcgactatagtgacctgagcaacatcgcacccgagcattacaccaagcatatgacacatcgtctggcggagatcaaggcggtggagagtcctgcggaccgatctgcctttattcaggtcctggagagctcttaccgtttcactctcggttcctttgccggcgctgtgggcgccactgtggtctaccccatcgatctagtcaagactcgaatgcagaaccagcgagcgggttcctatattggtgaagttgcctatcgaaactcatgggactgcttcaaaaaggtggttcgccacgagggattcatgggtctctacagaggtctcctgccccagctaatgggcgtggcccccgagaaagccatcaaactgacggtgaatgatttggtgagggacaaactcaccgacaagaagggcaacattcccacatgggcggaagttctggctggtggatgtgccggtgcgtcgcaggtggtgttcaccaatcccctggagattgtgaagatccgtctccaggtggcgggagaaatcgctagtgggagcaagatccgcgcgtggtcggtggtccgggaactgggactctttggcctctacaagggagccagagcatgtctcctccgcgatgtgccattctcggccatctacttcccgacctacgcccacaccaaggccatgatggccgacaaggacggctacaatcatccactcaccctgctggccgccggtgccatcgccggtgttccggccgcctcccttgtcacgcccgccgacgtcatcaagacccgccttcaggtggttgcccgatctggacagaccacctacaccggcgtatgggatgccaccaagaagatcatggccgaggagggacccagagccttctggaagggcacagccgctcgagtgttccgttcctcaccacagttcggtgtgaccctggtgacctacgaactgctacagcgcctcttctacgtggacttcggaggcactcagcccaagggatccgaggcgcacaagatcaccactcccctggaacaggcggctgcgtcggtgaccaccgaaaacgtggaccacattggtggctaccgggcggcagttcctcttctggcgggagtggagtccaagttcgggttgtatctgccgcgatttggacgcggagtaaccgctgcctcgccctcgacggccacgggatcctgattatattggcgccaccgcctgccaagcgccacgtagtctacggaatgcagaagggattggcgggattgggctccggtggaattagatatgggatatattttttgctaggacgcgtttacacaaaatacacaaacacacagaagcactgagtatatttttaacgaggatcagggaggagcagcgccgtatctatagtactattgtatctgaacagccgggttcctgggcacccagctctgagcaactgtttttaccacacacaggaaaaacctagagaaaagtaaagaaaagcccatttgagagtatagaatatcgattttggccatggtgcgtatatatttaggcaagtgtagaactgtttttgtaaactttgttaactagtttaaagtctagagcatcaaccaatcactgaacgtcaacttttgcactcaatgtaactattaaagcgataaaaccttttaatcttagtacgaatttgttcaaaacaattatcaagcaaaggaaatgcaatgaatgacctcttagctaataatgaataattaaataaaagtcaatattaaaaacaa

SEQ ID NO: 3471 - protein, 643 aa, DROSOPHILA
MTSEDFVRKFLGLFSESAFNDESVRLLANIADTSKDGLISFSEFQAFEGLLCTPDALYRTAFQLFDRKGNGTVSYADFADVVQKTELHSKIPFSLDGPFIKRYFGDKKQRLINYAEFTQLLHDFHEEHAMEAFRSKDPAGTGFISPLDFQDIIVNVKRHLLTPGVRDNLVSVTEGHKVSFPYFIAFTSLLNNMELIKQVYLHATEGSRTDMITKDQILLAAQTMSQITPLEIDILFHLAGAVHQAGRIDYSDLSNIAPEHYTKHMTHRLAEIKAVESPADRSAFIQVLESSYRFTLGSFAGAVGATVVYPIDLVKTRMQNQRAGSYIGEVAYRNSWDCFKKVVRHEGFMGLYRGLLPQLMGVAPEKAIKLTVNDLVRDKLTDKKGNIPTWAEVLAGGCAGASQVVFTNPLEIVKIRLQVAGEIASGSKIRAWSVVRELGLFGLYKGARACLLRDVPFSAIYFPTYAHTKAMMADKDGYNHPLTLLAAGAIAGVPAASLVTPADVIKTRLQVVARSGQTTYTGVWDATKKIMAEEGPRAFWKGTAARVFRSSPQFGVTLVTYELLQRLFYVDFGGTQPKGSEAHKITTPLEQAAASVTTENVDHIGGYRAAVPLLAGVESKFGLYLPRFGRGVTAASPSTATGS

SEQ ID NO: 3472 - DNA, 2142 bp, DROSOPHILA
aattactgtgttggtttatatatgacaaatcggaacatacatatgcaggaaacacattgaataagattcgtcaaaataaactgatcatgttgaataaataacgaataaacacgtaaaaaataatctttagatccagcaaacgctctaaaatctggaagtctaatttgcgatttgtctggtgatgctgttacgcagatagcaaggtaacagtagctaatgttattccttaagatggaagaggaccaagcggatcagattaggggcatgttttaaacatggactggggatggctgcggtcgataggcggactgaaactttggaatggaattataaattagatgcttggtcactctcactattgttattttcagcgtgtacctaaagtgcaacgtcatcgttagatcggaattttcacagagcttatcttagatcccgcagatagcgggaatgcttgtgtagtctatatgtatagatttggtgatgaccctactgctgcgtcagggtgatacacttttcggagccggcggcagtcggtttgtcggtggtgcacttgcataagaatccgaattcaaatcggagtccgttaatcaaatgagatgcaaatgcagacgcggatttcgcttaacacttgaccctcgtcgcccatcacacacatatatacatgtatgcaaatggatagtttcgccatgtggagctctttcgacagctgggcgaaagtggctgctggaagtttcgacgtcgcagcaaatctgcgaaatccggacgcaggtcaaactaccgtccgggggtcaaagtacagacctaattgccccgcgatgcaagttagagtcgctacatgtggctacgtgggcttgggcttgtgctggggctgggcccattagctcatcgggacaagtgaaacccagataaggcccaatagcaaacgatgacccccatttagtggtgggagcgggtgcggggcggtggcactcagctgcgacgtgttccgtgcgattctcacctcgttgaggaaggcggtgacgtcgtagatgttgttgtgtatgagcagccaggtgtccttgttcgtgttgtgcttggcgacctcggcccgcgtgaaagtctttgtttcctcgctcgacatggtgatcacttgttgatttctactgcgcgtttgatttgtgtcacggaaaaactatttgtccagcctcgcactcttcctccagggcgcacggtctcacagaactggtggccggcggtcacactggcgcgcagcaagatggcttgtttacaccaacgcctatcgatatcgaatagtgaccgtttagactagccagattgtttgtggtatgagcacatattttattataatatataatagcttataacttatttatctagcttataatttgtttacagcacccaatacacaatatatcggatttggagcggtggttatgcgatgcgattgtatagtggatcacggctattttaccatcgacatgtaaagaatactgcatacttttgggcgcgataagaccagtgctccaaagcacctcattaattttggcgcccaatttgaaatgtgagaaaaccctttagtgaaataaacgattcaaatgaaatgtacaaacaaaattcgtaagcaaatttattttgggcagaccatttcattaataaaaatgtatttcgagcggtatcccagcgaactggttccaccagcgacgaatgcgcagactcggatcttgtatttacactcaagccctgcctttattccatactcggcaaaggagacttcaaagtcaaacgtatcctgctgtacgccgtgcggctgcggcgctccttcaataaaaacagtcgacacgcattgtgaagagttttccaaaagctacagcgctgtccaatagcgcaattcaagttaacaacaaactaagcataaatatattgataagtgacggcgggtgtgcttttgatacgcagcgcttttagcttttttacaaaggtaagttccttattacgcaattggcatcctggagtggcctacgtgcggtggccattttcttgggtccgatttcctttctctggtatacatccaccactatgtttccttttccgcttcgctgatgcgtaattcaagtgacgggatttatgcgttaaaaagttatt

SEQ ID NO: 3473 - DNA, 142 bp, DROSOPHILA
tagaaatcaacaagtgatcaccatgtcgagcgaggaaacaaagactttcacgcgggccgaggtcgccaagcacaacacgaacaaggacacctggctgctcatacacaacaacatctacgacgtcaccgccttcctcaacgag

SEQ ID NO: 3474 - protein, 40 aa, DROSOPHILA
MSSEETKTFTRAEVAKHNTNKDTWLLIHNNIYDVTAFLNE

SEQ ID NO: 3475 - DNA, 2396 bp, DROSOPHILA
aatttgtaaagtttgattgatccagtatgttacttcatcttcctaaaaaagtattttacttttcacaaaacttgatggcagtatttgtattagtttaataatagtttctattaagttttttatgaaagttgcctagctgaaataatttgtttgtgaaaatttagccacttcctaacataaccccattcaagttaagtctcatacaattgtaataaatacctaatcaccttataaagtttattcaaccataacatccgggttccccgtatattttattcactctcagataggaaaacctcttagcaaaggatcccacttgctttaatactatttatattgttgtattataattgcagcacaaagtggaaaccataaacaaattcaataaaataattaatgtcaaataattgataatgtcaaaagtatttatatggctgcccagaagtaagacgacatctgtatggtctacccagttgtttcctcccaccgataagcgcttgtcccacccaaaacgcactccaactgtttgggccacccacgcgaaatccgtgtacctttggcccagggtaacagaaccagtattagttatattacacatactatagccagccagaatcaagaacgtgctagttatcgcattacgcatacgcctcggatgcggagggtgagcaggtgcagtgtctgcatatctatttgttttggcaaaacaatcggaaatcttacagaacattatacatatgttgattatgatattcagtaagtaagccttatttattgtttgcttccattcttactgattactttacactaaagtgtgtcaaatatcgctcatccgtcacgttgtacataatattatgtttcttaacattgcttcacagaataacgaactttgtcccactgtgcggtgagagcgagagaaaccgcctagctggcgcattggcaatctgagacccaaccgaagatccaatcgcttggaggtgatatagtactcaatataaagtcgtactgtcggcttggcgatccgaactgaaaagctagccgtcgcataagcgaaacaaaaaccaaaccacttggcattcgcgctgggcgagctgaacagtgcgagcgtcaagtgtcgcgacggttttttatataaattaattcatattttccgctgacatcccataccacaccgcaccacaccacaccacaccatactatacacattcacatctgttttttgttttcgtttgcgttgcggtttttttttgtgtgtgcgcgagagcgtttcgatttggatcatctcgagatcagatcagttgtaaacaaagagatcgtgcgtccagtcaatccagtgagcagcaagtcaccaggagaagatcagccatggaggtgtacacgtcggacagttcggacacggattcgcgggagcagaagacactggactttggccgtatgagcctggacctggtcacgctggaggatcacctggcctcgccgcagaaggctctgctcaagtccagtggcgacatcgagaccatgctgctcaatcacaatcgattggtcggcttgccccgtctactgctgcagttcggcaatctgaagattctggatctcagctcgaatgcaatcaccacgctgccggatgccgtctgccaactgccgctggtcaccctgatagccaagaataacctgctgaccaatgcctcgctgcccaaatcgctgctcaccaaaatggccaatggcaatggcaacggcaatgccaccggtggcaccaactccacgctcaaggagctcaatctgagtggcaatcaattaacccactttccggaacaggtcaccgagctgcgccacctcaagtacctctatctgggcggtaacaagatctccagcgtctcgaaggatatctggaagatgcaaaggtatgtatgtgctagtcgatcgtttgtttgcccaagtgtttttgtttggcttcgtcttgaaaagcaataatttgtatcagctgactttcggtttgctcgtgggcacatttatctgcgtttctgattgattcagacaaagaaaaacaaaactataataggtaaagtatgagacatgattacagggtcgaagtatatcaagaaacatatatacaagatcatttcaacaatttccgtaagccctaaaaatgtattatttatagttaattttttttggcgtatataatttaatatatatatataatattttaaacttgattactttcgatttggtttgcaaaaatgaagaaaaaaaacgccgtgaaggtcaaaaatgaaacttgagactgacaaacaatggtcaaaacacacgaaaagggcgataagttggaataaaattaatagtatagataacgttaaatgggcaaattattagatttatgagtgctttgcaattat

SEQ ID NO: 3476 - DNA, 965 bp, DROSOPHILA
tcgtactgtcggcttggcgatccgaactgaaaagctagccgtcgcataagcgaaacaaaaaccaaaccacttggcattcgcgctgggcgagctgaacagtgcgagcgtcaagtgtcgcgacggttttttatataaattaattcatattttccgctgacatcccataccacaccgcaccacaccacaccacaccatactatacacattcacatctgttttttgttttcgtttgcgttgcggtttttttttgtgtgtgcgcgagagcgtttcgatttggatcatctcgagatcagatcagttgtaaacaaagagatcgtgcgtccagtcaatccagtgagcagcaagtcaccaggagaagatcagccatggaggtgtacacgtcggacagttcggacacggattcgcgggagcagaagacactggactttggccgtatgagcctggacctggtcacgctggaggatcacctggcctcgccgcagaaggctctgctcaagtccagtggcgacatcgagaccatgctgctcaatcacaatcgattggtcggcttgccccgtctactgctgcagttcggcaatctgaagattctggatctcagctcgaatgcaatcaccacgctgccggatgccgtctgccaactgccgctggtcaccctgatagccaagaataacctgctgaccaatgcctcgctgcccaaatcgctgctcaccaaaatggccaatggcaatggcaacggcaatgccaccggtggcaccaactccacgctcaaggagctcaatctgagtggcaatcaattaacccactttccggaacaggtcaccgagctgcgccacctcaagtacctctatctgggcggtaacaagatctccagcgtctcgaaggatatctggaagatgcaaagcaataatttgtatcagctgactttcggtttgctcgtgggcacatttatctgcgtttctgattga

SEQ ID NO: 3477 - protein, 199 aa, DROSOPHILA
MEVYTSDSSDTDSREQKTLDFGRMSLDLVTLEDHLASPQKALLKSSGDIETMLLNHNRLVGLPRLLLQFGNLKILDLSSNAITTLPDAVCQLPLVTLIAKNNLLTNASLPKSLLTKMANGNGNGNATGGTNSTLKELNLSGNQLTHFPEQVTELRHLKYLYLGGNKISSVSKDIWKMQSNNLYQLTFGLLVGTFICVSD

SEQ ID NO: 3478 - DNA, 3451 bp, DROSOPHILA
gcgaacgtgaaattccatcattattcatcattataaaaattgttcaaaagtgtgggcgtgacttggtgtctttagggtgttagagtgggagtggcaaaaagtttttttcatatcgatagaaatttgaacgtctaataaaattgagaaaaatttgcttgaatgtggccgtagcagttttgggcggttgaagggagttagagtgggcgtggcaaaaaatctagagaaactgtatttttgcttaaaattattaacacatttttcaaaattgtgggcgtgacatttttgtgcggtttgtgggcgtgccaacataggtcaacaaacttgcgctgtgtcgatgtctctagaatgctgaatcttaatcttctagctcttatagttcctaagatcccgttcatacggacagacggacatgaccagatcgactcggctattgatcctgatcaataatatatatactttatatggtcgaaaacgcttccttctgcctgttttctacttttcgaagaatctacttatagtctacttatttactctacgaataacgggtataaacgtaatttttttaaaacatcctgattaaataaatggtaatgctgttcctgaatgttttagggacacttttggtgttttagcacttgattaaattgtgactgattaaattatattttacgttccggacatctatagttcacttgttggatctcaatttataaatgtctatgatggtgagctggtttgatgaaacaaagccagtcaactatttaaaacttaaccattcgaagtataagtatttaattaataatattaagcacgaatatttaacaattatcctattcttcatcactattaaaactaaatctgtaaatcggggaaaaattcttaaaggtgtagttaaaatttatctcactacggacataaaaaaattatgatttcattaatgtaatatgaaatgttgaagctgcttggtaactttaaacaaaaaaacgaaaagacagcgtttgttcggtaaacttatatatttgcactcaacgtgaaaaaaagcaatttaattttgattgattgattaactagtaagccaaaattaggtagagaaaaaacacgagcagcagcaccgcaacgagcgaccttcccactctgtgcagtcaggagcgaagatccgtgagagggacgtacattacgcccatgagacgtgtcatctccaccttcccattggcgtccttgtcgtactgtaaaaatggttatattattatatattattatatattattatgtatattattatatattattatgtatattattatatattattatgtatattatgatatatatatattattatgtatattattatatatatatattattatgtatattattatatatatatatattattattattacatatacatattattccagcagttatacgaatcagcatctgcccacctgttgcatgtactgagacccgccgtcgggaccgactggaactatcaggcgtccgccgctggccagttggttgatgagttcggtgggtgtgtcgggagcagctgctcctacatggattgcattatacggggcgttcggggggtatcccttgcggccgtcaccctcgacgatcagcaactggccggagtccagcatgctacggtcgtcggtgtttaagttggccttgctccgccgcaccagctctgcctggtgctctatgcccacgattcgggtgtccgcatcaacgcccttagccttgatgtaacgatagaagcaggctgtgaggtagccagatccagagcccacatccagtatacgtgcaccgggcttcaagtggtcgcgtagatactccaaggcgaaggcatgctgggaaagaaaaatgtattaatctccagtttaaaaagacactttactttcagaaattataagaatatgatgggaagaagctacgggagtgaagaactagtcttcaaatgatgagccattgatatgtttttagtggattaaagaaagctacttttttatgctgcctcctaaaagcatcttgagtgtgggcattgactcccacagcaaacatggcgagcaaactatttgtttttcaatgtcctggctaggagttaccatgtgaggagcactgatggtgacacctcctccaatgggttgcggggcgtccatgtaggggttgcgcggagagtagtgcttgcggtcggtttccttcatcgcctgggccaccgcatcacttgcaatgacgccgtgatcttggggattcggttctattattaactcggcccattaaacggagcgaattcaagggctcacccttcagttggcgaatcaggtcttcattattggctcccacggatcgccacgccatgctgaaggcgcggaagaagaagcccagtttaccaatccgcaccacaagattccctttttccaccgtcttgttgttttgtttagtttgttataatattgtaccagaggtggcaggccaacgataacactgacaagcaatcgacacattcaagcagtactcatacatcaactgagttttgggtcgtatgtcctgcatctaataagtttaactcctctgttgaatttatattgaaataatatctgttgaatatatataatatcgatagttgcataacattttcagttcaataaaaatatcactggtcgaactttaataactaaaagtgaacatgctgctatgtacatggatatgtaaaacatctaaacccgtgctgtcactgctgtgcaggtaatattatattaaaattatataaaatatatatacatatatttttttaaactttttttttttaagtttaaatcatttattattatgcattaggaatcgttcagttccttctgaacttaacctaatgtgtagcttaaaagatattatggattctgttccttaattatagtgtacacatatgtaccgtggagagattattgtattctcttcagacgtcggagggaaataaggtcgacaagatcattcgccaacgtgttcgggtgggcgctaagtctgtcggcatatcggctgctgtggaagtttatttggtctcccaatggtatggctgcgtttaagcaatgaattgcatttaatcgtggtccctgccatattcctaatcctttcccgaaaatcgttaaaaagattatatatacttaatttttgcttgagagatatggcggcaatttaaattaagcgcttgattttagtatgaccttgtgctttatcgcctgtcgatatgataaaagcggtttctctggcaatcgaaccgtgcgatcctggccctatttgttatatgtaaacaggatgtccaatgtagggaaaataaagataagatccattgcggatctgcaggccacagtacgagtaaatgtagaaccggacccaacgcccacgatcgagaacagaacgccggacaagaaaagagcgggaagaactcgtg

SEQ ID NO: 3479 - DNA, 910 bp, DROSOPHILA
caaactaaacaaaacaacaagacggtggaaaaagggaatcttgtggtgcggattggtaaactgggcttcttcttccgcgccttcagcatggcgtggcgatccgtgggagccaataatgaagacctgattcgccaactgaaggatcacggcgtcattgcaagtgatgcggtggcccaggcgatgaaggaaaccgaccgcaagcactactctccgcgcaacccctacatggacgccccgcaacccattggaggaggtgtcaccatcagtgctcctcacatgcatgccttcgccttggagtatctacgcgaccacttgaagcccggtgcacgtatactggatgtgggctctggatctggctacctcacagcctgcttctatcgttacatcaaggctaagggcgttgatgcggacacccgaatcgtgggcatagagcaccaggcagagctggtgcggcggagcaaggccaacttaaacaccgacgaccgtagcatgctggactccggccagttgctgatcgtcgagggtgacggccgcaagggataccccccgaacgccccgtataatgcaatccatgtaggagcagctgctcccgacacacccaccgaactcatcaaccaactggccagcggcggacgcctgatagttccagtcggtcccgacggcgggtctcagtacatgcaacagtacgacaaggacgccaatgggaaggtggagatgacacgtctcatgggcgtaatgtacgtccctctcacggatcttcgctcctgactgcacagagtgggaaggtcgctcgttgcggtgctgctgctcgtgttttttctctacctaattttggcttactagttaatcaatcaatcaaaattaaattgctttttttcacgttgagtgcaaatatataagtttaccgaac

SEQ ID NO: 3480 - protein, 226 aa, DROSOPHILA
MAWRSVGANNEDLIRQLKDHGVIASDAVAQAMKETDRKHYSPRNPYMDAPQPIGGGVTISAPHMHAFALEYLRDHLKPGARILDVGSGSGYLTACFYRYIKAKGVDADTRIVGIEHQAELVRRSKANLNTDDRSMLDSGQLLIVEGDGRKGYPPNAPYNAIHVGAAAPDTPTELINQLASGGRLIVPVGPDGGSQYMQQYDKDANGKVEMTRLMGVMYVPLTDLRS

SEQ ID NO: 3481 - DNA, 5222 bp, DROSOPHILA
ctccggcgccgcgtagagttaccactgtgctgctggttgatgagctggatatcttgtgcaaccggcgccaagatgtggtctacaatttgctcgactggcccaccaagtcggcggccaagctggtagtggtcaccattgccaacaccatggacttgcctgagcgcttgctgatgggtaaggatcacctccataactgaaacttgtggaattccctaacgtgtattgtttttcctttaggtaaagtcacctctcgtcttggacttacccgtctcacattccagccgtacagccacaagcagctgcaagagatcgttaccgcccgcctgggaggatcggagacttttaaaggcgaggccgtgcagctggtggcgcgcaaggtagccgccgtttccggtgatgctcgccgagctctggacatctgccggcgtgctacagaaattgctgatacggctgcggtcaagtgcgtcacaatgctgcacgtgcagcaggcattggccgagatgatagccagtgccaaggtgcaggccattaggaactgttcgcggatggagcagatcttcttgcaggcaattgcagctgaagttacgcgcactggcgtcgaggagacgactttcatgggcgtctatcagcaggtggaaactattgccgccttcatgggcgtgacctttccaccaccaggacgcgccctgcgcttgtgctccaagctgggcgccgagcgactcatcatcagtgaacattcccgcaatgacctctttcagaaaatcctgctcaacgtcagcgctgatgacattcactacgccctcagagtggaagagatggtcaactaaggccataatgcaagaacaaacgaataagaagttaattaagcacattaaattctcatctccatttttaagactccaaatccaggttacttgacctatcacatttccaccatttttaaatcattcattattcatacaacattgtaatagcttaagcgtttttaaattatttctttttaagcgtcatgtttaaacaatttaaagtacaaactcgttactaaaaataccaaatagaacaccagcacagtgtaacagtcgtaaagtacttttggggaaaacacggagtagataaagaggtggtagcggaagccaaccaagaggcagaggtagaaggccgccggcaacatgattagcgcggcgtagagcggagctatcagcgaatccgcggctatcgagtacggaggatgtagctgcatgatacccacactgcgcagatccgagcgcagggtgtggacaactaaatagaggaatgcatgaatatccgcactgtacgtgttgagggtgacaaagatggcaacgatcgacgggttgtagtttgtctgtccgatataaccaggcgttaggtcaatggtggacaggctgttcgagttaccctggtagaagaagaacatcctggccaggaatatggtcatgatgatcttgtacacatgcaccaatcgcacggagaactttcgggcactggtgccgtagacatcgcacagcttgtacgtttgctgcagggccacgagaagtacgggtagtagtaagatgttgtggacccgttgcaaaagtgcagccaacagcagcgagctggtaaggttcgtctgcagcaactgcaataatgcacctgtgggcggcaccttcccaaagctgtgcgcttgaggcagtgccgcccgatagcccagcatcaaaacaagggccaaacagcaccagaagatcaccagcgtcggcaccataagttttgcactggaaattattaaaaatatactataccacaatattcaggctgaactcatttaaacttacgccatgtgcgaaggcacgtcgaagaaaagcacctggccgtttagccctcggaagcagtaaaccatgaataaagctgctccactggccaacgactgcggcaactggctgtgacgatggaggcgtgcccagagcaacagcatcgaaaatatgacgacggtgctccggatagcctgcagcctgtggatgtagcgcatcaatgtgagcagcataagcaccacaagcactttacgcatttgccacagacaggtcgatgcaatcgtgtacagatgacggccatttagttccacgttggttttggtgatgcgccatcgcagcgttcggaatgccgtcaataggatgagggtattgcccaggtaataccatgtattatactcgaattcaataaacgaggaggaaccaagagttaaagtgcgtatagcataacaagctagcagaggtagcggcaatggaatggaaatcttcaggcgacgcgtgtatagcggaggcaatgcaatcttgagcagcgcctgcgccacgtcgattgtaaggtaaacagcgatcgagatgggtaccaataggagaatgctgtaaagcgttgaactggtcatgatgatgtccaatgcatgactagtataatttaagacgacagcagcaatcacagagagccacagttgccccacttttaatccgtccagctgaagctgttcggtgagatccaagtacaagacgctgatcacaatatgaagggatgtctgaaagaacgtggtcactatagcgtacttaaaaactggtcagaaaacttaccgatgtggtcaaagctaatccaacggcaataaatccatagtcgaacttcaccagggattcggagagcagatcagaaatctcgcgagccacgcgcatataattaagcttggcgttctggtagtaaacctgactagctccacctccatcgccttctcttaaagggcgcagcagcttcttgtgtaacagggtggcattctgataccaggtgtagtaatctggagaatgaatgaataattaactaaagaaatcggcgcggagggatcataaccttaccactccgatggactatttcgtggccgaacttcactcgcgccttgttgagcaagtggtgggcgttgtagaagtaagcatacaactggtgctccaaagacagcgattgcagcatctccggtattaggcagccaatggagagcgtgggtatttcaacagacagaagcactgaaagggtgggcgccaaatcgatttggttgtaccgttttgaggcggatctgtgcaagaatcatttgtagatgcagtttttcttttagattgtacttttggggcttacggtgttttgctgcagttgttgtaatacaaatataaaggtaccagagtttcggctggcgtattgccgccatgtcctccgccatcagccatgccatgatctccagtcagcataagcagaacgttgggaaaactctaaatagggaaggagttactttacagctttccctctatattaagctatctaatagctcaccttatgatccaatatttttttcaccacctcatccatttcctttagctttaggggcaccctagggctggcattgccctcgacatgaccaatgtgatcgaggcccagatagtgtaaaatcagcaaagaccagtcactccgctccaactcagtctccagcgttttggtcacatttctatcgccctcgtagaagtcgttaacataaaaggaatcatggttctcgacctgccgtgtaaactcgctgggaaagagcttcacccaggtgtggtcgccggcaaaggaaacaactcgattctgctgttttagccggtgcaagaacgagtcctgcatctgctccgtatgacccacgtttagcgcaatgtcgataaagttcgaaagggtgccggtggtgatgctcttcaagcgtggcatagtcaccgtcggtatgtccacatggagcttaagcttctcgcaggccctagaataagccaccggcatagacgtggcatcgggaaaatcatcgcgcaacgcgtcgaccagtaacagcacaaaggagtcataggcaggtggcggcggcgtcagtctgtaaagggtaacgagcattataggggcgctatctcacgcaattatcagctcataaactcactccatgccaagcagagcggtgggccggccctctggcacggtgctttccttctccgccaccgagtaggaggccggaaagaagccaatcagaaagagcacggcgccgcaaaggaacgccgtgagcatgccgatggtatagaccagccaacttttgtgctgttccatcttcttgttttcatcgaaagtaccgcgctccaccgaaaaccacaacaaattcaatataattgccgcccgtcagctggaagtcaaatataaaggctagacaatcgataagtgctgtatgctatcgatagacggcaagcaaaacttcaggggcgtaggcacataaaactaataaatgctaaagtcttacgtataatttatatttattttaaaactattgatacgaaagagttaagagaggaaatttgttagctttatggaaaaaaagtattaatatttacataatattactaacgttttgccatttctcgaagtgtatattattttatacttaatttatcttaatttacatttaaaatcttacatataaaagaaattttttaaatttgatacttataaaacaaacgaatttaatatcgtctgtcgaacccttttgcccatttgtgaatgcgcccatggtctctcatagtcggatatgtataaacaaacgcttttgattgttatttctaacttaaaatggaaacttgcggccttatttgtgtgagcagggactacgagaagttcctgatgcgctgctcctactgtccaacggacgtggaggtggcccagtggcaggagtttgtgctgcacatccgcaacgtgcatagcaaagtaaggagcatggaagacgacttcgagccagtgggggaaaattctacggagtctgggcacgtagatcctccagaggagaaaccccaagcggaagagtcgatattccagcaagacgaatcggcggacggagcctgtgtacagctgcatattgacgcagtgcgttcgtcgacaaacgagactgaggagtcggacgtatctttggttacagatgaagaagaatccgtccaggacgaggatccaagtgaaccagctcttgatgatgccaatttaaaaaccacacccacatacaaggtacttctagaagccattcatgaacgcgctaaactaatctcagcattcaacttcagtttcatccatccttctttcgccgagatcaccgaaccataaagttcatagagatctacaaggaacacccgtgcctttggaatcccgctcac

SEQ ID NO: 3482 - DNA, 2728 bp, DROSOPHILA
tttgacttccagctgacgggcggcaattatattgaatttgttgtggttttcggtggagcgcggtactttcgatgaaaacaagaagatggaacagcacaaaagttggctggtctataccatcggcatgctcacggcgttcctttgcggcgccgtgctctttctgattggcttctttccggcctcctactcggtggcggagaaggaaagcaccgtgccagagggccggcccaccgctctgcttggcatggaactgacgccgccgccacctgcctatgactcctttgtgctgttactggtcgacgcgttgcgcgatgattttcccgatgccacgtctatgccggtggcttattctagggcctgcgagaagcttaagctccatgtggacataccgacggtgactatgccacgcttgaagagcatcaccaccggcaccctttcgaactttatcgacattgcgctaaacgtgggtcatacggagcagatgcaggactcgttcttgcaccggctaaaacagcagaatcgagttgtttcctttgccggcgaccacacctgggtgaagctctttcccagcgagtttacacggcaggtcgagaaccatgattccttttatgttaacgacttctacgagggcgatagaaatgtgaccaaaacgctggagactgagttggagcggagtgactggtctttgctgattttacactatctgggcctcgatcacattggtcatgtcgagggcaatgccagccctagggtgcccctaaagctaaaggaaatggatgaggtggtgaaaaaaatattggatcataagagttttcccaacgttctgcttatgctgactggagatcatggcatggctgatggcggaggacatggcggcaatacgccagccgaaactctggtacctttatatttgtattacaacaactgcagcaaaacaccatccgcctcaaaacggtacaaccaaatcgatttggcgcccaccctttcagtgcttctgtctgttgaaatacccacgctctccattggctgcctaataccggagatgctgcaatcgctgtctttggagcaccagttgtatgcttacttctacaacgcccaccacttgctcaacaaggcgcgagtgaagttcggccacgaaatagtccatcggagtgattactacacctggtatcagaatgccaccctgttacacaagaagctgctgcgccctttaagagaaggcgatggaggtggagctagtcaggtttactaccagaacgccaagcttaattatatgcgccttcagctggacggattaaaagtggggcaactgtggctctctgtgattgctgctgtcgtcttaaattatactagtcatgcattggacatcatcatgaccagttcaacgctttacagcattctcctattggtacccatctcgatcgctgtttaccttacaatcgacgtggcgcaggcgctgctcaagattgcattgcctccgctatacacgcgtcgcctgaagatttccattccattgccgctacctctgctagcttgttatgctatacgcactttaactcttggttcctcctcgtttattgaattcgagtataatacatggtattacctgggcaataccctcatcctattgacggcattccgaacgctgcgatggcgcatcaccaaaaccaacgtggaactaaatggccgtcatctgtacacgattgcatcgacctgtctgtggcaaatgcgtaaagtgcttgtggtgcttatgctgctcacattgatgcgctacatccacaggctgcaggctatccggagcaccgtcgtcatattttcgatgctgttgctctgggcacgcctccatcgtcacagccagttgccgcagtcgttggccagtggagcagctttattcatggtttactgcttccgagggctaaacggccaggtgcttttcttcgacgtgccttcgcacatggctgcaaaacttatggtgccgacgctggtgatcttctggtgctgtttggcccttgttttgatgctgggctatcgggcggcactgcctcaagcgcacagctttgggaaggtgccgcccacaggtgcattattgcagttgctgcagacgaaccttaccagctcgctgctgttggctgcacttttgcaacgggtccacaacatcttactactacccgtacttctcgtggccctgcagcaaacgtacaagctgtgcgatgtctacggcaccagtgcccgaaagttctccgtgcgattggtgcatgtgtacaagatcatcatgaccatattcctggccaggatgttcttcttctaccagggtaactcgaacagcctgtccaccattgacctaacgcctggttatatcggacagacaaactacaacccgtcgatcgttgccatctttgtcaccctcaacacgtacagtgcggatattcatgcattcctctatttagttgtccacaccctgcgctcggatctgcgcagtgtgggtatcatgcagctacatcctccgtactcgatagccgcggattcgctgatagctccgctctacgccgcgctaatcatgttgccggcggccttctacctctgcctcttggttggcttccgctaccacctctttatctactccgtgttttccccaaaagtactttacgactgttacactgtgctggtgttctatttggtatttttagtaacgagtttgtactttaaattgtttaaacatgacgcttaa

SEQ ID NO: 3483 - protein, 880 aa, DROSOPHILA
MEQHKSWLVYTIGMLTAFLCGAVLFLIGFFPASYSVAEKESTVPEGRPTALLGMELTPPPPAYDSFVLLLVDALRDDFPDATSMPVAYSRACEKLKLHVDIPTVTMPRLKSITTGTLSNFIDIALNVGHTEQMQDSFLHRLKQQNRVVSFAGDHTWVKLFPSEFTRQVENHDSFYVNDFYEGDRNVTKTLETELERSDWSLLILHYLGLDHIGHVEGNASPRVPLKLKEMDEVVKKILDHKSFPNVLLMLTGDHGMADGGGHGGNTPAETLVPLYLYYNNCSKTPSASKRYNQIDLAPTLSVLLSVEIPTLSIGCLIPEMLQSLSLEHQLYAYFYNAHHLLNKARVKFGHEIVHRSDYYTWYQNATLLHKKLLRPLREGDGGGASQVYYQNAKLNYMRLQLDGLKVGQLWLSVIAAVVLNYTSHALDIIMTSSTLYSILLLVPISIAVYLTIDVAQALLKIALPPLYTRRLKISIPLPLPLLACYAIRTLTLGSSSFIEFEYNTWYYLGNTLILLTAFRTLRWRITKTNVELNGRHLYTIASTCLWQMRKVLVVLMLLTLMRYIHRLQAIRSTVVIFSMLLLWARLHRHSQLPQSLASGAALFMVYCFRGLNGQVLFFDVPSHMAAKLMVPTLVIFWCCLALVLMLGYRAALPQAHSFGKVPPTGALLQLLQTNLTSSLLLAALLQRVHNILLLPVLLVALQQTYKLCDVYGTSARKFSVRLVHVYKIIMTIFLARMFFFYQGNSNSLSTIDLTPGYIGQTNYNPSIVAIFVTLNTYSADIHAFLYLVVHTLRSDLRSVGIMQLHPPYSIAADSLIAPLYAALIMLPAAFYLCLLVGFRYHLFIYSVFSPKVLYDCYTVLVFYLVFLVTSLYFKLFKHDA

SEQ ID NO: 3484 - DNA, 3228 bp, DROSOPHILA
ttagaaagtcaatgtcaaggtcagcatcttaaagagttaactcgagtaatcttctctcgaaagctctgcaactttgttataaagttcaagctctcaatttgtcattaaatttaatttgtatgtttattccccgcatccaagggaaaaactataaaatccaactgattacagaatctttgcaacattgtagggaagctccatttataattcctgattgctttttacaatatttcatttgtaatttgattaggaaagctttagcaacattttgagcaacttatggctttttaaattacttttctataaggaatacccaaaagtatgccttgaatataaaacagttgattcattgaaagtaaactgaaaaaaaaaaaaattgaaaaccataaatacatttaatcagaatgaggcgaactaagccatttataactgtatagattaaagatttgtcaaaacctcattagttattaactacaaattcagtagccaaattttcacatataattttgaaaacccggatcaagaatcagtctattgggaattttgaaaattttcgacccggcaacaccacacatacaaaattctatacatttgaacacgtgtgggttttcttatcactgagactattcaatctgtctcattttctgttttgagctaacaaatatatatatatatatatgtatattctgtatatttgtttaatctgttgtgcattgctgactcataaactcacgcctgcacatacaaatttaccaatagtaactaattactaagtatattctgcagtactctttttttgaacatcagttttaaatatattataggtaaaatataaggagtgtgcttcggtgattcctgtctattctaattaaaaatagactcaatttcaaattcagttgaaagtagcaaatcaacaatatatgttaatattgtgaatggcaaacctatagaaatctaaaattctacccacccacccaaaataaaaatataatttttcgttcgttttcctgttcgtgtgcttgattttcgtgcacttgcaggtctgaaatctgggacattggccagattttattaatttccaaggcgatcaagtcatgtacagcatttaaatcgtcaaccaagattagaaccgagtccatcggggacgcagcccaccgccacggtgctactcataaaacgaaggtgtcgtaatagtcgacatcgtgaccggagacaaaggatatctcctccagaatgttgatcagcttgagtgtggcctggcagggcttgattctcggcagctggagcaactgcttcgtggctatcagatcagcgggagtgatccgattgccgttcacatcgcactgtccctcgtgggtgtccatcagaccgggcgagaagctgagcacatggacaccgaaacgatactcctcggcggccatggcgcggaagtacatatccctggcccgtttgcacgagcaaagcagaccagcatggaccaatggacgtaccatcagcgatgaggtcacattcaccgccagcttctccactcgctccaagtgcttcgattgcagccacgtctgattgagcgccaccggagcatagagctgctgctggacataggccttccaatcgtcgtcgctctggggttccaggagcatatgcgtggccgcctttccctcgttgtgaaggattatggaacgctcgaagcgttgattgtccttatccgccatgaaattatccatcaatgcctgttccattagctgcacaccattcgagtgatctttgtccaactttccgattgtcaccttaacgttctccgtcttcagttcgctccggagatgattctccagctcccgaagctgctcctgatcctcatccaagatcaaagcaagggatccagtggccaggcgacggcagaactccagcgccagggattgacccaaaggatttgagctgccgctcaacaccaaaaaggtgcgtctatttaaatccattctctttgctgccattattttgatttaaaggatttcgggtacttgaggatttcgggaactgaagaatcttccacttgttttcacttgaagctgtacgactgtactgatgccttatttcctccgggctttgccaactggactctgttttcgactgataagctttattccgatttcgattggccaactatatgtgcatatatatgtattgtatatatatttatgctcgactgagcaactcaggttccgattccgtatggagaagcgctctggactggtggggatgtcagcttggggcttttatacaacccaatcgactgataagccggggttcaggcgtctggtcttgttgccgtgccattaaccatttgtaatgtttgggattttggcaccgtaatccggacccatggcgcatcatttaacctctggaatctgatggagtggtgcgccaatattacgcatcgggggcctggtcctggtaaatagacatagtttagataatgtcctaacaaacaaattgctctatatgctttaacatagattatacttttcatttcattttatactttcatattagaataagctaattttttcaagccccttttggctttgccactgtttcccatgagccaaaaacctgatcgattgtcatcttgaagttcatcgagttcctttgatatggcgctaagtcaaggttgtctttttagtgcaagagattaaccaaagaattttgtaaacaaatcagttggcaacaattaatagtgtagcacagatggggacaatattatgtggaaagtagaatagtacattttatagttttgtctaagcaaagtcccttcttttttttgcaaaacaaattaaataaatttccattcatatagttttttcccattaaaactgctttcctattttaagtatatatgtttattttccgaatcacataacaggttatcgcattcagtcgttgaactttcgtagacgaataaaatgcaaatggtttttgcaattacataatacatataatatatgcctgtgaattacatgggtagtgtaacacgtgtgaatttaatgaactctctcgttactaaacatccgttaaatcgcatgtttaaagataacgtaaggtacatatatattaatgtgtcatataggggtttttttttttttgcctagaaatgtgatttttccatatttctatagacattatcgatcggaagggaagtgctttaaaatctatattcaagatctatcgata

SEQ ID NO: 3485 - DNA, 1228 bp, DROSOPHILA
cggaatcggaacctgagttgctcagtcgagcataaatatatatacaatacatatatatgcacatatagttggccaatcgaaatcggaataaagcttatcagtcgaaaacagagtccagttggcaaagcccggaggaaataaggcatcagtacagtcgtacagcttcaagtgaaaacaagtggaagattcttcagttcccgaaatcctcaagtacccgaaatcctttaaatcaaaataatggcagcaaagagaatggatttaaatagacgcacctttttggtgttgagcggcagctcaaatcctttgggtcaatccctggcgctggagttctgccgtcgcctggccactggatcccttgctttgatcttggatgaggatcaggagcagcttcgggagctggagaatcatctccggagcgaactgaagacggagaacgttaaggtgacaatcggaaagttggacaaagatcactcgaatggtgtgcagctaatggaacaggcattgatggataatttcatggcggataaggacaatcaacgcttcgagcgttccataatccttcacaacgagggaaaggcggccacgcatatgctcctggaaccccagagcgacgacgattggaaggcctatgtccagcagcagctctatgctccggtggcgctcaatcagacgtggctgcaatcgaagcacttggagcgagtggagaagctggcggtgaatgtgacctcatcgctgatggtacgtccattggtccatgctggtctgctttgctcgtgcaaacgggccagggatatgtacttccgcgccatggccgccgaggagtatcgtttcggtgtccatgtgctcagcttctcgcccggtctgatggacacccacgagggacagtgcgatgtgaacggcaatcggatcactcccgctgatctgatagccacgaagcagttgctccagctgccgagaatcaagccctgccaggccacactcaagctgatcaacattctggaggagatatcctttgtctccggtcacgatgtcgactattacgacaccttcgttttatgagtagcaccgtggcggtgggctgcgtccccgatggactcggttctaatcttggttgacgatttaaatgctgtacatgacttgatcgccttggaaattaataaaatctggccaatgtcccagatttcagacctgcaagtgcacgaaaatcaagcacacgaacaggaaaacg

SEQ ID NO: 3486 - protein, 273 aa, DROSOPHILA
MAAKRMDLNRRTFLVLSGSSNPLGQSLALEFCRRLATGSLALILDEDQEQLRELENHLRSELKTENVKVTIGKLDKDHSNGVQLMEQALMDNFMADKDNQRFERSIILHNEGKAATHMLLEPQSDDDWKAYVQQQLYAPVALNQTWLQSKHLERVEKLAVNVTSSLMVRPLVHAGLLCSCKRARDMYFRAMAAEEYRFGVHVLSFSPGLMDTHEGQCDVNGNRITPADLIATKQLLQLPRIKPCQATLKLINILEEISFVSGHDVDYYDTFVL

SEQ ID NO: 3487 - DNA, 4316 bp, DROSOPHILA
cagtggcctttttctcgggcgataagccccagatttaagcactgagttttcagtttcattattatttattagaacgggacggtcagctaggccaatttgctcactccttcgcaagcagtgcaattaattagttttgttgaatgggtcggggaatggaatcggcatctatatagagtcgtcttccattgggggaagggccagggaagggaaccagaccagaattaaacagaacagaacaatactgaattccaaggcattatgtaagcttaattcgctttaatcgcttacgtgagccatttccgaaggcaaatacaatttcggactaccccccatttgcttggatgcctgcgactattttcgttcggtcgggtcgagtctttttttgtttgacaattagagctctgtccaggtaattatgaactataaccctcgatcagcccctgatgaaggtcccttcagaactcagcttctgaacttaccggcgatttttgggttgattcagctcttacgacttcaattactaaatgttatatctacaattaatatacaatagataggtaaatatcatatgaatgtaaattcataaaataaagtaacaatgacattgttttagttagtagttagttttgttagtcagtaacatgtgtgcatctttgggtttcgatatagagatagagatatgattatattttacattaagcaaagcctttttgtagtgcatatctctttcatttcctttccaagttctaatagcttttaatgctatttttattggttatttttataataaccccaaatttttcaaaattaacatagcctattgaagtggctgtagagtacctgtatagaggcaaaaacccacgccgccgacgatcgcgtcgtaagctcattaataaaaccacaaacaacaacagcggctcatacggcagcagcagcaacagcagcaacaacaacagcagctgcagcaacaacagcggcagctacaacagcaacaccggcgacagcagcaacatcagctgcgatcgcgaagatcaggcggatggcgaactggagtctctcgtcagtcgcttgccgagtcttcgttcagctggtcgagcagtcttcgaattttgaaaaaagccgaaattgaaataaaaaaattgttgtacgccaaggcaaagtgctaataaatcgagcaaaatgcgctgcctggcattgagcgcagtgtttttgtgcctgactctggccgggcactttcatttgtcaggtaggcgaaatggctaaacccatgcaggtagtcataacattgttttccgatccataatccccgctagatgcctacaagaacgaggtacagatcaccccggatccgctagacgcggtggagacgacaaccaagaagtccagctggtttggtggattcaagaagttctttggcagcgatggcactacaactaccaccagcacgattgctccaccggtggtcaccagtccgaaatcggtggtggttacacccacggcagccaacaagccaccgccactggtcatctcgcatgctccattgatgccgctgggaccgcgacccgatacgccgggatcgtcacctttcggcgcatcccaaaatcctcaaacgccacctcagtggccatcgagcaccagagcaacgccatcgcatccatcgcaaccctcgcagccatctcagcagccacctctgcctggtttcgcctcctatcggccacagaaaccgcagccgaatagctacgatcttagctacggtggcggtccacaaccggcaccagcaggaacaggacgtcctggttttggactgggcataagcagcactacgagcaccacgaccaccgcgaagcccatcaccagcaccacaggtaagacaccgcagcagaaggaggatttcccggcactgccaggacctcggcggccgtcccaaaaagaggacttcccagctctgcccgcgcccaaaactccaccaggctcgccaacgcctacaccgggatctccttcggcttggcaatcaccgttgccaacgccccagcatcctgtgcatccgcccactaaggctacttcggcggccacgcctaccccgacaccaacgccttcgttctcttcctcggtaacgcccactcccgctcacggatcgtctgtgggaccacacaaggacggaggtggaggtggtggaggcggcacaactactgtgcgacccggtttccagtcgtcgggcaactcggtggccactgatgacgaaatccgccagctgacggagctactgtacaccaaggagagcaacagccagatcggtaacatccaagtgaatctgcagggacgcacgcgttccatcgacagcgcagatgaggcacccaatccgtaagtagatcatacatagatacatagacaaatactaaaatatccctcaaatcctcttgttacatttttctccaaagacttttgactgtggactcgaaagcccttgaatccccgacgatcgtcaagatgcggctgctgttcaacaactacgagcacgacacccatgtcaacgagcatgtgacgcccaacgagcgcaaggaggagaatgactttctggacgcagtgatggccacgccggtgatgcgacaggccatgctcttcctccaacaaaagggagtcgtcagtcccgatccaaagacccaccgcgatctggtcaaggagctgtggttcacacagtactcgcgcggtcagggcaagatcggcagttccggcttcgagcacgtctttgtctacgaggtgaaggacggcaccattatcggattccacaactgggtctatattggcgatgaggaaaaggacggtcgctttgactacaagggatatatgaaggagcaggacattggcacggtaagtgatccctcgaggcgtatgttattaaaatcttagggaacacagtggtacatatctgaaaatgtgcacgtcaatccgaaactaatatatgcaactgaaaataatattgtaatcctttgcagaagggaaaaatcgtaaagatccgtttctcgcatcagggactcaataagccagtgaatactgtgtttgtgggcacctctccggaactggagctcgccctgtacaccgtctgcttccagctacgaccggatcgcacctgtccagtgtccttgggcaatagcaagttcggcattgtcacctattcgtggcgctaccggggaaagaacctcattggcagcgcctatccggagatttgaggcagcgattaacgtttgtgcctctcgtagtcatcgtagaattttttttctgtcgctttaatgaataaagttaatgtgtgaaattataatattttcattttcatttcaaattcgcgggcctttcaatcagtttgctgcatagctaaaaaagatatcgatgtcgacaaggctatcgaatctttttaagtttcatatcagtcagcttcgcttttaataacagatggtaaggaaaaatgtagtgtttttgttaatattatcaaattggccacactgctcgcacttaaaaaatgaacttgcgtgagatggaaaacctgttttcagccacaaagcgtggctctttctctctctcacttagagttgtcatacttttttttaaatatcgtacatggcgtagttttctattctgaagaatgttgatttttcgatttttttaagattatagcctcatattttttatttttatatttgaatacgaatatattactttacgaatatatttgaatgattttaaatggacacaaaacatacaaacttttgttttaaattcaacgaggtatggcatttcagttttggacaccaattcctattgctattgattatattttaccaaaaaaaaaagtttgtcaaaaatctgattttttcaagcggggttttcttcataacttggccaaaaaagttgaaacaaccaaaatgaagactgttttgtactgctaatagtcaaccattcattttaattttccgctgatttttggaagtccaatttttgaccaattttcgcatttttaataaggggtaaaaagggattaatgaaattttcaaaaattggcaatctttaaaatttattttgtagaattacagattgatcggaaattttataacgagttcaactgggtaagaaaatctttatgtggacaacgaattctgtttttgtaagtaaaattccgataacttttgctggagaaatcgataagactcgataatcccgataagttttttcatgataacatggctttgaagatcgcagaggcaagtaactgactgcgtatctttgacaacgattccacctataaattccaataggcgattgcc

SEQ ID NO: 3488 - DNA, 2047 bp, DROSOPHILA
acagcagcaacatcagctgcgatcgcgaagatcaggcggatggcgaactggagtctctcgtcagtcgcttgccgagtcttcgttcagctggtcgagcagtcttcgaattttgaaaaaagccgaaattgaaataaaaaaattgttgtacgccaaggcaaagtgctaataaatcgagcaaaatgcgctgcctggcattgagcgcagtgtttttgtgcctgactctggccgggcactttcatttgtcagatgcctacaagaacgaggtacagatcaccccggatccgctagacgcggtggagacgacaaccaagaagtccagctggtttggtggattcaagaagttctttggcagcgatggcactacaactaccaccagcacgattgctccaccggtggtcaccagtccgaaatcggtggtggttacacccacggcagccaacaagccaccgccactggtcatctcgcatgctccattgatgccgctgggaccgcgacccgatacgccgggatcgtcacctttcggcgcatcccaaaatcctcaaacgccacctcagtggccatcgagcaccagagcaacgccatcgcatccatcgcaaccctcgcagccatctcagcagccacctctgcctggtttcgcctcctatcggccacagaaaccgcagccgaatagctacgatcttagctacggtggcggtccacaaccggcaccagcaggaacaggacgtcctggttttggactgggcataagcagcactacgagcaccacgaccaccgcgaagcccatcaccagcaccacaggtaagacaccgcagcagaaggaggatttcccggcactgccaggacctcggcggccgtcccaaaaagaggacttcccagctctgcccgcgcccaaaactccaccaggctcgccaacgcctacaccgggatctccttcggcttggcaatcaccgttgccaacgccccagcatcctgtgcatccgcccactaaggctacttcggcggccacgcctaccccgacaccaacgccttcgttctcttcctcggtaacgcccactcccgctcacggatcgtctgtgggaccacacaaggacggaggtggaggtggtggaggcggcacaactactgtgcgacccggtttccagtcgtcgggcaactcggtggccactgatgacgaaatccgccagctgacggagctactgtacaccaaggagagcaacagccagatcggtaacatccaagtgaatctgcagggacgcacgcgttccatcgacagcgcagatgaggcacccaatccacttttgactgtggactcgaaagcccttgaatccccgacgatcgtcaagatgcggctgctgttcaacaactacgagcacgacacccatgtcaacgagcatgtgacgcccaacgagcgcaaggaggagaatgactttctggacgcagtgatggccacgccggtgatgcgacaggccatgctcttcctccaacaaaagggagtcgtcagtcccgatccaaagacccaccgcgatctggtcaaggagctgtggttcacacagtactcgcgcggtcagggcaagatcggcagttccggcttcgagcacgtctttgtctacgaggtgaaggacggcaccattatcggattccacaactgggtctatattggcgatgaggaaaaggacggtcgctttgactacaagggatatatgaaggagcaggacattggcacgaagggaaaaatcgtaaagatccgtttctcgcatcagggactcaataagccagtgaatactgtgtttgtgggcacctctccggaactggagctcgccctgtacaccgtctgcttccagctacgaccggatcgcacctgtccagtgtccttgggcaatagcaagttcggcattgtcacctattcgtggcgctaccggggaaagaacctcattggcagcgcctatccggagatttgaggcagcgattaacgtttgtgcctctcgtagtcatcgtagaattttttttctgtcgctttaatgaataaagttaatgtgtgaaattataa

SEQ ID NO: 3489 - protein, 592 aa, DROSOPHILA
MRCLALSAVFLCLTLAGHFHLSDAYKNEVQITPDPLDAVETTTKKSSWFGGFKKFFGSDGTTTTTSTIAPPVVTSPKSVVVTPTAANKPPPLVISHAPLMPLGPRPDTPGSSPFGASQNPQTPPQWPSSTRATPSHPSQPSQPSQQPPLPGFASYRPQKPQPNSYDLSYGGGPQPAPAGTGRPGFGLGISSTTSTTTTAKPITSTTGKTPQQKEDFPALPGPRRPSQKEDFPALPAPKTPPGSPTPTPGSPSAWQSPLPTPQHPVHPPTKATSAATPTPTPTPSFSSSVTPTPAHGSSVGPHKDGGGGGGGGTTTVRPGFQSSGNSVATDDEIRQLTELLYTKESNSQIGNIQVNLQGRTRSIDSADEAPNPLLTVDSKALESPTIVKMRLLFNNYEHDTHVNEHVTPNERKEENDFLDAVMATPVMRQAMLFLQQKGVVSPDPKTHRDLVKELWFTQYSRGQGKIGSSGFEHVFVYEVKDGTIIGFHNWVYIGDEEKDGRFDYKGYMKEQDIGTKGKIVKIRFSHQGLNKPVNTVFVGTSPELELALYTVCFQLRPDRTCPVSLGNSKFGIVTYSWRYRGKNLIGSAYPEI

SEQ ID NO: 3490 - DNA, 2638 bp, DROSOPHILA
aaacaaaaggaaaatcgaaaaacgaaaaacaaagtaattcccaagtaaatgttgttgtaattaattatttaaaccaattcgtctagagagagaacagggatggcagggcggcagatccagttggtttcaattccaaccacaactaactaactagatataccgtgcatatagagatctatacaaattccattgagcagcagctaaaaaccagaattttatattaaaagaagtgtgggtcaagtaaaatagcaaactatgttacgcaatgttgaacacttgaaagtttctaaaagcgaatgatatctaatataccttaaaatctacatatacggtgtcccgcttgccatttccatttcgatccatttgctagatggctgcacttgccagattatccctgtatcctttgagtcctcgagatcatatttcgatctgatggactaataatggattcttggtagagtttgaattgaaatcggaaatggtagcggggcaagtaataataaaattcaaaaaacaattttttttttgtagtccacaaggtataaaaaaatgtgtgtgcagtaaatctgtttaagtttttatttatgtatgtgtgtggtgtagcaaaactaaactaaatacgaaacaaatacctaaagaaaaacaaagcggattgcaaaataggcacggtttaatagccattgtacgaaattaacgacatttatgagtaaccctaacgcaaaaatgcggacaaagtcagatgaaataacaatattaataataataaaaaaaatcgacaaaccaagaaatataaacttcagattgcgtttttctgggtggcaagttgataaaaacatttataaaaaccaaatcaagaaatttagaagttgcttccagtttttaaaaagtgcgggctttccgtgaaatttatttgttagtaccgatagttttcgatagactaaattgaacatatcgatgtagcacaaagcccgatacgtcaggcgaatgagtcttgtttttgttttagtgaagctaaaatcgttttgtttccgttgtcaaaatccagcagtgagaagggagcggcacaattagaataaagaagccatcatggatccaacaccgccgcttcgtgccaccaatagtattaacccacagcaggtggcaagcgttccaccgccaccgccaacggggcaaatcatagctccatcgggagcgtttcctggtgagttgattccgctttcaaatcgtgccaaggctaaacttttccatcgcacaggatccctgactcccggctggaatgacccgccacccatttcggcggattctcagagctgcaaattaaacaatagtcgtccacgcctagatcttcgcaagcgcgtggcccacccgctggacgggaagtcctctagtgtccagctggttcagccacaactatcaatacctacagcacaagattcaatctcgccgcgtcccgtggccctggtaacaccccagcgccagattccatatccggatcccaacaatccaccggccggtggagcggatgtgggcggtttcggagcgggaccaaatgccaatgccgtgcgcctgccaccgttggcccacagcatcagcatcgatccctccagggtggccaaggttccaccaagaaccaaatagcatgtagttatcgccaattcagggcctaggctaaggaacttcaaattaatgtgttctatggcgggctggaaaatcaattatttttctatgtaaaacacttaagacacctcacaaaatacaatcagaaatgcgaatgatggggggacgggacctctaaaaagtaaacccaagcgtttcttgactttaggagtccagtttattcaacaacaattaacagacagaaacaaaatgcaggtaaactaaccgctgtcatcgtttaccaggccagcggagtgccgtcgtagttgacaaaaccgccgttctgtttctcgcccagcttgctgatggtctgcacaatttgtcccgtgctggtgggcacgtccaagggggcactggagccacccatgtcggttttcacccagccaggatgcagactgacgcacatgatgcgttgcggatacagatccacgctcaacgacttggtggccgcattcaaggccgacttagaggtgcgataggcgtacattccgccgtccgtgttgccctggatggagccaaggatcgaggacatgttaataatggcggcacggcccacgcccatcggctgggattcgttcgctttggctgccttcttaaggagcggcagacacgccttggccagcatgatgggcacaaccgtgttggtctgcaaggtgtcgagcagctcctgcgatcgaacggccgttatcctggccgatttgggcgctatgccggcattgttgaagagcacattgaggccttggtccttggtcacgccctcgatgtcggcgactagcttgtcataggcatcgaaatttctcaaatctgcacggaaaatatatttatatgcgagagtgtttagcggctggtaaaacataatgcttaccaatctcaagtatgtgtatgttcgagtggttcttggctagatcctccagctcctgtgggccaaattgggaaagacaaaatgtttgaataagaagcacattattagtaaaaaagcagt

SEQ ID NO: 3491 - DNA, 584 bp, DROSOPHILA
ttttagtgaagctaaaatcgttttgtttccgttgtcaaaatccagcagtgagaagggagcggcacaattagaataaagaagccatcatggatccaacaccgccgcttcgtgccaccaatagtattaacccacagcaggtggcaagcgttccaccgccaccgccaacggggcaaatcatagctccatcgggagcgtttcctggatccctgactcccggctggaatgacccgccacccatttcggcggattctcagagctgcaaattaaacaatagtcgtccacgcctagatcttcgcaagcgcgtggcccacccgctggacgggaagtcctctagtgtccagctggttcagccacaactatcaatacctacagcacaagattcaatctcgccgcgtcccgtggccctggtaacaccccagcgccagattccatatccggatcccaacaatccaccggccggtggagcggatgtgggcggtttcggagcgggaccaaatgccaatgccgtgcgcctgccaccgttggcccacagcatcagcatcgatccctccagggtggccaaggttccaccaagaaccaaatag

SEQ ID NO: 3492 - protein, 165 aa, DROSOPHILA
MDPTPPLRATNSINPQQVASVPPPPPTGQIIAPSGAFPGSLTPGWNDPPPISADSQSCKLNNSRPRLDLRKRVAHPLDGKSSSVQLVQPQLSIPTAQDSISPRPVALVTPQRQIPYPDPNNPPAGGADVGGFGAGPNANAVRLPPLAHSISIDPSRVAKVPPRTK

SEQ ID NO: 3493 - DNA, 3445 bp, DROSOPHILA
aatatgattataccgtaggaccatcagcagttgtggtggctacgatgtcgtaatcggggtattccacagcttccacttcgtttggcgtctcatcataaggcatctcatagtgcagctttttgggtgcacttccacgtatgtacatatatatgtatatgtacatagaggacggccacctcggcacgcattcaattgggaaatctaatgatgcgaatgttggttaagtggctacagcttcagattcagctgccacttcatttatggctctgggccacaactccaacttcggtcgtggtaattgtcgatgtccatcgactcatcattcccccatcgcctttcccgccagcagctgcagttggcccagagtctcggctgcatatgtcgcaatgttcgcgtaatgagcgcccctccggctccatctgccatccacatccccatcttcaaccacatcttccattttaagcacttgcacgactgagagtacctcgtacacagcaaaaaaggggctacaaccctgcctccaatgagcagttaaagacatggatcatatgtatctggtatctgcaagatattttcctaagtataatgttattatattagcttgtaacttaaatcatttatatatgtaatttagtatttgcaactagtgataacacaagaccaattgattggctcagtgtacgtgaagataggccaggggttaaagctaccttattatcgagtgtaaaagtgaaaggattggcggagatgcttggcttggtatttaaaaacactgacatggggccagtgacaactcggcttacgtagagctgcgagtccgatcaattggaatggtgggtccatgtgagtggattgtcattacgagatcatcgagtgttttggtggtgagcaatgcggaacgaggtcagtttcattagatgtaatgacatttggcgagatagccataatttcgaaactcccatggattcacggtattgaaatgaaaatattgcaatcatttaacggtgacaaaatttactattttttttattgttttcatatttttttgttgtttctttgtttgtttcatataaaataaaaacacttacgagctagtaatgcgttataacactttgtggggtgttttccatcttggtgttgtgggtgttgttgtgtggctttcgttttcgggttttcttgtattcgtgtagtgtgagaaactatttacaagggttacaaaaaggcccgagacgaagtcccgaattgtttggggtttccggggaacggacgtttcagagtgttggggtacagtcgctgagttcgggaagagggcttgagaaggggaagcgatctccagttctctcgggatcagagcggatcggtgatcggtagttccattattagatccaggttgcccaaatttgtatagtgttggtgtcgtctttgtcggtttcgtgtccgtcggtattcatttttggcagaggtgtgtctttcggatgtgagacctgtgcgaagatctagaagggcgctccatagctgccgctgggccttgaaggggctccatacgatccggatggggcgctgggatatccaccgccgccacctccctgctgcgagctctgctgggcgaactgagccacctggatggcctggcggacgccttccaggtcgatgcccacgacacggccaccgcctccgattccgggggctccgtagctggtggaaggtggaccgtagctgctggatgggccactggggtagccaccaccgccgccaccaccgcctccaccaccaccgccgccctgcttgctctcctcgttcagcaggatctggcgcacctgctccaaaagctggggatccacgttctggccctcggacgtctggaagccgccgctcacagcctggtagccgccgccgccaccaccgccgccacctcctagtccgcctccgaatccgccgccgaagccacctccaaatccgccgccaccaccacctccgccgcggggatagttatatccggatggtggctctgctgcagcaagagcggccagcgcgaacactaagaactgaaagtaggtagtggaggttagtgcaaattccatatcaaactggtgatctcatcaattgaattctcttaaataactcgaatgcgtctttttgtggaatgtgaattgaaatcccatagattaaggcacaaggagagtttttgaaactattgaagtttttttgaaatccaattgcagcgtttgcggtctgacagggctattctttctaaatcccgtaaggggtgtaatccgcttgcgtccaggtttaatcggctctggggtctggggtcttgaggtcgtcgggatcgtgtgttacttaccactgagaaggagttcatagcgacgtttcgggtgagtgtgtttgttggggggaagagttgagtagagtagagtggagtgaatttggttgcttccgagtggggaaccagcgactgaatgcatctccacggccagcagagccactctttatacccgccggtgctcagctgctcttcagctttcgggccaactcgtccactcggcaacgtcattatcgccaaacttcgtctgcaacttgtttcttttgctgctgggcgcttctcacaataaaacaaaatttccaattggaaaacaacgtagaggcagaagaaaaaaaggccgaaaaaaataaaatgtcgctaacgattttggtatttgaaattttctttggcactttccttcgattcgcgcggaccaggaagtgatttttcccaccaccgcgatcgattccgaaggtaagtaacccagccgcagccactgagatttttcgacagcccaggaggatcatggcggcttccaaaacatatttctcttggccatgaggtatggctccactgacgaaactgcaattcgcgtttcccgttgcccaactgcagttgcatttcaattgtgggtaagtcgcaacctgggctcgtcatccatcagcatcagcgtcacatgggcacgaagattacgaaatgggctgggaaatgcgaatcgggggagtcaggagggccggagacggggaccgggacgggcccgaggcccgtataattcgtacgatctcgatgtggagcagtagggccatggcaccacggggcgtataattaatgtttcccaaggagcgtaattacacgagtttgtacatttgcagatgagtgctgcaatcgcaagagcctgaaaagtgcactttacgctttggaaggtatgcagttgggaatgccagagctaaatatgtatattacctgcactcatagtttgtcatattggttaagttaacttaaccacgtttaatttaacccaaccaaatgacctcgaaataagatcgaaagccagatatctgcgctcattctggcagaagtgaaagaagtccccgatggactggaggccgcattgtgcccattatgtcatgtcttcggatgagc

SEQ ID NO: 3494 - DNA, 1146 bp, DROSOPHILA
cccactcggaagcaaccaaattcactccactctactctactcaactcttccccccaacaaacacactcacccgaaacgtcgctatgaactccttctcagtgttcttagtgttcgcgctggccgctcttgctgcagcagagccaccatccggatataactatccccgcggcggaggtggtggtggcggcggatttggaggtggcttcggcggcggattcggaggcggactaggaggtggcggcggtggtggcggcggcggctaccaggctgtgagcggcggcttccagacgtccgagggccagaacgtggatccccagcttttggagcaggtgcgccagatcctgctgaacgaggagagcaagcagggcggcggtggtggtggaggcggtggtggcggcggtggtggctaccccagtggcccatccagcagctacggtccaccttccaccagctacggagcccccggaatcggaggcggtggccgtgtcgtgggcatcgacctggaaggcgtccgccaggccatccaggtggctcagttcgcccagcagagctcgcagcagggaggtggcggcggtggatatcccagcgccccatccggatcgtatggagccccttcaaggcccagcggcagctatggagcgcccttctagatcttcgcacaggtctcacatccgaaagacacacctctgccaaaaatgaataccgacggacacgaaaccgacaaagacgacaccaacactatacaaatttgggcaacctggatctaataatggaactaccgatcaccgatccgctctgatcccgagagaactggagatcgcttccccttctcaagccctcttcccgaactcagcgactgtaccccaacactctgaaacgtccgttccccggaaaccccaaacaattcgggacttcgtctcgggcctttttgtaacccttgtaaatagtttctcacactacacgaatacaagaaaacccgaaaacgaaagccacacaacaacacccacaacaccaagatggaaaacaccccacaaagtgttataacgcattactagctcgtaagtgtttttattttatatgaaacaaacaaagaaacaacaaaaaaatatgaaaacaataaaaaaaatagtaaattttgtcaccgtt

SEQ ID NO: 3495 - protein, 188 aa, DROSOPHILA
MNSFSVFLVFALAALAAAEPPSGYNYPRGGGGGGGGFGGGFGGGFGGGLGGGGGGGGGGYQAVSGGFQTSEGQNVDPQLLEQVRQILLNEESKQGGGGGGGGGGGGGGYPSGPSSSYGPPSTSYGAPGIGGGGRVVGIDLEGVRQAIQVAQFAQQSSQQGGGGGGYPSAPSGSYGAPSRPSGSYGAPF

SEQ ID NO: 3496 - DNA, 9396 bp, DROSOPHILA
aatatatgtttattatctcttctgaaaacttgtagtttacttaaaaactaaaaaaaatcaaaatcataaatcaaatcaaaataaatcatattgaaacacaatgaattcgacaaaagctttgttaagcagcaggatagtggccttcggacttgaaaatctggtgacgcgtcgcggaatgaagcagttacgtttggatgaaattcactacaaactcaactccaatcaagagcgaaaccaccagagaacttggccacaatcacagatgcagccgcagattgaggagcgcatggatgacaccaaatacaggccaggtcgttggacggagcggaaatatcaggccacctggcgggaagctgtcatcccaaatgaggaagcccataaggaggcgaaggactcgcgttcacaggaggagcgaccccacattcgtgaactccgccgaactaccgaccccaataggcgcctccagaggatcgcaatgcctgctaaacaattcatctcgcagtttatctccacccaaagcaaaaacaaaaggcgttacgtagaagctgcatcagatcgaatggcgtttgatggatactagctgatacacggcttgttttcgctatcaacttcgatcttaactattgtggatttaatttgcctttgcctcatatgttagatgtcgagttttagtttaaagtcgaataggttttctgtgttgtataacagtagaaacaaaatcaaattaaatttgcaatctttaagataattgtttgtttgtgttttatggtattaaggggtttttgatggcgttttaaaaaaatatcgtgtgtaatttatgcacttttgggcaggtaaagtcgaaaaaacataattaattccattaagcaattatttagcggtgcatggagagaatgctacagtcgagttactcgactatcagatacctgttactcagctagtgacaatgcgaacgcgtaatatcgtttttttttctggcatattaatagatattagggagtaaaatgagataaaattaataacattgttcaaaagtgtgggcgtagcagttttaggcgtcttgaaggcgttagaagaggcgtggctatgtaaaaaaatataacagcattttgcaaaagtgtggtgacagatttaggcaaatcgatagaaaagaatgaaaaaatatcagaacattttccaaaagtgtggaaaaagtgtggcagcatgggccaacaaacatgtgctgttatcgttattagttccagagatcgaggttttcataaggacagatatatatacatatatactttttaaggtcggaaacactaccaatctagtaacaagaatcgcagccacccgagtaacttgcttcaaatgacaacatttgtggaacgatcacattccgttacaacgctcatgatgaaaatttcgcagtgactcccagttttcgtttatattttaaaccaggacaaaatttttgcagtgtgtacggcatttttgcaacatagtttatactccactttgaatccggcttcattgaaacaatgatgctggccaagaacacgctctcccgagcaccggttgccataaggagtggattgacgtcaaggaccattcaggtgcgcatggagtcgttgttcgatccgtatgaatttggtgcgcccacgatggccaccgaacgaaaggatctgaaaaagaatgatcccgcggacaacaccaaggtgccggtcaaggacatctgctggatgtcgatgcggcgcagtgagtacaagtgccgttccgaccccgagttcaacgtgccggcctttattgactcccgtaaaagatgcctgtccgatcgctgtgcgatggcctatccgccgtctgacctcatgttctacaagcccaccgataagctgaatcgcaagtaccagcgcacctggtgcgagtgcgagctgcaggagcgcaaaaggaaggccgtttgccggtcccgtccgcccaaaattcatcgacggagccttcgaactctgccgctccatccttcgaaggtttgctccaaaggcaacaagagccttgggctggggctttgccgcccgaagccagcgaagagctcctgccccaggttcaagatgcccttctgcaagcaggccattacgaccggctgccggccaggacgccccccctccaattgcgttcgcccccggaccaagtatcccagcttttcggagtgccaaccgtatccgcttcccgatgttccgccgacgcattgcttctgcatcaaccagccgcccatgtgcgtggtttggaactattaccgcatgaagaaatcctagttgcctaggtcttcctacaattaccaattgccaaacctaagattcgaataaacaataggatatacattatttgggactaaagcgggcttaattttgggtatacatcattccttcccactgatagttattttcgtttaaagctcgtaatcagttaaatcaaactatctaatctcttctcatgttacaacaaataaattggacattttgggtccaatgcatagagtcctttggctagcatgtcagatacccgccgcctcatttcaaatttcgaacttcaccctttcggctaacgcctctctaaattagatattcaaaaaaggcaggcaccatgatcacctcgaagctgcgcctgcgccgagcacagattcccaggttttcgatcacgagtcgatggtacaattggggcagctacgatgccagctctggggagtgctgcaagatgcgcgacaaggataccacggcctgcaaggatggaaaatggttctgtccggtcaagtacgagcccaacaagtgttacgagaaaccatcctttgcagtagaagaatactcccagtatctgcaggagatctataatcgaggcaagaccaatcccgactgcttgctgaagctgatccgccacgacgctgaacattacaagccgtcagataagcagcgcaaattccaacggacttggccagagtgtccgctcctctggctacgaccaaaggactattgctgtcccgatcaggaggtatatcagcccatgaatcgccgcatccgccccccgcaggaaccaccactttcggctattgaaaagcacctcttccagatgagtatcttttgcaagtccgtcagggctccctgttgtaaagtaggtcgacgtccgcccaaatgcaccaagccgcggaggccatccgaatgctgcaagaagttcactccgatgcctagtttttcggaggcctgccgccatctgataccacgattctgtggctccgagtgtgcctgtcgtggagggagcttatgtgaaatgtggaacacgtataatatgtgcaacaagtcgcgcaggaactgcaccaagccgttaatagggtattctccgttacgatccaggatgcgatttccattttgagagattcctaagtgtgcagtcgtctgatttatttagaggttcttcaacaaagagtatgcggaagtaacctaaccagtgacctagttttcccggcctagtaactcacaagttcgacagctttcgaaaaatcattaggccaaatcaaaattctcaaaattttaagcatgcagtcagcactgtggatcttttgcagacaaggtttcaggagctttgccactaaagcgcaaggtttcagaagcttcgccagcaaagtgacctaccacgcggatccgccatgccaacctgtcgaccctttgtgccatcatgttccaagcggcagatgcgtgcaggccagggaaacgatcaatctcaaactgccacatgagaggttattgaagcaagaacgcgatcagaagaaggagaggaaatgctgtgtcctgcgatcggcggccaaaaatccctgcgtagagataagacgacccaaagccgcaaagctggaggagaagccattccgttcgatgtgggagccaccttgcaaggcgaacgagcagccgttctgcaaggaaatgctgccccgcttcgatgcgatgtactaccatccctcaaacaagtgccgctgctaccaacgcacctgggtggagtgttcacccgttaagaaacggctgaagaaggtttgctgcctggacgccatcgaacctcctgagattctgtaccggatcaggccgccctgcccaggaacttgccaaatcaactataaggctcgaaggctactctgtgcggatggagaatgggagcgggacccaacgaggaagtgtccgaaattctttcacccctgttgcaagctggctcgctgcaatcctcgttgctccagaggcagaaagcctaccctatgcaccaagttgcgagctccatatccttgttactcagaaaaaataagaggaacaagaccgctccgaaaaagagagtgcctttgcttggagaccaccccgaaatgtatagctcttgcggaaagaatgagacgcgatggattaaatctgtgataatcctaccgaaacacgtaaaagtgcaagttgagggtctggcttttaaaacgaagtaatagatacaaagtgatgtttctattaatttgctttagcagtcaggtatccgatcctaacaaaaaaccatggaaattacttaataataacaatttggcatacaaaatttataattgaatttatgagttgtaataaaacatataataaaaattcattaaatttatttttatgcttttttttggatttttagtattttacatcaaggtcacccacgccattgcagtcatctataaaatgaatcgattatttcggagtcacccattttttaatcaagcaacaggcttccaaatcgaacgtttccatttagatactacccaacccatctctcacgcagaccgaagcattcagggaaactaagcagcagaagaagccagcgagaactggtgaggatctgagatgggtacctctgtattggccacgatgtgtgctgagcgcctgaccaagctcctcgtccgctactcccgtgctcagcctcccgtggggcggaatcagtcccactgcgtcgataatgtgctaagtcctttgccaaggagcgaagcaactaccgccttcctgaagccaatgaacaatgctggccaggaccatcccccatcgaagtcggccaacaagtggcagccgatgggtaccatcacgagcatcggacagagattccagcgtgaggccatggatgagatttgtgccagggccaaggaccgcctgctgccaaagaccgaacctcgacgcttgaacttctctagaaatcacgctttcttccccaacaaatcgagaggccttgaagattggaagaaaccggagggtgggcggtactcagctccatttgtcagcctattccaggctccgaactgtcctagtctgcctaagaagtcgttttctcatccgcttgccttcgatcgtcaaaaactgtatcgagactgctattaaccagaaaaaaatgaaagttttcgatcctgatgccaaactcatacgcagaccaattactccacgctcattttagcgtagtgattgggttgcacttgcgattggcatcaggggtccaagattctccacaattagccgtattaaagatgtaatgtgtaaagcaatagtctttttaatcattggcctatatacggagtgaagtctggtaatgaatactgtagaatgtatttagcagcttaattttgtagaccaaactacggtcttccgaataagaagcacacatagaaattgactgaaaatgttaggtgacaaccccatatgagaaaccccatattcaactcttaaccccatactttttcattcgtttcggcaacacttcctctacgagaaggaactcaaatttaagttcaccagccatgctcaactctttggccaagagaattgtgcttatgcccagccttatagcactggaggatacttgtcgaactattcacgttaccgccctaatggcgaggatgggaaaggatttctgtcccgtgagtgaggttcccgactgcaaagtggtgaagaagcgaccgtgcagtcccacggatccacctgttcgtccttgcagcgaggagggctgcacccagccgcgatactcatgttgcgtgagtaccggcatttcggcgaatccatgcgctgatccaagcaagaagaccaagttcgtttcgatgtggaagagatacaaggatgatggtagtaatcggccagaagctatgtggcactacccggaggagtgctgtccaaagtgtgaggatacgcgatttgacgttttgtactatacaccgtcggacaagtgccgggagttccagcgcacctggtgggaatgctgtccaaaaatggtaccgaagcgggtctgctgctggtgcgacgccattccaccggaggtcctgcggcgagatttgcccatctgcccgcgatccgcttgtctcgcagaacatgagaggaagcgctataagtgcctaaacaaaaggtacaaaggttgcatgcgtatccgtatgccgtgttgtcgaaccgctcgaataccgcccgactgcagggcattccccggtccttccgattgcgagaagatcaagtgcccgttcccgagttactccgaatgcgttcaggaggatcccgctgttatcccaacccggccaccagagtgtgagtgcttgaaaaaggcgtctcagtgcgagcagatccgacgaggacggcacatggaaaacaacgacataagcatctggccgtgtacttccaggggaagatgaagaccgtatcccagggttatagtaactggggtcttcgctggaatttttgtaacacaaaatgtaacaaaaattccaacagagaccaaagtcctgaacggcaagcccttcaccagaaatcataaacctttataaactctttttatatttatgatttctggtggtgttgggtatccctgtggaatccccatcccagcaacccaactgaaaatctgtcagttgaggtacatctaatatctcattcaattggcatccggcaccctgtttaaaattcaaaattctaggcctcgttcaaaattaaaacatgcctcgcctctcggttttctgcggattatcgcgtagaatcatctgctccagcactgctcaccgaaacctttggcgactgttgtccgacagttcggagtcgaccattatcccacacgtttcggacaaaacggaaagtgtgaagaaattcaaaaaggaaacgcaggtggatcacacaagtcacctatttgtatggccggaggcgaaggacgaaaacgttcatcatgtgaaagagaacaaagaggatagcaatgacgatataactgcatcctggggctggaaaaatgacgagcttgacgtggagcaattggcaggactaccaagtcctaatgaggtggaggatccataccggcagccaaacaatgaatctcaggatgatcagttgccattcgctgaaggagaccaatcaggaattcaagaagaattacaattcgcaagaacgcgctccctgcgagaacagcttgtcaagaatcaggcgtcccaagaaccttttaccagctttgagaaaacatctctcacatccgttcgaaggaatgtggacttcatgatgcaagagcttagtcagatttcacttattttgaatactatgggaggaggtgaaaaaacaatggggatggttaactctgaaccggatgtggcttcctttgcactcaaccaacccaaaatcagtgaaagtttgaatcatgaggaggaatcaaatcagtcagtggatagagctagttcccatcaatctgagctaggtgttgcagattctatgcattcggaggtagccagtgcgctctcagaaccatctggattgggtgatgtagagagcctagatcatagcgagatttcgaaccagtcttttgattccgaactaacgagggatatcaccgatcaacttaaattggatcacgagatggaagcaaatcagtctttggattctgagttaaccggtgaaataactaatcaatctagttcggtagtttcagagtcttcgatttccgatgaggacttcggggaggagctaataaaacaatctcacaaaatcgagcaaattgcgtctgctggcgatactcaagagtccagtccttcaaaaaccaatgagaatactcccaagactgatgacacgcaggacactcagcctaaggaaaccatacacacctacaggccctttaggactatcgaagttcctgccaagaagcctactagtagccttagcaccgagtcaattgaagagcagccgttgaaccaggaaccccaattcggcacaggtatccatttagatagagaacggtacaaagtttctgctcagctgaccgagtccgagtcccgcttacttatgcgcatggctctgaagcaggctttaatcgatctggagtctggccaaagcaagtacaaagcaacaattctggaggctgaaaccgagtaatacaagagcaccaatgaccaaagaaataaacataacctttaaaacttattttttatttttatccttgttcttatctttcttcttatccgtgcccttatccttcttatcctttttcatcttcttgagcatgtcttttctcgccttcttggccttttttatggcactgggacagacgtggttctcaccatgaattttgacccactgacgaccccgctccgcttcgcagaggctcagggggaatcggcactcgcactcgcgaggtcgatatggtcgcttggccagcttaggctgcttacaatccgaccagcagggcatcggtgcacacaacctgcggcagcaggagggcgtcttggccgcgtggcatctgggcggacgacgtcctggcacgcatcgtgccaacggagcgaaatggggacatggtcctgtggctgtggcactgagcgttgtccgctcgcgccgctcggccacccgacgggcggggctcagagcctccagcttgtcgtaggcgcagattatcttcttgcggatcatgaacttggggcactccacccagtggcgctggtaaggaccgttcttgcaggagggacggtaatacagctcgtcgaatgagggcagtggtttggtgcagttgggttcgcagcacaagtcatttgatcggctgaccacgaaggggtacggcggaggcaggttcttcggcggatcccacatcgacttgaacttatccccttcggcgcagaaggcggccggaatgcagtgcgtccggatcttgcattctcgtttggcagaaggagactttggtggagatggtgacgatggtggcttcggtggacttggaggttttgggggtttattcgaggagccgctctgacgtgagctgaagccccttagtagggaggaccaaaacattagccgaaacttttaatgaaagtggaattttgaaaatttttgtataccgtaacgccgttacatgaatcgctaaattaaaattttttgcttggta

SEQ ID NO: 3497 - DNA, 5266 bp, DROSOPHILA
taaaatgagataaaattaataacattgttcaaaagtgtgggcgtagcagttttaggcgtcttgaaggcgttagaagaggcgtggctatgtaaaaaaatataacagcattttgcaaaagtgtggtgacagatttaggcaaatcgatagaaaagaatgaaaaaatatcagaacattttccaaaagtgtggaaaaagtgtggcagcatgggccaacaaacatgtgctgttatcgttattagttccagagatcgaggttttcataaggacagatatatatacatatatactttttaaggtcggaaacactaccaatctagtaacaagaatcgcagccacccgagtaacttgcttcaaatgacaacatttgtggaacgatcacattccgttacaacgctcatgatgaaaatttcgcagtgactcccagttttcgtttatattttaaaccaggacaaaatttttgcagtgtgtacggcatttttgcaacatagtttatactccactttgaatccggcttcattgaaacaatgatgctggccaagaacacgctctcccgagcaccggttgccataaggagtggattgacgtcaaggaccattcaggtgcgcatggagtcgttgttcgatccgtatgaatttggtgcgcccacgatggccaccgaacgaaaggatctgaaaaagaatgatcccgcggacaacaccaaggtgccggtcaaggacatctgctggatgtcgatgcggcgcagtgagtacaagtgccgttccgaccccgagttcaacgtgccggcctttattgactcccgtaaaagatgcctgtccgatcgctgtgcgatggcctatccgccgtctgacctcatgttctacaagcccaccgataagctgaatcgcaagtaccagcgcacctggtgcgagtgcgagctgcaggagcgcaaaaggaaggccgtttgccggtcccgtccgcccaaaattcatcgacggagccttcgaactctgccgctccatccttcgaaggtttgctccaaaggcaacaagagccttgggctggggctttgccgcccgaagccagcgaagagctcctgccccaggttcaagatgcccttctgcaagcaggccattacgaccggctgccggccaggacgccccccctccaattgcgttcgcccccggaccaagtatcccagcttttcggagtgccaaccgtatccgcttcccgatgttccgccgacgcattgcttctgcatcaaccagccgcccatatattcaaaaaaggcaggcaccatgatcacctcgaagctgcgcctgcgccgagcacagattcccaggttttcgatcacgagtcgatggtacaattggggcagctacgatgccagctctggggagtgctgcaagatgcgcgacaaggataccacggcctgcaaggatggaaaatggttctgtccggtcaagtacgagcccaacaagtgttacgagaaaccatcctttgcagtagaagaatactcccagtatctgcaggagatctataatcgaggcaagaccaatcccgactgcttgctgaagctgatccgccacgacgctgaacattacaagccgtcagataagcagcgcaaattccaacggacttggccagagtgtccgctcctctggctacgaccaaaggactattgctgtcccgatcaggaggtatatcagcccatgaatcgccgcatccgccccccgcaggaaccaccactttcggctattgaaaagcacctcttccagatgagtatcttttgcaagtccgtcagggctccctgttgtaaagtaggtcgacgtccgcccaaatgcaccaagccgcggaggccatccgaatgctgcaagaagttcactccgatgcctagtttttcggaggcctgccgccatctgataccacgattctgtggctccgagtgtgcctgtcgtggagggagcttatgtgaaatgtggaacacgtataatatgtgcaacaagtcgcgcaggaactgcaccaagccgttaataggacaaggtttcaggagctttgccactaaagcgcaaggtttcagaagcttcgccagcaaagtgacctaccacgcggatccgccatgccaacctgtcgaccctttgtgccatcatgttccaagcggcagatgcgtgcaggccagggaaacgatcaatctcaaactgccacatgagaggttattgaagcaagaacgcgatcagaagaaggagaggaaatgctgtgtcctgcgatcggcggccaaaaatccctgcgtagagataagacgacccaaagccgcaaagctggaggagaagccattccgttcgatgtgggagccaccttgcaaggcgaacgagcagccgttctgcaaggaaatgctgccccgcttcgatgcgatgtactaccatccctcaaacaagtgccgctgctaccaacgcacctgggtggagtgttcacccgttaagaaacggctgaagaaggtttgctgcctggacgccatcgaacctcctgagattctgtaccggatcaggccgccctgcccaggaacttgccaaatcaactataaggctcgaaggctactctgtgcggatggagaatgggagcgggacccaacgaggaaaccgaagcattcagggaaactaagcagcagaagaagccagcgagaactgcgcctgaccaagctcctcgtccgctactcccgtgctcagcctcccgtggggcggaatcagtcccactgcgtcgataatgtgctaagtcctttgccaaggagcgaagcaactaccgccttcctgaagccaatgaacaatgctggccaggaccatcccccatcgaagtcggccaacaagtggcagccgatgggtaccatcacgagcatcggacagagattccagcgtgaggccatggatgagatttgtgccagggccaaggaccgcctgctgccaaagaccgaacctcgacgcttgaacttctctagaaatcacgctttcttccccaacaaatcgagaggccttgaagattggaagaaaccggagggtgggcgttcaccagccatgctcaactctttggccaagagaattgtgcttatgcccagccttatagcactggaggatacttgtcgaactattcacgttaccgccctaatggcgaggatgggaaaggatttctgtcccgtgagtgaggttcccgactgcaaagtggtgaagaagcgaccgtgcagtcccacggatccacctgttcgtccttgcagcgaggagggctgcacccagccgcgatactcatgttgcgtgagtaccggcatttcggcgaatccatgcgctgatccaagcaagaagaccaagttcgtttcgatgtggaagagatacaaggatgatggtagtaatcggccagaagctatgtggcactacccggaggagtgctgtccaaagtgtgaggatacgcgatttgacgttttgtactatacaccgtcggacaagtgccgggagttccagcgcacctggtgggaatgctgtccaaaaatggtaccgaagcgggtctgctgctggtgcgacgccattccaccggaggtcctgcggcgagatttgcccatctgcccgcgatccgcttgtctcgcagaacatgagaggaagcgctataagtgcctaaacaaaaggtacaaaggttgcatgcgtatccgtatgccgtgttgtcgaaccgctcgaataccgcccgactgcagggcattccccggtccttccgattgcgagaagatcaagtgcccgttcccgagttactccgaatgcgttcaggaggatcccgctgttatcccaacccggccaccagagtgtgagtgcttgaaaaaggcgtctcagtgcgagcagatccgacgaggacggcacatggaaaacaacgacataagcatctggccaatcatctgctccagcactgctcaccgaaacctttggcgactgttgtccgacagttcggagtcgaccattatcccacacgtttcggacaaaacggaaagtgtgaagaaattcaaaaaggaaacgcaggtggatcacacaagtcacctatttgtatggccggaggcgaaggacgaaaacgttcatcatgtgaaagagaacaaagaggatagcaatgacgatataactgcatcctggggctggaaaaatgacgagcttgacgtggagcaattggcaggactaccaagtcctaatgaggtggaggatccataccggcagccaaacaatgaatctcaggatgatcagttgccattcgctgaaggagaccaatcaggaattcaagaagaattacaattcgcaagaacgcgctccctgcgagaacagcttgtcaagaatcaggcgtcccaagaaccttttaccagctttgagaaaacatctctcacatccgttcgaaggaatgtggacttcatgatgcaagagcttagtcagatttcacttattttgaatactatgggaggaggtgaaaaaacaatggggatggttaactctgaaccggatgtggcttcctttgcactcaaccaacccaaaatcagtgaaagtttgaatcatgaggaggaatcaaatcagtcagtggatagagctagttcccatcaatctgagctaggtgttgcagattctatgcattcggaggtagccagtgcgctctcagaaccatctggattgggtgatgtagagagcctagatcatagcgagatttcgaaccagtcttttgattccgaactaacgagggatatcaccgatcaacttaaattggatcacgagatggaagcaaatcagtctttggattctgagttaaccggtgaaataactaatcaatctagttcggtagtttcagagtcttcgatttccgatgaggacttcggggaggagctaataaaacaatctcacaaaatcgagcaaattgcgtctgctggcgatactcaagagtccagtccttcaaaaaccaatgagaatactcccaagactgatgacacgcaggacactcagcctaaggaaaccatacacacctacaggccctttaggactatcgaagttcctgccaagaagcctactagtagccttagcaccgagtcaattgaagagcagccgttgaaccaggaaccccaattcggcacaggtatccatttagatagagaacggtacaaagtttctgctcagctgaccgagtccgagtcccgcttacttatgcgcatggctctgaagcaggctttaatcgatctggagtctggccaaagcaagtacaaagcaacaattctggaggctgaaaccgagtaa

SEQ ID NO: 3498 - protein, 1579 aa, DROSOPHILA
MLAKNTLSRAPVAIRSGLTSRTIQVRMESLFDPYEFGAPTMATERKDLKKNDPADNTKVPVKDICWMSMRRSEYKCRSDPEFNVPAFIDSRKRCLSDRCAMAYPPSDLMFYKPTDKLNRKYQRTWCECELQERKRKAVCRSRPPKIHRRSLRTLPLHPSKVCSKGNKSLGLGLCRPKPAKSSCPRFKMPFCKQAITTGCRPGRPPSNCVRPRTKYPSFSECQPYPLPDVPPTHCFCINQPPIYSKKAGTMITSKLRLRRAQIPRFSITSRWYNWGSYDASSGECCKMRDKDTTACKDGKWFCPVKYEPNKCYEKPSFAVEEYSQYLQEIYNRGKTNPDCLLKLIRHDAEHYKPSDKQRKFQRTWPECPLLWLRPKDYCCPDQEVYQPMNRRIRPPQEPPLSAIEKHLFQMSIFCKSVRAPCCKVGRRPPKCTKPRRPSECCKKFTPMPSFSEACRHLIPRFCGSECACRGGSLCEMWNTYNMCNKSRRNCTKPLIGQGFRSFATKAQGFRSFASKVTYHADPPCQPVDPLCHHVPSGRCVQARETINLKLPHERLLKQERDQKKERKCCVLRSAAKNPCVEIRRPKAAKLEEKPFRSMWEPPCKANEQPFCKEMLPRFDAMYYHPSNKCRCYQRTWVECSPVKKRLKKVCCLDAIEPPEILYRIRPPCPGTCQINYKARRLLCADGEWERDPTRKPKHSGKLSSRRSQRELRLTKLLVRYSRAQPPVGRNQSHCVDNVLSPLPRSEATTAFLKPMNNAGQDHPPSKSANKWQPMGTITSIGQRFQREAMDEICARAKDRLLPKTEPRRLNFSRNHAFFPNKSRGLEDWKKPEGGRSPAMLNSLAKRIVLMPSLIALEDTCRTIHVTALMARMGKDFCPVSEVPDCKVVKKRPCSPTDPPVRPCSEEGCTQPRYSCCVSTGISANPCADPSKKTKFVSMWKRYKDDGSNRPEAMWHYPEECCPKCEDTRFDVLYYTPSDKCREFQRTWWECCPKMVPKRVCCWCDAIPPEVLRRDLPICPRSACLAEHERKRYKCLNKRYKGCMRIRMPCCRTARIPPDCRAFPGPSDCEKIKCPFPSYSECVQEDPAVIPTRPPECECLKKASQCEQIRRGRHMENNDISIWPIICSSTAHRNLWRLLSDSSESTIIPHVSDKTESVKKFKKETQVDHTSHLFVWPEAKDENVHHVKENKEDSNDDITASWGWKNDELDVEQLAGLPSPNEVEDPYRQPNNESQDDQLPFAEGDQSGIQEELQFARTRSLREQLVKNQASQEPFTSFEKTSLTSVRRNVDFMMQELSQISLILNTMGGGEKTMGMVNSEPDVASFALNQPKISESLNHEEESNQSVDRASSHQSELGVADSMHSEVASALSEPSGLGDVESLDHSEISNQSFDSELTRDITDQLKLDHEMEANQSLDSELTGEITNQSSSVVSESSISDEDFGEELIKQSHKIEQIASAGDTQESSPSKTNENTPKTDDTQDTQPKETIHTYRPFRTIEVPAKKPTSSLSTESIEEQPLNQEPQFGTGIHLDRERYKVSAQLTESESRLLMRMALKQALIDLESGQSKYKATILEAETE

SEQ ID NO: 3499 - DNA, 6541 bp, DROSOPHILA
gcaatgccatggtgtcgccaacttcagcagcagcagcggtacaacaacagcagcagcagatacagcagcagcagcaacagcagcagcagcagatacagcagcagcaacaacagcagcagcagcagcagcaacagcaacaggtcgccggaggagtgggtgtgggcgcccaggcccagggatccgtgtactatgcgatgaacgtatgacccgcgctcgaatagtcgatgccagcggcggtcattgtcgagcgccgccagtgtcaacttgtcgaaatgtcagcgacttcagtgcatttgggtagcggtggcatgggcggcagatgagcgcccgccccccggtattccaaatttgaaaccgagtccgtgattgagtcctcgagttaccatcaggtcccatccgctgatttcagttgcccctcagttgaccctagcgagcgtttttgaatcagtttgatcttccgtttatccagtgtatctgtatctttatctgtatctctatctgtatctgtaagcgtacccgtatatgttttcgcgtcagtatgattatcattatctgtatccgtgtaaccgtgttgtcagtatctttgtgtcggtggacgtgtgtgtcacaaatactcaagtacggtctgtcactacgatccttcaaagcttcaaatcatttaagtttctttgatagatgcaatacaaattcgttttgaagtgtatagcacactttaaagcgtttttgaggtggtttcgaagctcttgaggttcttaatacgcccattataatagaattaacaaactaaacatcttaagttggtggtaaacgatgcagcggcatcaaaataattttgatactatgtgcatcatggaaacgaaacagcggttgcaccgtttacaaccagcttcaacaacgagatccaaagtgaatcactccacgttatgcaatgctccaaaaagtaatgtttaagttcagccttgtcgtcgaggattttatttaataggtattaatatttagtcgagtgtagtgaagaaaggatgaaaatctaaaccaaaacacaaccaaatcacatgaatttatttcgagcatggacatgctgggtgctagtaatgcaaaaacaacaacaacaacaaccgcaacaaaaacacaacaaaaccaagaaagagttaattaagagctgttagccaaggaaaccgagttttgctcaatgaaaagtgcatttgattttaaacacatatatttaataactaacatacattattatatatctacatatgcgaatgcttaactaaattatacataattaattatatttcattgaattgatattataaggtattttcaatgtagtgcaatttgttgctaactccaaaagttctcttagcagagagtattatataaaaacaaacatatatatattttatgagtatcgaaattataggactatttttaggcttaggctttatttatatacaatttagttttaattattttttttttctttatgtaaaataaattaaaagaaattttcaacaatttttggttttctacgcttaagaaatgttttagcatggtacatgtaaaatctataggcgaacgaacacacatctatgtgtacttatgctttgtgagctacagtttgtttgggtttcatttgtattgtagatcgatcagccggcatcgcattccacatcttccacattccacaccctaagagatgtacatatgttaaaacccgggaagatttcatgacgattgtgcctaaaagtatgcaagaaacggggatcatcccaacttaaggcatacttttaagcacgtaacaaattgccttgaaatctgcggggaagaccacgcatctccgatcgcctttctcccaaagtgagagcatcagtgccaaaaacttgcatcccagacctaactcaatcatcccataccacccagtcatctcacctagtcgatagagttaccatttaaatcgtgcaatcatacgaaaaatgttagaagataccacacaaagtcacgttgaaccgagcgaaatatcgtatctcttaaaaacaaaaaaaaaaaaacataggtctacacactgaaacatacgcatagatgtaagtgcattagtgcatgcatcacgcatacaaaacattaagatgatatacagacatacatatataaaatatgcataatgtatttcgattcagatattgtgttaatgtctataacgaacatattgaaaactattgaaagcaaacacgaattaagagtgcaataatgttaaagtgaaattaccgctgaccggaaacggaagccaaaaatgatgaaaaatgacaacgcaattccgtgagagcgcgcaagcgaattagatagttggtcggccagttagacagagatggcgagagccgaaacaaacagagatagcgcgcataacgaaacagtttagtcatagatttaaatacacagacatttacagagcgattaacgattaactataaaggataactaaagcgtggtcttaggtgttcgatactcaaattttttttattttttgtttattcttcggttatatattttcgttgaacttttttgcggttccactgagagattccgacactagaaattgactagaaaacgcagcgcgatttgcatattatataaatacagttagagccagatagcgagcgagagtaaagcgataaattataaataaatatatatgtatatatatacatacaggcatacatatatatatatatacatggatatatactagatgtttatgtaatacataaatggcattgaacgaattccaagcacattgcaagaatcccaaatcaaagaaatcgcatgaaattgccccgtaccttttgcgtttgtaactcaattttttctatgcaaaagtagttgaaaattatataataaaaaccgattagaaaaacaaaacatacatatatatatatataaatatatatatatatttagacacacatcgacagtatcctattcaattgatttctttgagaactttgattttgcgattttggatatgcagcaagacaagtaaaaccaacaacagaaaatgtgtaagaaatagtataaataaggtcggatattaatgccccgacattacgctatatgtatgtgctggggcaaacagcaacaaatccaataaaacaaagtaattaacaacaaacaaaacggatgaaacaaccaagattatgtaagcgatggatcgaagtaagaattgatgcgaacggcacaagtatataacaaatttcaacaagtatatgactgagccaatgactcaaaaatacattttaaataaaagggaaaaccagaaatatatgaaaaatataaaaacgataagcaagtgaatgaaagctctttttcttttttgggttttgggaactgcaaattattgattgtatggaaatgtttgtttacctatttttgcatatggtgcgattgtatcaaaacaagttttgaattatcaaaattggttccatttatttttatacaaccttgacctattttcaaggaccaataagattggaccccacattaacttagaaaacaatacttgccatgttcaattttattcctacgcagggtttatttattattatactatgttaatcaaaaaattaaaatgttaatttctcagttatttaactacaccttaggtaactctgatttggcatttctcactgaactgtactactgtagactaccttccattcaggaaaatatttgtgtgcgccgcactttcacctcaagtgattgataattcccagcctatctggcagtgcccatcgcccagatcaccgactgtgcaatcagtcggaactggagctctctcgctctgttatcggttcgctggggtctcatctccggtccgctggcggagatcagttcgccagcatccgccgctcgaggagtcacgatctgatctgagctgtgcaccatgagctgtccctatgcaggaaacgggtgagcaccagcacgtgctgtccaggaatgccaatcgatcttcagttctgcgattcaattcaaacccatacagaaacgatcacgatgattcggcggtgccattaaccacggaagtgggcaaaatctatggagagtatctgatgctggacaaactgctggatgcccagtgtatgctctccgaggaggacaagcgacccgtgcacgatgagcatctgttcatcatcacgcaccagggtgagtaggtttacaactttgatgacaacactcaaaggcatttaagtaccttcgccacagcctacgagctttggttcaagcagatcatctttgagttcgactccatacgagacatgttggatgcagaggtcatcgatgaaaccaagacgctggagattgtcaagcgactgaaccgagtggttctgattctaaaagtgagtgctttctgaatctcttaccaaaatccgtttataacttcctttgtacagctcctggtggaccaagtgcccattctggagaccatgaccccgcttgacttcatggacttccgcaagtacctggcacccgcatctggtttccagtcgctgcagttccgtttgatcgagaacaagctgggagttctgacagagcagcgggtgagatacaaccagaagtactcggatgtctttagcgacgaggaggcgcggaattcgattcgcaactcggagaaagatccctcgctactggagctagtgcagcgatggctggagaggacgcccggactggaggagagtggcttcaacttctgggccaagtttcaggagagcgtcgatcgattcctggaggcgcaggtacagagcgccatggaggagcccgtggagaaggcgaaaaactaccgcctcatggacattgagaagcgacgcgaggtgtatcgctccatctttgatccggcagtgcacgatgcactggtgcgacgtggggatcgccggtttagccatcgtgccctccagggagccatcatgatcaccttctatagggatgaacccagattcagccagccacaccagttgctcaccctgctcatggacatcgactcgttaataaccaagtggagatgtaagtattgcattctttgatactcttttataaatatatcttatgtttaagactggttttcctaaccaaatactttctattcccgccgcagacaatcacgtgatcatggtgcaacgcatgattggatcccaacagttgggcactggtggctcgtctggatatcaatatctgcgctccactctcaggtgatcatcgcagatgtgattatatcggggatcaatgaactccaactgttctccctttgttttttttttggtttcagtgatcggtacaaggtgtttctggatctgttcaatctgtccacttttctgattccccgcgaggcgattccaccgctggacgagaccattcgcaagaaactgatcaacaaaagtgtctgacaatcggcagggtatccaattggtcaatgtttggctatgcgttgtttgttctgcctactgttttgtcgttttggtgtaataaaattacttgtttagtctttgttatcacatttgatgtgttccttttctttatgtctgacatataatacatataacataacaaaataaatattcatatttcagacataaacaaattctatgggaatgtgtgagtcagcagcctgaaagtagaccatatatattctggttgtctttctcgctcgtttctattagttcgttagcaaattaaattccataatattgtgtggcaatacttgtcaaaataataatggtataagtgaattttaattacaaaataccgatttaaacaaaaagctttgaataccaattttaaatgggtctcaatatataaatagtcaaaacattattattatagatacaaattttataaaaaaataatatataattttgagaaactataattaatctttaagattataataccctgttttgggataatcataattaatagttttttatattaccaaattcgcaccattaatttcagcatagaaggtcacatcaagtgttacgtagttaagataaaaagatgcaaaaccatttaaagaaaatgtttagagatcagaacccaaaatgctttgtcatttcgaacacttattttgtacccgactttaaaacctaattaatcatacaaaattcataattaattattaaatggctagaattttaaatagatcacatgtaggttgcttatcgtcttctaaacgttcaagttttgcaattggaacttggtgagctttccaaatcgactatcgctgtttgctcaaatagagcacacaaaaacataacctttgccagtggcctttttctcgggcgataagccccagatttaagcactgagttttcagtttcattattatttattagaacgggacggtcagctaggccaatttgctcactccttcgcaagcagtgcaattaattagttttgttgaatgggtcggggaatggaatcggcatctatatagagtcgtcttccattgggggaagggccagggaagggaaccagaccagaattaaacagaaca

SEQ ID NO: 3500 - DNA, 1806 bp, DROSOPHILA
cgagtgtagtgaagaaaggatgaaaatctaaaccaaaacacaaccaaatcacatgaatttatttcgagcatggacatgctgggtgctagtaatgcaaaaacaacaacaacaacaaccgcaacaaaaacacaacaaaaccaagaaagagttaattaagagctgttagccaaggaaaccgagttttgctcaatgaaaagtgcatttgattttaaacacatatatttaataactaacatacattattatatatctacatatgcgaatgcttaactaaattatacataattaattatatttcattgaattgatattataaggtattttcaatgtagtgcaatttgttgctaactccaaaagttctcttagcagagagtattatataaaaacaaacatatatatattttatgagtatcgaaattataggactatttttaggcttaggctttatttatatacaatttagttttaattattttttttttctttatgtaaaataaattaaaagaaattttcaacacgccgctcgaggagtcacgatctgatctgagctgtgcaccatgagctgtccctatgcaggaaacggaaacgatcacgatgattcggcggtgccattaaccacggaagtgggcaaaatctatggagagtatctgatgctggacaaactgctggatgcccagtgtatgctctccgaggaggacaagcgacccgtgcacgatgagcatctgttcatcatcacgcaccaggcctacgagctttggttcaagcagatcatctttgagttcgactccatacgagacatgttggatgcagaggtcatcgatgaaaccaagacgctggagattgtcaagcgactgaaccgagtggttctgattctaaaactcctggtggaccaagtgcccattctggagaccatgaccccgcttgacttcatggacttccgcaagtacctggcacccgcatctggtttccagtcgctgcagttccgtttgatcgagaacaagctgggagttctgacagagcagcgggtgagatacaaccagaagtactcggatgtctttagcgacgaggaggcgcggaattcgattcgcaactcggagaaagatccctcgctactggagctagtgcagcgatggctggagaggacgcccggactggaggagagtggcttcaacttctgggccaagtttcaggagagcgtcgatcgattcctggaggcgcaggtacagagcgccatggaggagcccgtggagaaggcgaaaaactaccgcctcatggacattgagaagcgacgcgaggtgtatcgctccatctttgatccggcagtgcacgatgcactggtgcgacgtggggatcgccggtttagccatcgtgccctccagggagccatcatgatcaccttctatagggatgaacccagattcagccagccacaccagttgctcaccctgctcatggacatcgactcgttaataaccaagtggagatacaatcacgtgatcatggtgcaacgcatgattggatcccaacagttgggcactggtggctcgtctggatatcaatatctgcgctccactctcagtgatcggtacaaggtgtttctggatctgttcaatctgtccacttttctgattccccgcgaggcgattccaccgctggacgagaccattcgcaagaaactgatcaacaaaagtgtctgacaatcggcagggtatccaattggtcaatgtttggctatgcgttgtttgttctgcctactgttttgtcgttttggtgtaataaaattacttgtttagtctttgttatcac

SEQ ID NO: 3501 - protein, 379 aa, DROSOPHILA
MSCPYAGNGNDHDDSAVPLTTEVGKIYGEYLMLDKLLDAQCMLSEEDKRPVHDEHLFIITHQAYELWFKQIIFEFDSIRDMLDAEVIDETKTLEIVKRLNRVVLILKLLVDQVPILETMTPLDFMDFRKYLAPASGFQSLQFRLIENKLGVLTEQRVRYNQKYSDVFSDEEARNSIRNSEKDPSLLELVQRWLERTPGLEESGFNFWAKFQESVDRFLEAQVQSAMEEPVEKAKNYRLMDIEKRREVYRSIFDPAVHDALVRRGDRRFSHRALQGAIMITFYRDEPRFSQPHQLLTLLMDIDSLITKWRYNHVIMVQRMIGSQQLGTGGSSGYQYLRSTLSDRYKVFLDLFNLSTFLIPREAIPPLDETIRKKLINKSV

SEQ ID NO: 3502 - DNA, 7714 bp, DROSOPHILA
tcctgccggtccagtgtagaatttatgttaagggcatccgccccctgaaagaggcttatacctggcgtgttcatattcggctaaggggacgccacaagcatcaaattcaaataaattccgaggcgcaggcgctattttcgtaggcaactctaattttcttcctcttgcttctgttgacactttgacattaacatagtaacgcgtgctgttaagtgcagtaagcgcttctgtagcgaaaacattgcgttcacactacatacagtctagaagggaattaggtttttattctatacttgtacataaactgtaattgttaaatttaaaaataaatattttcccaaaaagttgccgatatgtcgaaaagattgtggccccgacaatagacctgccaggcatacacaagcttgaagatgatattgtatgtatgtattatcatgccaactatggttccgtcgtatcattgatagggggagctgttgtgcattgcagaatgcagtagatttgctattggaatatacatacatatgtatgtcgtgttagtccagatgacaggtatgtattttcagacacggccagtaattttttataggatcactttatagaaagaatttcttctacctttcaaatacatttcaacgaatcgaaaaaatataacttgctttttaatttaatgggagtccgctcatttcataatatcgaacagctaaaaaatgttacatttcaaagatattctaaaaatatgaataccaactagactccagcaggataaaaataaatcgctttaaattgttaaccggcaatttgtaccagaatttgcacatacatacatatgcatatatgtatgtatatatatcctaacaccgttttagaagaaaaactcaaatggattgtttttaatttttataataaaacttattattcagttagtgttgagtgtccttgttgcaatgcaaaaacaacagcatactttctttttcaatttttttcatttttattaattttatacagactgtccattcataaacgcacttatattgggacatttatctaatttctcgggatctatttggaaaaccttggacaaacgtttccaactttgcgcatcaaagtagtagaaggtgccgcgctcttttgtaccatttttttcatattgatcaatgccaggaattcgagttatccatattttctcctccacgtggtatcgccactcgcgactatgcctgcgatgggagcagaattttagtatatatgtatgttctatatatgttcatacgaagcttagataatagctacgcaagaggaagtactcacaattcagcagctgccatcaattgcatcatatcgccgatgttcgtgtaaaaaaggaaaaagagcaggtcttcttgcagctttttcagtaccggcgctgttagtttgtctcttatcgcaaagttaatcagatattcgggtggcacgttgaactcaacgtcttgtgctctgaaaaaagtaaatgcaaatccaatgttactaatttggtacacctcttactcaatagtactcaataagcaattaaattatgtaagtttattatgtaaactgacctgcagggctgtgctacgaaggggccagcgaaggttgtatgcaagctctcctgcgagttcaggttcaggcctaaacccgtgagatccgtacccaaggagagcgtcaccagattgggatccgtttctgcagcccgaatgaacgtcagcaggccaaccatgccgaactggttgttcaccatggtcgctggtatgtttgtgaccttccctatttatgcaaaacgaacgaaaggtaaatttgttacatttttaaataaataaaatatttcatggtactattatttctggataaaatgggtcaaggatagtatagctgttgggcttttgtgatgtacaccgaaatcaccgaattataatatgaaacaaataataatagaaaccaagaaatccattgattaaatggtatcaatcatccatagagtgttcaattcaaagctccaaatgatcaaaaggtcaaaaatagctctctcacatgttgtgagaagtgttccagcactcaccatctggcgaagtttgcacgccgctctttacaagtttatcgttgctggaattatcgttcagatgctcgccgcccgctccgctcccagacgagccgcttccactccccaggccgccgcctacgcccatcatggcattgctgttgggtacgctgttgacgccgccaatgccgctgttactgcccaccagtcctacatgggacccgccgacaacgccgctggctgcattgccgccgactcctccgcctcctgagctaccagctcctccgccgccgcctactgccaagccccctataccactgccaacggcaccgagaccattgccgcctacaacgccgacgttggaaccgctgctgccgctcgctgatccgctgaccactatcgaattcatcggcttttccgtgccgtccaagtggttctctgtggacgcacctccggagcctcctgttccggcgacgctccccaccgcgttcgttgtgccgtccgagttttgggtgcccggtaacgcagggaagtcctcgttagacatcgtgaactccgattgctctgacgtcggttgcttcaccatgccaactgaaatcagaagaggagcgagatggtcgcccagggcgaatgagtgaagcgaagaaattagtactaaagcagtttaagctcatacaatacacacgattttagttaatttctttttcctcaaccaattaaaatcaatgagtaggtccaaacagcatttgttcaaggttttaagacatgttactgtgaatttaaagttatccttcacctatatatgaacttataaaaggttaagtcgcttgctttatgtgaacagtttctttttattcattgatcatgtttcaaagtaaatgagattgcatataataatatgtttggagtataatccggaaacacaatttcatttcaaactctaaattgcaaaagctcttcatggaatcagaagcccgtattcggttggaccaacgtagccaaagtaaatgtccttgactgaatctagtttttgcagcgtttgccatacccaaaccaacacccgaggttagtcccaaatacagcgtagcatatctaagtgggcttaatgagctgatcacgagacaccacgcttacaaccgattcttaatcgtagttttaaaaacaaaaataaataaaaagaagtggattttgatttgaactcacaagaggtaaagaaattaccatagggtttgctgcccggcggctggagcggattcgattggggcagtgtctggtcgttctggccgcgcgcattcgtcagcgaggggaactccgtgggatcgagcagggcaggcgtggaggtgtcgctaccaccgccgccgccgaacacgtggaagttattcaaaggaccgccaccgcctccgcccgttccgtagccgccgcgacccgtctgcatgaagttgcccatgttcgactgcggaaagagataatgattagccaagtcttaacaatttatttttagaattaggactgacatctccaactcaatcttaatagagggtatattttttatgtaatgtgaaagcatttgtaacttctgaaattaatgtatattccgttgtatcaaaaatatttcctttatataaatctgatcgatcagcgatacgattctctgatgcaatccgaagtattgaagtactaaacccacagtcaatggatatagatattgttatatgttttactttgagtatcttggacaagaccgagttggaggagttagactttgttgtaatgccgcgctgcttaccatggggccactgcccaatccttgcatggctcgccgctccacaaactgacgctggccgaagaggttggcgttgcggttgccgctcgagatggcgggtccgccgaccgacagctgggcattccggttcggcgacagttggggctgctgctgctgttgttgctgctgctgcggcgcctgtccgtagttcgccgttcctggataggagttggcgaagtctaaggcaacaaatgtgaattggtgctccgtcaaaagctttgggcgacaagtgcttaccggtttgaaacatgcccgacgtgggcgtcacatggccagccagggagctaccaccgaatccgcctgttgtccggccagctaacgccgcgttcgctatacttctcgggggttgttgaaaatttaaattcgccataatctgcaatggaaggggttgtcggttattaggctgtggccttgctttgcttatctacccataaagaaaaacccatatcgtatccgcgtcgacatcgaagtatcacttaagcagtaatcacttaaatgtaatagtatagggatttccttttggcaaaaacaaactaatatatatttattttggagattattacgcgttatataacattacggttaatacgagcaattgggaatatgctggatgattcgcaacataaattctcgaagccatctgcgcagcaatcagagaactgctgtcaaatgtctgaatcagggaaactcttcgcccataaacaagggtttacaataaaaactgtgtgattcagtggagggggactatattgataacaaattggctccccgcagataattgtcgcacactaaatgcgagtatatgcgtattgagcaaacaaaccaacaaccttgtgggttagcagcctggagccatatatatgaaaaggttatcttaacggcaaaatgggatcccaaaaaagggccaccatctatagtatatctataaacaaaatagcccgcgccaagtgaatccgttaaatggccgacgcatcagctgtcgattggcgaagcgaattcggacagcaaacagagcagaaggagaaaaggagagcaaattgagaggcagagcaaggaggtggagaacgagaagcatgggcagaaaggctgtggcaattattgccgttcctctttgtcgtgggcacactcatgcacagaccgtgtggataagatggagaccaagacaatggcgatggtgtgggtgagaaaaccagaatgactgccaccagggtgcaagggagtgggtggagagcggggcaatgcaaaaggatataagcctcaacttgtccctcgatcaattatgcaggcagtggtcagtgcagtgcaaaaggtgtacagtaaaaacagttaacattgtaaaatacaaagctttataccttatctccactactggccaaaccactaccgagttagtcgaatttcgtttacttcactacgaaagctccagttaggttttgatgctgcttgctagtaccataatatgtaaataacccttcctatggtaaagaccggctttatcttatcgaaacttcaacgtgcgctgaactcgcctggaatgcaagatatactagcacaggatgccagtgcatttaatttgaaaggagcaaatcttcctggaatacgggagctgtcgattaaattgatgttttacctgcacgcatgtaactttatcagctgacctaacagacgcttcccaacactggcgaccgcgcttacaacaaaattcaatggctagcgttaactctggggacaagtgtttaaccaaccatttaacctcgggcgattcagcaagtacaaaataagaacgacggatccgaaaggaggaatgcgcgcaacttacctaaattaacgttagacgatactgtcgcttcttgttcttccactgttaacgctcgctttccactctgtccagcaacaacaacatacactgatcgaatcgttctcaccgcatttaacattccaaagcggccggcgggacgaggacgtaggagtcgttgtcctggcgccgtaaccgtaactgtgacggatcacggatcggcgaatcagcaggaatatgaaagtccgctaactcccactgggcagctgttggttagctgtgggtgtctcggtcactagcactcactcgctggaagctgaaaggatgcaacggagaaacgggagctggaaccgtagcgggtgtaggagcgggaacgaggttagttagtacttttccgcgccgagtcgtccctaaataaatggcatatataccgctgtgcgtgtgtgcatatgtatatgtgcctcgtctgtatgcagcgtggtcttcgtgccgaagagacagcgagcgagagagagagagagaggagaggagagtcgaaggatgttgatgcctggcggaggctaaaagttgtccgttttttctgcgccgctcttgcgaccactgtagtttctatattcacgcttatgcaaatgtcgcgcacgttacactcggccgattggattggccagggctctcgctttttgttaatgtttccgttttgtattttatttgtaagtaaataatcgctcgctattgcgctgttgtctctgcttcttactacactgctgcacaagcactgtgtctgtgaccctgtgcgtgtgtttgtgtgtgtgtctgtctttgttttctcagttcattgaaatttcacccgaagcagcgaattgggcaaattccctgctagatttgcgcgtcttttacgccgccgacccgcaaatgcactcgaacttaatggagccgggtccttacgatccactatcgaggggcagtaaacaattctttagcgcccgaaatggctttaaattgtacacaaaaaatgttccgcaaaaaactttgtggctgtcacgaatacaaacacacaagaattagggatgtaaaaatctgctatcgagacagcgttggtatcgatagtagttagtttgcaacgagagggtttggtgcattgattactgtatatttcaaagaatattcgaattgttttctttaaagacaacaattttattcgcctttgcgattggtaaaatagttgtttacttttaatcgatagacaaaaacagttattgggctgccatctggggcgtctatgcgaagacctctttgcgtatttcagttatcgattactgtgacagtgcctagacctcctaaactcaactttattgcccggccgcgaattgtcttgattgcagattttccgattttaaacaaaatttacttggcattatgggcagccaaaactcggacgacgacagtggtgagtggctaatggctaagtccaggcctgagtaactaatatttacactgttcacatatgtatgtaggttcatccggttcgagtcgaagtggaagccgcagtgtcacgccgcaaggaggtagtgcgcccgggtaactatttgatattcaaacacggcggcgggagagtgctgattaccttcccctcgttttccagatcccaacgcagtcgcaggtcgggtagtggcagcgatcgttcccgatcgggctccaggtcttcccgatcccggtccggctctgggtctccgcgtagtgccaggtccgggtctgcagaaagccgccactcgcagctgtctggctccgctcgtagtaagagatcaagatctgctcacagtcgcaggtcgggatctgcgcgtagccgtaaatctggaactccggaatctccacaaagtcacagatcaggttcgttgcaaagtcgcaagtcaggatcgcctcagagtcgtagatctggttctccccaaagtcgcaaatcgggatctactcacagccgcagatccggttcggcccacagtcgcagatcgggatccgctcggagtcgcaaatctggttcggcaca

SEQ ID NO: 3503 - DNA, 2757 bp, DROSOPHILA
tgacagccacaaagttttttgcggaacattttttgtgtacaatttaaagccatttcgggcgctaaagaattgtttactgcccctcgatagtggatcgtaaggacccggctccattaagttcgagtgcatttgcgggtcggcggcgtaaaagacgcgcaaatctagcagggaatttgcccaattcgctgcttcgggtgaaatttcaatgaactgagaaaacaaagacagacacacacacaaacacacgcacagggtcacagacacagtgcttgtgcagcagtgtagtaagaagcagagacaacagcgcaatagcgagcgattatttacttacaaataaaatacaaaacggaaacattaacaaaaagcgagagccctggccaatccaatcggccgagtgtaacgtgcgcgacatttgcataagcgtgaatatagaaactacagtggtcgcaagagcggcgcagaaaaaacggacaacttttagcctccgccaggcatcaacatccttcgactctcctctcctctctctctctctctcgctcgctgtctcttcggcacgaagaccacgctgcatacagacgaggcacatatacatatgcacacacgcacagcggtatatatgccatttatttagggacgactcggcgcggaaaagtactaactaacctcgttcccgctcctacacccgctacggttccagctcccgtttctccgttgcatcctttcagcttccagcgagtgagtgctagtgaccgagacacccacagctaaccaacagctgcccagtgggagttagcggactttcatattcctgctgattcgccgatccgtgatccgtcacagttacggttacggcgccaggacaacgactcctacgtcctcgtcccgccggccgctttggaatgttaaatgcggtgagaacgattcgatcagtgtatgttgttgttgctggacagagtggaaagcgagcgttaacagtggaagaacaagaagcgacagtatcgtctaacgttaatttagatggcgaatttaaattttcaacaacccccgagaagtatagcgaacgcggcgttagctggccggacaacaggcggattcggtggtagctccctggctggccatgtgacgcccacgtcgggcatgtttcaaaccgacttcgccaactcctatccaggaacggcgaactacggacaggcgccgcagcagcagcaacaacagcagcagcagccccaactgtcgccgaaccggaatgcccagctgtcggtcggcggacccgccatctcgagcggcaaccgcaacgccaacctcttcggccagcgtcagtttgtggagcggcgagccatgcaaggattgggcagtggccccatgtcgaacatgggcaacttcatgcagacgggtcgcggcggctacggaacgggcggaggcggtggcggtcctttgaataacttccacgtgttcggcggcggcggtggtagcgacacctccacgcctgccctgctcgatcccacggagttcccctcgctgacgaatgcgcgcggccagaacgaccagacactgccccaatcgaatccgctccagccgccgggcagcaaaccctatgttggcatggtgaagcaaccgacgtcagagcaatcggagttcacgatgtctaacgaggacttccctgcgttaccgggcacccaaaactcggacggcacaacgaacgcggtggggagcgtcgccggaacaggaggctccggaggtgcgtccacagagaaccacttggacggcacggaaaagccgatgaattcgatagtggtcagcggatcagcgagcggcagcagcggttccaacgtcggcgttgtaggcggcaatggtctcggtgccgttggcagtggtatagggggcttggcagtaggcggcggcggaggagctggtagctcaggaggcggaggagtcggcggcaatgcagccagcggcgttgtcggcgggtcccatgtaggactggtgggcagtaacagcggcattggcggcgtcaacagcgtacccaacagcaatgccatgatgggcgtaggcggcggcctggggagtggaagcggctcgtctgggagcggagcgggcggcgagcatctgaacgataattccagcaacgataaacttgtaaagagcggcgtgcaaacttcgccagatgggaaggtcacaaacataccagcgaccatggtgaacaaccagttcggcatggttggcctgctgacgttcattcgggctgcagaaacggatcccaatctggtgacgctctccttgggtacggatctcacgggtttaggcctgaacctgaactcgcaggagagcttgcatacaaccttcgctggccccttcgtagcacagccctgcagagcacaagacgttgagttcaacgtgccacccgaatatctgattaactttgcgataagagacaaactaacagcgccggtactgaaaaagctgcaagaagacctgctctttttccttttttacacgaacatcggcgatatgatgcaattgatggcagctgctgaattgcatagtcgcgagtggcgataccacgtggaggagaaaatatggataactcgaattcctggcattgatcaatatgaaaaaaatggtacaaaagagcgcggcaccttctactactttgatgcgcaaagttggaaacgtttgtccaaggttttccaaatagatcccgagaaattagataaatgtcccaatataagtgcgtttatgaatggacagtctgtataa

SEQ ID NO: 3504 - protein, 579 aa, DROSOPHILA
MANLNFQQPPRSIANAALAGRTTGGFGGSSLAGHVTPTSGMFQTDFANSYPGTANYGQAPQQQQQQQQQPQLSPNRNAQLSVGGPAISSGNRNANLFGQRQFVERRAMQGLGSGPMSNMGNFMQTGRGGYGTGGGGGGPLNNFHVFGGGGGSDTSTPALLDPTEFPSLTNARGQNDQTLPQSNPLQPPGSKPYVGMVKQPTSEQSEFTMSNEDFPALPGTQNSDGTTNAVGSVAGTGGSGGASTENHLDGTEKPMNSIVVSGSASGSSGSNVGVVGGNGLGAVGSGIGGLAVGGGGGAGSSGGGGVGGNAASGVVGGSHVGLVGSNSGIGGVNSVPNSNAMMGVGGGLGSGSGSSGSGAGGEHLNDNSSNDKLVKSGVQTSPDGKVTNIPATMVNNQFGMVGLLTFIRAAETDPNLVTLSLGTDLTGLGLNLNSQESLHTTFAGPFVAQPCRAQDVEFNVPPEYLINFAIRDKLTAPVLKKLQEDLLFFLFYTNIGDMMQLMAAAELHSREWRYHVEEKIWITRIPGIDQYEKNGTKERGTFYYFDAQSWKRLSKVFQIDPEKLDKCPNISAFMNGQSV

SEQ ID NO: 3505 - DNA, 3063 bp, DROSOPHILA
ctgtcctgccgtccgactgtctgtctatgcgaattaattaagtgttttcgtgcgcgggcaaatccttttgcggttcagaaacttttgaggtctttggagccaaggcatatcgctgggccggtgggcggggggaaaatcaattataaattaaacatttattaaagaaagcgcacacattgccccgggggcaacgcaaccgcttcaacacatccccactcttccccatccaaaatcccccattctcaaatcccaggttcttagcctgcctatgcaaatcagctgcggcataaataatgcgacatcattatttagacgaaggtaggcgcacaacacgaatcctcttttcggattcggatccagatccagccagaacatttctgtcgccagtcagcgatccatcaattatgtctgcagctggggaagattcgtcgtcttcggagctgcggagccgggccttgtctcatttcgattgtcttcgggagaaggctccttccgctccccttttgattatgcacatgcatttcggctcgtacatcaaactcgaactcgaataaatgtgacggcctgcatgcattcaaagttaaaggaaatacgaaaagggagagggacgtccaaaaagcaacagccaggggaatatgctgatggatgccgggtataactgatttgtgtgtactcgtatatatctgaattggtaatttgctataagcgactttaatatggcacgcagttgtacgccatctccgcatcccctcttcgagacactttgcatactcatccagagtcgggcaaatgttttcgatttacatggctaagtagcaacggtccaggttttcaaaaccaaaatatataacacaaaaactattttcgagcggcgagtaaaccaaatgcgcataacaatcttatgcaaccagactccatagtagccatgtgtgcatttaatccttcccctaggagattgttataaatattttattgaatgaaagatcaatgctatctaattaaataaatttaaaaatcatagttcggtttatttctagtctgaattttacgcacggtagaaaagttactttaactggatcggtttggaatatttaggtcaacggaacaagatactgagcgctgggattaggattcaaacagcactatggaattaagccctactgcccccgcagtttggcttccgtggatttccttcgaacttcttcagctcacgaatcaggtcacaggagcttggaacatctaggcagttgcattcaacgccccgaggcttgcgaagacgagagcggctgcactcggagaaggaaggatagggggccttgactttgacgcagtcggtcttacgtctaacgacgtggcaagagacgctgtctacggccttacagccgggcatcttgattctagggcagggtcctccctccgtggggcattcgacattcgtgggacactcggcggatgtcacgaacttcttgcgcttgcgccttgggatcggcggacgaattcccgcctcgtagcagcagatcttcttgggctttatctttatgggcggacactccacccaggtgacctggtacttgcgcgtggccttgtcagagatcttgtagtagcattggtcgtacggggggaaccgttccgcgcagggatcggtgcagcactccggcggctgcttcaccagatgatggaactggaagccgtcctccttcttcggcggtggtttcttcgcgaaccgggggtctccacaagcggtaaaattaccgcaaccctttccagaactgtcactgcactttggagatggattgtggtcctttgcgaaagcgcgatggcagaccacgctcgcaaagctgggtattactcgattttgggttttcgttccaatactgcgccacatagacatggctggatacgggctgatataaatttctcgggggggaaagaaaggtatcgctaaatacaacaatcccgaaacaaaaatgaaaatccctcggcaccgaaaaatgaccaaactacaaatttgtaaccgaatacacaatcagctcaacggagccgatgtgaattttggaagaggccgagaggaactggcatacaaagttattcgacatggctacatcgcatcgaagtaaatttcaaggcatccttttcagaatattattatatagaaagaggaaatactctgttagcgcagagtactccatatttatacataaaagaaaaaaaaccctacagtcgttttctccgtaaatcacataccacttattctgctagtacgaaaattgtgacgaaatagatttacaattggtcaaaaataaactgaaatccaaataaaaacaagagccattactcagcaacatgggtcaacttccgctgcgtcaatgtctctagaatctgtatgctaaaccttatagcttttatagttcctgagatcgagacgttcatatggacagacggacatggccagaccgactcggctattgagtctgattaaagtatatatattactttatggggccggaaacgcttccatctgattgttacatacatttttaaacgaatctagtatacccatttactctaaatataataatataatataaaataaaataaaaagtataataaaattttcttcagcacttaggtcgcgaaaagtatttggagacaggttctgcggcaaattctaccaaaaccattttgtgctgcgctaacgtctttagagtctggttggtcaatccaacctgcatacctttttaagtgcccgacatggcctgattgggaatgaacatgtatatagagtcggaaatgcatccttctgccatttacttacgtttcatcgtatttagtatactctactagtagcgggtacgataataccattcccacaagtttgcaaaacttcatagattttactataaattctctaagatatttaaaatatgtatatcttaagttatatactcgtttccctgaaaagcaaattgagatgaggaagaggaaccctcacaaaagtggggaaaaaaaaggcactgcaactggtacaacaggtgtagcttagatatatctagaggtctttta

SEQ ID NO: 3506 - DNA, 1063 bp, DROSOPHILA
gcctcttccaaaattcacatcggctccgttgagctgattgtgtattcggttacaaatttgtagtttggtcatttttcggtgccgagggattttcatttttgtttcgggattgttgtatttagcgatacctttctttcccccccgagaaatttatatcagcccgtatccagccatgtctatgtggcgcagtattggaacgaaaacccaaaatcgagtaatacccagctttgcgagcgtggtctgccatcgcgctttcgcaaaggaccacaatccatctccaaagtgcagtgacagttctggaaagggttgcggtaattttaccgcttgtggagacccccggttcgcgaagaaaccaccgccgaagaaggaggacggcttccagttccatcatctggtgaagcagccgccggagtgctgcaccgatccctgcgcggaacggttccccccgtacgaccaatgctactacaagatctctgacaaggccacgcgcaagtaccaggtcacctgggtggagtgtccgcccataaagataaagcccaagaagatctgctgctacgaggcgggaattcgtccgccgatcccaaggcgcaagcgcaagaagttcgtgacatccgccgagtgtcccacgaatgtcgaatgccccacggagggaggaccctgccctagaatcaagatgcccggctgtaaggccgtagacagcgtctcttgccacgtcgttagacgtaagaccgactgcgtcaaagtcaaggccccctatccttccttctccgagtgcagccgctctcgtcttcgcaagcctcggggcgttgaatgcaactgcctagatgttccaagctcctgtgacctgattcgtgagctgaagaagttcgaaggaaatccacggaagccaaactgcgggggcagtagggcttaattccatagtgctgtttgaatcctaatcccagcgctcagtatcttgttccgttgacctaaatattccaaaccgatccagttaaagtaacttttctaccgtgcgtaaaattcagactagaaataaaccgaactatgatttttaaatttattt

SEQ ID NO: 3507 - protein, 246 aa, DROSOPHILA
MSMWRSIGTKTQNRVIPSFASVVCHRAFAKDHNPSPKCSDSSGKGCGNFTACGDPRFAKKPPPKKEDGFQFHHLVKQPPECCTDPCAERFPPYDQCYYKISDKATRKYQVTWVECPPIKIKPKKICCYEAGIRPPIPRRKRKKFVTSAECPTNVECPTEGGPCPRIKMPGCKAVDSVSCHVVRRKTDCVKVKAPYPSFSECSRSRLRKPRGVECNCLDVPSSCDLIRELKKFEGNPRKPNCGGSRA

SEQ ID NO: 3508 - DNA, 10438 bp, DROSOPHILA
cactattaaaagtaaagtgatgtgatggaccattaataggtggcatacgtgtaagcacctcacggaagacggttcaatgcacgccaaagcaaagcaaacagggctaacatggcgtatgcgcaatgcggctgcttcacgtgactcggtgctggggtctggcaattcaaatgggaacgagataccccttcgatgttcgctagggcttgatttgcatttttatgccactctattcaattcaaatccaacaggtgcccgagtacggagatttgtgggattagcttgggctttacggtgtttttgtttttattctgttcgcgataaaaaaaaggcagcaagtgtcacgccgaagaccggagcacaatttctgtttggttttctggcgcgcaaacagcgcggggtttatcgcacttggcctaggcagagacctcgcaaatatgcgccattgggctggcccaaatattgggtttatgaatccaatccaattccatccgatctcgtcactgctggaactgggaccgcattcttcagtcatccgtccggcatttagcaatgctaatttaccgacatcgagggaccgtaggatggggtctgacatatctgatggctgattaatggaccatgatttatgcatgaaccacctgcccaggcgggattctccgcattttgtcacgacgaactgctcggagatgggatgcactatcttatcggcgatgcactcgtttccgtaacaatatttgttaaataacagcgctgcaagacatctgtctggtgcttaaattgttgggcaggtacaatgcaaagcggctgcaatcgccgtgcaaattgttttccgtctacgataatttacgactttgacgggccactcaattaagaggttaccattcaatgagtgccataaatttcgacaagcacttgagtgcccgaaggtgcctttatgatgccccaaactttccacagttcagtacaatctgctttatttggacaaagttgtgggatcttggacttacgaactagaaggaagtggctagccttagatgaacgcacaacatgtaggacagtgttgagtatatgtgaggcctaaaagtgtgctacattatgtgggatcaatcaattttatttgagcaaacgtgcgctgggcgctcgttgaattgatgtctaaaagcgataaacaaacaaaaaacgacccaaaacgggtcggttgcaacactatttttgtgacttgtgagtggttatatgagtgagtgggtcccctagtcctccagcgttacgttgcggaacagataggacatggactccttgttgtgaatgcggcgaatggcctcagcgatcagaatggagatgtcgatcgtcttgatcttatggcactgcagcttttggatctcgtgtggaatggtattggttacaacgatctgtcgagggagatagtaaacaaaattatgagtcatattcagggcaattaactccgggcggcacatacctcatcgatgggcgactcgtccagctgacgcggtgcatctgagctaagcagaccatgcgtggccagcacgtatatcttgcaggcaccgttctccttcagcatctcagcggcggccacgaaggcctgcacatcgtcgatcaggtcatcctgattaaagcaaatacattcaaagttaatttcggagaaagccttgggacgcagatccagggtactcaccaccatgatggcgatgcgtccactgacatctcccacaatggtcagcggtggcttgaccttgacaatgtgctccggaacacccaccgaaaccgaggtggttcgctggcgggcgctgctggttggggcgtgttgtggagtagagtttctagtggttagtgtggggcagtatcacgtggtttgcagttcgtgtggtgcagtgtggtgcattgtggtacattgtgagttggtttttgtcgaggtggtggtgcattgcattgtttggtcgaatcgtaatcgaaaccaaaaaagaaaagaatcgtgagggtgggttgggagttggtggagtggcatgggtggggaaagatacaaatgacagtcggttaaagaatacaattaaactgaaattaaacaatagtttaaaatacgaacctaggcgtcgctggtaagcacatttcaactgaatttcctaataaattgctatacgcactgcataacacaaataaagagaaatttcgattgtttttctgttttctggattttaaatttggacaagagaactgctccgtatgcccgccaaaaagtgtcgaggatttcgtggcagagcggaacaataaatttaaacaaaaacaatttcaaaacgcaaaagaggaaacaaaacaattcaaagcgttttaataggatctagcttttagtttaaagtctactaattaagtgtctgccttggccgtgaagtacgaacagaagccactgacagaagctcaaaatatatggcattgtgatggtgcttttgtgagtatgtgcgttaaaaattaaatttattcaaacagaatgcaaagctacaatgctgaagaactaaattgcatttaaaaaatcacaaaaaaaaaagagtggatgattgatattcgagtgctttacacccgacgaacaagaacgagtgcagagtgaaattatctggatttgaggtgagttaagcttcggtcgcagtataaagtttcagaaactcgaaaactaacaagaaaagctaacaacaaactataataaatcagctaacaaatcaaacaggaacctcacaacgaaataacttaagctaggaaggatcgaggctacgggcaagactgagggaatgtaactcacctggtcggtggaggggagtaccgaccgtcgacctcatcggcatccgtttccttctgttcgccatggatgacggccaggccaagacgcagtcgctcggcgtaggagttggccttcttggccacgcccggattgcgagctacaatcaccgaatttcgatagtcgggaatctagaagcattatcacatttagtttcaatcttcgcttagtttgcacactacccacgctctcttgaatatattggagcagaaagggcgacgccctcagattgtccacgggtatgtcaaagaagccctggatttccttctggtgcagatccatagtgatgatgtgcgtcaggccagaggtgcacatcatcttggccagcagcttggacacaatgcagccgcgcttgcgcatcttgcactgcttggaatagggcaaatatggaatcactcccacgatcgaacgagccgaggaagtcttgcaggcgtaggccataatcagaagctccatgatattattgttggcatcccttttgggggtaaaagacatataattagtgagcagaagaaggtcaccagtgaattacttactttgtgcccgtttggatgatgtagatgtccttgcctctaacggaatcactgatctccacaatagtctccctattggacttgtggaacacggagcagcccccattcttgattcccatacgctcggccaccatattggccagatccggatgcgagttgccattgatgatgacaatgtccgaggtggaggtgttatccatgtcgctcctgcaacgctttggtggccgtacgctgcctaatctgtgatgaattcaaatgattagtacgagttagggtcaagagagtgcaaatcaaagccataacgaaacattaacttggattagggaaaagctacctgcgtttggacatgctgtcctagctgtagcttttggggttattggttatgttaatggggtggtgcatggttctctcggtggcataatcgttaaagtaacacacacgcagtcgttacggttcccacgttgcgatgtacgaccgtatcgattagccccagtgaactgaatagcccccggtttttgcttgaacgcaattaatcctgccgctcctctcggttgcccagttgtggaaactgctctctggctgcggaggaacccaaaaccacaggcgaaccgaagcccctagccggaaactactgcgaattatcgatcaaacaaaaaggcgacacacgtgagtggcgtggcaacgtcaaagtgccaacatgcgaatcacagttccggagtccgcagcccgaattccggattccaaggcagtcgtctgtgcggtgcggaggaagcggcgaggagcgaccaggagctgcccgggattagcagatagagatcgacctccagcgcccagacttcgcacgcgacttcaccgtcttgggagccccactcgagaaaagtgaaaggccaggaggcgttggctaattgaatttctatttttgatcctgcccaaggagcgaagccccaaagaaaagagaagttgatgggttgaggcggcggaatgggcgactcaggtaagcgaaatggtcataaatactcgcgataagtacgttgagggaatcccctagcaaagcaatgtaaaaatacactaggagtttatgaagatgttattgaaaaatagttaaccatgaacaaaagctagcaatctatacctcattccgaccaaaaatcacaacacccacggttagggtataaatgaagctatttaaaaacctttcaagcctcgagacattcacctccggctttcaactcaggattggtttggcatgggcttgggattggggggccgacgcaaccgcgaggcgactattcaattttagacatttgacgacttgagctgctcgaggctcagccaaaaggcgttggcaggtgcagtgagtgcaatggaaacttgcggcacgcatatgtggcacaaggaaaaggaaaggaccggcgggatgggatgccttgatttaagatagcagccgggtggcattaggaggaggattagaaggcgccccggccaagaaagttatgacaggccgggcagaggccaaagcctcgagggattagggccactgcactcggattggcttggttgcattagaagaacgtagatttttgccaaagaaagacgcatcagcggataagagtcatcatgttgggaatagcctgcgatccacttcagcatacgagcatgtacgaacgcggatcagatggtagtgaaattgatattaaacactcatcttgaacagattagaaactaagagatagtatactacgcagatcaaaaaaagaatattggaaatatttgctcttatcaatcagtttcttatttcctaaactagaggcatgccgcttaaaatctttttggctcaattcatagtttttatacttctaatggatattcctttgcagatagcgaagacagcgacggagaaggcggtctgggcaacgtttcccgggttatcatccgtccgccgggtcaaagtggcaaggccaagaggggccatctctgctttgatgcggccttcgaaacaggaaacctgggaaaagcggagctggtgggcgaattcgagtacgatttgttccttagaccggatacgtgtaatcctcgcttccgtttctggtttaacttcaccgtggacaacgtaaagcaggatcagcgagtgctctttcacattgttaacatcagcaagagcaggaatctcttctcctcgggactgactcccttggtgaagagctccagtcgacccaagtggcagaggctgtccaagcggcaggtgttcttctaccgatcggccatgcaccagggtcactatgtcttgagcttcgcctttatcttcgacaaggaagaggatgtctaccagtttgcgttggcctggccttatagctattcgcgtctgcagtcctatttgaatgtgattgatgcccggcaaggatcggacaagcggttcacccgatgtgtgcttgtcaaatcgttggtgagtcatcagaatgtcctgattaaagctttgtctgagatatccctttaaagcaaaatcgcaacgtggacctgctgaccatcgaccacgtgactgccaagcagcgctctacaaatcgcttggatcgcagttttatccgggtgattgtagtcctctgcaggacgcattccagcgaggctccagcttcccatgtgtgccagggcctcatcgagtttctcgttgggaatcatcccatcgctgccgttttgagggataactttgtatttaaaattgtgcccatggtgaatccggatggggtctttctgggaaacaatcgctgcaatctgatgggacaggatatgaatcgcaactggcacataggatccgagttcacgcaaccagaattgcacgcggtgaagggcatgctgaaggagttggataattcagatgtgagcagagggattgaaaccgatttgatcggcattatattcgtgtgttcgtacaatatatcatttcagacctatcagattgactttgtgatcgatctgcatgcgaatagcagcatgcacggctgctttatctacgggaacacctacgaggatgtctacaggtatgagcgacacctggtattcccgcgactcttcgctagcaacgcacaggactacgtggcggatcacacgatgttcaatgcggacgaacggaaggctggcagcatgcggagattcagctgcgagagactcagtgacacggtgaatgcctacacattggaggtctccatggccggtcactacctcaaggatggcaagaccatctccctgtacaacgaagatggctgtgagtatatgcctgcaaactaagctgatagggttcctaatgagctggtatcttcctccagattaccgcgtgggcaggaatctggccaggactttgcttcagtactatcgcttcattaacatcctgcccatgccgattgtgacagaggtcaggagcaaaaggcgggggcgaaaccgccatgcccaccactcccgatcccggtcgaaaacccgctacgaggtgaagccccgtcccaagacgccccgatgccacgcccccattgcctacacaaacctaagtatatgctacgattcgggtggaggaggcggatcctcggacgagggaggattttcgcccgcccgtcccttggctcctggaagcagttgctttagcgggtaccgcaactaccggagggccgccacagcaagttgctccgcgcacccaggtcacgatcagtactcccccttcgcactgggtgccctgaaaacgggcagcgaccacggcggaggagttggtggctccaagggcaagcgatcagcagcggtcaccatcgaagttcccctgcccgtgaatgtgccccccaagccttatctgtccatcatcgacttgaatcaactgaccaggggaagccttaagctgaagtccaatagcttcgatgccgcagacaggagataggatcagtgatgtgatgtggaacatgatgaccccggacgttagggattcgaagagagtgacgagttttttttaggtataaccaagatcaagtcttttctacgcttcttgcttgtttttctaaataaaaggttgaaactattaattcaaaagtattgaacctttactttttattgtagtctatattttaataacaccaaattgattgtatagacattgtacgatgaaacaagtaattagattgtttctgatacaatcaagtaattattaccaaatctaatcaatagatttatgttagctgggggtaggcactagaatttccataaatataacgaattagcttcatatcagtagtattgggattgtaaatctccttctcttttgtccttcttctaaacaaacagttatgcgaccacttttcactcggaaaaccgaagggcaacaagtcgcgcaattgagtggcatttcgagtgggttggcttatctccccagcatgtattgttgttgttatgtgctcttaatttggctcgcaaccagaaagtacaaaataaaacacatttcactcaattggcgacatgtgagcttttatcacaccatttagatgcggttatttacagtaactcacggcgaacaaagaacagaagtaactgagtgggcatcaatttcactcgctgcgcacgtgagtgtgagtaaaatggtcctagacaatcgctcatcagtaattagatggattagctgccacttttatcttatcttttatcaaacgcgatattgctataacctcctagggatatgaaaatgcaatatatgtacagactactctcactcacgcaggaaaacacgcgcgaaaagtgttgataagagcacaactagcgggcgactgattaacgttttcaattaacacggaatcggatccggaataggaatgaaatcaataaaaaaaataggcagccagacgttgctttcttacacttatttttcgtataaataaaagcgaatgactgtggacacagtggagcgcaaaagcgagggctgcgcggcgttgccagatcgctggagtgaggtaatggtggtggcaaacagctgttgccgctttgagtggaatccagcaaggaactgtacaagttacaaccatatttaaggtttttaagcatatgtgggtcaattaagttacttatttatctttttaatggtttaatcttcttgcgtatcattgtgttcaagtgggtccgttaaaaagtggtcaatggaacatgtggatcacaacaaagcccccaatgagagtttatctcactctcttagctttttgagagaggaaatcaataaggaacattaatcgaccgatctgactcgcacgcaattaaatattcttattgaaatatatagttttcatgtatattcataatgccagtaattaaaaaagacttaatatcattataattcaaaccaaaccaatgcattttgttcagtgtacacaagagagagcgttgtcacggaaagaggagagcaaaacaaagacggagaggcaaacggcgatgaagtaacaaaatgagaacggcaataacaacatcgaaagcgggctaaaaataaaatgcaaacacaaattccagtacaaaagaagtaaaaagcaaaaggaggtggggttttgctcttgttagcaccagcacgcaattgataaaatttggttagacaaacaaaagctgtaattgaaaacctggctataatcttcgcgggcactggaatagaacagggaaaacgtattagaacagggaaaacgtattagaacagggaaaatgtgatgaagggtgggaggaacacacgcaaacagcgggacactaattaaattatacatgaaacacacagaaatcatagaaaaaagctagaaattagccgctaaaaagttttacttgttccgctgcagcagcatgttgacttttcgaagaattagctgttttatctcgacgcttatggatttatattcaagttttctcttctttcttgcctagatctatatcctgtttttagcagtgttaacaggccgaagaaagtagtaattaatacagagacactatcacacattcgccgattatattagctattaataaacgtttatcaataattactcttttcttcacgacactgcttcacttaattcgcacttttccgaaaactcagacaaaactgccacaaaatcctcgcaattattcgaacagctgatgaatcgatgatttcgtatatcgataatcgactgagattagtgatgacatcatttcgatagtaagtactcattttattcaatatgcgtctagattataataatttacatgcatactatgcatacattcagaagctgttttttcattgcgttttgaaagtccctgttcaagggctacttcaaaaatgtttctgaggcttttattttcgaaacgagtcatgcagaatagacacaacgacgacgtcatcgtgctgaaaacaaatagtagagctgatgtaaaactcaaatactactaaaatgttacaacagataaacaaaaacaatatcagatgttttgtttacttcctagaaatcagagatgtgtggagtctgctactttgccgatagtagccatccttctggcagcactagttgggtggaaaactccgcttactccaattctggatgggtgggtgcatttgctaagtacactgtgtcaaaaattgtcttactgttttgttttcggtataagcttgtaaaaaggtccaaaaattagtggtttgaattgtattatgtttcttgaatccaatttatggattttccttgccgaattatttagtcacagatatttagctgagtcgaatgcattacatttcggacttggtgttcttcatccttaaaatttagttttctccaatacccaaccaatcatggctgtgtcattttggcttgcgattctgcttttgatccttggctgttacagttttaaggctctaagtgagaaacaagtgcgggaaatgctgaatctagagcgcaatctcctgcagaatatgcgtgactatgccgaaaagctggaggagaagatcgaccttataaacaagtgcgtcagaaatcctttcccaatcgtaccaattgagatgaaaatatttttaatatagttatgtggaagattataacgtcga

SEQ ID NO: 3509 - DNA, 1700 bp, DROSOPHILA
cgaattaagtgaagcagtgtcgtgaagaaaagagtaattattgataaacgtttattaatagctaatataatcggcgaatgtgtgatagtgtctctgtattaattactactttcttcggcctgttaacactgctaaaaacaggatatagatctaggcaagaaagaagagaaaacttgaatataaatccataagcgtcgagataaaacagctaattcttcgaaaagtcaacatgctgctgcagcggaacaaattaggcagcgtacggccaccaaagcgttgcaggagcgacatggataacacctccacctcggacattgtcatcatcaatggcaactcgcatccggatctggccaatatggtggccgagcgtatgggaatcaagaatgggggctgctccgtgttccacaagtccaatagggagactattgtggagatcagtgattccgttagaggcaaggacatctacatcatccaaacgggcacaaaggatgccaacaataatatcatggagcttctgattatggcctacgcctgcaagacttcctcggctcgttcgatcgtgggagtgattccatatttgccctattccaagcagtgcaagatgcgcaagcgcggctgcattgtgtccaagctgctggccaagatgatgtgcacctctggcctgacgcacatcatcactatggatctgcaccagaaggaaatccagggcttctttgacatacccgtggacaatctgagggcgtcgccctttctgctccaatatattcaagagagcattcccgactatcgaaattcggtgattgtagctcgcaatccgggcgtggccaagaaggccaactcctacgccgagcgactgcgtcttggcctggccgtcatccatggcgaacagaaggaaacggatgccgatgaggtcgacggtcggtactcccctccaccgaccagtgcgtatagcaatttattaggaaattcagttgaaatgtgcttaccagcgacgcctagaaactctactccacaacacgccccaaccagcagcgcccgccagcgaaccacctcggtttcggtgggtgttccggagcacattgtcaaggtcaagccaccgctgaccattgtgggagatgtcagtggacgcatcgccatcatggtggatgacctgatcgacgatgtgcaggccttcgtggccgccgctgagatgctgaaggagaacggtgcctgcaagatatacgtgctggccacgcatggtctgcttagctcagatgcaccgcgtcagctggacgagtcgcccatcgatgagatcgttgtaaccaataccattccacacgagatccaaaagctgcagtgccataagatcaagacgatcgacatctccattctgatcgctgaggccattcgccgcattcacaacaaggagtccatgtcctatctgttccgcaacgtaacgctggaggactaggggacccactcactcatataaccactcacaagtcacaaaaatagtgttgcaaccgacccgttttgggtcgttttttgtttgtttatcgcttttagacatcaattcaacgagcgcccagcgcacgtttgctcaaataaaattgattgatcccacataatgtagcacacttttaggcctcacatatactcaacactgtcctacatgttgtgcgttcatctaaggctagccacttccttctagttcgtaagtc

SEQ ID NO: 3510 - protein, 386 aa, DROSOPHILA
MDNTSTSDIVIINGNSHPDLANMVAERMGIKNGGCSVFHKSNRETIVEISDSVRGKDIYIIQTGTKDANNNIMELLIMAYACKTSSARSIVGVIPYLPYSKQCKMRKRGCIVSKLLAKMMCTSGLTHIITMDLHQKEIQGFFDIPVDNLRASPFLLQYIQESIPDYRNSVIVARNPGVAKKANSYAERLRLGLAVIHGEQKETDADEVDGRYSPPPTSAYSNLLGNSVEMCLPATPRNSTPQHAPTSSARQRTTSVSVGVPEHIVKVKPPLTIVGDVSGRIAIMVDDLIDDVQAFVAAAEMLKENGACKIYVLATHGLLSSDAPRQLDESPIDEIVVTNTIPHEIQKLQCHKIKTIDISILIAEAIRRIHNKESMSYLFRNVTLED

SEQ ID NO: 3511 - DNA, 3737 bp, DROSOPHILA
tgtgattagccaagtgaaaaaacaagagattaggcaactatttccaacttcatttgcctatggataatgcgctggtatggcaaacatcgtacctcattacttattcattttcgagtttaatgaggtgggtttgaatttacttcttagacttattagcacacgtagaacatacgcacctatacttcgatcatctttgattcgcttgagatttgaagggtacgaaaggaaagacaaagctctttaatatggccactaatctagacaccgtctgcgatctttccactatctgacaaatttggccgtcatccaatgcgattttcgccattctgccctcactcatcctcatggaccacgtctatatctcagtcggtgcgatctgtatctgtggcgactcttaagtgcttttaattatgtccacttaagtctcaatatcgccagcttccgaagcgcgcaaatcacacagaaccacacacattgccattgcagtggaacaggaaacttggcagttggggagccggaggaactgctcggcgcactctaaataaagcataacaatttatgaaattttaatttttacacttaataacacgccgagttatgggcgcgccaagtgaaacgggccaagcgaattcgccaggaaaatgggaaatggctcagggggactgactttcatatagagacatcaatgtgagacgagcgcgggcaggtggccaaacctccgggagtgggacaaactgcggtgcaacttgtgtggcatcaaccgcagacgttgggcgcaattagagacgctgtatatttttggtgcccgaccgactcgcggattatgccacaagtcggattgtcgtctcacgttcggaaaattcgccaatgccaaactggaacatgcgatttaaatagcttatataaaattacgccgctttgatgaccattaaataacacacgaaactatacagataatagataattattacaattttttccaacacagtgctgaaattgaaaaggcggagaacattatggactttggataatcctctgaatatatacactgcaatacaaactgatttgtcgcacccccacgggaaaatacagttcttgcgcgagttgaaaagtcgatttgattgctgcttcaattcaaaatgttccaatcaagaattttcaattccaattaaagaggccaccgaatggaaaattcgtggcggattattgggtattatgttttgccgtccgttcctcttattcactgctatcgtcctattccgttcccgggtgaacgtttaacaattttgaaagcgcatctctgtattgtctgatcagttctggctgggatcgctggaggtgctggagtccaggtgcaatgccttctccaaggacttataatcgttcgagatctcgacggcgttgttgagatcgttcatcatggtagcgatgagaccctggtgctcctgttgcattttgtcttggatacgcctgttttcctccgcctggcgaagaatcaaggacttgaagcgattcttttgaatttgctcttcgtcctgcacatatcctggtcttttatagaccggcactggagtcctgatgcttttcggcacattcaagtggctggtatcaggcagaggtttctgtttgactgaggaaatctggcccctgctcaccagaatttttcgcttggcagccactttggcgtcataggtgcgtcgggcctggtaggcactctgggttttggtgacactggcactgttggccacatggctggtaatcagtttcgggattcgactgggactcctgattgtcgtaagcttattgggttgctgctgctcgataccttgtacactttgtggctcacattttataggcaaagtaaactgtgacttgggaatctgcatcagatctcttcgccacagttggtgatgaagcttcgaaagatcaggactggtagagctccgatgaagtggttccaggacattctccgttggcttgggtttctccgccttcggtggatccaacttggtcacccaaacactctctgctgtggccaacttcacgggtgtcagcgtgacaacaactctttgcggcggagtcagagaagcatcctccattaccagctgagaagtcatcccaattggcatgctaggcggagcagaaatctgcatggtcatctcggctgtgtgatcatagatcattgtctccgattgctgtaatctctggcggaagcgtcccattatgaccggacaaccaaatccttgttgcgattttgtattggtagatgcatccctccgttcaggatttgtaatctggttcctcttctggaccacctccttggttaaggcgcacaagcgcagtcgcatcatttccagtctcttccagtcagtcatctattagggatatataatacagttcatatgctatctcaaaagataatcaccaaccactggcggcagaataggtttctcattcaggcagtatcccgactcgaactcgccacctccaatattgttcagttcactaagcaacgttagctgctctgtttctccggccatgttcagaaaatttcgtgtagaaatttcgtgtggaaatttcaggtatcaaaaatgatctttatgttcaggaatttatttgttgtgtgatgtgtaggttaaaggaatggaatggaattggaaaggcatgtgagttaaaccaacaacggttgacatttgtagaatgagtgtgtttgctaggagtactagcgtacacaccactgtcggtagactacactggggaaaatactctacacgcacagggaatcgataggtttctgttgtcatacaaatatctagcttgaaatgaaattcttcgatttaaaattctaaatccgctggtgccgttttctccgagtgcataccacatgcactgcccatccgcacttttgcctcccaatccggacgaagagtctgacaaatgcgccgctcgtcgccggagcgtgccacaaaaggtacgggcagtcgagcgtggagctggcaaacaaggagcccaaataaagtccactccattaccggcaggacattcgtcctctcactgtacatacatacgtgtgtgtgggaccgtctggaaatttgtcttgggcgcttgtaggtgtgatttgttttttaaatttcagaccgaagctgcagaagctggccaatttgtctcccccagtggctggttgactttttatttgcaacggagtcacgtagcattttcacttgcatacttgcgacatgcggcaattttccactaaatttgccatgtcaaacatatttcggaccggccggaatatatgcagctccgctccccataaagaattcaaattaatacattaacagctccagataagcgaccttttggggaggaaagtaaacgcttggctcccagcgacaggtaataaacgccgagtcgttccgttcgtgccaaagtctcgaaagttttgctccaaggcaatttgcctcaagtggcaattcgggagcgtgccaagtgcctcggtaacggtaacagcccacggattacgagaacacggcgtgggcacaagtgggttaaggcggggcactctgcggctaaccgcctgcaccacaaaaggtatttatctcattgtgcagattaagagctgctctcaaattaggtgagtgtcgtcacgtgacacaagatgagatctagatggcgatgaggttggaaataaaggaaaggtgggtgggtggttcgatgaagggggttcgggggctggg

SEQ ID NO: 3512 - DNA, 1683 bp, DROSOPHILA
tggtgtgtacgctagtactcctagcaaacacactcattctacaaatgtcaaccgttgttggtttaactcacatgcctttccaattccattccattcctttaacctacacatcacacaacaaataaattcctgaacataaagatcatttttgatacctgaaatttccacacgaaatttctacacgaaattttctgaacatggccggagaaacagagcagctaacgttgcttagtgaactgaacaatattggaggtggcgagttcgagtcgggatactgcctgaatgagaaacctattctgccgccagtgatgactgactggaagagactggaaatgatgcgactgcgcttgtgcgccttaaccaaggaggtggtccagaagaggaaccagattacaaatcctgaacggagggatgcatctaccaatacaaaatcgcaacaaggatttggttgtccggtcataatgggacgcttccgccagagattacagcaatcggagacaatgatctatgatcacacagccgagatgaccatgcagatttctgctccgcctagcatgccaattgggatgacttctcagctggtaatggaggatgcttctctgactccgccgcaaagagttgttgtcacgctgacacccgtgaagttggccacagcagagagtgtttgggtgaccaagttggatccaccgaaggcggagaaacccaagccaacggagaatgtcctggaaccacttcatcggagctctaccagtcctgatctttcgaagcttcatcaccaactgtggcgaagagatctgatgcagattcccaagtcacagtttactttgcctataaaatgtgagccacaaagtgtacaaggtatcgagcagcagcaacccaataagcttacgacaatcaggagtcccagtcgaatcccgaaactgattaccagccatgtggccaacagtgccagtgtcaccaaaacccagagtgcctaccaggcccgacgcacctatgacgccaaagtggctgccaagcgaaaaattctggtgagcaggggccagatttcctcagtcaaacagaaacctctgcctgataccagccacttgaatgtgccgaaaagcatcaggactccagtgccggtctataaaagaccaggatatgtgcaggacgaagagcaaattcaaaagaatcgcttcaagtccttgattcttcgccaggcggaggaaaacaggcgtatccaagacaaaatgcaacaggagcaccagggtctcatcgctaccatgatgaacgatctcaacaacgccgtcgagatctcgaacgattataagtccttggagaaggcattgcacctggactccagcacctccagcgatcccagccagaactgatcagacaatacagagatgcgctttcaaaattgttaaacgttcacccgggaacggaataggacgatagcagtgaataagaggaacggacggcaaaacataatacccaataatccgccacgaattttccattcggtggcctctttaattggaattgaaaattcttgattggaacattttgaattgaagcagcaatcaaatcgacttttcaactcgcgcaagaactgtattttcccgtgggggtgcgacaaatcagtttgtattgcagtgtatatattcagaggattatccaaagtccataatgttctccgccttt

SEQ ID NO: 3513 - protein, 345 aa, DROSOPHILA
MMRLRLCALTKEVVQKRNQITNPERRDASTNTKSQQGFGCPVIMGRFRQRLQQSETMIYDHTAEMTMQISAPPSMPIGMTSQLVMEDASLTPPQRVVVTLTPVKLATAESVWVTKLDPPKAEKPKPTENVLEPLHRSSTSPDLSKLHHQLWRRDLMQIPKSQFTLPIKCEPQSVQGIEQQQPNKLTTIRSPSRIPKLITSHVANSASVTKTQSAYQARRTYDAKVAAKRKILVSRGQISSVKQKPLPDTSHLNVPKSIRTPVPVYKRPGYVQDEEQIQKNRFKSLILRQAEENRRIQDKMQQEHQGLIATMMNDLNNAVEISNDYKSLEKALHLDSSTSSDPSQN

SEQ ID NO: 3514 - DNA, 3236 bp, DROSOPHILA
cctgaatttatgctaaaactatcgcccagattggtagaacctaattcagtccattcaacccaatcgaagttacgactccaatccgttaggttttttagaaaatgtgtcagcaatgttggttggaatggggatacttagcttaggcacttggccaaaaagcctctaagaaattaacaattgccacctttgttggcgaaattcaagcattcagatccgcctggctcttcttctctgcgatgttttgttaacaatttcagttggcttaaataagcgctggaaagtgaaaacccaattcgatactgttgttcatgaaatgagtcacgtactagccgcaatatttatctatctaactaaatcgtttcaactggactcgcatgattgctgttacgttttttttttaaactttgttttcaaagctgcaatcgttgggcattttcgcgttttatgttgaccaattagctgtttcagggtcaagttaatgattcaattagcatttgtcatcattgttattgcttctcctgagcggcggcggtataattgatcccccagatcgtgggaatattcataatgatgtgtgatcacacatcaacacgcccaaccagcttttcataagtagatcattcgaaaggtattgttttcttcaagaaaagagttaagattataaatatgtatttaatatacaatattagcaatctaagttgatccagagttgttccataaatgggttaagtagagctcatctgattctggaaactatctaatccaggatataaattcaatctaatatgtttgatgattaagccaagacccatcagcatacacgttgtccagtggcatgcgtcatacatacataggtggcaagcaaggcgacacgaatctctgggatgcaacagttgcgtccaacttcgcggctcgagttcgctgggattggaagtgggctcggcgggtataaaagcgactgccggcccggtggggaatcattagacaagtgtcgaacggcgcgtgcgcatcatagtcttgaaggagcagttagccaccagaaagcagtgaacaccacaaaccggcagccacaacatgaagtgctttgtaaggactcgccaaaggatctctcgtggattataatttcccaaaaactagaaaatgatttaaaaaacacagttcgttaaagtgaataataagttttgaaagcattgtattccaaatgcttgatgttcattgttaaattataaagtgtatttaaattttagtttaaagttgatacatattttttacattttttttattacatttttgaatatgttttatgttgcttttgagaatttgttaaacaaaatactattgttaaaaagtacttttcactttattgaaatatgttttaagtggtaatcttttgaatatgatacattttggtgacgctttatcctcgcgcagtttatcctgatagcaaccagtctggtgctgagtgcctatgcccaggacgcggcggattctgacctggagcaggtggcatccgcatcggcaccggatgcggtggccgtggaggatcaggtgagcgccgccagcagctatgccccgctgcaggataagaagcaggagaagcgctatgttggtggatacggtggctacggagcgggctacggcgcgggatacggcggctatggcgccggatatggcgcaggatacggcggctatgcctctggcctgggagccggctatggaggagcgtacggcagtggcgtcggcgttggcgtggacagctactacaatccgtacagctcgcgagctctgggtggattaggtgagggtgagcttgaaagaagactctcaatctcttgccgaagactcgtagtataccaacgctgtttctcaatccccagatggtgctgcagtggccggatacggaggctatggatccactctgggcggctatggatccgctttgggtggctatggatccgctcttggtggctatggatcgggacttagtggttatggtggctcctacaactcgaatccatacgccctgtcatactacaacagcaggctgggcgctggagccggcactgggtatccgtactacaacacccgattcggcgctggtggctatccatccagttactatacgagcaactatggcaacagcgtggtgggcggcggcttgggcgctttgggcggagtgccgcccatcggatcgggctataactacggttccggaatctcgggaaccgtctactagacaccgcacggtccaacgttcaagatctaagctagtggaatttattttttttcatcgatatatttttttctaactttatttttattaaaagatgctacaaaaaaatacattatcataatcgtcatttaactagaaagtatatatttatatatgcatgtaatctcattggggcgatggatatgcgccatgcttgtccttgatcacccagaaggagtcgacaatggcgccgttctggtcatcggacacctgctcgaagtgaagatgcgtgccattatgtgccttcaagcgggtgtatccgtaatcctaaagagattatagaattatagtattccgttttgatattaagcaggtcattcaattacattgctatggtaggcattccagatgggcaaatcgttggagaagggctcgcgctcctccttgcagccggcggaacccgtgatgatctggatgggcgccttgggattagtgtatggcgcctcggcactgccattgtacaccttgtagtcgtagattggccacaggcgagtgtagaagtgttcatgcgcaaagatctccacgtcgacgccgtgcttgtagaacagatcctccaggccgaaccacttgagcatgggcagaccctggcgaatgtacgtctccagttggctattgcaatcgtactccttgtcgtcgctgcagtacatcggtcgatgaccgtaggtgatgatccacggacgtttggcccgattctcgggcagattggcctcggccaggtcacgttccagccactcgaattgcttggtcagcaacttgaagccatagctgaggaagtagtagacctccgtggagaaggagacaaagtgcacgggtcccaagttgaagctgtaccacaagctgtccgtttcgccgggcatattgaagcgggcgcgatagttggagaagttgctgtgatgggccaaagtaagttaggtttgaatagttaacacaccggcatcatcaaatacttactacttctcctcgt

SEQ ID NO: 3515 - DNA, 812 bp, DROSOPHILA
gcgtgcgcatcatagtcttgaaggagcagttagccaccagaaagcagtgaacaccacaaaccggcagccacaacatgaagtgcttttttatcctgatagcaaccagtctggtgctgagtgcctatgcccaggacgcggcggattctgacctggagcaggtggcatccgcatcggcaccggatgcggtggccgtggaggatcaggtgagcgccgccagcagctatgccccgctgcaggataagaagcaggagaagcgctatgttggtggatacggtggctacggagcgggctacggcgcgggatacggcggctatggcgccggatatggcgcaggatacggcggctatgcctctggcctgggagccggctatggaggagcgtacggcagtggcgtcggcgttggcgtggacagctactacaatccgtacagctcgcgagctctgggtggattagatggtgctgcagtggccggatacggaggctatggatccactctgggcggctatggatccgctttgggtggctatggatccgctcttggtggctatggatcgggacttagtggttatggtggctcctacaactcgaatccatacgccctgtcatactacaacagcaggctgggcgctggagccggcactgggtatccgtactacaacacccgattcggcgctggtggctatccatccagttactatacgagcaactatggcaacagcgtggtgggcggcggcttgggcgctttgggcggagtgccgcccatcggatcgggctataactacggttccggaatctcgggaaccgtctactag

SEQ ID NO: 3516 - protein, 245 aa, DROSOPHILA
MKCFFILIATSLVLSAYAQDAADSDLEQVASASAPDAVAVEDQVSAASSYAPLQDKKQEKRYVGGYGGYGAGYGAGYGGYGAGYGAGYGGYASGLGAGYGGAYGSGVGVGVDSYYNPYSSRALGGLDGAAVAGYGGYGSTLGGYGSALGGYGSALGGYGSGLSGYGGSYNSNPYALSYYNSRLGAGAGTGYPYYNTRFGAGGYPSSYYTSNYGNSVVGGGLGALGGVPPIGSGYNYGSGISGTVY

SEQ ID NO: 3517 - DNA, 3811 bp, DROSOPHILA
aaatgtttcagaaggtataaagagagcagttgcacctctttgcgaagacatcattgaaacatcaaccactcttccgggggccataggagcagttgaatccgcttatctggacaattcgactgaagctgagaccactcttccgtccgaagctgaagcaactaatccacttgaacttactgagtcatttctacagaacaacacatctatggaaaaaacacccaaagtcgaaaaaattttgccagatgacggaagtgcatctccgattaaaaataacgttgattcgaaggatgttaaaacggtaacagtgcccatttttgaggaacaactagtatccgattccgacgacgatgtgatgttggtagacgactccaatatcgacgtttcatacggcgactctgatattgaaccgattccaggtgagatacgaggcatttaaatggtagatgtatgcttatgagtgcccttgacatcttagtagtagaaaataggcaatctttggatattataagggacctactgcggactgcaactccactcaatagcctgccgtccaggggcgatacggttatatttaaactgctgaagattaagggaaacgccaattctggcacaaccgaatttgtcgccgggaggtgcacttacgttaaccggcgcaccaaaattgtcacagtggaaacaataagtaagcgactatcaatttaaattgtatacccgaaactgatctcgttaaaatttttagcttatccccccgaaatcggtcgcatgttgcgtcaatattatatgagtgggttggacgagtcttctgaggatgtgcgaactttaagtattcatctcaaagatatgcttgaagccaaaatcattgtagccacaattgactgattatcatttttgtgtgtacattcttgagttctatttccagggtttcgtacatttatagcttttaaaatacaaacgattaaacaacatctatatgtacgaattcatgttagttgtctatcctctacttgatgtgctccttgatcttctccagcaagtcgtcggcttcgtcaccggtctttacgcgtagcaacagcgatgtggccttggagtcctctggcgtgggcacgcagaccatcagcacattgttcttgcccatgcgctggcaaggtatacccttgctaagaataaggttgaccaagatgttgcccagattggtgtcggcgcggactaacagttggatcttttcggagtccttgacaggtttcaagtacaacgtgcccacgccacgatcgccaaagtccttgtctttcttaatgaacaccttacaccgcttggagtatatagcgtcatcctccacaacctgtttggagtagaagttatattatctttcccttcgaaaagaaaattcttttatcatcacctgtttaaactcgacttttgggggcgtatcctcttctttttcctcctccgcaggcgctgccgctgcagctggcggatgaatgtttccgagagagaagggcgtggcactgttggtgaaggaaaagccctttgcgccgtctcctgctcctccaggcgcttttccgaaacccgcaaacaacgaggtgcttggcttgtcgtcgttgttacttttcagtccgaaggaaaagccattggtcttcggtgccgagaagttaggctcatcctttttagtggtcgtatcctttgctccaaagctaaaaatgctggacttaggggtatcatcggatttggcttctccagtgggttttgctgtcaaactgaagatactggaggaggacggcactggcgcagtgaacgatgccgtactgccgaaggagaccagtggtgttgcggtcgtggtggttgttccaccactggttatggtgcagttgggtttcttggctaagggcgatacgctggcgcctattggcgcgctgggcttgccaaacgtaaacgtagtagccgcttttggtggcgacgatgcacgggacacctttgcaactggttcttgagaacgagcttgtgccgttttggatttcgtggagttcgttctggcgctctcctcgtcttgcagatcctttagatgctcatcatagttcttaaacactggagtcagtatgcagtagggacttttgcccatttggtcctgcaggaattttatgacggaccgatttaggtcagcaacgctttcacggtactcggaggtctccatggtggatgtgaggctagtgctgctgctgctggttttggcctcgctactctccttcttggcagctgatatgttgccaaatatcgaggtggtcggcttggcgccatcgacggtacttgttgattccttggccggcaaaggagagggggccgtgctgctggtgctggcggtgccgcaaatgctagtgctgacaggccgatcggccgaactggaactggagctgaacccgaacgagaatgcagacttttttggctcgctgctagaggtcgtggctggtgccgtcacattggccaggaaggagaaaggcgaacccgcggctgggctcgcagccggcttgccgaaacctaaaagcaatcggagtgagcaagtccctcaggtctgcatggatttgatagcttaccggaaaagccactgaacacacttttgggctctgcagtcttttcttcggcgccatcctcttcagcggcggacgatccaccggcaatcttgcggcgcgccttcttgataacgcgtgtctttagctcctcttcggtggccgtgcggaatgtgccgcgctcctcgggttcctcctccaggtcccagttttcgtggttcaggttcgaagtggcttgtcgcttgccagccatcttgttctactctgtattaaaactcaaagcaaatgccagtgaaaaagaaaaaaaaaaccgaataaaatccacaccgcgttgctggcggtcgataaatgttatcgctacctcagttgggcgacgtaactgtgagtcagcgaaacaggcctgctgctttcgatagcatatcgatagggtaacaacagcgagacgccagcagcacaaaatcgcaataaaacaaaagtattaaatcacgcctaaagttaggacgaccatgtccagtgccgcgagtcccagtcacagtagcagtaccagtccgagtgtgtttctgatcctaccatgattgccgcgattccgggtactgcgcacttccctcgcccagagacaaagttaattgtgcatctcgagtagtacgagcagtaccaaaaacgcagaaaaccgaaaagcgaaaagcaaaaagccaaattgcatgaggatgatgagaacgccagtgtgtggatatatggatatagtgccagggaaagtgcgacgagcaacaacacaaatcgggagtgaacaaagacgcagagacacgtacagtgcttaaaggcgttatcctggtagtttctcagctatttgccgtcccgctcccactcccattttgctcccgttccacggccttgggcgtgagctggtgtgcgtgcgactcgcgtgtgtgtgtgtgtgagtgagtgtgcgtgtgagtaaaagatacgctgtatataccaggacatcgggatatcctgagcagcaaaatgccgccatccctgattgccgtgtccgagtttgtggaggagacgcgctccgattacagctcgcccaccacctccaccttcgcctcgaggatgcccgactgccgccacacgattggcgtcttggaagaggtaagtgtgttgaccaggcaattcctaagccatgttccttatgtagaggcaggtagtccaaaaagccaacaatctgtgtacctacagcccaagcaatccctagtttaaggtgggctatc

SEQ ID NO: 3518 - DNA, 1695 bp, DROSOPHILA
atggctggcaagcgacaagccacttcgaacctgaaccacgaaaactgggacctggaggaggaacccgaggagcgcggcacattccgcacggccaccgaagaggagctaaagacacgcgttatcaagaaggcgcgccgcaagattgccggtggatcgtccgccgctgaagaggatggcgccgaagaaaagactgcagagcccaaaagtgtgttcagtggcttttccggtttcggcaagccggctgcgagcccagccgcgggttcgcctttctccttcctggccaatgtgacggcaccagccacgacctctagcagcgagccaaaaaagtctgcattctcgttcgggttcagctccagttccagttcggccgatcggcctgtcagcactagcatttgcggcaccgccagcaccagcagcacggccccctctcctttgccggccaaggaatcaacaagtaccgtcgatggcgccaagccgaccacctcgatatttggcaacatatcagctgccaagaaggagagtagcgaggccaaaaccagcagcagcagcactagcctcacatccaccatggagacctccgagtaccgtgaaagcgttgctgacctaaatcggtccgtcataaaattcctgcaggaccaaatgggcaaaagtccctactgcatactgactccagtgtttaagaactatgatgagcatctaaaggatctgcaagacgaggagagcgccagaacgaactccacgaaatccaaaacggcacaagctcgttctcaagaaccagttgcaaaggtgtcccgtgcatcgtcgccaccaaaagcggctactacgtttacgtttggcaagcccagcgcgccaataggcgccagcgtatcgcccttagccaagaaacccaactgcaccataaccagtggtggaacaaccaccacgaccgcaacaccactggtctccttcggcagtacggcatcgttcactgcgccagtgccgtcctcctccagtatcttcagtttgacagcaaaacccactggagaagccaaatccgatgatacccctaagtccagcatttttagctttggagcaaaggatacgaccactaaaaaggatgagcctaacttctcggcaccgaagaccaatggcttttccttcggactgaaaagtaacaacgacgacaagccaagcacctcgttgtttgcgggtttcggaaaagcgcctggaggagcaggagacggcgcaaagggcttttccttcaccaacagtgccacgcccttctctctcggaaacattcatccgccagctgcagcggcagcgcctgcggaggaggaaaaagaagaggatacgcccccaaaagtcgagtttaaacaggttgtggaggatgacgctatatactccaagcggtgtaaggtgttcattaagaaagacaaggactttggcgatcgtggcgtgggcacgttgtacttgaaacctgtcaaggactccgaaaagatccaactgttagtccgcgccgacaccaatctgggcaacatcttggtcaaccttattcttagcaagggtataccttgccagcgcatgggcaagaacaatgtgctgatggtctgcgtgcccacgccagaggactccaaggccacatcgctgttgctacgcgtaaagaccggtgacgaagccgacgacttgctggagaagatcaaggagcacatcaagtag

SEQ ID NO: 3519 - protein, 564 aa, DROSOPHILA
MAGKRQATSNLNHENWDLEEEPEERGTFRTATEEELKTRVIKKARRKIAGGSSAAEEDGAEEKTAEPKSVFSGFSGFGKPAASPAAGSPFSFLANVTAPATTSSSEPKKSAFSFGFSSSSSSADRPVSTSICGTASTSSTAPSPLPAKESTSTVDGAKPTTSIFGNISAAKKESSEAKTSSSSTSLTSTMETSEYRESVADLNRSVIKFLQDQMGKSPYCILTPVFKNYDEHLKDLQDEESARTNSTKSKTAQARSQEPVAKVSRASSPPKAATTFTFGKPSAPIGASVSPLAKKPNCTITSGGTTTTTATPLVSFGSTASFTAPVPSSSSIFSLTAKPTGEAKSDDTPKSSIFSFGAKDTTTKKDEPNFSAPKTNGFSFGLKSNNDDKPSTSLFAGFGKAPGGAGDGAKGFSFTNSATPFSLGNIHPPAAAAAPAEEEKEEDTPPKVEFKQVVEDDAIYSKRCKVFIKKDKDFGDRGVGTLYLKPVKDSEKIQLLVRADTNLGNILVNLILSKGIPCQRMGKNNVLMVCVPTPEDSKATSLLLRVKTGDEADDLLEKIKEHIK

SEQ ID NO: 3520 - DNA, 3165 bp, DROSOPHILA
ggtagaggtgctaacgccacttagtaaacggccagatcgcagcctgtatccctatcctcacgccttcagtacgtttaatcgcaggacttgctatatgtgcggcattcgcagctatagcttcatcgtgaaccagtcccggcgacagctgcacgatccctcctacctgtgccgcagatgttttctcagcttcttttacgtggatggtgtcaagctgggccagttcaaagcctatcgcatgtatgaccatgtagagctggagggcgaagaggaggacattaaacagcaaaatctcccctcctgaatatacatatacatttgtgtgattttttctttatttgcgagctcctttgactgcaagatcgctcaaggagttgattgatattttgttcttgtaaaatattcatagatagatttaaataaaatacatacacgttgcaacaagagtaattggcattgaacgtattcgattgccgtaaagctgcctaaattccatgcaatctagattagcaaaaagttagtgtccaagttaggaatacaaaaatgcaaacaacgtaaatagtacgatacatctggcttagaacttacgttaatacatatatgcagtagttcaatgtttaaaaatttgcttaaggatttgcacactgtggtgcagagtatagacttgaccaggacccatataaaacaaaccaatagactaaatatggcaaataacataatacattatcctagacaagatactagtactaaccgtacttagcagtacaatacagtaaaattctgtgcactgggattccggcgtgcacgtgaagagagactgtgcgcttagttactggggcgtagaaatgcatcaacaacatattgccaatccgaccaacaaatatcattacgaacaactgcaggctgggattccattcgcccggacctctttggtgtacgcgcttgcgtttacttcagtgttaaagctttgaccagcggcttctcgacggcgggcggcggttgcctaactctggaagaccagctcccgctccaccgacaagtactccagcatctgcgccggcactggcaactgggccagctgttcgcgagacatctggcgctgcagaacacggcggcataagtcctgcagcttgggcatgttggagtaccggctcaacgggtacttgaggatcactggaaacggtggctgcatctcgttgggaaccttcacaaagcacacaaagttgtcgttggtgcagcggtgcaagatatcttcgatcatctcgacaatggactcgtacttaagttcctcgaagtgccaaaaattgtcgcgatattccagtcgataatgcagggttacgttcacaatccgaaagctgagcgtgaattgggatccgctggtttccgagtcgcggactagaaacgacccagtcggcttgtcactcaactgccgctgcgaatcgcgcctggagatctcaccccagtaccacacttggctaaaaacaaacaaagggcatgagtcatcgatcgttgatggacggagaaacacggcgcttacttgagcatctcggagcaggccttgtacatgatctggttgggcgagtgggcgtcctcgcgctcaagccatttcttccggataaagcgcaagtagtcgtgtgtgaatggtagcgtgggttccggacagatggccggcgtaaggaactcgtaggtggcatcagtagttccgccgtcgtcgcagtcgcccatggagtgccagtttcgcagggagctgagcccttggcccaccttccttcgtagtctggcaaacacgtttcgcttgtccttgtcccgccttctgcgcagagttcctgtgcccgtgcccccattgctgcagctggccatggaagagtccgctgcctcaaggacgcacacttcgttgttgttgttctgcgatccactggtggagacggcggcggatgcagtcacggccagcgccgagtcggacttcttgcgcctggtcagcgagtggaaccagcccttcttttccttctccctgtccctcggggagtcaccaccgccagtgagcgcctggctccgctggctgctctggttttgactctggtcgccgtggctcattttggagtggaatcggatcggatcggagcttcctcgtggtggaattacatcattgatctaattcggagccgtgatcaatgcctaactttattgataagaactatttgttttcgttgtacacaagaactgtcttatcgctatcggtcgtgcgtagctggtaaatgctatcgataacataggggagtttaaaaaattaaattctctgcaaggcaaagctttaatttatccattattacagccctctgctttaggcatttttaaaactaacttaaattatttcaagtaaaatctcgttgacttaaatatattgttttccatattgcaattttttaatattaatgtagtttgtcattcaaataagctttatttttataaatcgctacaaaaaatatgacattaatttgacagaaatttaaacacatcgatttaacgataacgaaatcgaacatacttccatctctagcacatttaaaatcattttaatcataagaaaactaagtcaaaaatgcaacactccagcatgaaggtggatctatcaaactttttcaaggacgaacgacgaaattcgttggttttcatcgatgcagcatggaacaacatcaaggacctccaggaccacatacaaaacctcttcagcttggcaagatttttaagaatctctaactgctaattctaaataaattgcattcaaacagaaggacattagtctgctcacctcagatggatgctatctgcccccgagggagtctatcaaagtgttgaactctgccgaaggactcaagtaggtgagcttatttctttttacgatctacttgagcatattcatcccttgcagagcctttcggtttgccagccacgatagtgatacctttgtgagccctgctcctgtaaaatccagtaaaaagcgcaagaatcgatccgtcgaggaacaggttcacctaaccgcctccactcccctccgaccttcaaagcgctccaagaaccagaacaactcagaatggataaatattgcagaaaacccatctcgtgtgagaaagaaggagttgctagatatggctcctggaccttctgtac

SEQ ID NO: 3521 - DNA, 1103 bp, DROSOPHILA
tcacggctccgaattagatcaatgatgtaattccaccacgaggaagctccgatccgatccgattccactccaaaatgagccacggcgaccagagtcaaaaccagagcagccagcggagccaggcgctcactggcggtggtgactccccgagggacagggagaaggaaaagaagggctggttccactcgctgaccaggcgcaagaagtccgactcggcgctggccgtgactgcatccgccgccgtctccaccagtggatcgcagaacaacaacaacgaagtgtgcgtccttgaggcagcggactcttccatggccagctgcagcaatgggggcacgggcacaggaactctgcgcagaaggcgggacaaggacaagcgaaacgtgtttgccagactacgaaggaaggtgggccaagggctcagctccctgcgaaactggcactccatgggcgactgcgacgacggcggaactactgatgccacctacgagttccttacgccggccatctgtccggaacccacgctaccattcacacacgactacttgcgctttatccggaagaaatggcttgagcgcgaggacgcccactcgcccaaccagatcatgtacaaggcctgctccgagatgctcaaccaagtgtggtactggggtgagatctccaggcgcgattcgcagcggcagttgagtgacaagccgactgggtcgtttctagtccgcgactcggaaaccagcggatcccaattcacgctcagctttcggattgtgaacgtaaccctgcattatcgactggaatatcgcgacaatttttggcacttcgaggaacttaagtacgagtccattgtcgagatgatcgaagatatcttgcaccgctgcaccaacgacaactttgtgtgctttgtgaaggttcccaacgagatgcagccaccgtttccagtgatcctcaagtacccgttgagccggtactccaacatgcccaagctgcaggacttatgccgccgtgttctgcagcgccagatgtctcgcgaacagctggcccagttgccagtgccggcgcagatgctggagtacttgtcggtggagcgggagctggtcttccagagttag

SEQ ID NO: 3522 - protein, 342 aa, DROSOPHILA
MSHGDQSQNQSSQRSQALTGGGDSPRDREKEKKGWFHSLTRRKKSDSALAVTASAAVSTSGSQNNNNEVCVLEAADSSMASCSNGGTGTGTLRRRRDKDKRNVFARLRRKVGQGLSSLRNWHSMGDCDDGGTTDATYEFLTPAICPEPTLPFTHDYLRFIRKKWLEREDAHSPNQIMYKACSEMLNQVWYWGEISRRDSQRQLSDKPTGSFLVRDSETSGSQFTLSFRIVNVTLHYRLEYRDNFWHFEELKYESIVEMIEDILHRCTNDNFVCFVKVPNEMQPPFPVILKYPLSRYSNMPKLQDLCRRVLQRQMSREQLAQLPVPAQMLEYLSVERELVFQS

SEQ ID NO: 3523 - DNA, 7091 bp, DROSOPHILA
tcgcaattgaagttcgagtagttttatgtttcgtttgatgttctggcgcagctcgtccatatccctgaggcgctgcactcgctgatcgcgcagctgggctaggtgctcccgaaaggggtccatctcctcgggcagcggcaggggatcagctagaagtgaaagcggctgttcgcccagctcatcgcagagctgctgctgttgatggagtagctccctgatctctgcccgtcggctgaccagctctttgcgcagttgttcgatgtatttctccagcttaatgtaccagatctccatcggcacatcgtccggccgctcgccaatgtccaccgctttgtgaagcagccgccttagcccgctggcctcgttgcgcaaaacggctatgtcgttgagtataccctgctccttgtcgctcgtctccttgcggagatccgtgtagaatgtgtgtacgtgatccttaagacgggcgagacaatcctcgcaggcttgcggctcaaacattcgcgaccacattgcgtgcagctcgtcgaagtgctcggccgtcagcgctagtatccttgctttgtgttcgctagatagcattgtgtttattttgtttgtttctgtgtcgtgttctcgtgtgtggttggatgtaagtaaacatgaaattcaattcgaatcagaacgtatggacgcaatgttgctatgtttaaatcggtaaatttcaaactgtacatcaaactcgtgcgctctgcaacactggccaattggtgctgttaggcgacagcattgccacatcggtaagcattggagatcaaatatatatatagtgagtgagtatatttctgctactcactttctattgcgtataatgcgttataagaaaataattgttttaccgtgtctaatatggtaaatgttagtaccaatggtatggtaagtagtataaattgatatcgatatataccgatagcaacgcatacctatcgctgtacttgccaccactaataccaattgcatccctcaaaaaaaatactgcgtgtgaaaaagacccgaacttttcgcatacctttcgggtgcctacttattcagtggaaaagcgcgcgttactgctcagatcgattcgatcgcaaaacggctgttcaaaatgttataaaacaccgcgccgcgtccgtagacagtccctgttctactttaaaacacacacccacacacgcgcgccgccgagtgtcaacagctgccctggcgaaaaaatgtcggacattaagtaagtggtgggtgcgaaaaagtgggtgaccctgtgatgaatggtggccacctaagattgggcaacaatcctggccagcgttcgattggtggcactgagaaaatcgcatgcaaaaagcattgtcggggcgggggggttggcgatgcatgtgtataacattttcaagctgcgtaggtgtgtacgtatgtgtgcgaatgtgtgtgaatgcccccccggctgtgcttgtgtatgtgtttgagtgcgtgtggttattatatttttttttttcaatggaacctcgaaggatagaaaagtctcaccttggttttctccttaacccattaatgatttcttaactgcatctcatccgcagcgatgacctgctcaactacgagctgggcgatgacatcgatgaccaagctctgctcggcgccgatgaggatgagttgctactctcggacgaaggtgagttctatatgcactgcaatagttgaatcgttttctgatggatatccttcttccatgcacagagctcgaaaaggatgtcaccagcgaggtgaagcagcagatgcgcgccgaggccgaggagtgggcccaggagcagattagacagcacgagcgcaagcacaaggagcaattgcaggcagatgcgactgcagcgactgaagtcactgttgcagccacggccaccgcagaggtagcaccaactttaagggcgcaaccagagctagcttcatctcctgctccggatcctgttcctgcgaaacctctagtcgctcaggtggagaaacatgttgacacagcccacgcggctgtggcagctgagccagcgaaggaactggtgtcagccagtcgctcggaatccccacaacagcaagctaaggaggaggcgcctccagctgattgcgccgaaaaggaggcgactcagaataatggcaacagcgaggaacaagctgagaacgctggcagtcagagtgaggctgaacgaggactgggcttgtgctcgctactggcctcatcccaagagagcctgcccagcgccagctcagcctctgtgatttcagatccgcgagaggacgacgaagagcgcgaggagcgcaccaactacaagacggccagcgagcgatctgacaacaatctgaggcagcagcaagagcacgcacacatgtcgccctaccagcaccagcagcggcgactccacggccatggaggtgggtgcaacgggaggggtagtcttccttgtcaaatccttacctaatgagtgtattaattgttaattgcagataaaccccgcgtgggcggaggtggacgcttcatgcatggccagcagcagcagcagcagcagcaacagagccagatgggcaagccgccgcgtggaattggaacgcgccaccatctgctacgcaatccgtcgccaagtttcggcatacagcagcagcgcatgggcatggccgggatgcaaccgccgccacagcgatatggcatgccgggtaatgctccaccaccgcagcacctggctctgatgagcacgccagtgggtgctgctcccaccgccgcctgccttctcccactaaccgttcccgtaaccccgctcaccctgtccataccgcaagcccatcccagccatcaagttcatcaacaacaacagcaaacactgagcaatccgacattcattccaattccaggccagtacccggcaactcagccacccaaccagtcaccacaacaagcaccgaccaacacacaacagccacacagcgctcccgcctctcccctccacactcccacgcattcgcacatgatgcaccacagtcacaatccgaacggaggcgtgctgcaccacctgctgccgcatccgcacgagcaggtgcgtgtgggtctgctgcaaccaccgccgctggcatatgcgcccaatccgggtggctatcgcaatggagcacttctgggtccgggaccgggacctggtttgcatcagcaacaccagtcgccgcaccagcaacagtcgggcatgcgtccgccgctgtatcggaatgccccgccatcgtacggctacgaccagggacatccaccccagcatccgcagcagttcatgcggcctcacaacggctggcgaccgcagggggacaatgcgcgcatgcagcgaccaccactgcaaacgctgccaccgcacatgatgcccggcgcaccgccgaactatgccaatggcatgggaatgcgaggaccgccgccccagcaacagcaatcgcagcagccgccacagcagcagccagcaccgcagcaggcgggcaatcccctacagcaggccgtcaatcctggccagccccctcaacagccgaatggaccgccgcagcagcagggctcatcatcggtgccccgggtcagcaaggtgctcatcaatccgaatttcaagggcggcgtcgaagcggctaccaacaagttcatcaaggagacacactttatgcccgccattaacagcgaggccgagttgctgcgccagcaggtggagttcatcaacaagaatcggcagtacattgagaagcgacgcatggaacgctcgccaccgtcgtcgggctcctccaccggagccgcctcgtccggccaggcaggcgaacggaggcgaacacgtagccgcagtcgctctcgtggtcgcagttactctcccgttaagcgcgtggaaagagaacgcgagcgggagcgggagcgcgagagggatcgtgaaagggatcgggagcgagatcgtgaacgatatggcgccaatcgggcggctggaaaccgtggattccgacgggcatcgagtcgggatcgagacgagaatcgtggcgcagcaagcaccgccagtgctcaaggagcgggcggatcagcatccagcggagctgcgccccccaagcgacgaaggagtggctcggccggaggaggcactgcccggaatccattctctggcgagccgcgcggccgaccctccgaaacaggcagtcgcagtatggtaagtggaatcagtgatgcaatgtcagctctggctctgaattaatatcacattttgaatgcagcccagcgacgaggacgaggagacccgcaactatcgccttgagattgagaagcagaagcaactgcgcgagaaaatcatgcgagacaaggagctgaagcgtcggcgcgcagccgaggagaagctacacgaggtaagtccttgttctcttacttattttattagcttataaatgtgcaggttgtaccatagtattttgatgcccttgctggttggtttagaatatgagcagaatatacataagtagttttggcaaaaattcgatatgtttgagaggagttttaataagaacttggcccaaaaagatcacagaacttaaaaaattactgatttctacagctaataaacaaggtttagtgtttaagtaactttaatccagattttcagaaatccatttttgacatatttttttaagtttaattttttgcgaaaactggcaaaaaattaaagtttctatgttcgaatgcagatcgataggaaattttatttcaaatttaacgaggtgtaaaattcaaattttgaacaattatttccaatgttacagcaaaaaaattgattattttgtattaaaaattgtaggtaaaaactattaaaattacgtttgttcagcgttttttttaaccatatttagcccaaaaagatcgcaaatctaaatatatattatgaacagctaataaaaataaaataaatatataaattttataaagatttttataaagcatgtgtaggtaatcttgtaaaatatatagtgtatgcaagggcatttgatccttcggccgccgaagctagccttacaataatgtagcttactgtagcgatccgaaagcaagagaaatccacaaacgaactaaactttctaggagaaacgcgccgagcagcacaacacttcgccagcccgcgacgaccaggaggtggccgccggacaaggatctgcagcgccaacacctgcagcgtcaaagcatcggccaaccgcatcagccggcgagcgcaaggtgatctcgctgaagcgtcgcgacgaccaggatgcgagcagcgtacgcagcaggcaggcacagggatcgcagtccaatgctcaggcaggccaaggtcagcagcagcagcaggcggcgcgcaagcaactaacggcggcgaagatagcgccagaggcaaagcgcagtataaccgatcacctggcgccatcctctaagcagcatcatcatcatcatcagcagcatcatcagactgcagcggcgccggcgagaacggtggtattgggatcgggagctgtggccggcggcacaccgccgaagccgcgcgataagctgcgcctgggcacgccaagcgacgatgaagtggagctggactatgatgacgatgacctgctgctggacgaggaggatcgtttgttggccacgccatcgccgccgccgcagaaggcgagcagcaaaagatcggccacgccggagcccttggtggtcaagcggaaccacaaggcgatgcgtggcggcagctcgacatcagcgcccagctttagctccaaccagcggcgagtggtgctcaagccgaccagcaatggcagcagcagcagcggaggagatcagcagcagttgtcgcacagcggcaggcagcgggatcggaggcgcggtggagaggatagcgcactgcagcggaaaggtggagtaggaagcgttggcggcagcagcagctcgggatctggcggagggatcttcgataggctggagaagcgtgtggccgtctcaggaggagggagcagcggtggaggcggcgggagcagccacaagcagcgatccaaggcgcccgcccgcatcgtactcaagcacgattgataagaatatttagtttaagaatatatagttttctataactattatcgattatagatgtacgacgatgatggggagtagtgcagtaagcagtactttagctttaaggtaaaaagttataaatagttgagctttctttataaatagcggattatacatatatctagatgtcatgtaattggtgggtgtgcgtgagggtctctaccccgtgctccatgcggtatgcaaattcatttagctttaagtgtacaaatcttatcaatgactaaaacgtgcttcgttttcttaatcgctatttgtatttaaacgtaggataaagtggaatgcttaaagcttgacctggacaacaaaacaattaccgtatataactttagcaacacaaactaggacccaaatgtgcatactatgtgcatgctcatagcccttagcctatgtaatcaagtgaaaaatatttacacctctacatacatttatatatatatacataaagtgtatatatttatttataaatacttcaatttagttttaagcacaaaagctgagcgtctattttttatgatgacaattctacaaagattttattgaaagaaagagaagttaagaagtgcaaatgcttcttaggaatttactttaaatttacctttagttatttgaattattttatacattgtgccccgttgattgtaaatgaaatttattgtctgtcctgttgtgttctttgtaactactataaaccacatacgaaactatgttagcttgtgaactagtttaactaataaacttgaaatattgcagcatgtaacgtacttgtacacacaaagcaataccttaatggcctggaaaacgcagacacatagaatgctaccgataaactggtaatgcaaaatgatcaaaccataaattacaatggcatagtacataggataccacataccacttaccatataacacttatcgctcacttaaaaaactggccagttaaagagtaatcagcggaatgaag

SEQ ID NO: 3524 - DNA, 3616 bp, DROSOPHILA
caaaaaaaatactgcgtgtgaaaaagacccgaacttttcgcatacctttcgggtgcctacttattcagtggaaaagcgcgcgttactgctcagatcgattcgatcgcaaaacggctgttcaaaatgttataaaacaccgcgccgcgtccgtagacagtccctgttctactttaaaacacacacccacacacgcgcgccgccgagtgtcaacagctgccctggcgaaaaaatgtcggacattaacgatgacctgctcaactacgagctgggcgatgacatcgatgaccaagctctgctcggcgccgatgaggatgagttgctactctcggacgaagagctcgaaaaggatgtcaccagcgaggtgaagcagcagatgcgcgccgaggccgaggagtgggcccaggagcagattagacagcacgagcgcaagcacaaggagcaattgcaggcagatgcgactgcagcgactgaagtcactgttgcagccacggccaccgcagaggtagcaccaactttaagggcgcaaccagagctagcttcatctcctgctccggatcctgttcctgcgaaacctctagtcgctcaggtggagaaacatgttgacacagcccacgcggctgtggcagctgagccagcgaaggaactggtgtcagccagtcgctcggaatccccacaacagcaagctaaggaggaggcgcctccagctgattgcgccgaaaaggaggcgactcagaataatggcaacagcgaggaacaagctgagaacgctggcagtcagagtgaggctgaacgaggactgggcttgtgctcgctactggcctcatcccaagagagcctgcccagcgccagctcagcctctgtgatttcagatccgcgagaggacgacgaagagcgcgaggagcgcaccaactacaagacggccagcgagcgatctgacaacaatctgaggcagcagcaagagcacgcacacatgtcgccctaccagcaccagcagcggcgactccacggccatggagataaaccccgcgtgggcggaggtggacgcttcatgcatggccagcagcagcagcagcagcagcaacagagccagatgggcaagccgccgcgtggaattggaacgcgccaccatctgctacgcaatccgtcgccaagtttcggcatacagcagcagcgcatgggcatggccgggatgcaaccgccgccacagcgatatggcatgccgggccagtacccggcaactcagccacccaaccagtcaccacaacaagcaccgaccaacacacaacagccacacagcgctcccgcctctcccctccacactcccacgcattcgcacatgatgcaccacagtcacaatccgaacggaggcgtgctgcaccacctgctgccgcatccgcacgagcaggtgcgtgtgggtctgctgcaaccaccgccgctggcatatgcgcccaatccgggtggctatcgcaatggagcacttctgggtccgggaccgggacctggtttgcatcagcaacaccagtcgccgcaccagcaacagtcgggcatgcgtccgccgctgtatcggaatgccccgccatcgtacggctacgaccagggacatccaccccagcatccgcagcagttcatgcggcctcacaacggctggcgaccgcagggggacaatgcgcgcatgcagcgaccaccactgcaaacgctgccaccgcacatgatgcccggcgcaccgccgaactatgccaatggcatgggaatgcgaggaccgccgccccagcaacagcaatcgcagcagccgccacagcagcagccagcaccgcagcaggcgggcaatcccctacagcaggccgtcaatcctggccagccccctcaacagccgaatggaccgccgcagcagcagggctcatcatcggtgccccgggtcagcaaggtgctcatcaatccgaatttcaagggcggcgtcgaagcggctaccaacaagttcatcaaggagacacactttatgcccgccattaacagcgaggccgagttgctgcgccagcaggtggagttcatcaacaagaatcggcagtacattgagaagcgacgcatggaacgctcgccaccgtcgtcgggctcctccaccggagccgcctcgtccggccaggcaggcgaacggaggcgaacacgtagccgcagtcgctctcgtggtcgcagttactctcccgttaagcgcgtggaaagagaacgcgagcgggagcgggagcgcgagagggatcgtgaaagggatcgggagcgagatcgtgaacgatatggcgccaatcgggcggctggaaaccgtggattccgacgggcatcgagtcgggatcgagacgagaatcgtggcgcagcaagcaccgccagtgctcaaggagcgggcggatcagcatccagcggagctgcgccccccaagcgacgaaggagtggctcggccggaggaggcactgcccggaatccattctctggcgagccgcgcggccgaccctccgaaacaggcagtcgcagtatgcccagcgacgaggacgaggagacccgcaactatcgccttgagattgagaagcagaagcaactgcgcgagaaaatcatgcgagacaaggagctgaagcgtcggcgcgcagccgaggagaagctacacgaggagaaacgcgccgagcagcacaacacttcgccagcccgcgacgaccaggaggtggccgccggacaaggatctgcagcgccaacacctgcagcgtcaaagcatcggccaaccgcatcagccggcgagcgcaaggtgatctcgctgaagcgtcgcgacgaccaggatgcgagcagcgtacgcagcaggcaggcacagggatcgcagtccaatgctcaggcaggccaaggtcagcagcagcagcaggcggcgcgcaagcaactaacggcggcgaagatagcgccagaggcaaagcgcagtataaccgatcacctggcgccatcctctaagcagcatcatcatcatcatcagcagcatcatcagactgcagcggcgccggcgagaacggtggtattgggatcgggagctgtggccggcggcacaccgccgaagccgcgcgataagctgcgcctgggcacgccaagcgacgatgaagtggagctggactatgatgacgatgacctgctgctggacgaggaggatcgtttgttggccacgccatcgccgccgccgcagaaggcgagcagcaaaagatcggccacgccggagcccttggtggtcaagcggaaccacaaggcgatgcgtggcggcagctcgacatcagcgcccagctttagctccaaccagcggcgagtggtgctcaagccgaccagcaatggcagcagcagcagcggaggagatcagcagcagttgtcgcacagcggcaggcagcgggatcggaggcgcggtggagaggatagcgcactgcagcggaaaggtggagtaggaagcgttggcggcagcagcagctcgggatctggcggagggatcttcgataggctggagaagcgtgtggccgtctcaggaggagggagcagcggtggaggcggcgggagcagccacaagcagcgatccaaggcgcccgcccgcatcgtactcaagcacgattga

SEQ ID NO: 3525 - protein, 1128 aa, DROSOPHILA
MSDINDDLLNYELGDDIDDQALLGADEDELLLSDEELEKDVTSEVKQQMRAEAEEWAQEQIRQHERKHKEQLQADATAATEVTVAATATAEVAPTLRAQPELASSPAPDPVPAKPLVAQVEKHVDTAHAAVAAEPAKELVSASRSESPQQQAKEEAPPADCAEKEATQNNGNSEEQAENAGSQSEAERGLGLCSLLASSQESLPSASSASVISDPREDDEEREERTNYKTASERSDNNLRQQQEHAHMSPYQHQQRRLHGHGDKPRVGGGGRFMHGQQQQQQQQQSQMGKPPRGIGTRHHLLRNPSPSFGIQQQRMGMAGMQPPPQRYGMPGQYPATQPPNQSPQQAPTNTQQPHSAPASPLHTPTHSHMMHHSHNPNGGVLHHLLPHPHEQVRVGLLQPPPLAYAPNPGGYRNGALLGPGPGPGLHQQHQSPHQQQSGMRPPLYRNAPPSYGYDQGHPPQHPQQFMRPHNGWRPQGDNARMQRPPLQTLPPHMMPGAPPNYANGMGMRGPPPQQQQSQQPPQQQPAPQQAGNPLQQAVNPGQPPQQPNGPPQQQGSSSVPRVSKVLINPNFKGGVEAATNKFIKETHFMPAINSEAELLRQQVEFINKNRQYIEKRRMERSPPSSGSSTGAASSGQAGERRRTRSRSRSRGRSYSPVKRVERERERERERERDRERDRERDRERYGANRAAGNRGFRRASSRDRDENRGAASTASAQGAGGSASSGAAPPKRRRSGSAGGGTARNPFSGEPRGRPSETGSRSMPSDEDEETRNYRLEIEKQKQLREKIMRDKELKRRRAAEEKLHEEKRAEQHNTSPARDDQEVAAGQGSAAPTPAASKHRPTASAGERKVISLKRRDDQDASSVRSRQAQGSQSNAQAGQGQQQQQAARKQLTAAKIAPEAKRSITDHLAPSSKQHHHHHQQHHQTAAAPARTVVLGSGAVAGGTPPKPRDKLRLGTPSDDEVELDYDDDDLLLDEEDRLLATPSPPPQKASSKRSATPEPLVVKRNHKAMRGGSSTSAPSFSSNQRRVVLKPTSNGSSSSGGDQQQLSHSGRQRDRRRGGEDSALQRKGGVGSVGGSSSSGSGGGIFDRLEKRVAVSGGGSSGGGGGSSHKQRSKAPARIVLKHD

SEQ ID NO: 3526 - DNA, 3118 bp, DROSOPHILA
cataacttctgtaatgaagctgtagttctacgtattttggaaagaccctatggcttagccggtctcgagcaacagcatagatatattagctttatacaaaatcatttaaatgcttaattttgttcacttaatttttaaaatttatttttttttttatttattttgctttatactaaaaaaaaaagtcaaaaatagtaaaataaaacaaaattaagacattttacaaaatgatttttttttataattcttggctcgtatcgaataatttcaggataatgagacgttctttgcttacaaaaaaattggaatggaagattaaaaataataaaatgcaaatatgaatttacccaaaacatttattcactgcgtttatatttttcttatatatttttaccgtctatgatgaaaattagtcgtgagaagtgaaccaacgccggctgcatttgtggcgatggtcaataaacgtgaccaaaatacatattgtttccgcttctattacgagtgacagaaatggtaacaattaaaaaactaacaaaacatagaattgttttaatgaaatttaatttttatcaagattaggcgtcaaatataataattaaaccccatattagaaattaactaaaactataatatagaaataatagctagagcaaaaaacagcttagaacggctgatgctcttctattttttgttatgtattacagttacaaatttgttggtcacgacatttactctttactgttttctgtttatattttattaaactacaagcgtaactgttcctttaaggtatattttacaaggatttcgtagtttgtacttcccataatacaagttgtagatatatcctttggctcactaaaaagtaatcgtgtacacagtgctccaaaaaattttcggaacgcagcacaatgagaaagcgatataacacggacatattactgcatacaggtctcaaattataaaatgacactcgtggcctttaccaacactggtttccttttttccacatacgtcgtcaacgtgattcgaccttttccggtttattagttgaacatggcagtcggcaaaaataaaggtctttccaagggtggtaagaagggcggtaagaagaaggtggtggacccgttttctcgcaaggactggtacgatgtcaaagctccgaatatgtttcaaacccgtcaaatcggtaaaacacttgtaaaccgcacccagggtcaaagaatagcatcggattatttgaagggtcgcgttttcgaagtgtctttagcagacttgcaaaaggatattgatccagaacgttcttttcgcaagttccgtcttattgcagaagatgttcaagaccgtaatgtgctctgtaactttcacggaatggacttgactacggacaagtacaggttagtaaacgtctataatgcacaagtctcgactttatatttgtaaatgtgcacttgcatgtataaatgtaaatgcttactaacatttcaatattgtttaggtcgatggttaaaaagtggcaaacactaattgaagctattgtcgaagcaaagactgtagatgggtacctcttgcgagtgttttgtatcggatttactgccaaggatcagcagtctcagcgcaaaacatgttatgctcagcaatcgcaagtccgaaagattcgtgctcgcatgaccgacattattactaatgaagttagtggtgccgatctaaagcagcttgttaacaagctggccttggactcgattgcgaaagatatcgaaaaaagctgtcagcgcatatatccattacatgatgtttacattcgtaaagtaaaggtattgaagaaaccgcgcttcgatgtctcaaagcttctggaattgcatggcgatggcggtggcaaatccgtggaagccgttgtttcatccgagggagccgtaatcgaccgccctgaaggttatgagcccccagtacaggaagctgtttaaattaaatatgaaatgcatatttttttatgtattgcattcaaacataaaatacatttctctacaaattgcataaactattttcttggcttgttatattagtttgtgggcctttgggaagtctttcgtcttttaggcatatgtttgttccagccgtccatcctgaatgtggtatgtaaatctaacatttttatgctaagcctccacttacttgtatattatataggctacgtttcgtaacgatcgaggtgtatacaaagaagccgaaattcacaggtatgtaaagcatttaatttataaattccaatgagaattaaaacgtgcaatacagaagccaatttcttataatttctttgtctttaaacttaaattatttagattgctttcctattaaaaaaaaaaacatttttagcttttttttttcgaaaatttgaacaaatttttttatattttctttaaaacattaatccctttaacttttttacaaaagtatatttatattacaggctacatataagtcatcttgacgtagctgtaactagatgtattttacaaacatatttgttttaaagaactttataagatttataagaaggaaattgttgcatatattattgcacttttattatttaatatgatgttgttatttttcgtctctgtcatttatgatgaaagctaaagtgctgaaattcatttgtttaaatataatttttaaataaaagaattttacttataaaactttgctttttcgcaggtatgtcgattgaataaaaatcaatatataccccaactatgtaagcatgtcaaacactttggtggattccatttccaatactactggagatggcgtgaagacgactacgatatatacaaggaaattttaaaataagcttggttgtccgattaatccaaatgaaatgaaaaatcaaaaaaaatttaaaaatatatggtttacttacatatgtaactttattttgaatatgacattcacataggcatgatacacgattttatttgactataaaattaactagctaagtaacgggtaaatgttgttttagcctatgaaaatatgtgcaattggacttaatctgtaagagcctctaaagcttatactggttgattcaactgctttgatagaaaatttagttggtaaa

SEQ ID NO: 3527 - DNA, 1017 bp, DROSOPHILA
ttttttccacatacgtcgtcaacgtgattcgaccttttccggtttattagttgaacatggcagtcggcaaaaataaaggtctttccaagggtggtaagaagggcggtaagaagaaggtggtggacccgttttctcgcaaggactggtacgatgtcaaagctccgaatatgtttcaaacccgtcaaatcggtaaaacacttgtaaaccgcacccagggtcaaagaatagcatcggattatttgaagggtcgcgttttcgaagtgtctttagcagacttgcaaaaggatattgatccagaacgttcttttcgcaagttccgtcttattgcagaagatgttcaagaccgtaatgtgctctgtaactttcacggaatggacttgactacggacaagtacaggtcgatggttaaaaagtggcaaacactaattgaagctattgtcgaagcaaagactgtagatgggtacctcttgcgagtgttttgtatcggatttactgccaaggatcagcagtctcagcgcaaaacatgttatgctcagcaatcgcaagtccgaaagattcgtgctcgcatgaccgacattattactaatgaagttagtggtgccgatctaaagcagcttgttaacaagctggccttggactcgattgcgaaagatatcgaaaaaagctgtcagcgcatatatccattacatgatgtttacattcgtaaagtaaaggtattgaagaaaccgcgcttcgatgtctcaaagcttctggaattgcatggcgatggcggtggcaaatccgtggaagccgttgtttcatccgagggagccgtaatcgaccgccctgaaggttatgagcccccagtacaggaagctgtttaaattaaatatgaaatgcatatttttttatgtattgcattcaaacataaaatacatttctctacaaattgcataaactattttcttggcttgttatattagtttgtgggcctttgggaagtctttcgtcttttaggcatatgtttgttccagccgt

SEQ ID NO: 3528 - protein, 268 aa, DROSOPHILA
MAVGKNKGLSKGGKKGGKKKVVDPFSRKDWYDVKAPNMFQTRQIGKTLVNRTQGQRIASDYLKGRVFEVSLADLQKDIDPERSFRKFRLIAEDVQDRNVLCNFHGMDLTTDKYRSMVKKWQTLIEAIVEAKTVDGYLLRVFCIGFTAKDQQSQRKTCYAQQSQVRKIRARMTDIITNEVSGADLKQLVNKLALDSIAKDIEKSCQRIYPLHDVYIRKVKVLKKPRFDVSKLLELHGDGGGKSVEAVVSSEGAVIDRPEGYEPPVQEAV

SEQ ID NO: 3529 - DNA, 4021 bp, DROSOPHILA
caacgacattttgcacttcgcttcctctctatatacaaagctacaaatcatttaaatttctcattctttctcttggattttccccttttttttcgatttagctattttgtttcattttctttttagagctacgattaaataagttacgttgtgtaaagtgtaaacttttgattacagagttaccattgaaggagatacagatacagagatatatagaacagtatagacttggttacaggggggggcgcggttgttgggcgaacagaattgctttcaactattgcactattatcggatgtgtctatataggtcccttaagatatatgtctatgtacaattggagctgcgcaacgaaacgaagtgtctagcagatgcggatacagatgaatcgctgaggctcaagcacttaaacgtataagacttttgaacactttcgtttgtcatcaatcacatgtccacggatatccagctctggtcgtcgatgtacccgatgccccaccggacgatccacctggccattcgtccttatccgtatacaagctggaatacgatccgctggccgaacacgtccgacgatcgccgattcgccgttcggctccggacaacctggtgcccaggccacctgcatacgccggcatcgacagcgagtcgccgactgctgacgagacgggcagggaaatgggctccaatagtcccacctcctcgtcctgattgtcgtcgtgaacagcagcgtcggcggcatcgtcgtcgaagccataccagcatcacatgaccatgatttgcagcgctactcattgatctatcgtacggtagatgcgtctctggggctcgggtgtatagtggatgcgagtgcggaaatgctgcggtgatcccggcacgctttcagagcctcgacgcggtggcggcagcggcggcgaagccgaaacgtatctgaaagtgagtgaaagaggcgaggattagcatgacttagagcaggatggcttcattacgcagcacttaccttcggtgcagcagcggagagccgggcggctggccactcagctccagcagattcttgcgcagcaatagcggtgactgtccgcgattgtagcgtggcggcggatctggacttcgatgcctgcgatccaatcccgccaagatatgcggactgggcggcgtgctgatgctacctcccggtccactgcttgcatagcgacgcagaaagctactggtgccaccgccgggcagcggttccgtcgtgggcgaggtgctctggctggtattgctactgctgctggccgccgacaaggtgcgatagtagtaagacttgccaccgctgccgttattcacaacgctcctgtacgccggcggctgcggatgcactggctcctggtctcgatccatgctggacgccaccggcgacgtggctgtggaattcaattgggttttaacataggtggcaaactgtcgcttcatggcaccggcaagagtgttgaaccagcctgtttggttggttcgttgtttgtttgtttgatgaattgagtgatgatggattatgagtacgtggtttcatggtgatggtgcagtgcattggtgcagagttcgttttgttgtgcggtgtgcggaaaacgaagagaaaaacgaaacggaaatggaaaatgtataaatacgagagcaacatagcagcgttcaaagcgaaatcaaaagagcaatgatagactcagaaataaaatctgtaatccttttaaagaaggtttttaaaagggtgtagatgcacaacatcaagcatttgtttaagaatatagaataatgatttgtgccagctattatcattaagaatgttatgattttatttctgagcttgtggactagttagcaattcaagtgatggctcacctgcatcgtgttgctcccgactgcaaccgtccaggctgctattgctcgctccgctgctggagctctggcccaaaagttgtcggcgtgcgtacagcttgctcagcttactggccaccatgttgccgtttcctccataatccgactgctgttccggtgatctagactggagcgtgggactcgttcccgttgcctcggcggcgatgggcagcggctgatactgcagctgctcgccagtgccgcccgctccaaagtgaccagctgcccccaatcccgatgccggagccgaaccgattcccaatcccgccatgtttcccgttccggaaccagacgatggggatatgctggcgggattgatggcgatttgcgaacacgtcgactgcgtggaggactgactagaggtggagtgcgttgatggcggcggcggcacatagttgctgtgaaacggattcgtgctggtcactccaacgggcggctgctggcgctgctgctgataccgctcagccgcctccttctcgcgcagctgattctgctggtggtagaagcgctgcagcactgcatattgaaatttatatgttagtttcatacatagcccagcaaatgactagatcattatacctatggggctctgattgcccggctgcaatcgctgtggctgctgctgctgctgactcgtgagttgcagggtcggcgattctgtggggaattgcttgcgcggcaacgagggggagggtgaggagaggcccaaattcaaggtcgtcgtggtcgcattactactactatcacagctgtcgtaggcttgggaattttccgttggcaggcgccaagtgggcgtggtcgttggcgttgtcgtgagcactgtagctgcaatatttggcggtgttgttgctgttgccgccgctgctgctgctgttgctgcatccgtgatcaatgtttggttgttgtgcggcagtggtattgttgttgcagttgaattgtgtttcttttggctgaagggcgatgttgtcagattgcgtagaatcgattgacctgcaagtgatgagttggtagagtattctttttttttttctaaatctaaatctatagagccaaacccaccgatgctactaaacatggactccttcttggggctctcgtcgttatatttgtagtgcggatgatgggatccgttgctcagttttcgctgcatgaacggcgatttgcgataaagccggttaagatcgccgataccggcgcttggtggcgatagaggactggcactgctgctgcttccgctaccatttccgcttccgccgctgccgtttcctcttccatttccgtttccgctgccgccgaaacagtttgtcgttgccgtcggtgttgtggttgttgtttgaggtagttgtgtggctgattgcatgaaaaactgcgactgttgctgctggtaactcggtatctgagtgggttttattgtcttctgcggatttgtgggactctgccccgcatacgttgtcgccctaccatattttacagctccacctgcggatcctgatcctgatcctgcgagagatccggccccagaaccgatcgcacttccagtcgccgttgccctgcaaattgacgattgattcgtttaagattagtgcattcttaatggctagatgaccagtaatgagagcacactcaaatgtacgccagtggcagaaagaaggtttgtgtttggaggggatacatcgggctatttaggggacatatatcggggattttgaggaagcatcaggatatccgggatgtgatgggtttgtagggtacatttaaatagattgacggcgcaatggcaacatatctaagacatttaaatgagctgtaatcgcatttggaatgtgtgttggtgatcgatcgatgtgtgtgttttgtatatatacaagttgatgagtgagttttgcgtgtgagttgtgtgttcttttgtgtaagcgacaggtgggaaacacaggtaaatgccaaagggagcgaaagcgaaagatggccgcgcagaattaaagaatctttgctcatgatggctttccaaaataacactttcctaaaaaaaacaaatgtgaattgtagaaaaagatcgcagaatgtttaagaaaacacctttccacaaattgcaaaccaaattgaaagttcc

SEQ ID NO: 3530 - DNA, 1565 bp, DROSOPHILA
acaaatataacgacgagagccccaagaaggagtccatgtttagtagcatcggtgggtttggctctatagatttagatttagaaaaaaaaaaagaatactctaccaactcatcacttgcaggtcaatcgattctacgcaatctgacaacatcgcccttcagccaaaagaaacacaattcaactgcaacaacaataccactgccgcacaacaaccaaacattgatcacggatgcagcaacagcagcagcagcggcggcaacagcaacaacaccgccaaatattgcagctacagtgctcacgacaacgccaacgaccacgcccacttggcgcctgccaacggaaaattcccaagcctacgacagctgtgatagtagtagtaatgcgaccacgacgaccttgaatttgggcctctcctcaccctccccctcgttgccgcgcaagcaattccccacagaatcgccgaccctgcaactcacgagtcagcagcagcagcagccacagcgattgcagccgggcaatcagagccccatagtgctgcagcgcttctaccaccagcagaatcagctgcgcgagaaggaggcggctgagcggtatcagcagcagcgccagcagccgcccgttggagtgaccagcacgaatccgtttcacagcaactatgtgccgccgccgccatcaacgcactccacctctagtcagtcctccacgcagtcgacgtgttcgcaaatcgccatcaatcccgccagcatatccccatcgtctggttccggaacgggaaacatggcgggattgggaatcggttcggctccggcatcgggattgggggcagctggtcactttggagcgggcggcactggcgagcagctgcagtatcagccgctgcccatcgccgccgaggcaacgggaacgagtcccacgctccagtctagatcaccggaacagcagtcggattatggaggaaacggcaacatggtggccagtaagctgagcaagctgtacgcacgccgacaacttttgggccagagctccagcagcggagcgagcaatagcagcctggacggttgcagtcgggagcaacacgatgcagggctggttcaacactcttgccggtgccatgaagcgacagtttgccacctatgttaaaacccaattgaattccacagccacgtcgccggtggcgtccagcatggatcgagaccaggagccagtgcatccgcagccgccggcgtacaggagcgttgtgaataacggcagcggtggcaagtcttactactatcgcaccttgtcggcggccagcagcagtagcaataccagccagagcacctcgcccacgacggaaccgctgcccggcggtggcaccagtagctttctgcgtcgctatgcaagcagtggaccgggaggtagcatcagcacgccgcccagtccgcatatcttggcgggattggatcgcaggcatcgaagtccagatccgccgccacgctacaatcgcggacagtcaccgctattgctgcgcaagaatctgctggagctgagtggccagccgcccggctctccgctgctgcaccgaag

SEQ ID NO: 3531 - protein, 367 aa, DROSOPHILA
MFSSIGGFGSIDLDLEKKKEYSTNSSLAGQSILRNLTTSPFSQKKHNSTATTIPLPHNNQTLITDAATAAAAAATATTPPNIAATVLTTTPTTTPTWRLPTENSQAYDSCDSSSNATTTTLNLGLSSPSPSLPRKQFPTESPTLQLTSQQQQQPQRLQPGNQSPIVLQRFYHQQNQLREKEAAERYQQQRQQPPVGVTSTNPFHSNYVPPPPSTHSTSSQSSTQSTCSQIAINPASISPSSGSGTGNMAGLGIGSAPASGLGAAGHFGAGGTGEQLQYQPLPIAAEATGTSPTLQSRSPEQQSDYGGNGNMVASKLSKLYARRQLLGQSSSSGASNSSLDGCSREQHDAGLVQHSCRCHEATVCHLC

SEQ ID NO: 3532 - DNA, 4737 bp, DROSOPHILA
aaaattccataatgagatttaaattacgccggcgagtgcaactcaattgagcgacactcaaaatcgccccacagttgagtgcgacatacccacattgagcggggctcgaaggtataaaagctggagcagcccagaccacagtcaacagtttcctccgagcgagcattcagtcctcacacaatctatcacagaagccaaaaaaaataagattcaccatgaagaacgctgttgctattctgctgtgcgccctgctgggtctggtaagtgttgcaaggagacagaagccgatggcagccagtaatctaaattcatccgtttgctcctcgacaggcctctgcctccgactacaagctgcgcaccgccgaggatctgcagagcgcgcgcaaggagtgtgccgccagcagcaaggtgaccgaggccctgatcgccaagtacaagaccttcgactatcccgacgatgacatcacccgcaactacatccagtgcatcttcgtcaaattcgacctgttcgatgaggccaagggcttcaaggtggagaacctggtggcgcaactgggccagggcaaggaggacaaggccgcgctgaaggccgacatcgagaagtgcgccgacaagaacgagcagaagtcgcccgccaacgaatgggccttccgtggcttcaagtgtttccttggcaagaacctgcccctcgtgcaggccgccgtccagaagaactaggagttcagcgcagttccacatcaattctagaagcgaaagatcaatcaacacgcaagcaacgcggcattttcgagttgaaatccgctcaggctctgcaatcctacgattgaaataaaaccatataatagtgcttttgaatgaagaatgttctttttattattcacaatatttctgagggctggaagagaggtagggctgctggtggtggcaggaatcaagctgttactcgcatcctcaatcccaaaaaaccttgtcccgcccaaaggaaaggcattgatagcttatttaattcgattatatttgtcttcatctttttcgctttagtaaattcaacttcttttcttatcttctctttactctatatattttttttttaaatatataaattacacacgcactttttatatattttgttgatttacttctttcccaagagtcttgtgttcttttgattttttttttatattttcttccttctttatttgcttttgccatcttttaacttcttttatttggggtttgtggtttcttttgcgcttcttttatatatacttattgttgtatatacttttttgttttttaaatcaacttcttgtttttcataatcttttttttttttttgatgttttattgaaaattaaaatgtgtgaaaagggggtgtttggtgttgggtgcttcaaaaaacattatagccaagtcaagatattcgttttccttgttgattttttattattttcgaggtctcttcttttcgcctgttttcttgctgctgatgcattttttattgaaacgatattttttctggcgttttctgttgcgattgttttctcttttttatttagcaaagaagtttggcaataaaataatgttttttgaaattatattgtaaaaaaatctgaaatcaaatagttaatggattaaagacgacagtcggtaaatcgaatggaagcattataataaaacccaacacgctgcgaatgagagcaaggtattcccataaagggttcggaaaattattctgtttttgaccataaatttgattgtttttatttcccgtaatgatctaccagctatgcaaactaaatctatttagctccataaaaacaaacggcattttctaacaacttaaatttaacataaaaagacgtcctcattggttttataaattttaagaaaaaaaatgtatcaaaatataagagatagatatcggattactttatgtaaccgacataaatcggacgcaacccacacatataaaatttcaactatcaattattttcagttcgaaattgtcaacttaccttactagggattttaataaaacaataatcagtaaggagcgtagtaattggcgcgaccacggtaaccccttctggaacgaaagacagaccgggattagctcgatccaatcgggattttccagagcccacttacatagctcttcgggcgcctcggaaggtggagtgacagcacgcccgggagacacgggctcctcgaccccggaagctgccgcgtgcgaaacggtttgtggtggagagtccagggcggtttgtgcgcttcgacattacctgaaagtcaatagattaagctaaagtcaactctaaatatgtgctttcaaaattgcgctacgtaggagtccctaggactcattctatccacatatgtacatgagagtttgataggtagcaggactagcaaaaagtgcttcagatactcacctttatttgacgccctcggaagagggtttcgttcatggccaatgccgtctcgacaaactccttggaaccaaactcaatgtatgcgaatcccttggggtgcccgtcagccttgttgcagagtatggttactcggttgattgtgccgcatccgtggaagtgggcctccagttcctcggccgatgcgccgtagtccacattgcccacgtagacggaccgcgtgtcgatttcctgcttctcctcaagagaaagcgggactgtggccaagccggtggtagacccaccggccatttgtttgtccacctccgactgcatctgctttatcttctcggcctcctcttccatctccttgactcgagcctttatggcctccagttccgggtcgatttgcatgctgccctcctcctggcgacgaggaaaatatgaaatttagtggtatttgatttggagcgatgagcaaacgcccgaaaccacagcagacaatggaatggagtggcggtgcgaagtgacgctctgaaaatggcagccattgctgcggttttcggctttgtatatcccccaaagctttgcgagcttttccagggaattcggcgggctttcgcaaggcgtgaggccaagaaactggttcttgggcactgtctacaagggcaaccccaactcacctcgacctctgtggcgatctcagtctcttgctccccgttcgtctcctccaatgactccaggagctgatcctcgttcaatgtgatatcttcatcggccattgctttggatttgggtttgtttacgtctgctacaaaagctcggttttgttggcgcaaaagcttccggcgtggtactcaaaacggcagttgtcgtaactatgtatgtatggtagctgtcaatgagaaaagggcggcgaaagtgagcataaagagcgtaaaacattaagagcgcgaatgaagagttcatcatgcaaatgcagtgaaaatccaagccataagtaaataaattcaggctgcggacaccgaaatgtctaggtttcactgcgttcgcactactacactgatatttaattaaacacactgtacttacgtttaataaatgtacaaattacgagctcgttctgctgacgttgagttcgcccaaaatggctgccctgtgaaaacacacgtacgctgggttgctgggttgctgtttttcgttcaaaagtctacgtttttaaacccttttcgactttgtttcgcgccacaccacgtcagcataaatatttatttataagcttatttatttattatttactaatatttacaactatacgaaaacgtacgtagtttttgacacaaattgaaacagatttgtgttcgcctcgtttttaccgatgacagttttcgcctcgatagtttcgatggtttggtggtgggtttacctatcgataactgccggtatttaagaaagcagttctttggatgataaaaataatagtattttcacaccacaatgccattttaaatttaccataggaaggaaagaagaggaatgtgcacgcacatttctaacaaggttttgtaaatgggaatcagacaaattattgtttaaggaagtcatatattgcgaaataacgccatcattcaaccatcaatcagggcccatgcataacgataaaaggagaacatgaacgattcctccgattcggagtacgaggacacagagtacctggtatttgcggatttcaagaaccacattcatccgcaccagctgaagcacgaggacgcggccattaagatcatcggaatcgagagtgacacgcccatggccgaggtaaatggaagcatttatcggggacgctacgaacattccgtgggaaccaacgtgttctttgagaaggaaaaagacaatctggcaagtgatccgctttttgagtcagtgtgtcgccagcggtaccagtacgtggacaaatccaccaaggtgatatcttttgaaagggtctacgtggacaatttgcaccaggaggtggagaagtcggctgagactgaagaggacgatcagaccgagccaaagccagaatctctgaagctaaatataacttacaaggaggctattaacaagtttggagaagatcattgagtgtggagaactgagtctaatcctgaacaaaaaacactctttcaagacatacctcttagtaccatggataccacctatattacaacgaatccagctttaagcctgcgagactttctagccgactatcaaaagaaaatatccggtactgcagacgaagtgcccttctttctccaaaaaaacccagtacttgtcgacgtgtctg

SEQ ID NO: 3533 - DNA, 1662 bp, DROSOPHILA
tacgttttcgtatagttgtaaatattagtaaataataaataaataagcttataaataaatatttatgctgacgtggtgtggcgcgaaacaaagtcgaaaagggtttaaaaacgtagacttttgaacgaaaaacagcaacccagcaacccagcgtacgtgtgttttcacagggcagccattttgggcgaactcaacgtcagcagaacgagctcgtaatttgtacatttattaaacctaccatacatacatagttacgacaactgccgttttgagtaccacgccggaagcttttgcgccaacaaaaccgagcttttgtagcagacgtaaacaaacccaaatccaaagcaatggccgatgaagatatcacattgaacgaggatcagctcctggagtcattggaggagacgaacggggagcaagagactgagatcgccacagaggtcgaggaggagggcagcatgcaaatcgacccggaactggaggccataaaggctcgagtcaaggagatggaagaggaggccgagaagataaagcagatgcagtcggaggtggacaaacaaatggccggtgggtctaccaccggcttggccacagtcccgctttctcttgaggagaagcaggaaatcgacacgcggtccgtctacgtgggcaatgtggactacggcgcatcggccgaggaactggaggcccacttccacggatgcggcacaatcaaccgagtaaccatactctgcaacaaggctgacgggcaccccaagggattcgcatacattgagtttggttccaaggagtttgtcgagacggcattggccatgaacgaaaccctcttccgagggcgtcaaataaaggtaatgtcgaagcgcacaaaccgccctggactctccaccacaaaccgtttcgcacgcggcagcttccggggtcgaggagcccgtgtctcccgggcgtgctgtcactccaccttccgaggcgcccgaagagctatgggttaccgtggtcgcgccaattactacgctccttactgattattgttttattaaaatccctagtaagatttttttacaatataatttcaaaaaacattattttattgccaaacttctttgctaaataaaaaagagaaaacaatcgcaacagaaaacgccagaaaaaatatcgtttcaataaaaaatgcatcagcagcaagaaaacaggcgaaaagaagagacctcgaaaataataaaaaatcaacaaggaaaacgaatatcttgacttggctataatgttttttgaagcacccaacaccaaacacccccttttcacacattttaattttcaataaaacatcaaaaaaaaaaaaaagattatgaaaaacaagaagttgatttaaaaaacaaaaaagtatatacaacaataagtatatataaaagaagcgcaaaagaaaccacaaaccccaaataaaagaagttaaaagatggcaaaagcaaataaagaaggaagaaaatataaaaaaaaaatcaaaagaacacaagactcttgggaaagaagtaaatcaacaaaatatataaaaagtgcgtgtgtaatttatatatttaaaaaaaaaatatatagagtaaagagaagataagaaaagaagttgaatttactaaagcgaaaaagatgaagacaaatataatcgaattaaat

SEQ ID NO: 3534 - protein, 224 aa, DROSOPHILA
MADEDITLNEDQLLESLEETNGEQETEIATEVEEEGSMQIDPELEAIKARVKEMEEEAEKIKQMQSEVDKQMAGGSTTGLATVPLSLEEKQEIDTRSVYVGNVDYGASAEELEAHFHGCGTINRVTILCNKADGHPKGFAYIEFGSKEFVETALAMNETLFRGRQIKVMSKRTNRPGLSTTNRFARGSFRGRGARVSRACCHSTFRGARRAMGYRGRANYYAPY

SEQ ID NO: 3535 - DNA, 7330 bp, DROSOPHILA
atcttaaaggttgctatatttaaaggcaaaatcatatttcacatacaaggccagttgaaaaattcaaatcacttgaatgattaatgggtaaatgggcaacctttttcaagtagagcctaagccaagtactaccatttaataacaacttgtaattaatacgaaatgttctctttctagttatttttgaagtgttttccgcgtgggtttacagaatcgacatttacggctcataacccactgcactgaaatgacggagtatttgtgcttcccgatagccattagaaagtggagctggtaggcggggagggtagtgtggggtgttgcaagtgggtggcttttgggcgactgggtggtgtgggaggtgtcaagggcgcgatagctctttgacagccgggaaagcggatatggagtgaacgacaggttttccctcagctcttccgcctggtagttcgtgtttatgtaaaattaatttgaagcttttaatcaaatattagcggcaaaaaatgctgcggagcttggtaggaaaaactgagccacaaagcagtgaaattaaatacttaacctactttcagcagtcactttatggacaaaataagaacttattctcacgcattagcattgttttaagaaaaaaagaatttgcctaactaaaacaccaatttgcgtttgtagcaacttattgttccctcaaaaacgttaatataaaactaaaaccgcactgtaataatgatgatacatactaaaaatgtgaagggaagagttagtgattgagaaacgatttatttacttttaccacttgtattatttgcttttaaaaatatctaccgcgtaagtatcttacattgtaaaataaatgtaggaaatgactgatgttatcgattatttataaaattcaaatgtttaagctttcgcgcgtaacatggtattttttaggcagttattcgcgtcctcggatcacaatctggtaacatcgaaagttctaattttgtttgtgtgcgtgcgacgtcggttttttcgtcgtcgcgacttttttaaaataaactggaggcattcgcaaataatttaagcctaatcgatcaggaattcgtacataatgtcggttgtgatatcgagctctttgtcaagaagcgcttgaatcgtgggtaagaataaagtcgcacctacaaaatgaacgaattagaactttttgccacgagaatagcaagtgcatatgtgtgggtgtatgttagtgtgggcatttgtgtgtgtgtctgttgtggtctctgaatgtgtgagtgaaggagaaggaagtagagctccccttatttctccaaaaacaacaaatacagagagtaagaaggaaagagtaggagagagaataacttgtaacaaagtaccgttacaacaatggtaatacggaaatgtgcaacagagaaacaaaaacaacaccaacaacaacgagaagtagtacgagttttgtgggcctttcgtgcagataccaccagttttcccccacccctccccgtctttttctgcacaatttcgagttttcccagctgcgccacagcaacaacaaccacaacaacgagagcaattgtgacttttccgcattgcagttgcgccaactaacaccgattttttgatttggggcttcgtgcctaagcgctcttcttgcattcagcccgcgtttaataaacaattaatcgtcaagcaataaacaacagcaagccgcgcatagaaatttgagctttttcaaaatattacaccatccgattacataatatagtttacaagtcgtgctttgccgttccgttttgtttcgcttgttcgccttcttcttgaggtcgtttcttgtgcttcctcttccaagtgagaattcccaacaacctgttagaagattcggtcccattgggcggcgctctagctgggtttatgcgggactgtaatcaagatctatcaatggaactaaaaatttaattatagtgtgttaacaatcaggtagtaaacaagttagcattagaagcacattctaaaaaaaaaaaatggatttacctcttcatttttaacacggcttttatgaatatatgattcatttttatcatacgaatttagtatctaagctcccaaatgtatttccgcctgttttgcctgtgcttatcaggagtgttttcaattcgcctaattatcgttaatggagttcccgcataaacgactcactatacacgcacgcagtcagcgaattgaattgatcgatggtttgttcaccttctccaccgctttcttccgcagcgttctgctctttccacctgtgggcaactaccgccgttatctcatccaccaaacatgtgagaaataccgccagcagtacgatctgttcaccttctcagtgggccaagggccgcagcggcgcaccgtcctctgctttcgaaaccagcttctggatcccagcggctttgagaagtgagcatctgatatctgacagtagattattgttcatttcaatttgtcgttaatgcacaattaacagccgcaagcagcagcagcagagggagaaggatagagagcgagaggcagcgaggagctggcggagcaacaacaattcgcactatcacacgaacggcagaagcagcagcgccagcagaagaagcgccacggagctctgtaagatgggcgttaagaagcatatcagcgagactccatgtgagtaaatggcccaaagcaagctggccgtacatataaacaaaggctatcccctgttttttaatcacattttggagcgatgcgtttttggctccccgtttagcaagcagtcataaatttaagtgttcgcaaatacgcaaaaagaagccaaacaaagaaatcgaaaatgtaacagggatagcgacgaatatgagaatacccagtaatactgaaaattaattcacatatttatctatgtacatttttgccattaaattgcacagttgtgttagatacccagcaaattgaagcattaatgagctttccaatcagaagtaataactaaattccggccaagtgtatagcaaacaggtagattaactaaaaataaccagatgcgccagctgatcgacgtcggcagcgccgttgccgttcattcaaggtcgccctctttctcgagcggattttttggtgatgttgcatcacggctcacctcacttcacttcacttggcttcacgcaggtagacgctcaactggtcgaccgctgcgcacgctcaccagctctggaccgcccccgcagcccccccttgctgcctgggatccacctgtcaagttcgtgttgacattcacgaaaatcgggcatagagcggatcgtaaaaaattgggtcgacatgagtgaattttgcttttaatttattttatgccgaatccgttgcttcaccttagtctctattttattcgttttgttttgagcatttgccaactattgttgctaatcgtctgcttagctctcccatttggcgatctatcttcgtatcatgtgaagtatctcacattcggcatcttgtgtctctttctcaatgtatctcatggatggcgccttctctatctgtatcttgcagtaagcaaatcgaattcggtggatttatacaggccgccagcgttgaggaacaatagcaataacaacaacagcagcagcgaggaagcagctgcagtaaacgaagctataacaacaccattagctgcaggaacagcaaccactgcatctacaagtcctacctccaaagaatccccaaacaggtaggtaaatcgatttgcaacccatcaaagttaggaatagatcataaactgcgtatatacctctaacgaaactgttgatattctgtcgtgagctaatctcgttacctcgtttccttcaccgtttattattattatctctgttttgctccgctctttcgtagagaggcggacgcctcagcagcagcagcggcggcggcgacacgacgtgaacgccgtcccgatcgagcggtttatgtgccaagggcacgacgcagtcaaactacaccaccgactactacaacaacaacaacggcggcggcagcgacagcggttgcaacaacatcaccaccagcagcagcagcggtggtcgcagcaacaattacaacagcgccggattccccgccagttgcagatacacagccgagcaaagcggacgacgtcaacggtcagccgccgtccaagtcgaagaaaagcaaatcgcatcgggagcgcagagaacgcgcaaagaaaacgacaacagctacaacggccgataacgccactgtactggttatatcagcatctgagaacgatactcaatccaacgaagaacaccgaccggcaaagccagcggactgtgataaggaggtgtgtgtactaaaacaagacaagaacgtatataagcgaatctaaagcctatgaattagttcttattaacaataattgttcagcgtagcgccattctccatcagcagttagaattttttaatacacattttaatagctgaccttgcctttctaacatacagatcatgagcggcgcccagcgtacaaagccaggcaatggcaacaaatcagccagcaatggcaaaagccaggcatcgcctccgctgcgcatcgaggatgtggtggcggccaggagcaccaatggcgaggagccggccaaatgtgataacgatgtgcgcgagctgcagcgagcctcaaaggtaagttatgccgcatggaatcagcgaaatgttttaactaacttccaaacgattgcaggaaatcaatcgcagcaatcggcgcatcatgaaacaaaccttcaactcagatgtgctggagattcccgagaaaatagagacatcggcaacaaaggccatccccacatccccgcaagcatcagccacagcgaaaccacctgtagacagcaccaccgaagacgatgacgaggaggacgaggacgactgggagaagatgttcgacgagagcggcgactgtctggatcccaagttactccaagaactgactgaatccgtgggcaagtgcaaaatagagctgcccaaaatggactatacggtaagtagatataactggttaaccagcatcatcatcaaattaaacactctgttccacaattcgtacaggtctttcacattaaacaacaactgctcaacgaagaggaatttccgcacgttctggaggtgtccaatttcccagtggagttcaaaactcccgacctgctcatgcttttcgcccagtacaggggcagtggtttcgacatcaagtgggtagacgatacccatgccctggctgtgttcagcagttcccgcattggtgagtgcctacaaatgcaaccggagattggttcggtaatgaaatagaacgtttcctccgcagctgctgaggtgctgacgatggggcatccgtttgtcaagttgaagccacttgcggaagccactctggagtcacgactgaaggcaaagaaggccggcgcggtgtcaatgcagccctatcgccagcgtccggaaacctgcacggccttggcccgacgactggtatcgggtgcactgggagtcaagctgcccacggcgccgcaggaacgggagaacgagaggcgggtactacgtgaagccaaaggtgagtgcgggccatgtaactaaactgggtcaaggatatacttgatttggaatcattggcgctgccttcccttggtcttttattaatctgccttatctttttattcagaacgcaaactgctagctgccaaacagcgggacgaagtctgggagagctagaccgcggcccggaagaaggccaggtgcatttttctcacccttttctcatctgcaataaatgcggcagcaaacacaacaccatgtggatcgacaacaagaaacaccaccattaacgcccacaaaaacaattctcaatcaaagctaacacagtaaatgagtaattcgcatgctaagcaatgtacttttaatgttcgctttttgtgaaattaacacagacttttgctcaatttgttgtagtttttagaggatgcaatgcatattatatcatctaggccgtaagagagaaatatctatatttattggtcgtagcaattaaacgtgcagagagacgcgtgtacgtgttgttttaactccagccgtaaacctaatttttaagcgcgagcaatttatatattgatatacagtttgtcaagaaactgtttacacactgtgaaataagttgaatttttgactttaaagctaaaaataaagggttttttgcttaattaaacgcaatttttttataaaatataattaaacaatatttattttacttataaatcaaaaaacaaattaaaaatattaaatatacaagaaaataaacaacaaattccaagtttacacacttttgagactgtcaagaaactctttacacaaaacactaaatcgaagtttaatcctaaattttttaattattttattaaaattttaaaagttttggtatgtagtatgttccccattggctttagctacaagttgaagcctttttttcatggattggacaagtttttgcaggtcatattcaaacgggatcttttcacactcttcgactattacagtcataagctgttgttgtgttttaggtccctttttgccaccttcttctttaagtaggtccacaaattttcaatggggttcagatcaggactctgagggggcgtatcgatcactttaccacagttattaaggcgccaggtgcgtacattgcactctttatgtttctgatcatgtcctggtaaaacttaagatttggcttgttgttgctaactagcccgaatttttctgcactggccttcaaatttgttttttaacatttctagatattgcacggcagttattgtgctctcaattaaggctagttttcccactccacgggctggtgatacagccccaaaccatcaggtgacatttttccaaattttatcggttggaatgatattttgtttttctagcgcactcaacggtttgcgccatactctgcttggcccgtcgttataaaagagcatcatttttgtttcgtcacaaaatatgacagtcatcccagtactcttccgcatgatccatcatgctcacagcgaattaatgaccgcttttccatattggcatctgatagcaaagggtttttccttgcaaatcttgaagagtacctatggcgtaggatgacttggcgcacagtttcggtgtgacacagttaggtggcattcttgcctgatatccagagcaagtgatctgaccgagattgcgggggttcgcaatcactattcgcataataaagcggtctacacgctttttaattttaattttccgcccaccaccg

SEQ ID NO: 3536 - DNA, 2636 bp, DROSOPHILA
cgacgtcggttttttcgtcgtcgcgacttttttaaaataaactggaggcattcgcaaataatttaagcctaatcgatcaggaattcgtacataatgtcggttgtgatatcgagctctttgtcaagaagcgcttgaatcgtggcgttctgctctttccacctgtgggcaactaccgccgttatctcatccaccaaacatgtgagaaataccgccagcagtacgatctgttcaccttctcagtgggccaagggccgcagcggcgcaccgtcctctgctttcgaaaccagcttctggatcccagcggctttgagaaccgcaagcagcagcagcagagggagaaggatagagagcgagaggcagcgaggagctggcggagcaacaacaattcgcactatcacacgaacggcagaagcagcagcgccagcagaagaagcgccacggagctctgtaagatgggcgttaagaagcatatcagcgagactccattaagcaaatcgaattcggtggatttatacaggccgccagcgttgaggaacaatagcaataacaacaacagcagcagcgaggaagcagctgcagtaaacgaagctataacaacaccattagctgcaggaacagcaaccactgcatctacaagtcctacctccaaagaatccccaaacagagaggcggacgcctcagcagcagcagcggcggcggcgacacgacgtgaacgccgtcccgatcgagcggtttatgtgccaagggcacgacgcagtcaaactacaccaccgactactacaacaacaacaacggcggcggcagcgacagcggttgcaacaacatcaccaccagcagcagcagcggtggtcgcagcaacaattacaacagcgccggattccccgccagttgcagatacacagccgagcaaagcggacgacgtcaacggtcagccgccgtccaagtcgaagaaaagcaaatcgcatcgggagcgcagagaacgcgcaaagaaaacgacaacagctacaacggccgataacgccactgtactggttatatcagcatctgagaacgatactcaatccaacgaagaacaccgaccggcaaagccagcggactgtgataaggagatcatgagcggcgcccagcgtacaaagccaggcaatggcaacaaatcagccagcaatggcaaaagccaggcatcgcctccgctgcgcatcgaggatgtggtggcggccaggagcaccaatggcgaggagccggccaaatgtgataacgatgtgcgcgagctgcagcgagcctcaaaggaaatcaatcgcagcaatcggcgcatcatgaaacaaaccttcaactcagatgtgctggagattcccgagaaaatagagacatcggcaacaaaggccatccccacatccccgcaagcatcagccacagcgaaaccacctgtagacagcaccaccgaagacgatgacgaggaggacgaggacgactgggagaagatgttcgacgagagcggcgactgtctggatcccaagttactccaagaactgactgaatccgtgggcaagtgcaaaatagagctgcccaaaatggactatacggtctttcacattaaacaacaactgctcaacgaagaggaatttccgcacgttctggaggtgtccaatttcccagtggagttcaaaactcccgacctgctcatgcttttcgcccagtacaggggcagtggtttcgacatcaagtgggtagacgatacccatgccctggctgtgttcagcagttcccgcattgctgctgaggtgctgacgatggggcatccgtttgtcaagttgaagccacttgcggaagccactctggagtcacgactgaaggcaaagaaggccggcgcggtgtcaatgcagccctatcgccagcgtccggaaacctgcacggccttggcccgacgactggtatcgggtgcactgggagtcaagctgcccacggcgccgcaggaacgggagaacgagaggcgggtactacgtgaagccaaagaacgcaaactgctagctgccaaacagcgggacgaagtctgggagagctagaccgcggcccggaagaaggccaggtgcatttttctcacccttttctcatctgcaataaatgcggcagcaaacacaacaccatgtggatcgacaacaagaaacaccaccattaacgcccacaaaaacaattctcaatcaaagctaacacagtaaatgagtaattcgcatgctaagcaatgtacttttaatgttcgctttttgtgaaattaacacagacttttgctcaatttgttgtagtttttagaggatgcaatgcatattatatcatctaggccgtaagagagaaatatctatatttattggtcgtagcaattaaacgtgcagagagacgcgtgtacgtgttgttttaactccagccgtaaacctaatttttaagcgcgagcaatttatatattgatatacagtttgtcaagaaactgtttacacactgtgaaataagttgaatttttgactttaaagctaaaaataaagggttttttgcttaattaaacgcaatttttttataaaatataattaaacaatatttattttacttataaatcaaaaaacaaattaaaaatattaaatatacaagaa

SEQ ID NO: 3537 - protein, 535 aa, DROSOPHILA
MGVKKHISETPLSKSNSVDLYRPPALRNNSNNNNSSSEEAAAVNEAITTPLAAGTATTASTSPTSKESPNREADASAAAAAAATRRERRPDRAVYVPRARRSQTTPPTTTTTTTAAAATAVATTSPPAAAAVVAATITTAPDSPPVADTQPSKADDVNGQPPSKSKKSKSHRERRERAKKTTTATTADNATVLVISASENDTQSNEEHRPAKPADCDKEIMSGAQRTKPGNGNKSASNGKSQASPPLRIEDVVAARSTNGEEPAKCDNDVRELQRASKEINRSNRRIMKQTFNSDVLEIPEKIETSATKAIPTSPQASATAKPPVDSTTEDDDEEDEDDWEKMFDESGDCLDPKLLQELTESVGKCKIELPKMDYTVFHIKQQLLNEEEFPHVLEVSNFPVEFKTPDLLMLFAQYRGSGFDIKWVDDTHALAVFSSSRIAAEVLTMGHPFVKLKPLAEATLESRLKAKKAGAVSMQPYRQRPETCTALARRLVSGALGVKLPTAPQERENERRVLREAKERKLLAAKQRDEVWES

SEQ ID NO: 3538 - DNA, 8449 bp, DROSOPHILA
gattgtcaccccgaaattcggaactggctttgtaagctccatggagtcggagaattacatgccccacgctccgggaatcaagatatgatattcatttagtcggaaaaccatagcgtaagacggaggcgcgtcttcaacgcttcgtgggttcaaatagtaggcgaattcgcgatgtcaaatggccaacgatcgattggataacgataactgatgcgtcgaggataagaaaagaaagtatcaacaagtttgaattcgagcagatggtgcttctggatagagcaggtgcaacagcccacaacgacagcgacgcacagaaaaatgaatgttcattataaaatctttcagcatatatgtacctatatgaaaagcagaaaattagttatgtacatttttctcagtgcaatcgtaggtaaactctccttattagaaagacatttgtgcaagactatggcccggaaaatttgcatattccgcgaagtgaactggctgaacgggctgcagttatgtcacttgtagagcgacgaaggttgggtaaacagatcaaaattgagcaatagcccccttcgaatggtaaatgcgttaaagtgttaaggttagatgaacaaactagcgttggagtaatgacctcgagtaatcatagagaagatatgatctctggaataatcataggttgctcatggctttaattcaggtgggttaaggtttaaagtaattgtagcacatatgattagtggtttgagactacatagataaactagcctatttttcacgcgtgaaacgtattattcagatgaattaattgctatttgattaaatatttaaagtattcaccttaggttagaactatcattaggaaaacacattaattgtaattttgagtttattaaaacttataattttaagcggttgtttacttcaatcagaacatggctaggctaaaatgtaagtatgaggatatggggctgggatgtaaatgcataggcgacccggatcaatgaaatcagttgatggaaatgtcggaggagtggggtccgagggtggggtcgaaccggaccatcttcttcgttctccgcttaacccttaaccgcttccgctcattggccatttcccgggaccagggctgctggcgctgtggagctgtgggtggataggcggcttgatccaggaggcgcatgtggtcgccagtcagtggaagttccgagtcggtactatagctgggaggattacaaatcggccttatctcccggtccttagtttggatggtggtattattgactcggctgtagacacaggaatcctgatgatcctgtcccgagaaaccaccagcaacgcgaccggggaccggcttcttcttcttgggcttctttggaatgttcctcatcttgggcggcttgggctcctcctggattacgccctttccatagatccaattgaatggcttctctcgctcacccatcacacagctctcgtactggactgtggcgtcgggcatatggggatataggctcggattgacccagtcactctcgttgtactgcgtctcggtgtgcttcacatgggagctcttcagtcgctctggacgcattaagcccgccggcggagtgaccccgaagtcgaactcatcctcgctgtcggaggtgtccgttagaacgagctcatcctcgcaggaatctatcttccggcgctcgcactccctccgcacatggtacagcagccgctttttgtccacgaaactgcggcagtagcagttcatcagcggtttgtggcaagagcacttgctgaatcccattcccttgaggcagcgcttcaaatcgcgaatttccttcagcagcggattcttgacgatccgaaactgaacgggcttcattctcacgtagggattggcggagcgagcgagcgtcttggcatccttgagaggacgcagggtaatggtgtacacatcgttcttcttttcaatgtgcagcgtgggcacctgcaccaaatcctccgccttctcacccggtggagacatcggcgacatcttatgcttgtagtatgacatgtacttcgacacgggcacgttatccacgggaaagtccttaaggaagtaactcattagaccgcgaatggaacgtcgaatggctccgggtcgccagccaggcttgttggctagtggatgagcggtccacaaccaacccatgtggctgggaacttttttgtctgcatccgggatggctacatttgccttgggcctctccgtggggcgatacattgagtagtacctcgacttatagggacgtttgaccttcgggcgacgcttcttcatcttccgcggtgtttcgcaggcatcctccacagggtccgtcttgccagcctttgtcctttccggcgatgcaggacgatttttgctctttttgtgcgacttagcaagggcacaggcctccgcgcagatgtcctggatcttctggttctcatccgcggctttaacattgaacagatctctcagctccgtaaacaccttggccaagtcttgcggctgagctgaaccttcttgagcagtgggatttttggtggccgactgggtggctttggtgttggactcgcgaatgctgcgcctcagaagctggtagtccttcacaattgcttcaaaggcttccgaggtgggttctggaacaccatgttcttcattcgccgaacagccttcgaccgatcccatatcaaagctgagattctccacaggattttccagatggtccagcagaatctgttgggcagtggcctgctcgtcgtagggtcgctccttgaactccggcactggtttatagccacagcaaggacaagcggccaccttgggtaaccaggagacatcctcgccgcaaaggacgcaggatcgggtgttgctgatgtgcatctgtcgcagtcttggcgaggaatgcttctggcacaagcggttcgcatttccctcacctagaacgttcttttggcaggaggagaactgagtggcaggacccgccgggggctcgaaggtcacacaatcgtcgtccacgttgggacaggagtacacgggatagggacccgccatgtcgatcaggcgaggtggggaatcctaagggaaaccatttagaaataatcaggtgcaatggttttcttgtttcacctgacattgaaaagaatcctgcgccctatcctcactgcaaggaggggaatcctgcgctacctccgtatcactgggcatgaaacccacacacggatcaatggaagaggtggacatgaaggagaggtcctggagatccacattcatgttcggaaaacacccccgctcctggccgcccgccaatcgtccatcgaccgcatctctattgaagttcaggtgctatcgcattcaggctgctcgaggatcaggtcctggtggcgttacttactctttgagggtctggcagcgcatctgcatggcgaagcggatgttcataatgccgacggtgcatcccttgcaggttagctccacattcgcatcgtgcacaatctcgtcaaaatcgttgatcatgcgactgaccaccgccgcgggtggaaaatagcagcctcgtgctggagaggattatgtgagtgatttgcttatgtatcggacttcctcgtctgcacacttaccgatctccttgcgcagatagaccacggatatgtttatgccttcggccagctgcctctgcaggcactcggcttccatctggaatgtcttgtccggattcagtggaagacagttgacattgatgctgctggaaccaaggcagatcttgcacccgcggcacacgtttgccttaatctgcagcttatcctggcattcgaagtccctaccgggcatgttgagcttctgaacgatcagtttggcggcaaagcagcgcatgtagtccctgttgggcttgcccttctggccgggagccgggcacctgggctggtatacctcttcccggtttcgaaccggacaggaggagcaacagcacgcgcccttacccttcttgtccttctcctgggcattacccttctcctggtacgtggagcagtgcatgtagtccgctttgcagctgcccaatcgggtgctgaccaatccgcggttcttgtagtaggcatcccagttcattagctcttccaccggcttctccttcttctccaccggctctggcttgcactcgtacttctccatcctggccggttagcaatcgatatagggtcgtccacgagtctaaaatttttcttgcacaaataattttaaaaaagcgcacgggctacgtcacgagaattcacataaaagtaagcaatttatagataacttgagcctgaagcgatcgacctgaactatcaatagagaatgagctgtgttcaagaatcggactgtaatgaccaggtgaagtagaactcacggcatcctgggttacatagaaccacattggcatagaatgacataccaacacattgttttaataaatctatgactatgactatgttattcaattcatgccaaaagggataaaaccaattcatttatgtggaattcttggaatgccgaaaccgtcatttatttaaaatgtaaaggctatgtatacttgtgattgctaacatcaatgcatttggactccgccaccatgtcagttagacttgtgccaaggtctgtttagtggggttggatcgaacctccggggatcatcgtagccaccgacattgcggaagggaagctgcttgcgtggcttcttcttgggcggatttcgcaggcgcggcttcggtggatccgcgtgaacgtcgccctttccgtagatccatgggaacatcttctttcgctcgcccatcacgcatccgccgtattggacgagcatgttggccggatgcgggtacatggtgggagcggcccagtcgtgatccacgtactgggtctccacgtgcgctctgtccggctgtcgcacccgttcgggctttatgactcccgccggaggagtaaccccaaactcgtactcccgatcgctgtcatcatcgtcgctgtttggggagtacacgaaggtatccgagttgtttggccaaccacgctggcgacactcgttctccacctcgtactgaattcgcttcttctcaatgtgactccggcaaaagcaactggccaccggccggcgacaagtgcagggggcaaatcccttgtcctgaagattcactctcatctggcggagtcctgctgccatgggatccttggtaatacgaaagacaacgggcttcatatccgcataagggttggcactggaggccagggccttgggatcctttaatggacgcaaggtgatgatgtactcatctcccttccgacttatgtgcagcgttggatgctgcactagtggctcctccagctcctcgaccctgcggcactttttgtgtcggtagtggtaacgcgaaaggcaaatattatccgcaggaaagtcctttagaaagtaggacattagttgtcggatgggtcgagaaatggctcctgggcgccacgacttgtggcgcgccatctcgcttttggtccacatccaacccatgtgacagggaatcctgctgtagcccgtatgcttgctgcccgaaatgcagtccagatgcccgatacgggagtctttggataccgtcttcagcttcaagaaggtgtagctgcaagatgagagtctaatctatctgaacgcaatgtaggtttcatatctcaccatcgggactttttgtggtgggtgcgctccttctttatccgcattttggctggcttgggataggccttgtcaatctcgtccagtgtcttctgcagcgccttcctggccttcctgcgggccttggccgacttggtgttacggcaggctgcatcgcactccttcctcagctcctcggccaccacgtccgcctcgttggctcccttcttcttgccgaacatattccgcatctccgtgaagatggagatcagttgggtacgacgaagtgattcgtccgagttggcttggttcaccttcttgctttccggttgtgatttgcttggagcttgcggataagcctgtgggagtggctcaatcttgcactcattttccttaaaaaagttgtcgcagagcttccggatgcggcatcgagtgcagggtttcccgcccaagcagccacattgctgcggaacattgggatcatccttgttcttgtcgcccatggcttcatcatcacctttggacgggtccagttcacaggtctccttgcgcaggcagtcccttagcaattgctgggcagttgccgtaagatcgtagggctgctcgctgggctgtatgtcctcgaaggttttgtagccacagtagggacaggcggagatcttgggcagccaactgatgtccgaacggcagagctggcagagattcggtggcttgtaggcctcctgtgttaaaacaggctcttttacaggacaggtgcccatgagtcttcgacgagcagcccgctccatggaggcagtcaaggatatggcctttctctttctaggaggcttttccgctgtgaactcattggtgtcacaggaggaagtatctgtgctggaactcggctgcttgcacttgcaatgccaacgacgggacttttcgtgtgtgtctggaggactgggtacttttatctcgtctagacccagttcatcgacgagcttcttcagagcggccttttctctctttttctccgtgccaacatccggaggtaattgcattcctttcaggaaacacccacatctggcaaaggcaccgcctttgttatcctgatcctcctgattctgacttgcggcgtgtggacattggaagggtgctcccgcgtgcgacatcaggcgctcatccgtgatgcagctgttcgttgcacactttccggagcgtcccagggtgaagataatatcctttttgttgatcgaatgatccacaggcttgcacacgtcatagcagccaaagggaatcaagccgtggctagagaggattgtgatttaataggaatactacatttcccctatctggttaacaccacttactttatatccggtgaagcggagctgatctttaggagtagctccacctcacccactcggtcgttcttaggccctttggtcagttgaactgtaacactctgggtaaccgaaaagctggggtctgtcagctggcgcaggattgaagattccagcgtggcgttgcccgatcctatgagctcgtcgttctctttgagagtgacgcctacgcccttggatgtcaatgctcctattagctcacagggactgctggtaaagccacccaatgcctctgtgggaaactgatccacgaatatgcgttccatggacagctcctcaaagtcctcgaacaatcgaaccgagtagacgggcctcccacccgcactgaaactggcggacttgcggggaatcggcaaactggagttcacaaggataacgtcaaagacatagtactgcgtcatgttgatcttctagggaaactatcgctaaaaccaagttaaaattttctttactctctaaagatttggctaaaaacttatttaatttgttctgatataaaactccagtctgaataaaatcgatgtgttcaggatcagaaatgacaataaaaagctcaaaaacggagaactagagcttgtcaaatcgataatgtatctaaggccacttgggttcaagaattctcagcctgttcatgttttgagaaaaactgaataatattttgttgatttactaaccataaattacttactaagctaaataacttatcagctacaaagaaattgccttgtttagctccatatttgccaaactttgtgcacaatcttcgaacacttcgattagaaatgaactctgagtataagtataaagtataataagtacaaactgttttcctttcttatctcaagttaagctatcttatgatgcattgcttcttcttgaaggcttttatgcaagatattgtcaaaaacatgatgcaaatgatttgattcacttgttaggtaagtgaatacaatgattgcctcgattactcagttggaactcatattccaaatatttgccatttcgcatgcttatcagaaattaagtaataacttgttcggtttaaggtccgcagaggtgacacatatatgtacatatgtgcacacaactttggacaccttgtcgttcaaccaatcgctctaaaaatagctgaaatagtcttgcaaaaaataagacacctgtttggtttggtatataagtaaatgagtagcgcataattattgcctgaataatttaagatttacacaatggactactatacgttcaacaacaaggatgtgagtagcattctcgcaaggtaactatgaatttggaactgcacttggtggtgacaacaactaggtgtgtgcgtaatgcattcgcgcgcaggagtatggagtcctgccctccagtgcctccttcgcgggcagttcgctggccgaa

SEQ ID NO: 3539 - DNA, 5610 bp, DROSOPHILA
atgacgcagtactatgtctttgacgttatccttgtgaactccagtttgccgattccccgcaagtccgccagtttcagtgcgggtgggaggcccgtctactcggttcgattgttcgaggactttgaggagctgtccatggaacgcatattcgtggatcagtttcccacagaggcattgggtggctttaccagcagtccctgtgagctaataggagcattgacatccaagggcgtaggcgtcactctcaaagagaacgacgagctcataggatcgggcaacgccacgctggaatcttcaatcctgcgccagctgacagaccccagcttttcggttacccagagtgttacagttcaactgaccaaagggcctaagaacgaccgagtgggtgaggtggagctactcctaaagatcagctccgcttcaccggatataaaccacggcttgattccctttggctgctatgacgtgtgcaagcctgtggatcattcgatcaacaaaaaggatattatcttcaccctgggacgctccggaaagtgtgcaacgaacagctgcatcacggatgagcgcctgatgtcgcacgcgggagcacccttccaatgtccacacgccgcaagtcagaatcaggaggatcaggataacaaaggcggtgcctttgccagatgtgggtgtttcctgaaaggaatgcaattacctccggatgttggcacggagaaaaagagagaaaaggccgctctgaagaagctcgtcgatgaactgggtctagacgagataaaagtacccagtcctccagacacacacgaaaagtcccgtcgttggcattgcaagtgcaagcagccgagttccagcacagatacttcctcctgtgacaccaatgagttcacagcggaaaagcctcctagaaagagaaaggccatatccttgactgcctccatggagcgggctgctcgtcgaagactcatgggcacctgtcctgtaaaagagcctgttttaacacaggaggcctacaagccaccgaatctctgccagctctgccgttcggacatcagttggctgcccaagatctccgcctgtccctactgtggctacaaaaccttcgaggacatacagcccagcgagcagccctacgatcttacggcaactgcccagcaattgctaagggactgcctgcgcaaggagacctgtgaactggacccgtccaaaggtgatgatgaagccatgggcgacaagaacaaggatgatcccaatgttccgcagcaatgtggctgcttgggcgggaaaccctgcactcgatgccgcatccggaagctctgcgacaacttttttaaggaaaatgagtgcaagattgagccactcccacaggcttatccgcaagctccaagcaaatcacaaccggaaagcaagaaggtgaaccaagccaactcggacgaatcacttcgtcgtacccaactgatctccatcttcacggagatgcggaatatgttcggcaagaagaagggagccaacgaggcggacgtggtggccgaggagctgaggaaggagtgcgatgcagcctgccgtaacaccaagtcggccaaggcccgcaggaaggccaggaaggcgctgcagaagacactggacgagattgacaaggcctatcccaagccagccaaaatgcggataaagaaggagcgcacccaccacaaaaagtcccgatgctacaccttcttgaagctgaagacggtatccaaagactcccgtatcgggcatctggactgcatttcgggcagcaagcatacgggctacagcaggattccctgtcacatgggttggatgtggaccaaaagcgagatggcgcgccacaagtcgtggcgcccaggagccatttctcgacccatccgacaactaatgtcctactttctaaaggactttcctgcggataatatttgcctttcgcgttaccactaccgacacaaaaagtgccgcagggtcgaggagctggaggagccactagtgcagcatccaacgctgcacataagtcggaagggagatgagtacatcatcaccttgcgtccattaaaggatcccaaggccctggcctccagtgccaacccttatgcggatatgaagcccgttgtctttcgtattaccaaggatcccatggcagcaggactccgccagatgagagtgaatcttcaggacaagggatttgccccctgcacttgtcgccggccggtggccagttgcttttgccggagtcacattgagaagaagcgaattcagtacgaggtggagaacgagtgtcgccagcgtggttggccaaacaactcggataccttcgtgtactccccaaacagcgacgatgatgacagcgatcgggagtacgagtttggggttactcctccggcgggagtcataaagcccgaacgggtgcgacagccggacagagcgcacgtggagacccagtacgtggatcacgactgggccgctcccaccatgtacccgcatccggccaacatgctcgtccaatacggcggatgcgtgatgggcgagcgaaagaagatgttcccatggatctacggaaagggcgacgttcacgcggatccaccgaagccgcgcctgcgaaatccgcccaagaagaagccacgcaagcagcttcccttccgcaatgtcggtggctacgatgatccccggaggatggagaagtacgagtgcaagccagagccggtggagaagaaggagaagccggtggaagagctaatgaactgggatgcctactacaagaaccgcggattggtcagcacccgattgggcagctgcaaagcggactacatgcactgctccacgtaccaggagaagggtaatgcccaggagaaggacaagaagggtaagggcgcgtgctgttgctcctcctgtccggttcgaaaccgggaagaggtataccagcccaggtgcccggctcccggccagaagggcaagcccaacagggactacatgcgctgctttgccgccaaactgatcgttcagaagctcaacatgcccggtagggacttcgaatgccaggataagctgcagattaaggcaaacgtgtgccgcgggtgcaagatctgccttggttccagcagcatcaatgtcaactgtcttccactgaatccggacaagacattccagatggaagccgagtgcctgcagaggcagctggccgaaggcataaacatatccgtggtctatctgcgcaaggagatcgcacgaggctgctattttccacccgcggcggtggtcagtcgcatgatcaacgattttgacgagattgtgcacgatgcgaatgtggagctaacctgcaagggatgcaccgtcggcattatgaacatccgcttcgccatgcagatgcgctgccagaccctcaaagaagatgcggtcgatggacgattggcgggcggccaggagcgggggtgttttccgaacatgaatgtggatctccaggacctctccttcatgtccacctcttccattgatccgtgtgtgggtttcatgcccagtgatacggaggattccccacctcgcctgatcgacatggcgggtccctatcccgtgtactcctgtcccaacgtggacgacgattgtgtgaccttcgagcccccggcgggtcctgccactcagttctcctcctgccaaaagaacgttctaggtgagggaaatgcgaaccgcttgtgccagaagcattcctcgccaagactgcgacagatgcacatcagcaacacccgatcctgcgtcctttgcggcgaggatgtctcctggttacccaaggtggccgcttgtccttgctgtggctataaaccagtgccggagttcaaggagcgaccctacgacgagcaggccactgcccaacagattctgctggaccatctggaaaatcctgtggagaatctcagctttgatatgggatcggtcgaaggctgttcggcgaatgaagaacatggtgttccagaacccacctcggaagcctttgaagcaattgtgaaggactaccagcttctgaggcgcagcattcgcgagtccaacaccaaagccacccagtcggccaccaaaaatcccactgctcaagaaggttcagctcagccgcaagacttggccaaggtgtttacggagctgagagatctgttcaatgttaaagccgcggatgagaaccagaagatccaggacatctgcgcggaggcctgtgcccttgctaagtcgcacaaaaagagcaaaaatcgtcctgcatcgccggaaaggacaaaggctggcaagacggaccctgtggaggatgcctgcgaaacaccgcggaagatgaagaagcgtcgcccgaaggtcaaacgtccctataagtcgaggtactactcaatgtatcgccccacggagaggcccaaggcaaatgtagccatcccggatgcagacaaaaaagttcccagccacatgggttggttgtggaccgctcatccactagccaacaagcctggctggcgacccggagccattcgacgttccattcgcggtctaatgagttacttccttaaggactttcccgtggataacgtgcccgtgtcgaagtacatgtcatactacaagcataagatgtcgccgatgtctccaccgggtgagaaggcggaggatttggtgcaggtgcccacgctgcacattgaaaagaagaacgatgtgtacaccattaccctgcgtcctctcaaggatgccaagacgctcgctcgctccgccaatccctacgtgagaatgaagcccgttcagtttcggatcgtcaagaatccgctgctgaaggaaattcgcgatttgaagcgctgcctcaagggaatgggattcagcaagtgctcttgccacaaaccgctgatgaactgctactgccgcagtttcgtggacaaaaagcggctgctgtaccatgtgcggagggagtgcgagcgccggaagatagattcctgcgaggatgagctcgttctaacggacacctccgacagcgaggatgagttcgacttcggggtcactccgccggcgggcttaatgcgtccagagcgactgaagagctcccatgtgaagcacaccgagacgcagtacaacgagagtgactgggtcaatccgagcctatatccccatatgcccgacgccacagtccagtacgagagctgtgtgatgggtgagcgagagaagccattcaattggatctatggaaagggcgtaatccaggaggagcccaagccgcccaagatgaggaacattccaaagaagcccaagaagaagaagccggtccccggtcgcgttgctggtggtttctcgggacaggatcatcaggattcctgtgtctacagccgagtcaataataccaccatccaaactaaggaccgggagataaggccgatttgtaatcctcccagctatagtaccgactcggaacttccactgactggcgaccacatgcgcctcctggatcaagccgcctatccacccacagctccacagcgccagcagccctggtcccgggaaatggccaatgagcggaagcggttaagggttaagcggagaacgaagaagatggtccggttcgaccccaccctcggaccccactcctccgacatttccatcaactga

SEQ ID NO: 3540 - protein, 1869 aa, DROSOPHILA
MTQYYVFDVILVNSSLPIPRKSASFSAGGRPVYSVRLFEDFEELSMERIFVDQFPTEALGGFTSSPCELIGALTSKGVGVTLKENDELIGSGNATLESSILRQLTDPSFSVTQSVTVQLTKGPKNDRVGEVELLLKISSASPDINHGLIPFGCYDVCKPVDHSINKKDIIFTLGRSGKCATNSCITDERLMSHAGAPFQCPHAASQNQEDQDNKGGAFARCGCFLKGMQLPPDVGTEKKREKAALKKLVDELGLDEIKVPSPPDTHEKSRRWHCKCKQPSSSTDTSSCDTNEFTAEKPPRKRKAISLTASMERAARRRLMGTCPVKEPVLTQEAYKPPNLCQLCRSDISWLPKISACPYCGYKTFEDIQPSEQPYDLTATAQQLLRDCLRKETCELDPSKGDDEAMGDKNKDDPNVPQQCGCLGGKPCTRCRIRKLCDNFFKENECKIEPLPQAYPQAPSKSQPESKKVNQANSDESLRRTQLISIFTEMRNMFGKKKGANEADVVAEELRKECDAACRNTKSAKARRKARKALQKTLDEIDKAYPKPAKMRIKKERTHHKKSRCYTFLKLKTVSKDSRIGHLDCISGSKHTGYSRIPCHMGWMWTKSEMARHKSWRPGAISRPIRQLMSYFLKDFPADNICLSRYHYRHKKCRRVEELEEPLVQHPTLHISRKGDEYIITLRPLKDPKALASSANPYADMKPVVFRITKDPMAAGLRQMRVNLQDKGFAPCTCRRPVASCFCRSHIEKKRIQYEVENECRQRGWPNNSDTFVYSPNSDDDDSDREYEFGVTPPAGVIKPERVRQPDRAHVETQYVDHDWAAPTMYPHPANMLVQYGGCVMGERKKMFPWIYGKGDVHADPPKPRLRNPPKKKPRKQLPFRNVGGYDDPRRMEKYECKPEPVEKKEKPVEELMNWDAYYKNRGLVSTRLGSCKADYMHCSTYQEKGNAQEKDKKGKGACCCSSCPVRNREEVYQPRCPAPGQKGKPNRDYMRCFAAKLIVQKLNMPGRDFECQDKLQIKANVCRGCKICLGSSSINVNCLPLNPDKTFQMEAECLQRQLAEGINISVVYLRKEIARGCYFPPAAVVSRMINDFDEIVHDANVELTCKGCTVGIMNIRFAMQMRCQTLKEDAVDGRLAGGQERGCFPNMNVDLQDLSFMSTSSIDPCVGFMPSDTEDSPPRLIDMAGPYPVYSCPNVDDDCVTFEPPAGPATQFSSCQKNVLGEGNANRLCQKHSSPRLRQMHISNTRSCVLCGEDVSWLPKVAACPCCGYKPVPEFKERPYDEQATAQQILLDHLENPVENLSFDMGSVEGCSANEEHGVPEPTSEAFEAIVKDYQLLRRSIRESNTKATQSATKNPTAQEGSAQPQDLAKVFTELRDLFNVKAADENQKIQDICAEACALAKSHKKSKNRPASPERTKAGKTDPVEDACETPRKMKKRRPKVKRPYKSRYYSMYRPTERPKANVAIPDADKKVPSHMGWLWTAHPLANKPGWRPGAIRRSIRGLMSYFLKDFPVDNVPVSKYMSYYKHKMSPMSPPGEKAEDLVQVPTLHIEKKNDVYTITLRPLKDAKTLARSANPYVRMKPVQFRIVKNPLLKEIRDLKRCLKGMGFSKCSCHKPLMNCYCRSFVDKKRLLYHVRRECERRKIDSCEDELVLTDTSDSEDEFDFGVTPPAGLMRPERLKSSHVKHTETQYNESDWVNPSLYPHMPDATVQYESCVMGEREKPFNWIYGKGVIQEEPKPPKMRNIPKKPKKKKPVPGRVAGGFSGQDHQDSCVYSRVNNTTIQTKDREIRPICNPPSYSTDSELPLTGDHMRLLDQAAYPPTAPQRQQPWSREMANERKRLRVKRRTKKMVRFDPTLGPHSSDISIN

SEQ ID NO: 3541 - DNA, 7710 bp, DROSOPHILA
gcgaccaacgcgcgggaaggcatagagccccatgttggcacctcgtcggttcttgtcgtggtccgtctctgaatggagtgtttggggattgcaatttattcaaatgttctcatcttattgttcttaagtctccgtggaataagctattttcgtagcctaaccgccaaagtaactcaagtgacttgaatatttttattaaggctttttgtgattaaaaccttttttaaatttgaattatagatttagagtgccacaactatttctttgatatttaactcttcttaagtggcttttattatttcagcggttagatttgaaatcacctttttgatttaaagagcttgatataaaaagacactgtgtacgacttaaattgcatgcctcttcaagaagtgctttaagtgttaaaaaaaaagttaataaaataataataaacaacttttctaagtagaacattttaatgaaaaattggaaaggtctttttaccattacctctttcttttaaaggtgctgcaaaatattattgaacattattaaaaagcatttaactattttcactttaaagttaacaaaagatagcagcagcacttagtcgagatagactagtttgttgtttaagatttccttaaaagcgattttgtaatgtttccaccactcaccagctgtactgaattcggcgattatgaaaatcactagaactatgtggaccaacatagatttcatatttgcaagactatttaggacgaaacactggcttggcgaatatgtttttcggtctgatgttatcctcggaacggtcacggttcttctgattcctctggtcgaagttcacgttcttttataggccagaaaagcaggcggatggatggcagacaaacaaattgccatcggaacaacggggcggatgatgaatgttgctgcgatgcaaatgagatgttgctggcaacaggtggcctttagcaacaagttgcagaaacgtggtacttgagattctttttttttattattcacacaaacaaaggacttaactatttaattgctatgaaagtggattccgcggcttagagccagccggagatcatgcgtcctgtgaccgtggatttgcctcgttctccgccagctgcggcactgctctgacccaccttgatcgccggcttcagaggagctgctgctggcttcttgtccttgtcatcggcaggcttcttgtccttatcatcgctcggcttcttgtccttgtcgtcacccggcttcttgtccttatcgtctcccggcttcttgtccttgtcatcggctggcttcttatcattattgtcagcaggtttcttgtctttgtcgtcgccaggtttcttgtccttatcgtcgccgggtttcttatccttgtccttggcatcgtctcctggcttggagtctcctgcagccttttttggctcctccggaccgctcttcttttcgtccggcttggaggccccattggttgccttagttgcttctggtgctccagctgctccaggtttcagtttggaatccggcttggcatccgaaggagcggagggagctgcgctcttggctgctccatttgtggctgccggcttgctagcttcggtcttggaagactcctcctttttggcagcggcctcgggcttggcggattctccaggcttcggcgcagcaggcttggtgtctccaggtttggttggtggtgccggagcgtccttcttttgtgactcaccgggcttgctgatagtgccagctgcttggggctttggagctcccgcacccggagttggcttctgatccccgggcttgggaccacctgctgacggcttggagtccttgggaggctgctgcttatccttatcatcacctgctttcttgtcatccgttggcttgcccatcgtgccgggcttgccatcggctccggatttttcatccacattcttaaccgatgctcttagagcagctgcagccaacatagaagctcctcctccagttccaccactagttatggactttttagactgcaagtgagattatatattagccagggaatacatatacatatattgattggaacgtaccccagaggcatccagtggcttcttttcgccttcgccatttggagcaccctcgtcatcggccaaggaaacctcgtcggcagccatcttcttccgcatgaacttgacataagccactcttgtggcacgcgtcacatcacccaagttgggattgaattctggaggagatcaagggtatggaaatatacatacattgggcacatctttattaatttaccaatcaactgggtctggttcatctgaagaccctcattcgcctgctcgatgatcttcctcctcaagcttcgctggctatgacgttgcatggaggagcgcttggagccaatgggatcggaggcgaaagtattcttcctcgcaatggcgttccaatccttgtctctgttgagaataataaccattattcaaagcgtcttacagatttaagtggacctaccccttctgggtcttctttctgccgatgaccttggccagcgatgagaatatatctcgtccgctctcagattcgctcatttcctgcttcagattctcgacgaagccgatttggaagtccttaaggatgcgacgttccatcaccttgcccttggtggttcgagcaactccttcaaaagtaagtttagtgaataaaatccattaaaatccattctagctttgtagtcttctagcacaacatatttcaaattaatattcaagatggggtgaactttattaggtattcaaaagctaattgtaaataattattcatatatactgctacttctatcttaagacacgtgtaagttgccaatttggatgtgggtaggcttcccttaccctgcgacttcttctcaatgtcgggtacatcccagttattgttggtgaaaatctccagcaactcgaaccgcaaggagctgatgtcctggcgcacctcaatgatatcatcctcggtaatgccgtaatcgtcccgccgcctctgctccgccgtaatgtacctcctgaccagcagcttcatcactttgtcatgcagcgtctgtgcccgttccatggactttcgctgggagttggaacagggagcattagagggtggaaggacacagaaaggatgtattagacgtcaatttgacgcacagatagctctgcatgggcttgattgaaaatgatttcgcttaagatttgtattgattgtgagccgcctctcactgtgaggtgattcaacttgaaaaaatcgaactttcgaaatgttacttacatttaaaagtaatatgataagaaatatcatttaaaagtagagtacactgaatttaatatatatgtgtggatttgtataatacttaaactgaaatattgaatttctctgagtgtaacttaccatgaagctcttggttcgtgacggtcgctttcggcccagggtcttcctcaacatcttcatgttgggacagaggttgaagggcggtggaatggtgccgccatcctcgaagtagctcatccacagctgggatcgggcgaacttccactcagtgtcggctcgctccgagatgatttggtaggagttggacatcatggcaatcagcatgttgagaagcacaatgatgttgataaccgaataggagccgaacattagcagtgcccagaagcgggtgaagctcttgattcccgccagatcgaaggagaccaggtccaccaggccaaaagaggcccaaaagagcgattgtgatgtttcgaataagctaaagtaaattgaaatgggatgccaatatgataaagtacatagaaatgaatgtaatatacttggaaaatcttcgccagatggtacaagccttctcctggtcatcaaagtcagccacatcgggatgcaggtgatagcacttgttcttctccagctcagcgtagtaccatagcaactggttgagaccacatccgaaggcaaacaacaccagtgtgtagatgaagaagaacttgatgatgtcgattatcatgcgacccagtgaaacttgcaagggtcccaggtggggattaatggagaagatgtggacgagctttagataggagaagaccattccggcagcaaaggcgccctctgatagaagcattggatcaaacggatgccagtgttcccttgggaagtaaggatctatgccccggaaccagagatcacgctgaaatcaattcgtttcagtaactccaatttattcattagattcatatggactcacatggacgattacccaagcggtggccctacaaagaatccacgtcacatagaacatgttcgatatgtagtccactatgttccaaagatccatgatgtactcaaacaagccgtccgaatataaagatttcagttcctcaaatattagagccattatgtaggtaatgattgccagttcaatgggacccggtagtgaacctctctcgtgtttgcgccaatcctccagcatggtcagcatccagggaaatgcgaggagttcaaaggtgatttgcaccaccctcagggaggcagcacccaggagcactgtgaatgggcgcatatttagatggatgaagtgttaagcacccactttacccactcaggaagaacatgtaggagcaggagtgcgtgatgaacttgacaaagggcttgcgcatgaacttggcaccctcggaatccggggccaggatgtacttcaagctgtagatggggaagctgcatcccagcttcacgacatccatcagctgctgggaggcctgcttgcgccggaagcccggcagtccgtcgtaccaaatggcggccaacaattgttggacatttggatgtgccacaaactagaagggggagtaatgtttataaattcaagcagggtactaagatccgtttctatatataaagctattaaatcccagttggtctgtggtggattaggcatgggtatctagccacaagcttgtaaccttcacagttccttaatgtgcacggattagtccgaacccaccgttttttgcttatagcgaatggccagcttcagtcgttccagggtttgccgctggccaaggcaccagatgtcgtgggacggctcgtggttgaagttgagcatcacctcgagttccatggatgtgcgtgcgtgatccaggagcgaggtcccgaagtcctgcaccatctgacgcatctcctgttgggcaaacacaaacaaaggctcgcattcgcattcgcatagactctagtggcacactggccaccgcttacattgcacactactaccgtaccgtgtattcggcacgaaactccgattccatcgcctgcaggcgcttgagttcccaggacaattggaaggcggtcagtacagggtcccgggagctgagcgctatcagcgagctggcggacagggcgcggtatgcgttgatcctcgactgcgagtggcgcagggagtccgtcatctgggaggtcacacactcatcgcagccgcacctagaaacaattgagattaagcgatgatatacaaagtgtacggaacccaagagttctataataataaatacatttaaatcaatctgaaaggagtacaaaggaccttctctcctagcaaggacatttatgacgctgttaaaggcttgagtccattgacccaatttaagaacattcaaggacctgctcttcccacacacaacattacaccctgtattaatatttcaccctaatttgcccgcaattatctaaaattagaggcacccagcgatgtgctacataagtgtgttgccaattggacaaacaatggaacgtgccgctcgaaggacgaggaagctcactacatagccatatcaccgagcaactgcatccctacaccaccccactcacttgacgtcgtgcggcatgggcagcgtggccccgcgatccaggaggattttgagtatctcgtagttatttcggtgggcggccaggataaggggcgtgatgtccacggtgaaggtggacttggagcggtccaccgcctcccagctctgccaaaggaggggaaaagagtaagagttgtggcatattctgcggcaggatgtgacctacgtatggctggccctccttgtggttggtctcctcccactgcagcagctcctccaccgcctccacatactcctccgagatggcgtgcaacagggcgtcgcccacctcgatgttatgctccagcaggatcaccatcaggtcgaagttctcgttctcgatggccgaaatgagggcggagcggttcatgggatccgtgcagttaatgttgaacttgtccgtgccctggtactcctcgaggatccttcaaggacgaaatcatattagccgagttactcgaagccatagggaggaagcctcacttcttgacacctggcaagtcaccccgctcgcaggacaatatgaaattcttctccacatcgctgaggatgtactcctcggccatcatcaggtcgtaatccaggcgagaccccaacgccttctcggcatcggattccgtattgctgcccatatctgcactgatttactggtctatgcgaacgcgattatcaggatcggatcactcggtcacttcacatctcacaaacactatgggcatttatccctgctcctcggggagccttggcgtaatcctttcgcgcactgtatcctttagtgttccatcgtggcgatgttccgcctccaattagccgcgttgcactgctgaaaagtggcagccacgggtcgctatattccactaattacattagtgcccaatgtggctaaaactcggtcaatgtgtgggcgaaccccgagtcaatgggcccatttgaccgcacttcggtaattgtggggctgcatttggaggcagcaaccgattttagcgatttcagttcaggaatctttcgtccatttgtggttgcattgcacgtgatgagcgactttcgattttcgaagccccagcaacggaatcgcaccacttttatgcctgaaaatccaaatcaatactgcccagtgggtttatatgtaagtgaaaaacaaaacgtgctaaatggaacaatattatctgcttatatttcgatgaaatgatgcatacagttgagatatgaaattaaataggtgtctaatattttgtacccagcaatatagatcaatgcccaaaaaaaaaatacgcactttgcatactttttgacacctattcaagccgaaattcaaagctacttaatattcaaaaagtagcatgagggtgttaatttgcgagtaaatagggattcatggacttgggttcatatcctagaactattcaccgagaaaagcccttaaaaataggagaaaatgcaagcttttaagcttttggctaaccaacagagccggaaaacacaccacacctgcagtttacagtcgagtatctaccgaattgaaatgatttcgaatgccttttgggcactgggtcagtgattctgactttgtgattgatgaatattgattaatctgcatgggaagtgggagggggaggtggggtggtgtacatctaagacccaactcgtccttggcagccgagcgtcttgagccttgaatgttgaatgttgcttacttcagggcgctcgcagggcttttgtgtgtcaatgcacttggaactaaatgccagctcctggctaaaggcggagaaaaggaaaaggaacaagcccactttcacggagcagccctttgaga

SEQ ID NO: 3542 - DNA, 4070 bp, DROSOPHILA
cggctaattggaggcggaacatcgccacgatggaacactaaaggatacagtgcgcgaaaggattacgccaaggctccccgaggagcagggataaatgcccatagtgtttgtgagatgtgaagtgaccgagtgatccgatcctgataatcgcgttcgcatagaccagtaaatcagtgcagatatgggcagcaatacggaatccgatgccgagaaggcgttggggtctcgcctggattacgacctgatgatggccgaggagtacatcctcagcgatgtggagaagaatttcatattgtcctgcgagcggggtgacttgccaggtgtcaagaagatcctcgaggagtaccagggcacggacaagttcaacattaactgcacggatcccatgaaccgctccgccctcatttcggccatcgagaacgagaacttcgacctgatggtgatcctgctggagcataacatcgaggtgggcgacgccctgttgcacgccatctcggaggagtatgtggaggcggtggaggagctgctgcagtgggaggagaccaaccacaaggagggccagccatacagctgggaggcggtggaccgctccaagtccaccttcaccgtggacatcacgccccttatcctggccgcccaccgaaataactacgagatactcaaaatcctcctggatcgcggggccacgctgcccatgccgcacgacgtcaagtgcggctgcgatgagtgtgtgacctcccagatgacggactccctgcgccactcgcagtcgaggatcaacgcataccgcgccctgtccgccagctcgctgatagcgctcagctcccgggaccctgtactgaccgccttccaattgtcctgggaactcaagcgcctgcaggcgatggaatcggagtttcgtgccgaatacacggagatgcgtcagatggtgcaggacttcgggacctcgctcctggatcacgcacgcacatccatggaactcgaggtgatgctcaacttcaaccacgagccgtcccacgacatctggtgccttggccagcggcaaaccctggaacgactgaagctggccattcgctataagcaaaaaacgtttgtggcacatccaaatgtccaacaattgttggccgccatttggtacgacggactgccgggcttccggcgcaagcaggcctcccagcagctgatggatgtcgtgaagctgggatgcagcttccccatctacagcttgaagtacatcctggccccggattccgagggtgccaagttcatgcgcaagccctttgtcaagttcatcacgcactcctgctcctacatgttcttcctgatgctcctgggtgctgcctccctgagggtggtgcaaatcacctttgaactcctcgcatttccctggatgctgaccatgctggaggattggcgcaaacacgagagaggttcactaccgggtcccattgaactggcaatcattacctacataatggctctaatatttgaggaactgaaatctttatattcggacggcttgtttgagtacatcatggatctttggaacatagtggactacatatcgaacatgttctatgtgacgtggattctttgtagggccaccgcttgggtaatcgtccatcgtgatctctggttccggggcatagatccttacttcccaagggaacactggcatccgtttgatccaatgcttctatcagagggcgcctttgctgccggaatggtcttctcctatctaaagctcgtccacatcttctccattaatccccacctgggacccttgcaagtttcactgggtcgcatgataatcgacatcatcaagttcttcttcatctacacactggtgttgtttgccttcggatgtggtctcaaccagttgctatggtactacgctgagctggagaagaacaagtgctatcacctgcatcccgatgtggctgactttgatgaccaggagaaggcttgtaccatctggcgaagattttccaacttattcgaaacatcacaatcgctcttttgggcctcttttggcctggtggacctggtctccttcgatctggcgggaatcaagagcttcacccgcttctgggcactgctaatgttcggctcctattcggttatcaacatcattgtgcttctcaacatgctgattgccatgatgtccaactcctaccaaatcatctcggagcgagccgacactgagtggaagttcgcccgatcccagctgtggatgagctacttcgaggatggcggcaccattccaccgcccttcaacctctgtcccaacatgaagatgttgaggaagaccctgggccgaaagcgaccgtcacgaaccaagagcttcatgcgaaagtccatggaacgggcacagacgctgcatgacaaagtgatgaagctgctggtcaggaggtacattacggcggagcagaggcggcgggacgattacggcattaccgaggatgatatcattgaggtgcgccaggacatcagctccttgcggttcgagttgctggagattttcaccaacaataactgggatgtacccgacattgagaagaagtcgcagggagttgctcgaaccaccaagggcaaggtgatggaacgtcgcatccttaaggacttccaaatcggcttcgtcgagaatctgaagcaggaaatgagcgaatctgagagcggacgagatatattctcatcgctggccaaggtcatcggcagaaagaagacccagaagggagacaaggattggaacgccattgcgaggaagaatactttcgcctccgatcccattggctccaagcgctcctccatgcaacgtcatagccagcgaagcttgaggaggaagatcatcgagcaggcgaatgagggtcttcagatgaaccagacccagttgattgaattcaatcccaacttgggtgatgtgacgcgtgccacaagagtggcttatgtcaagttcatgcggaagaagatggctgccgacgaggtttccttggccgatgacgagggtgctccaaatggcgaaggcgaaaagaagccactggatgcctctgggtctaaaaagtccataactagtggtggaactggaggaggagcttctatgttggctgcagctgctctaagagcatcggttaagaatgtggatgaaaaatccggagccgatggcaagcccggcacgatgggcaagccaacggatgacaagaaagcaggtgatgataaggataagcagcagcctcccaaggactccaagccgtcagcaggtggtcccaagcccggggatcagaagccaactccgggtgcgggagctccaaagccccaagcagctggcactatcagcaagcccggtgagtcacaaaagaaggacgctccggcaccaccaaccaaacctggagacaccaagcctgctgcgccgaagcctggagaatccgccaagcccgaggccgctgccaaaaaggaggagtcttccaagaccgaagctagcaagccggcagccacaaatggagcagccaagagcgcagctccctccgctccttcggatgccaagccggattccaaactgaaacctggagcagctggagcaccagaagcaactaaggcaaccaatggggcctccaagccggacgaaaagaagagcggtccggaggagccaaaaaaggctgcaggagactccaagccaggagacgatgccaaggacaaggataagaaacccggcgacgataaggacaagaaacctggcgacgacaaagacaagaaacctgctgacaataatgataagaagccagccgatgacaaggacaagaagccgggagacgataaggacaagaagccgggtgacgacaaggacaagaagccgagcgatgataaggacaagaagcctgccgatgacaaggacaagaagccagcagcagctcctctgaagccggcgatcaaggtgggtcagagcagtgccgcagctggcggagaacgaggcaaatccacggtcacaggacgcatgatctccggctggctctaagccgcggaatccactttcatagcaattaaatagttaagtcctttgtttgtgtgaataataa

SEQ ID NO: 3543 - protein, 1275 aa, DROSOPHILA
MGSNTESDAEKALGSRLDYDLMMAEEYILSDVEKNFILSCERGDLPGVKKILEEYQGTDKFNINCTDPMNRSALISAIENENFDLMVILLEHNIEVGDALLHAISEEYVEAVEELLQWEETNHKEGQPYSWEAVDRSKSTFTVDITPLILAAHRNNYEILKILLDRGATLPMPHDVKCGCDECVTSQMTDSLRHSQSRINAYRALSASSLIALSSRDPVLTAFQLSWELKRLQAMESEFRAEYTEMRQMVQDFGTSLLDHARTSMELEVMLNFNHEPSHDIWCLGQRQTLERLKLAIRYKQKTFVAHPNVQQLLAAIWYDGLPGFRRKQASQQLMDVVKLGCSFPIYSLKYILAPDSEGAKFMRKPFVKFITHSCSYMFFLMLLGAASLRVVQITFELLAFPWMLTMLEDWRKHERGSLPGPIELAIITYIMALIFEELKSLYSDGLFEYIMDLWNIVDYISNMFYVTWILCRATAWVIVHRDLWFRGIDPYFPREHWHPFDPMLLSEGAFAAGMVFSYLKLVHIFSINPHLGPLQVSLGRMIIDIIKFFFIYTLVLFAFGCGLNQLLWYYAELEKNKCYHLHPDVADFDDQEKACTIWRRFSNLFETSQSLFWASFGLVDLVSFDLAGIKSFTRFWALLMFGSYSVINIIVLLNMLIAMMSNSYQIISERADTEWKFARSQLWMSYFEDGGTIPPPFNLCPNMKMLRKTLGRKRPSRTKSFMRKSMERAQTLHDKVMKLLVRRYITAEQRRRDDYGITEDDIIEVRQDISSLRFELLEIFTNNNWDVPDIEKKSQGVARTTKGKVMERRILKDFQIGFVENLKQEMSESESGRDIFSSLAKVIGRKKTQKGDKDWNAIARKNTFASDPIGSKRSSMQRHSQRSLRRKIIEQANEGLQMNQTQLIEFNPNLGDVTRATRVAYVKFMRKKMAADEVSLADDEGAPNGEGEKKPLDASGSKKSITSGGTGGGASMLAAAALRASVKNVDEKSGADGKPGTMGKPTDDKKAGDDKDKQQPPKDSKPSAGGPKPGDQKPTPGAGAPKPQAAGTISKPGESQKKDAPAPPTKPGDTKPAAPKPGESAKPEAAAKKEESSKTEASKPAATNGAAKSAAPSAPSDAKPDSKLKPGAAGAPEATKATNGASKPDEKKSGPEEPKKAAGDSKPGDDAKDKDKKPGDDKDKKPGDDKDKKPADNNDKKPADDKDKKPGDDKDKKPGDDKDKKPSDDKDKKPADDKDKKPAAAPLKPAIKVGQSSAAAGGERGKSTVTGRMISGWL

SEQ ID NO: 3544 - DNA, 3637 bp, DROSOPHILA
gtaacctatgatgtcgcgccatatcgattcattgttttttttagtgaaccacccctaatgaacggagcttaaatctaaaaaataaacaatcatctgtgaacttagttgcgcttgcttgcgaaatgcaggcggagattaaggccgacatcatcgtggaggcgatggaggtgctagtgaatcacattctatacgtgcgcggtatatacccctcgcacatttttaaaatgaagcggatgtacaactcgcccatctatgtgtccatatttccaccgcttaataactacctggccggcgtcctaaaatccgcacaagaacttcttcgccgccgggagctgcagtgcctggagctaatagtgtatcagaaggagaatgagaagttggagagctataaaatgcaactagaaacccagaggagtggcctaccggcagaggatcatttgatggagttcgagcagaacatgcgctctgtcatctacaaaatctctcagcgcttaaaccaggcgcctaaactgcccgccggaagttgtcagtttaaggtgcatctgcacactacccaggaggcattcatccgcttcagccatgactcccagtaccaggagtttccctggcttcagacccaaaaaactgaatcccaagcgacagggcgaaccgtttacctccttcctttggctagggtagatgatttgggactgaaaatggatgtcctcatcgttaattaatgttatattcctaaaactgttatccattttatcgaaaactacacgacgttgggtttattttaaactacaattgattctaatcatgaatcgttggctgatccatggtctttctttaatgaataaaaggacgcccaatggttttatggcttaacattagattccttaaataaaaccaattttagtgtcattccgttttgaattataaagactgttgaggttttagaggaagcgtcatatagaattgaccggtactcaagcgaccataatcgtaggcttgtcctctaaagtagaccctggcgttttagatcctcgaacgtctttcggttgacaacgtttcccagcgagtcctcgaactcttcctcctgatcggctacccagcgctcgctctgcttttgcgacttgagtttttcccacaacgtgattgcgtcctcgatctgggtgacattggcgaaatgggcggtgttcggaatgccgaggcatcgcatgccgtgcgcatgccgccactcggcgaagtgtcgttgaaaagccttaggacccttgtaggtgaagtttccacatatctcgcaattatagctaatattcaggccatgcagtttatacaaccagtaggggataggtttaccgtcccatccgagcggcaagttcttgggattgtacggaacgtcgtccgcgtcgggatcatcttcgttgtccgactcgctggcctccacatcgctatcgtcccgctcgccaccagtccgagcctgttttctctgcacattctccttggtagccgctctctgctcagacaacagatccgcgtatttgtagagcagagcctctagctgggcaatctccttgtggcgttcgtgctcccgtgactgggcactagcagtctttgcgctgggcttcttggccatcagtgcgggatccaaggtgcttttaccttttgtagagaataaacgctgtgctcgctcctccagggtgccgccgcacttaagacccagagccaccaaagccgactttagacgatccagtcctagcgaggccagctcctcccagctggagaaggcggatagatcaaggtgggcgccggtgttggccaacgccgactcagtttccttaatcgaaaaacccggaaatgtgcccatcagccactggcgctggaagtcaagttccacctttagcagttcgccctccaggtcgagcaagggctggattcggaggatgaagtggtgcaggtagtcgttgagggtctctatgtatatgcggtactcgcggttcttgcgctctctcggaatatcgaagacgtggtcaaaggacataaggtaagtgatatagtccagtttctccaccgaccgcaagttgaggtacagctcgtagcactcgttgaggtccagatagcgaccgccgccctcctcgtcagtgaactccactagggcactcatgtcgtccggattgttgtacacccgaatcatctcgtcgaactcgacggacagcggcacgctgacctccgccggatgggacttgtagaactgcttgatttgcttgaggcgggcgtagaactcattgaactcgttgggccccgaaagagcggcaatctccgcctttcgttcattgtccttgtcctcgtagagatcgcgtagctgggacgtagagttgtgatgcagttccatgaggtatttaagccggtgctccgaatggatgcgctccttttcgcccggctttttggtcgcatgctcgtccaccatcagtttgaccaggcgctcgcgctcctcgtgtaggcgccgctgttgctccaggagcgtctccatggctcttgaatgcgaggatttaatgcggggaaatatcaaatggaggcctttcacttagcgaaatcccgaagaaaacacaacttttcgtcagcgtgtgtacattaaaaaatacacttacaataaagcagggatggcttatattgtcacatcatattattgtcaggttattatactccgatcacactggcaattaatgtggatttcgggaatgcagatgtatcaaattaacgctcgattattcgagtaatatagtaatgatatttaaagagccaaattgatttttcattatcatatatagattatatcgcatgatttttctacctagtcgattaaagtgaagcctctgttacaaatgcgataacaattacatcgtctatcggtggtctgacagcgacaacaaatacacatttttaccctcgcaatcgcagggtcacactttcgtgaaatcatatgatcgatttgcagtgaaaattttcagacgttgggcagaaggcaaaagtaacttatcgttttccactttcctcgtgttgggccgccgtttccaactcagttcggctgtgaatgtattagcttaattaaatttcaattatttccaggcacggttgttgtacgtgggcttctttaaaacacttgaatttcctttcggtttgtgcagtgaaaaaaatcagtcaaaatggcactgagcgatgctgatgtacaaaagcaggtaattgaaaacttggattgggaacgggcaggcgatcaaggtcgtagggaaacaagcaaaacgagaggcttcgtttgcctttttgcctttgcaatttgcctttgcaataaagatggcgaagtcatgggatctcccaggtcatgtgaacttttcaccgccagtagtccaattagactgacatccttccaaatcggcccggtcatttgggagttgccggagttttgacatatttgttggctaatgaagacacatcaatttatttgtccagatagtttgcgtaaaaagtgagtaaaaattcgtgctggtcatgtgacacggcccccgcattggagcaatgtgttggagcgagacgactagccctgcaccccacactcgtactctctgtcacacgaccagcggaccccttacgttatcaaaac

SEQ ID NO: 3545 - DNA, 1637 bp, DROSOPHILA
ctttattgtaagtgtattttttaatgtacacacgctgacgaaaagttgtgttttcttcgggatttcgctaagtgaaaggcctccatttgatatttccccgcattaaatcctcgcattcaagagccatggagacgctcctggagcaacagcggcgcctacacgaggagcgcgagcgcctggtcaaactgatggtggacgagcatgcgaccaaaaagccgggcgaaaaggagcgcatccattcggagcaccggcttaaatacctcatggaactgcatcacaactctacgtcccagctacgcgatctctacgaggacaaggacaatgaacgaaaggcggagattgccgctctttcggggcccaacgagttcaatgagttctacgcccgcctcaagcaaatcaagcagttctacaagtcccatccggcggaggtcagcgtgccgctgtccgtcgagttcgacgagatgattcgggtgtacaacaatccggacgacatgagtgccctagtggagttcactgacgaggagggcggcggtcgctatctggacctcaacgagtgctacgagctgtacctcaacttgcggtcggtggagaaactggactatatcacttaccttatgtcctttgaccacgtcttcgatattccgagagagcgcaagaaccgcgagtaccgcatatacatagagaccctcaacgactacctgcaccacttcatcctccgaatccagcccttgctcgacctggagggcgaactgctaaaggtggaacttgacttccagcgccagtggctgatgggcacatttccgggtttttcgattaaggaaactgagtcggcgttggccaacaccggcgcccaccttgatctatccgccttctccagctgggaggagctggcctcgctaggactggatcgtctaaagtcggctttggtggctctgggtcttaagtgcggcggcaccctggaggagcgagcacagcgtttattctctacaaaaggtaaaagcaccttggatcccgcactgatggccaagaagcccagcgcaaagactgctagtgcccagtcacgggagcacgaacgccacaaggagattgcccagctagaggctctgctctacaaatacgcggatctgttgtctgagcagagagcggctaccaaggagaatgtgcagagaaaacaggctcggactggtggcgagcgggacgatagcgatgtggaggccagcgagtcggacaacgaagatgatcccgacgcggacgacgttccgtacaatcccaagaacttgccgctcggatgggacggtaaacctatcccctactggttgtataaactgcatggcctgaatattagctataattgcgagatatgtggaaacttcacctacaagggtcctaaggcttttcaacgacacttcgccgagtggcggcatgcgcacggcatgcgatgcctcggcattccgaacaccgcccatttcgccaatgtcacccagatcgaggacgcaatcacgttgtgggaaaaactcaagtcgcaaaagcagagcgagcgctgggtagccgatcaggaggaagagttcgaggactcgctgggaaacgttgtcaaccgaaagacgttcgaggatctaaaacgccagggtctactttag

SEQ ID NO: 3546 - protein, 503 aa, DROSOPHILA
METLLEQQRRLHEERERLVKLMVDEHATKKPGEKERIHSEHRLKYLMELHHNSTSQLRDLYEDKDNERKAEIAALSGPNEFNEFYARLKQIKQFYKSHPAEVSVPLSVEFDEMIRVYNNPDDMSALVEFTDEEGGGRYLDLNECYELYLNLRSVEKLDYITYLMSFDHVFDIPRERKNREYRIYIETLNDYLHHFILRIQPLLDLEGELLKVELDFQRQWLMGTFPGFSIKETESALANTGAHLDLSAFSSWEELASLGLDRLKSALVALGLKCGGTLEERAQRLFSTKGKSTLDPALMAKKPSAKTASAQSREHERHKEIAQLEALLYKYADLLSEQRAATKENVQRKQARTGGERDDSDVEASESDNEDDPDADDVPYNPKNLPLGWDGKPIPYWLYKLHGLNISYNCEICGNFTYKGPKAFQRHFAEWRHAHGMRCLGIPNTAHFANVTQIEDAITLWEKLKSQKQSERWVADQEEEFEDSLGNVVNRKTFEDLKRQGLL

SEQ ID NO: 3547 - DNA, 2822 bp, DROSOPHILA
tggcacaaatacaacaaaatcgcacaaaaaaaatatcaaaaatcagttgaaaaacaatttaaacccttgagggtctcgaccaattgttaccctactcgaaattccattaaaaaaattaataattaaaattaaataatgatctaaactatgttaaatccttataccatatctgagcatacctttgtttatggcttaataagcttaataagcaactccacgagtaccaggtacataaattcaaattggcattagttatcgtggggcctggactttgtaatgacgacgagggtattgattgtttcgcacctaagaccccataggaatgtcaagaggaccctgtggccagtggtgtgtacagtagagtgtgcctatgaaccgtgacataagctgtgtgcctgagcccctcagctaagtgattcacttcaaaaggtgcaaacacttatggtacaggaaatagtagaagtattagaaatattttctactgcttaaaaattaatctgattctaattaaatcaaatcaaattagtttcaaatttagatgatttcgtccattttaaattaaatcatcgatcgtcgacctatcaacattacatttgacccgtttgaaagtaaaattgtttcaacagctatgaaatattacttaacatcagtctagttttaagccttaacacaaatttagttgaataattaatataaatatatatataattttcggctacatccaaggagatttcattctctaccattgagttgaactttggtttcgaaattcgcttgtgtgtatttgtttatctctactgaagttcatttgaatattttttctgcctagactttcattttctactataggtaactaaataaatggtagttggtgactgttttaaaagaaagtatctgttacctaatcagcgcacctttcgtattgatagtacaattgaaatcaggaatataaataaatacattccaagtctaatattccgatatgctattatacccatagataactgaggtagctaacttcgagatgcatttgtatctttgcagtctgcatgtgctgtccctcggcggcaatctaatcagcgaagttcccgaggcggtgggttcccttaatcagctgcaggctctcgtcctgtgcgacaatctgatcgagattctgccgaccagcatcgcccgactgaagaacctcaagtcgctgctgctgcacaagaaccgtctgcgtcatcttcccaaggacatcgtggcactgaagaatctgactgaggtaagaagcgattcctgtaataaaaaatatgactttcagaaataattaaatgccattatccttaccgatcctcatccgccgtctactctcttcatctacagctgagcctacgtgacaatccgctggtggtgcgcttcgtgcaggacatggcgctgaagccacccaccctcctcgagctggctggtcgcatggtgaaggccagtggccagagacccggaccctatgacatccccaggacactggccgagtatttgaacagcgccaattgctgcgtgaatcccaactgcaagggcgtcttcttcgacaaccgggtggagcacatcaagttcgtggacttttgcggaaagtaccgtgtaccattgctgcagtacctctgctcctccaagtgcatcgagccagagcagccggcggcgcgtggatcatccgttccggcggcgagcgccagcagcggattcatgatgcgcaaggtgctgctgggctagccggcattccggcccggcccggcccactccggctcctggggccataaccatatattgtccgggagcgcgagcggagcatcgaccgatctggtatcggatttggagcggacacagagatacgaaatcgatatcggattgggaatcggaggcggaagcggtagcggaacttgggagcgaaacggaacggaaacgagagcttaagcggaaatggttggatggatggatccacgcgttccgaggaaccgaggtgtccgccaaccaccgccgctcgccgggattcccattggcttcttcacacgttaccaatttgaactagtttgctaagtgattacacgacctgtttgcttgctcgccttgcgtgccaatttctgtgtttctgtttgcttgttactcacacacctacacaatctataccaaagaaactcgactggctttcactgggcaaaaacaaatagaaaaggattcgattggcttgcaaagcattcggcgattaaaagcgtcgatatgtcagattgcactagtccgacgaacttatctagccccataaattgagttagtaaccaaaaacatcagcacaactgttaaatatttcacaaactataactgcaaccacaatcaaattaacgcccgattctattcgttcaaaagcaagtcatttcatttaaaatgccaacaaaatgaccccaatcaggtattccaacaagttcctttaaatgtcctttgtcctggaatacctcaaccttacacaattataattaaagctttgctcaattgcccaaaatttataataaaaagtggacaaaaacctttagcaacatgctaagctatccctacagcgttttggtaaatcctattatgcttttaagatatactgcacctgcacctgaaaggatcgaaaggataacggcggcgaactgttattacgagtagtgtttattctgtgtttaatcgcgctcacagcttgccgaagttcgtgccacggacagcgtctaaaactagattatttaaaaaaatttgggaacagtggcgagggggttgagatactcaaaattgtcattcgcaagggggtggacagcaca

SEQ ID NO: 3548 - DNA, 721 bp, DROSOPHILA
ataactgaggtagctaacttcgagatgcatttgtatctttgcagtctgcatgtgctgtccctcggcggcaatctaatcagcgaagttcccgaggcggtgggttcccttaatcagctgcaggctctcgtcctgtgcgacaatctgatcgagattctgccgaccagcatcgcccgactgaagaacctcaagtcgctgctgctgcacaagaaccgtctgcgtcatcttcccaaggacatcgtggcactgaagaatctgactgagctgagcctacgtgacaatccgctggtggtgcgcttcgtgcaggacatggcgctgaagccacccaccctcctcgagctggctggtcgcatggtgaaggccagtggccagagacccggaccctatgacatccccaggacactggccgagtatttgaacagcgccaattgctgcgtgaatcccaactgcaagggcgtcttcttcgacaaccgggtggagcacatcaagttcgtggacttttgcggaaagtaccgtgtaccattgctgcagtacctctgctcctccaagtgcatcgagccagagcagccggcggcgcgtggatcatccgttccggcggcgagcgccagcagcggattcatgatgcgcaaggtgctgctgggctagccggcattccggcccggcccggcccactccggctcctggggccataaccatatattgtccgggagcgcgagcggagcat

SEQ ID NO: 3549 - protein, 205 aa, DROSOPHILA
MHLYLCSLHVLSLGGNLISEVPEAVGSLNQLQALVLCDNLIEILPTSIARLKNLKSLLLHKNRLRHLPKDIVALKNLTELSLRDNPLVVRFVQDMALKPPTLLELAGRMVKASGQRPGPYDIPRTLAEYLNSANCCVNPNCKGVFFDNRVEHIKFVDFCGKYRVPLLQYLCSSKCIEPEQPAARGSSVPAASASSGFMMRKVLLG

SEQ ID NO: 3550 - DNA, 4622 bp, DROSOPHILA
caagctggaggagctcaacgatgtagtcccagtgagggataggtccagatctgtatcacccacagtggaggcacgtggggagatggtctccccgcccaccaagaagtcccgcttcgaaccacgtcagcataacgcccagttggtgtgcgttcgagaactaatgcaatgtaaaaagccctttctgcagtcactggtcgcggcgaaagcacagcaacccaacacggagtttgtggatgaaccgccgctggagcaaagggatcgggatcgcgaacgagaaggagatcgcgacagggagcgggagcgcgctcgcgaacgggagagagaccaatccggtggcaggcccaatccctgggcttccaatgcaccctggtcgaacaatggcaatcctggtggcaatggcaatggatccaatggctttagcaacaatggcgcggaaagtttcaacgaccgggatcgcggtggcggtggccaacgtcgccggcgtggcatcaacaactccggtcctggcaacggcggtggaagtggtggaggaggtggcgggggcagtggccgaaatcgcggtcgcaacaacaacagacgttactaatcgctatcccaccaacactgttttctgccaatctcctttgcatcttttgctttgtaatgctgaaatcaatttatattatgaaaagaaaagaaaagaaattcggtttgtaatatattatacgtgttgtgtgtaattttccgactttttttaagagttttttacaatggagtctctggaataggaattttacttacatggatatttgtttctctaggaataatcaagatttaacattttattctggttttcgaaccatttaggttgaagatgaaagttagcattttaggtactgtattggcagttcttttaattaattccgataattacaatttgatgttttagtaaatgatgagatactttgcacaaattcgctaacttaattttaataaaactgaaaatacacaagacaagtgtagttggagaacaactttgatttactttattaatggaactcctactaacaacgaaactagtgaatacgtttcagacagcaagtgagttgcgacgactgctgcggctactgatgctgccacgtctttcgctggcttcgccttgcggttcggcgtccatgtggttgctgctgtggctgttggtacgtgggtgtctgaacttctccttgatctcacgctcctcctcgcgcattcgatccttggtgtgctggtcgatggtgcgctgtattttctcggcagaagccaccagcttgtcggcctccaggatgacttctttcggcgtatggctgcggcttctgctgttactgcgactgctacgatgtcggccccggtgatcccggcgggagctagattgcctgcgggagtgcgagcgtgatcgcgaccgggaatagctgctggaacgagatcggcgcgtagacgccagctttcgattcttgcgctgtgacggcgttttgctgcggctgcgggaggatctgctgtggctgcgcctgaaagcaattgaatattcgggaacattaatagtaaaaattaaaaaaaaggtaagcgaaggaactgggaaggtcctttattttaaatttacctggatctcgatgagtaagatgactttcggtagtgggagcgacttcgtgacttcgagcgcctggaacgacaaacaattctatatttttaatagtaatctatagagattataagcatcacgcattaattaccggcgtccccgggagcggcttcgactccttgaatacgacgatgaggaacgcgacctatttctgaaaatcacaaagtgtaaaaaaaaaaacatttgacttaagtgtaacacaaactttatgctggattcgtacctcccccgcgaagaccggtggtagtagccattctcgttctcgtcgtcgtagcgatcgtgcttcgtgttgtaatacgtgtcatatccggaacgactccctcttatgccgatgccacgacctcttccacgaccgcgaggtctcggagcaaagccacgataattgcttgagactgggaacggtgcaggtggccgataaagcgctccggtaaaaactcccggcaggccgtatccgaacatcgaaagcgactgcatccattcgctggcaaccttagcactgtaacctcctggtcccggaaccgcgccagcggccattgcggccaccgcattcaaagggttcagagcagagttgacatcgcctggtggcgcagattctgttacgccgtttcccattttgtgtcgcttactggccgccgcttcgtcttcgctgctggcgtctacgggcacagcgctcttcttgcttttgctcttcagaaggcccaaaagaggagtattgctttttatttcctgtacgattttgcgctgatcacaaacaagtttctcagtggcagccttgtacttttcgaccagacgaccacgttggatgtccttgtcatcatcttgtttgactcgccggtttttgtccctttgttttagctgtattaaagaataaaatataaaaaagtattattatcactgctgtacttttaaaaagaaaacgaatttttcgatatttcatttaacttttcatttaaaatacaacattgacttttaggttttaacttttgcccacctgtatccgctcaaatagtttttccagagtccgtatgctctccagcttgcgctgcgctatcatcagcttgcgctcctcgatgcgaatcttttgcgagatctccacttggccgcgctcctggatctttttcatgtgcttttctttgcgtctttcttcgcgttcacgctgcttttccgcttccgcttttttcaactcttcttgcttttgcctgtaatttttttgcaatgttgcgtgttttgttttgcttttgatatatttgttatgcataataaatatttgttaactgttcgtctagaagatacagagaacggttggcttaaggctcgcctcgaccagcggccgccaggtgagaagcaaaaataagtaaatgtaaaatggctggatatgaaaacagtagaaaggcagccatactaaacgcgatatatttcaatttctaattctaatataagtcaatggtaatcaactttcttctaaggtacataagtatgtactgaagatcagtaagttagaataaaaattaagatttaagcagatctgatagatgcattgccatttggttactgtattcgttttccggcctaaaaagttatcaaacctttcgcgatccaattcctcttcctgctgttttttaagtttttcccgctcctcgtcctcggccttggctttcgcgatgaactttttccgaatccgttctcggcgctgtatgttcgagtcactgagatgcttctgtttgtcgaagctcacacaaatgttgatggcttgagtcttgtccacaaactttcggaccaacttattgcccctgaactcgtccatggcccggacgaagcttgagtactcctcgaactgaacatatctgtccaaaaaaagtgttagctacacgaacttagtattcgtatcttattcgaaacttacccttcgaatagaacatcctgctcgaagctaaacgtccgcatgccgttaatgtccgcctgcatgctctttcggtacggatcacagataggtatgtcaaccatccggacgcgtccgaacttttcaaagattcgcttaaagatgttctcgctgggcttgacgttctcctcgtgctccgagtgacgcggacagaaccaacgcatgggcagatggctgatgtgaatggtgtccggacgttcgccggccttcatttcatccatgtttctggcatcccggaagtatgagtcccagtcgtgtcgcgttggaaagtcatccttagactcggcacaacgcactcggaaggactcactaaagccggagatgcgtagagaaatgccgtccaatcgttggatggccgccctaagacgtttccgctcgtccagctcagcttccaatcggatggtgtttacagtgcttttcgagacctgttcgggcatacagataatggaaattcgattcaaattatatgaagtggatgcgtatccatacttacatttctagatattttgtttaaattaaataaatgttatttttgtgtgtagtttggcatgcacagagttaagataagattattaacttactttgagcaggagaaacttgtccggcttaagctcggcgcccagtttgtccattatctccaggttagatacggatttgccggacttgatcgtcggcagcgacacggagatttgcattttggccagcggcttgaggtacaagctgtgcggcaagtaaaaaggaatgcagtctgccacattttctatagtctggatgtgggtcattttgaaaaagtgttttttttcggtttttcgtttcgaaacagtgcaatgtaatgaggcaaaatacagaaagtaatatttgtgtgtctattaccaagtaagactcccaagcatagagctagaccctaaggagacatcccaagaatcgcccaggataatgcaaaaggaaaatgccgcccgtgtcccttgcgtagatgagtgtttcatgagtgtgggtgtgagtgtgaatgtgtctagatgagaatggggg

SEQ ID NO: 3551 - DNA, 2398 bp, DROSOPHILA
cccccattctcatctagacacattcacactcacacccacactcatgaaacactcatctacgcaagggacacgggcggcattttccttttgcattatcctgggcgattcttgggatgtctccttagggtctagctctatgcttgggagtcttacttggtaatagacacacaaatattactttctgtattttgcctcattacattgcactgtttcgaaacgaaaaaccgaaaaaaaacactttttcaaaatgacccacatccagactatagaaaatgtggcagactgcattcctttttacttgccgcacagcttgtacctcaagccgctggccaaaatgcaaatctccgtgtcgctgccgacgatcaagtccggcaaatccgtatctaacctggagataatggacaaactgggcgccgagcttaagccggacaagtttctcctgctcaaagtctcgaaaagcactgtaaacaccatccgattggaagctgagctggacgagcggaaacgtcttagggcggccatccaacgattggacggcatttctctacgcatctccggctttagtgagtccttccgagtgcgttgtgccgagtctaaggatgactttccaacgcgacacgactgggactcatacttccgggatgccagaaacatggatgaaatgaaggccggcgaacgtccggacaccattcacatcagccatctgcccatgcgttggttctgtccgcgtcactcggagcacgaggagaacgtcaagcccagcgagaacatctttaagcgaatctttgaaaagttcggacgcgtccggatggttgacatacctatctgtgatccgtaccgaaagagcatgcaggcggacattaacggcatgcggacgtttagcttcgagcaggatgttctattcgaaggatatgttcagttcgaggagtactcaagcttcgtccgggccatggacgagttcaggggcaataagttggtccgaaagtttgtggacaagactcaagccatcaacatttgtgtgagcttcgacaaacagaagcatctcagtgactcgaacatacagcgccgagaacggattcggaaaaagttcatcgcgaaagccaaggccgaggacgaggagcgggaaaaacttaaaaaacagcaggaagaggaattggatcgcgaaaggcaaaagcaagaagagttgaaaaaagcggaagcggaaaagcagcgtgaacgcgaagaaagacgcaaagaaaagcacatgaaaaagatccaggagcgcggccaagtggagatctcgcaaaagattcgcatcgaggagcgcaagctgatgatagcgcagcgcaagctggagagcatacggactctggaaaaactatttgagcggatacagctaaaacaaagggacaaaaaccggcgagtcaaacaagatgatgacaaggacatccaacgtggtcgtctggtcgaaaagtacaaggctgccactgagaaacttgtttgtgatcagcgcaaaatcgtacaggaaataaaaagcaatactcctcttttgggccttctgaagagcaaaagcaagaagagcgctgtgcccgtagacgccagcagcgaagacgaagcggcggccagtaagcgacacaaaatgggaaacggcgtaacagaatctgcgccaccaggcgatgtcaactctgctctgaaccctttgaatgcggtggccgcaatggccgctggcgcggttccgggaccaggaggttacagtgctaaggttgccagcgaatggatgcagtcgctttcgatgttcggatacggcctgccgggagtttttaccggagcgctttatcggccacctgcaccgttcccagtctcaagcaattatcgtggctttgctccgagacctcgcggtcgtggaagaggtcgtggcatcggcataagagggagtcgttccggatatgacacgtattacaacacgaagcacgatcgctacgacgacgagaacgagaatggctactaccaccggtcttcgcgggggaggcaatctagctcccgccgggatcaccggggccgacatcgtagcagtcgcagtaacagcagaagccgcagccatacgccgaaagaagtcatcctggaggccgacaagctggtggcttctgccgagaaaatacagcgcaccatcgaccagcacaccaaggatcgaatgcgcgaggaggagcgtgagatcaaggagaagttcagacacccacgtaccaacagccacagcagcaaccacatggacgccgaaccgcaaggcgaagccagcgaaagacgtggcagcatcagtagccgcagcagtcgtcgcaactcacttgctgtctgaaacgtattcactagtttcgttgttagtaggagttccattaataaagtaaatcaaagttgttctccaact

SEQ ID NO: 3552 - protein, 693 aa, DROSOPHILA
MTHIQTIENVADCIPFYLPHSLYLKPLAKMQISVSLPTIKSGKSVSNLEIMDKLGAELKPDKFLLLKVSKSTVNTIRLEAELDERKRLRAAIQRLDGISLRISGFSESFRVRCAESKDDFPTRHDWDSYFRDARNMDEMKAGERPDTIHISHLPMRWFCPRHSEHEENVKPSENIFKRIFEKFGRVRMVDIPICDPYRKSMQADINGMRTFSFEQDVLFEGYVQFEEYSSFVRAMDEFRGNKLVRKFVDKTQAINICVSFDKQKHLSDSNIQRRERIRKKFIAKAKAEDEEREKLKKQQEEELDRERQKQEELKKAEAEKQREREERRKEKHMKKIQERGQVEISQKIRIEERKLMIAQRKLESIRTLEKLFERIQLKQRDKNRRVKQDDDKDIQRGRLVEKYKAATEKLVCDQRKIVQEIKSNTPLLGLLKSKSKKSAVPVDASSEDEAAASKRHKMGNGVTESAPPGDVNSALNPLNAVAAMAAGAVPGPGGYSAKVASEWMQSLSMFGYGLPGVFTGALYRPPAPFPVSSNYRGFAPRPRGRGRGRGIGIRGSRSGYDTYYNTKHDRYDDENENGYYHRSSRGRQSSSRRDHRGRHRSSRSNSRSRSHTPKEVILEADKLVASAEKIQRTIDQHTKDRMREEEREIKEKFRHPRTNSHSSNHMDAEPQGEASERRGSISSRSSRRNSLAV

SEQ ID NO: 3553 - DNA, 4622 bp, DROSOPHILA; identical to SEQ ID NO: 3550

SEQ ID NO: 3554 - DNA, 1998 bp, DROSOPHILA
tacacacaaaaataacatttatttaatttaaacaaaatatctagaaatgtctcgaaaagcactgtaaacaccatccgattggaagctgagctggacgagcggaaacgtcttagggcggccatccaacgattggacggcatttctctacgcatctccggctttagtgagtccttccgagtgcgttgtgccgagtctaaggatgactttccaacgcgacacgactgggactcatacttccgggatgccagaaacatggatgaaatgaaggccggcgaacgtccggacaccattcacatcagccatctgcccatgcgttggttctgtccgcgtcactcggagcacgaggagaacgtcaagcccagcgagaacatctttaagcgaatctttgaaaagttcggacgcgtccggatggttgacatacctatctgtgatccgtaccgaaagagcatgcaggcggacattaacggcatgcggacgtttagcttcgagcaggatgttctattcgaaggatatgttcagttcgaggagtactcaagcttcgtccgggccatggacgagttcaggggcaataagttggtccgaaagtttgtggacaagactcaagccatcaacatttgtgtgagcttcgacaaacagaagcatctcagtgactcgaacatacagcgccgagaacggattcggaaaaagttcatcgcgaaagccaaggccgaggacgaggagcgggaaaaacttaaaaaacagcaggaagaggaattggatcgcgaaaggcaaaagcaagaagagttgaaaaaagcggaagcggaaaagcagcgtgaacgcgaagaaagacgcaaagaaaagcacatgaaaaagatccaggagcgcggccaagtggagatctcgcaaaagattcgcatcgaggagcgcaagctgatgatagcgcagcgcaagctggagagcatacggactctggaaaaactatttgagcggatacagctaaaacaaagggacaaaaaccggcgagtcaaacaagatgatgacaaggacatccaacgtggtcgtctggtcgaaaagtacaaggctgccactgagaaacttgtttgtgatcagcgcaaaatcgtacaggaaataaaaagcaatactcctcttttgggccttctgaagagcaaaagcaagaagagcgctgtgcccgtagacgccagcagcgaagacgaagcggcggccagtaagcgacacaaaatgggaaacggcgtaacagaatctgcgccaccaggcgatgtcaactctgctctgaaccctttgaatgcggtggccgcaatggccgctggcgcggttccgggaccaggaggttacagtgctaaggttgccagcgaatggatgcagtcgctttcgatgttcggatacggcctgccgggagtttttaccggagcgctttatcggccacctgcaccgttcccagtctcaagcaattatcgtggctttgctccgagacctcgcggtcgtggaagaggtcgtggcatcggcataagagggagtcgttccggatatgacacgtattacaacacgaagcacgatcgctacgacgacgagaacgagaatggctactaccaccggtcttcgcgggggaggcaatctagctcccgccgggatcaccggggccgacatcgtagcagtcgcagtaacagcagaagccgcagccatacgccgaaagaagtcatcctggaggccgacaagctggtggcttctgccgagaaaatacagcgcaccatcgaccagcacaccaaggatcgaatgcgcgaggaggagcgtgagatcaaggagaagttcagacacccacgtaccaacagccacagcagcaaccacatggacgccgaaccgcaaggcgaagccagcgaaagacgtggcagcatcagtagccgcagcagtcgtcgcaactcacttgctgtctgaaacgtattcactagtttcgttgttagtaggagttccattaataaagtaaatcaaagttgttctccaact

SEQ ID NO: 3555 - protein, 558 aa, DROSOPHILA
MDEMKAGERPDTIHISHLPMRWFCPRHSEHEENVKPSENIFKRIFEKFGRVRMVDIPICDPYRKSMQADINGMRTFSFEQDVLFEGYVQFEEYSSFVRAMDEFRGNKLVRKFVDKTQAINICVSFDKQKHLSDSNIQRRERIRKKFIAKAKAEDEEREKLKKQQEEELDRERQKQEELKKAEAEKQREREERRKEKHMKKIQERGQVEISQKIRIEERKLMIAQRKLESIRTLEKLFERIQLKQRDKNRRVKQDDDKDIQRGRLVEKYKAATEKLVCDQRKIVQEIKSNTPLLGLLKSKSKKSAVPVDASSEDEAAASKRHKMGNGVTESAPPGDVNSALNPLNAVAAMAAGAVPGPGGYSAKVASEWMQSLSMFGYGLPGVFTGALYRPPAPFPVSSNYRGFAPRPRGRGRGRGIGIRGSRSGYDTYYNTKHDRYDDENENGYYHRSSRGRQSSSRRDHRGRHRSSRSNSRSRSHTPKEVILEADKLVASAEKIQRTIDQHTKDRMREEEREIKEKFRHPRTNSHSSNHMDAEPQGEASERRGSISSRSSRRNSLAV

SEQ ID NO: 3556 - DNA, 3054 bp, DROSOPHILA
tctcacgttgcgctatacaatcataatacggaatacaaccctccatgtagtacgagagagtgatgtatccctaaataacttattaaataaataaattataaggatctagaattttttatgttatgtgatttctgacgatatatagataagccaaatgagcaattattgtaggataacacacggtgacaccaggaaaatactatataccgcacactttaatatatttacagaatttatttaaaatattaaaattaactggtgaccgatcataaccagtaaaaggtagagcaactactataggttttgcgaacaagttaaattttccgataaacaatagcttaaagaaaatttggttcactagctccattcgaacaattattcttaaaaccattaaaggttttttcttttttttaaatttcacatgagagcaaataaaaaatcggttaaaagtcggttgagaatgcttggtactatttctaaatatatattatatataaattatatatattatattatattatataatattatatatattattatatattatattatatatattatcttatattatattatatatattatattatattatattatatatgttttatatatattatatataaattaaaaatggtatcatacatttgtatcggaccatctaaaaccgttttcaataagtttgtataataagccagtgggtaagacatgaaatataataacttaaaggtattgttcacagtctgggaaaatttcgtacgtctgtaggatcgcgagttttaacgggatgagaagaaaacaaattgtatagttctgttgtggtatgagatgttaatttggttgaagtgttattgtagaatatggtataagttccacagttggttgctgctatatgcgttgttaaaatgttaataaggctcatctctagcgattgagttggcaaaaacatgtagctttgatggtattatgctcattaaaattaagttgggcaatcatggctgaggagacaataattctcattttattagtgttggttatgcttgtggggtcttatttggcagggagcataccgatgctgatgaaattaagcgaggtcggtactaaacaatggcattttaaatacaaaaaaaatttaatgtgaggtatttggagcaccactagtgcattaatttgttctacttaataaatgtcattaaaggaaaagctaaaatgtgtcactgtgctgggagctggattgttagtgggaactgctctcgttgttattattccggagggcattcgatcattgtatgtggggagtggccaatcccaaaaacggacatcagttccggagcaaccagattactcacagaccattggactttctcttgtgcttggatttgtcttcatgatgttggtggacatctctcagcggaagagtaatgttggaagtaataaaaaaaacaatgccacactaactcttggattggttgtgcatgccgcaggtaaagaagcttatattggtgtacccaccatatcttaaaaattgttgttcttttgcagctgatggagttgcattgggagcagctgccaccactagccatcaagacgttgagataattgtatttttagctataatgcttcataaggcaccagcagcatttggattagtgacattcttactgcacgaaaaagtagacagacatcaaattcgcagacacctagtcttattttccctgtcggctccccttatgactattttaacgtattttgggatcggacaggagcagaaggacacgttaaattccgtgaatgccactggtatagctatgctattctccgctggaacatttttgtacgtagcaactgtgcatgttttaccagagcttacccaagggggatttacgaaaagcgatcagcatgattattgtttgctagaggaatctcgaggtgttgctacgaatgatataaatggaagcaatagtattcaagcactaaaatatagtgaattggtaattctgatttgcggcgcactgctacccctaattataacatttggacataatcactagtaatgtagtaatacatatatttttgtcaaataagatgaagtaaaagttaagggatattaagctataaatatattgggtttaatttctcggatatacaattattaacattaagtgctttgcacaaagattttgaatttaatgaattgtcgcatgaaagtcaaatttggtaccgacgtcaacttttgtcagctttctgtaaagttgagtgatttgagaggccttatacgagaatgtattgtgagtaaaccaagcaaaatgaggaaggtcaaaaagtagtgcaagaaatattttactttaatatttagacttgcgcaggcaggaatagtacgcaagtcggcgccgaattcattggcatcagaattttgactccggctcctatatactatatgttaatttataattatatatgtttttattgtatttaataacaatggatagtttacgttctcagaatggtagtaaaaagtaagagacggtttaaaggcagcttggcaatgtcaccattggtttactggataacgtcttctgttacggccttagattacggatttctataactacttctgctatgactttctacatttatagatacctttctgcgtcttttctactttaattctgctcaacttctttgcggaatatttttcgcgcgttctttatttccgctgttcttgtcttgtcttgtaaatatgaatcatatcttagcaaagatctttaaaaacttctttggctataaatgatgtgtattatgggcacttctcttctactagaacgtgaaaaaaactgtttcccaaaatcacgacgacaaatagctttgctgactgcagttttaggcagttttttaaaccatggcgttaagttgatccatctttgtttttgactatgacgagtctgctggcgaaattcggcgccgacttgcgtactattccttttcgttgccattccgaaacctgatctcgattctcttctccttgggcacaatcgacaaaatttggtaaaa

SEQ ID NO: 3557 - DNA, 891 bp, DROSOPHILA
gctgaggagacaataattctcattttattagtgttggttatgcttgtggggtcttatttggcagggagcataccgatgctgatgaaattaagcgaggaaaagctaaaatgtgtcactgtgctgggagctggattgttagtgggaactgctctcgttgttattattccggagggcattcgatcattgtatgtggggagtggccaatcccaaaaacggacatcagttccggagcaaccagattactcacagaccattggactttctcttgtgcttggatttgtcttcatgatgttggtggacatctctcagcggaagagtaatgttggaagtaataaaaaaaacaatgccacactaactcttggattggttgtgcatgccgcagctgatggagttgcattgggagcagctgccaccactagccatcaagacgttgagataattgtatttttagctataatgcttcataaggcaccagcagcatttggattagtgacattcttactgcacgaaaaagtagacagacatcaaattcgcagacacctagtcttattttccctgtcggctccccttatgactattttaacgtattttgggatcggacaggagcagaaggacacgttaaattccgtgaatgccactggtatagctatgctattctccgctggaacatttttgtacgtagcaactgtgcatgttttaccagagcttacccaagggggatttacgaaaagcgatcagcatgattattgtttgctagaggaatctcgaggtgttgctacgaatgatataaatggaagcaatagtattcaagcactaaaatatagtgaattggtaattctgatttgcggcgcactgctacccctaattataacatttggacataatcactag

SEQ ID NO: 3558 - protein, 283 aa, DROSOPHILA
MLVGSYLAGSIPMLMKLSEEKLKCVTVLGAGLLVGTALVVIIPEGIRSLYVGSGQSQKRTSVPEQPDYSQTIGLSLVLGFVFMMLVDISQRKSNVGSNKKNNATLTLGLVVHAAADGVALGAAATTSHQDVEIIVFLAIMLHKAPAAFGLVTFLLHEKVDRHQIRRHLVLFSLSAPLMTILTYFGIGQEQKDTLNSVNATGIAMLFSAGTFLYVATVHVLPELTQGGFTKSDQHDYCLLEESRGVATNDINGSNSIQALKYSELVILICGALLPLIITFGHNH

SEQ ID NO: 3559 - DNA, 4752 bp, DROSOPHILA
tctcgatggcatgaaagatggcagtgcagccctgattatccacagcatcgaaactagcatccttaataagcagacgcacaacgccggcaaagccattttggcaggcgaacataaagggtgtcattccatatttttccgaaacattgatcacggctccgtgccgcaagagcaggcccacaattctctccgccaggcacggatccttgtgggtggtattgcaggccatcatcagcggcatcaaggaatccagctgccgattcacgttggcccctgccctttccagcagccattcaactattttgtagtggccctcgcgacaggcgagcatcagtaagttaagaccaccttttactggctgatccacttggaggacgagtttgcgcatctcctcctgcatcgtcttgagatccccagcgacgactgcatcgtagagcttttgctcgggatccacgtaaggagctggtttcgagcgtttcacctatacagaaattactcaagtcacccaaggaacaccagaaggaacagaacaaggaacacataccttatccgagaagtagaatccatcgtagctgctatcagagtcggaatctgggggcggtccgtatttgcaaaggttgctcatcatacaggtacttatataaacctaatttagcagtttaagcacacaacaattgtggccaaattcaggaaaaaggcgaaaggaggaaaatggcaaacaaaactagtgaggggaggcgaggttctgaaaaagtttgcacaatcgatttttatcgatatcatggcgcgctttttaaactaagctaaattaagataaccgaaactaatttaagcaatagtaaatttgcagttatattagaaagtttaacactctgattatgcagattcgcaattttgttttgaggtgtcatatgtttaaagcaaattaaaaaaattaaatgccttaaagaagaaaaagttttattttacaagtatacgatttaacatagcgtagtttgcagctctacttctttttatccttcttggcgtgacgaggtcctccgaagttcttgcccttgttgaacttattctttcccgccttgtttgtcagcttcacactgctcgcctttttcttagcagcgatcttggtcatctttttgtgccgattggcctcggacctggaaaagggtgtacaaaattagaacaactatcaacgaaaagcgagaaagagctactcaccttagacgcagagctccgccacgacttacatcggtcaagtcgttagtaaatgccgactgaccgccgcgtcgcttgggtttgccgtcggaggcaccgcttctgtgaacttcggtggcggctcctagtttgcccggacgtttgcgcagcttggccatcttggcgcgcacaagggacaccttctcgatctccttcatggctcgctctttggccagctgctccggtgtcttctttcgaggctcctccttcttcttcttgttgcgctttgcctcgagatccttgaccggtggtccatcctcgccatcgcctccgtactcgggtcgcttacgctttccggccgtttttcccttaccctttccaccagatgctttatcctcgtcgccggttgtcaacgctaagcgatccttctccgcctcgcgttgctgtttcgtctggaaccaaccacgtcgctcgttggtctgtcccagcagctttcgctccgttttggagagctgttgctccgttttggctagctgccgttcagcctgctcttcgtccagaatgttttctacaaaacaatacatttacatccgcaaattaagaaaatgttacatttatataaacttacgaatctctggctccaagcttgtaagtttgttgcgatatttttcaataatctctggcggaataatacgattcttaatggtactctccgcattcttgataatgtccttaacgatcttgcgctccttttcaccggccagggaaacggatataccagcacgcccagctcgagccgtacgacccactcgatggatgtagtgctctgtggtgatgggcatcacaaagttgattaccgtttttacgcccacaatatcgagaccacgagcagctacatctgtggcgataagcacatcaatctgctcctccttgaacttcttgagggactccagacgctgttgctgggtgagattgccatgcagttcgccggcccggacgcccaagagacccaataaaatgtgcagtcgatgggcctgctttttggtttgcacaaataccatgcaatgatcatggaacgtcctgcaaatcaaactagccagaatgggttcacggtcgccctccttatcctcacgtatgcgaataaattcctgacgcagattgaaggccacttgctggttgttgttgacgaacaccttgatgggcttgtccagcgatacggcggccagatctttgacctgctcgctcattgtggcggagaacaacatggtctgacgtgtcttacagcaggagttgatgatctccttcatctgttcggcgaagtactcgtccagcatacgatcggcctcgtccagaatgagaacctgttcgggatatcaaaagatatttaagttattcaggtaaagtaaacgtaggaaacacaatgcctgtggaatcagcttgcatctgccgcgcagaagcaagaaccaggttatcctcttagctccgcaaagagctcagagcgcaaggatggagaatcatcaacttaaattcacctcgatttcttacctcaatggaatccaatgtaaaactgggcgtatttttaatgtgatcgattagacgacctggcgttgcaatgacaatgtcgggattctggcgaagtactgcctcctgagccttcacatccagaccaccaattgccagacccacatcaatagtggtgaactggcacaattgctttgtcacctggtaaacctgggcgcccagctcacgagtgggcacaagaaccagtaccctggtgatggccttgttgttaagaggacgatacagcaaacgttctagagtaggcaacatataagcagcagttttgcccgttcccgtggcagcacagccgcagatatcgcgacctagcaaagccacaggaatcgtagaggcctggatcggcgtaggatatatgtaccccagcacaccgatggcacgcatcaggggacgtgaaaggttcatttggtagaaggaagtgatctgctcgttcgcctctacagtgtcggcgaactgcatcttctcgccctcgtcctcttcatcctcctctccagccttcttcttcttttttttggattccttcttctcccttagccgcaggttgtcatgcttcaattcgtcctcggagagatctatctcacttccatcgctctgctccgcggccacagcttcggcgccaccccgcttttgcagccgggcggcgatcttgtcgtcggtctttgtgcgcgcctttcgcttcacgtacttcatcaggtcgtcccaagtgtcctggttgtactccttcactgaggacacgaactcgaagcccttctcaaactccgtcaccttcttgtgtctcagttttgtgggttggtactgcggaggcactcggaactcagttttgctatcgtttttaaaagtgtgagcaacctacctcgacctccgcatcggagtcctccgacaagttctccacctcggcatcgtcttcgatggtgcctatcaagtccaggttcttggttgcacccatttttgaagcaaagaactattcaaaactccaccagcgcgtgtttacaatttaaaacacacgtgtggcgtgttagagatgggcgaaccggtggtcaaatcatcgtttgcaagcgtgggtggaatttgtggaaatattagtttgttgctcttttaatgttaagtaatttcaaataaccataaacataagtttactaagtaaaatcaacatattattttcatcataattgatattttactttgtttttcaagccatcaatacatcacgaaattgcgtgccggcgatagctctcatctctaaatcgtcagctgtttaaccaattttgttatgaaatttgcttgagtttcccatcgaaaatgctgcgtttgcttacaaaaacaagggtgctgcggtgagttattataatgatacaatacctagtcagcagtagtaacaataggctctcttcgtagccaactgatgccagcgacaggcgccactccacctgcatcccgcttctatgcgaagaaccaaggagcagccagccaaaaatcggatgacgacatggtcagcgatgagcccatcaagtttttcggcagccaggcggccacttggcgcgccaaggacacccgcagtggtggcagcgacgagaccctttggtaccaaccctacgtaatctccgccagcctggccatcttcctcctgtacttctgtgcgctgcgcgaggagagcgacatcgatctccggttggagggcaacttgtacgagcatgtcagtggtctggaggaggtgcagctgactgtcaactacaggtacaacaaggaacacggactggacaccaaggagcaggagagacggctcagggaactgggcgttgatctgggccagttggatgccaagttggccgcccagtagtcgtagggttggtttgttgtacgtttttgtttcgttaagtgaaattaaacatttttaataactagaagatgtatgtttctaccagggtaaattatttattaatcttttttaatggcttggtgatatttgcaatcaatttttggttgttt

SEQ ID NO: 3560 - DNA, 2389 bp, DROSOPHILA
cacgcgctggtggagttttgaatagttctttgcttcaaaaatgggtgcaaccaagaacctggacttgataggcaccatcgaagacgatgccgaggtggagaacttgtcggaggactccgatgcggaggtcgagtaccaacccacaaaactgagacacaagaaggtgacggagtttgagaagggcttcgagttcgtgtcctcagtgaaggagtacaaccaggacacttgggacgacctgatgaagtacgtgaagcgaaaggcgcgcacaaagaccgacgacaagatcgccgcccggctgcaaaagcggggtggcgccgaagctgtggccgcggagcagagcgatggaagtgagatagatctctccgaggacgaattgaagcatgacaacctgcggctaagggagaagaaggaatccaaaaaaaagaagaagaaggctggagaggaggatgaagaggacgagggcgagaagatgcagttcgccgacactgtagaggcgaacgagcagatcacttccttctaccaaatgaacctttcacgtcccctgatgcgtgccatcggtgtgctggggtacatatatcctacgccgatccaggcctctacgattcctgtggctttgctaggtcgcgatatctgcggctgtgctgccacgggaacgggcaaaactgctgcttatatgttgcctactctagaacgtttgctgtatcgtcctcttaacaacaaggccatcaccagggtactggttcttgtgcccactcgtgagctgggcgcccaggtttaccaggtgacaaagcaattgtgccagttcaccactattgatgtgggtctggcaattggtggtctggatgtgaaggctcaggaggcagtacttcgccagaatcccgacattgtcattgcaacgccaggtcgtctaatcgatcacattaaaaatacgcccagttttacattggattccattgaggttctcattctggacgaggccgatcgtatgctggacgagtacttcgccgaacagatgaaggagatcatcaactcctgctgtaagacacgtcagaccatgttgttctccgccacaatgagcgagcaggtcaaagatctggccgccgtatcgctggacaagcccatcaaggtgttcgtcaacaacaaccagcaagtggccttcaatctgcgtcaggaatttattcgcatacgtgaggataaggagggcgaccgtgaacccattctggctagtttgatttgcaggacgttccatgatcattgcatggtatttgtgcaaaccaaaaagcaggcccatcgactgcacattttattgggtctcttgggcgtccgggccggcgaactgcatggcaatctcacccagcaacagcgtctggagtccctcaagaagttcaaggaggagcagattgatgtgcttatcgccacagatgtagctgctcgtggtctcgatattgtgggcgtaaaaacggtaatcaactttgtgatgcccatcaccacagagcactacatccatcgagtgggtcgtacggctcgagctgggcgtgctggtatatccgtttccctggccggtgaaaaggagcgcaagatcgttaaggacattatcaagaatgcggagagtaccattaagaatcgtattattccgccagagattattgaaaaatatcgcaacaaacttacaagcttggagccagagattcaaaacattctggacgaagagcaggctgaacggcagctagccaaaacggagcaacagctctccaaaacggagcgaaagctgctgggacagaccaacgagcgacgtggttggttccagacgaaacagcaacgcgaggcggagaaggatcgcttagcgttgacaaccggcgacgaggataaagcatctggtggaaagggtaagggaaaaacggccggaaagcgtaagcgacccgagtacggaggcgatggcgaggatggaccaccggtcaaggatctcgaggcaaagcgcaacaagaagaagaaggaggagcctcgaaagaagacaccggagcagctggccaaagagcgagccatgaaggagatcgagaaggtgtcccttgtgcgcgccaagatggccaagctgcgcaaacgtccgggcaaactaggagccgccaccgaagttcacagaagcggtgcctccgacggcaaacccaagcgacgcggcggtcagtcggcatttactaacgacttgaccgatgtaagtcgtggcggagctctgcgtctaaggtccgaggccaatcggcacaaaaagatgaccaagatcgctgctaagaaaaaggcgagcagtgtgaagctgacaaacaaggcgggaaagaataagttcaacaagggcaagaacttcggaggacctcgtcacgccaagaaggataaaaagaagtag

SEQ ID NO: 3561 - protein, 782 aa, DROSOPHILA
MGATKNLDLIGTIEDDAEVENLSEDSDAEVEYQPTKLRHKKVTEFEKGFEFVSSVKEYNQDTWDDLMKYVKRKARTKTDDKIAARLQKRGGAEAVAAEQSDGSEIDLSEDELKHDNLRLREKKESKKKKKKAGEEDEEDEGEKMQFADTVEANEQITSFYQMNLSRPLMRAIGVLGYIYPTPIQASTIPVALLGRDICGCAATGTGKTAAYMLPTLERLLYRPLNNKAITRVLVLVPTRELGAQVYQVTKQLCQFTTIDVGLAIGGLDVKAQEAVLRQNPDIVIATPGRLIDHIKNTPSFTLDSIEVLILDEADRMLDEYFAEQMKEIINSCCKTRQTMLFSATMSEQVKDLAAVSLDKPIKVFVNNNQQVAFNLRQEFIRIREDKEGDREPILASLICRTFHDHCMVFVQTKKQAHRLHILLGLLGVRAGELHGNLTQQQRLESLKKFKEEQIDVLIATDVAARGLDIVGVKTVINFVMPITTEHYIHRVGRTARAGRAGISVSLAGEKERKIVKDIIKNAESTIKNRIIPPEIIEKYRNKLTSLEPEIQNILDEEQAERQLAKTEQQLSKTERKLLGQTNERRGWFQTKQQREAEKDRLALTTGDEDKASGGKGKGKTAGKRKRPEYGGDGEDGPPVKDLEAKRNKKKKEEPRKKTPEQLAKERAMKEIEKVSLVRAKMAKLRKRPGKLGAATEVHRSGASDGKPKRRGGQSAFTNDLTDVSRGGALRLRSEANRHKKMTKIAAKKKASSVKLTNKAGKNKFNKGKNFGGPRHAKKDKKK

SEQ ID NO: 3562 - DNA, 12235 bp, DROSOPHILA
ttgtggttggtttcgattggccaattgtgaatgcgagtcatgtttgaacatttggacttcttaatattgaactgcttctggtttagattattatcataggtacgaaagaaccaaatacttttagcagcgtgaactcattagatataataaataaattaatgtatactagtttaccttgctttcactgcctttaagaattttccattcgaataaataacgtttattttgaaacctctaagctttatctcactgcattgatgattattgaaatctgtggttaattcaatttgggatgtcccttcaccactgcagcttccaattcgtgaatttctgacgagctttatttaataagtttgcttctctcggatcttttgcaacgatgcaaacgttgctactgtcattgttaccgcttcacgatttagttttttttttttctttttccttcgccgttgcatttcattgcaccccggtttcggttggcaaacatttccacagagacaaaaaaaaaatatatatgtatatatatatgcatatatatattcacatagatgcgaaatagcgaaaaatctgtactttcattaataaagcggccttcgcgtcattgactgcaaacagtcaccattgctcacgatcaaaatcacacccatgggttttggacttaactctaataagcaacaattttataatgcaaaagactgaggaatttttatagaaaggcaccgtaattaaacgaatttttttttaattttgttgggtgttgatagagaaaaattgtaaattttacttagtaaattcccatttcgtatatttattgcagcaatgaatcaaccggtttgaagaccacatccataccgcaccactcccatcagtagtgagttccacagattgtcaacactaaagaggaagcgccggagaggaagatcgggaagagtatcgttgccacactgaactgaccggaggatagtgagtccagagcagagaacgctaacttagcggagccatggactgggccgagggtgatctggtctggttcgatccgggcatgggacatcccattcccggcgagattcaggaggtgcaccgcgctgcccaggtgattgtcgtgcaggcgctcatcaaaggcaaggtaagtgcactaaaatagctataaatgggaatgctataaattagttttagttccctatctctatgttgctacttaaaccgaagaagcatttctctcagtgcattttcgcacccttcgtaaaaaggtgcgagtttgcaccaacgtctcgtttttggttcggtttccgtagcttactgtttgaattttcaatttgttttcggtttcgccgtggcccatgaatgcttttcactattttcacccgacatgaactgtttgcccgacagtttatatttatttatttatttcggtttccacgagctaccctcgagtgtttagcaggttggtctgctatttggggtctcggaatttatggaatgtgctcgcttggatttatgtgccgatttgctgggcatgggcaaccatggagcaaacaaaatacgaacagtgtgttgggcaacgatgcccagtcggatttctttttcgaccatcggcacgtgtgcctactgtacagtgtacactgtaccatctgtgcaatgcacctaattgcaactgccagcggcagcgtttcctttttcctttctgccactcgctgcaattatgagatgtgtaccgtgtgctgagctgctgagctgttgagctggcggtatcaagattgagaactcacggcaattagtctcaagtcgtcgactgacagcacagtggagcaaaatttagaaaaacatggcatgaaaatatataatttataacatcttaaactgagagacactgagatacatactcagatacatacggcgatactaaatagtaacacaatttctttaaagggtgtgccaatgtccaaacactcgactttacggtttcttcgcgttaaaagtgaaaatcaaaacttgatgataacatttgtgggcactctttattcgtagataaacatttggcaaatgtccgatttcactgcataaaaatgcgcttattttgcagcacccaaatgtttattttgtaattttaggtatataaagaaagcaaatgggcactgaaagcgccttcctcgtgttttattttgcaaatagcaggtgcaccttaaaaaaactagctttatcacgaactataaaagctattaggtccatttacactagctgagtaaagggtatctgatagtcggggaactcgactatagcattctctcttgttttgttattctctttcttagcaaatataataatttttttgcgctctgcacagtgcttgtaatttttggtctagcggtaccagaatcagaaaaacttgccacatgtgattcgtatcctgttgcacaagagaaccagttggtagcacatgtgttgcactgggatcggccactgggccatgagaatccgcttctggaggcgtaatcgtggatgtggatcaattatcggttattttgttgcctggaacaatacaaaatgctattccttcaacagtttcttggatctgtgagattctttacagattgcagttaagcaagttttaaaataaattaaattctgattaaatactggcatttgagtcgacgtcttattcagtagcatataatattgtttttcattggttaggtaatcataatagttgtgctaaatcagcattaaatcagcaactttagcctgaaagctgtagggatatatatatcttatatatattcttgaggaatgcacagctaagtttgcgtaggttttttaaagcatacttttagttatcatttaaaaaaaaacaattgcgcgccattccctcaatcaattgacacatataatttgatgctgtcattgatacggatacccatcgatatgaatggggaagttgccgaggcgaatgcattctcagcgatccaaagaaggtatttcacggcattgttttgaccaactatcagatgacaacatcccctgccccacacgaagctgctaaaaactgaagacggtaggctgaagattcgaagactgaagattcgatgactcgaagactaaagacgtgcccaagaacccatcaagccatcgaacttgaactggttgggcctctcgtctctttggggagaaagtcccccacacacattggccgcctaattgaatggccatcgaaagactgcatcaatatcaatgcgatcgggtgtcttctttctttctttctctccttctttgcttttcctctcctcctctcaccacttgcgtattattatttttttgtggcgttctggtggcccacactactaagtagtcggtagctaacaggagtgtcatctggtctggccgggttcgatgtgatccggtctactatagccataccacaacccatacccatactgaaacccccatcttccatcgttttgaaagaacgtgtttggatgcagcgaaaaccgttttagaaacgtttggggaaattgtggcaatgaagccgccagattccgattcctttcagttgcattcgagacctcggccacaaaagtcttttgtgatactagttcttgatctcttgatctcgctgtggattcgggtttcgggcccattatttggcccagaaacgttgtcgctttgggattagtgggagttgagacttaaagaggtgttcgtcaatagatgcgcatcgtacggtttcatttggagccgtggcaacgcggcggcggaggatcggtgactcccagtccagcccaatcgccctctctggcactcctctcgccgcacgtcctgcgtcgtcagcgtcccgccagtctcgaggatttcgaagatcttccaaatctgtcggccaaacatccggctctgccctccagtcgcctgcgtcgcctcaagtgtcgatatccacaagtggtcaagcgactgtccacgctctgcagcgatgtgatagcacgccatgtgagagatatgttccatagagtttctttagaggatttcccctgggattcgcctttatatatggtttactaagcttgaactctttctaatttcatttcatcaattacagccacaaacattcgccctgcaaccaggagaaggcagcctgcgcgctcgccaggatctgggcagcagcggtgtggaggacatgaccctgctggacgatctgcacgaggcgtcgctgctgtggaatcttcgtctgcgttacgacaagggtctaatctacacattcgccggcagcatcctgatcgcggtgaatccgtacaagatgttcccggatgcctacggattggaggtggccaagcagtatgccggccgaccacttggatccctgccgccgcatctgtttgctatcggagcggctgcacatgccgcattaccatcgccgcaggtggtagtcatctccggtgagagtggctccggcaaaacggagtccaccaaattggtgatgcagtacctggcggccgtggtgcccggcggtggatccgcctcagcagtcatcaccgagcagatcctggaggctgctccgcttcttgaggcctttggcaatgcccgcaccgcgcgcaacgacaatagttcgcggtttggaaagtatctggaggtgtacttcaagagtggcgccatcgtgggcgccaagattacgcagtacctgctggagaagtcgcgtatcgtgacacaggcgccgggcgaacggaactaccatgtgttttacgaactcctaggcggactatccgaaacggagagatccaagtacggtctgctggaggcggacaagtacttctatctgaaccagggcgccaccgactgtgccagtggtcgagtggactgggagtcactgcaaggggccatgcaggttcttggagtctccgagggcgagcgagagggcatcgtgcgtgtcctggcggcagttcttcatctgggaaacgtgtacttccatcgccggcaattgagacacggccaggagggcgtggaggtcggttccgatgcagagatcaaatgggccgcccacctgctgcacattagcgcggatggactgcatcgggcattaaccagtcgcaccaccgaagctcgagcggaacgattgcacacgccacttggcatcgatcaggcattggatgcccgagatgccttcgccaaggctctctatgcgggactcttcaattggctggtctcgcggatcaattcgattgttcagaagggcggaacccacgatgcccatcgcatcagcatcctggacatctttgggttcgaggatttggcggagaacagcttcgagcagctgtgcatcaactatgcgaatgagaacctgcagctgtacttcaataagcatgtctttaagctggagcaggcggagtatgcccgcgagcgtctggagtggactccgctggcctgggacgataatctgccggtgatccatctactggccaagaagccggtgggcatttgccatctgttggacgacgagtccaatttcccgcgtgccaccgatctgagtttcctggagaagtgccactacaatcatgcgctgagcgagctatacgctcgtccgcggatcggtgcccaggagtttggggtgacccactatgcgggtcaggtgtggtactgtgtggacggtttcttggacaagaatcgcgatgcgctgaggggtgatgtcctggagctattggcctccagccggctgcccttggtgggtgagttgaccaaacagcttcgtgcccagagagacgctggaaaaactttgccaaagggcagcaatggaagattcgtcacgatgaagccgcgaaccccaacggtagcagccagatttgcggactcactgcagcagttgctccaatcgatgggcaggtgtcatccatggttcgtgcgttgcatcaaaccgaatcaggagaagcacgccctccgcatggatatgccgtgtgtgctgcaacaacttcgttacttgggcatgctggacaccatccagatccggcagcgaggctatccggtgcgcttgcgcttccagcactttgtggagcgttatcgtcacctgctgccatcgcctctggccagaggtacaccctaccgcgagctgtgccgagctctgctggaggccatgccgcgaactggtgtggaaggtccggattatcaattgggagctacgcgggttttcctgcgcgaggcattgcatcgggctctggaaagtggacgaaccgagcgtctgcgccgagcggcggtcagtgtccagaggcatgtgcgtggtatgcttgtccgccggcaattggcgcgtcgccaggcggccgccacccgtctccaggcccgttggcgaggtcagagggcacagcaacggtacgagcgtctccgcaagggagcactcactgcccagcgattgtggcgaggacgccaggcgaggaggagagtccaacaactgcgatccgatcaccgacgcaggcaggaggccagggaggcagctcagcgagctcgcgaggcacgggaggccaagcaggccgtgctggagagaagtcaacttagctacctggacataccagccgaattggcattcatctactccaaactgcagggctggtcaccgccgcacggtgatcgtcatctggtcaaggtattgggcacagttcccggtccaccgtcgtcggcagttcagctgcccgaggatttgggtcagttttcgtttggaaaattcagcagcgtgtactgcaatggcttgagattgcagccgcggagggaacccatcactgctcccctgctaacaagagctgcctcgagggatcaggacttccaggatgcattggccgtgttcaagcttatccttcgctggagtaacgataaagcattggaaggcgccaaggaaaagctattggccgactatattgtgcacaaggctttgagctccagaggattgcgggatgagattctggtgcagttgtgcaaccaagttcatggcctgccgcccaattccggagaggcaactcgactgtggcaacttttgggacagtgtctgtgctgcttccagcccagtgctgccttcagcaaatatctgatgagattcgtggacgatgaggctccagagtcactgcgtccactactgctgcgccagttgctacgccagcagggcggtggaacgtcgagcggcgcagtgggcgctggcgcctgtcggagcttcgtgcccgcctggctggagtggcgtgcctggaccagaggatgcgacatggcactaccgctaactctgccggacgaggccagtcaaacggtcgccgtcgattcgtggaccagttgcgaggaggccgcagctttagctgtttcatctttgggcgtggccagtcgtggatggaccctggtgctggacgatggccaacagctcaccgatagctgtggactagactacgtgatggatttgattgcagagaaggagctgtgccccgcatttcctgctcccaggagtgatctattgcgttctggcgccaagtttgcaagaaccactctgccggatgctgttaaacgtccagcggttccgccaccagctccacccacttccagtggcaaggaggatgtgccgcgggaacgaagaagcagccgggagctactctccagaagctcggcgctcaatgaacgctatttcgaacgtgagcccagtccgggaccgggtcagggatcgagtacgggtcaggcgaagtcgcgatccaagtcactggatgacctgctcgccggtgatattgttcccgtgccaacggattgcgattcccaggagccgttgcacacactgggtctgtcggagagtcgcctgaacgatcgctatcactcggcggagcggctggctccagtcggcaaggacacgggtcctcgttaccagaagtcccagcacgcaggacgccgatcccatgctgcctcccatggttcgcattccagtaaatatgcggacaaggccgagtatgccaccaggtcctcggccatgtccgatacgagtgaggctccatccttggcttcccatgtgaggagggtaagggtcccatcgcaggcatcagatgtggatcagttcctggacgatctatttagtccagtgctggatggttccttggatgagctatctgatgccagatccttggcagcgagcatccgaggaggcagctatgaacaagaaaatgaagcggaatcggaaatcgatgacttggatgactacatcaacgatatattccaaccgataccactcgtccagaacttggagaagctgaccagcaaggatcagttggcggctatcatcaagggtggaggagtggccagtaaacccgaggagagggatgaggaatcggaaatcgaggatctagatgactacattaatgagctctttgaacctattccagtggccgagggattagacaaactgaccagcaaggagcacctagctgttagcatccgtggaggcggcagcacggacagtaatggagccgatccgctgctccaccaactgatgcagctgcccggcgagacggagtcaggtccagcactgtatcagcagcaggtgcagcgcgccttcctgcagtctgcaatggcccagaacctgcagatccagcagcaactgctcgcccagaatcaagctctgcagacgctgcttagtcagcaggcggcagcggcggcggccaataactccacttcgccgccaccagctcctccgatcctgagtagcctttctatatcgccaccgccaccgcaatccccaatgcgcatgaaggccacccggagtagtttggtggtgatggagtcattgcaaccaccgccaccacctccaccgccgccaatgccgccgccactggaatgcaaggatccctcggagacgcgacacttcctggatccctacggcagggccaagaccgtgcgtatcggcaagtggcgctggccaccgccccaggatgagccccagttccagaccgaagaggatttcttcgccttcaagatgcgccagcaccagcgcaagacgacgccacaggctcagcatcatcagatgaccagcaatggaggtatgatggagtcgggtcctggagcacgtggtgcctcggccacggccatcgagtgggaggagttcgagatcgagagtcccacaccgccgcccatgagtggtcagctaatgaggagtagcatccgactggagacaaccacaacgacaaccacatcggcggtgaataacagggacagagaccgcgaaacccaggatgtgggacaaccgatgcagagtgtggtcaccacaaagctggccaagaagagtttcgagatcggtgcggatcgtccgccgccgggcagtgtgggtaaacttaagctcagttccgagatgcgacagcggttggagcaagtaactgctggccattcggttagatcaaccgtttccaccaagtcggagcaaagagctccggccaaactggaggacacacggaagcttatgttgcagcagcagctgggtggactctttgccagcgtgtctggtggaaattccggccctggtggagtagtcgattcccatgcaacggtgcgcacacagatcgagcggatggagggcaaactatcgccaccaccagctccgccgtcgggcggctggcctggagtgctactgccaccggctccaagtgtgccggctccgccgccacccatcagaccacccagcatggcgccacctgccccgccgccagctccccagagtccgccaacggctaggagtcccgaaccggagcccgactatcgcacctcgagcagtcaggtggtcaaggagcatgtgcccgcctttattcagcgccaggagcgcgacacattcggtgcagtgcgtcagcagcagatgatcagcagtcaccatctgcatctggaggaccactcagcctcctcctcaccggcggtggccgcctgggagcaggcggaacgggaaagatctcgcagccgaagcaggagtcgcgatcgtgaggattactcggagtcggtgtgggatcgggcggaagtggagggacccgcctccggaagtggcagtgaaaaggagcgcgagaagcgggagcgtgaacgcgagcgtctctacgagattcgccaagtggaacgggagcgggaaagccataaggtctaccagccggcgccgccgcgtgtcatccaggctagcatggacaccaccggtggccatcgccgggaggaccgcaccggcggattggccaccttccgcacccacatggcccagaagtacgaacacgagcggaagcgcaagagctcggccagctccggaatgcgcgaggagctggactcgatgcacatgaccacgccgccgcccgttattgtgccggctccggtgccaccgccttcgtcgaccagcccgggattgggtgtggtgtctggcgttctgatgggatcgggttccgggggcagcactgcatgcctgacctacaaccgggtgccgtggaagttgcgcgtgcggaaggaggtcttccagccacacgaacccatcggtccaccggtggcgctggacttgctctttgcccaggtgctgggcgacgttttcggggtgactccctgcctgcgaattacgccgcaggagaagagctccgccctgaacatgctgcacgggcatggcgtgagtgtggacacgctgtccaatcgaaacggatcgggagccggcggtggaggaaatggaggacaggtgcgtgccctggtcaagcggcatctggtggatatggctcgcgattggccgctgtatttcgctcgactgttcgccgtacaaggagcgccgctctatccggatgttagcatcatgggcgtctcgcacagtggactctacctggctcgtcgagatgccgactatctgatcgtggtgcaggccatctcctttggcgaaatccagagtgcagtcaccctgccgcgtcctgctgcactgcagctcaatctgaggaatggaaagcatctggcactccatgcagcccgcgccgccgccatccagtcgatggtcaccacttttgtccaggagttccgcaaggtaagtgcgatttatttgacaaatgttttatatgattatttaatctcacaaatctgcaagttttgtttttagttcattttattagtttttttttgcctaccaaaagtatgcaagaaatattttttaagcattcaaagctcacaagacaagcttgactgtttgatagttaaatagcaggaattatatttgcttttcaatcgaagactgcagaaatatgttttgatatcacataaatatatattttacacgaatttaaatttgctaattaaattcaaaagatatgttgacattgatatttatttataaatcacaaaaaaacacgtcttgcgccaattgcaatttttggcatagcaattattttgtatgcgactttacttcgcgtaaatagaaaaataattgcattaattgcgtgaataattgctggcatcggtcattataacgtggccttaatgaaactgctaatgtttttacggcctcaagataataatacggcagctgggcaatttcaaagtgttatttttatatcgcgcagacaaaagctgtaatatcacctcaagcataaaaacggttgactttactgatcagtatgatattttacctttaaatgttataatttattgagtatccatccacatctgttgaaaccgaaaacccaaaaaatattgataagattgttagctaggtgatatagttttttgtaaatatccgattttttgcaatattttaattttattattattttttttttttggtaaaatataatcattgttttaccgattgcgataaatatagttgtccaaatgtagaatgtcatacctcgttgaattcgttacaaaattccctatcgatctgtgtttcaagttcgaaattaaaattttttgctttttttcgcaaatttagatgaaatgtgaaaattggtcaaaatttttatttttgggaatcataaaaatagtgatagggatagttagctatgcttattggcagtgcaaaacagtctttatttcagcggtgatatattttttgaccaagttatggagaaaaccccgcatgtaaatatccgttttttgggaaattttattttttgctaaaaaataatctgtattttctcaatagcaataaaaataattgtccaaatgtggaatgtcatacctcgttgaatttgtaataaaatttcctatcgacctgtattcaaagttggaaactcaaattttttgccatttttcgcaaatttag

SEQ ID NO: 3563 - DNA, 7275 bp, DROSOPHILA
atggactgggccgagggtgatctggtctggttcgatccgggcatgggacatcccattcccggcgagattcaggaggtgcaccgcgctgcccaggtgattgtcgtgcaggcgctcatcaaaggcaagatgcgcatcgtacggtttcatttggagccgtggcaacgcggcggcggaggatcggtgactcccagtccagcccaatcgccctctctggcactcctctcgccgcacgtcctgcgtcgtcagcgtcccgccagtctcgaggatttcgaagatcttccaaatctgtcggccaaacatccggctctgccctccagtcgcctgcgtcgcctcaagtgtcgatatccacaagtggtcaagcgactgtccacgctctgcagcgatgtgatagcacgccatccacaaacattcgccctgcaaccaggagaaggcagcctgcgcgctcgccaggatctgggcagcagcggtgtggaggacatgaccctgctggacgatctgcacgaggcgtcgctgctgtggaatcttcgtctgcgttacgacaagggtctaatctacacattcgccggcagcatcctgatcgcggtgaatccgtacaagatgttcccggatgcctacggattggaggtggccaagcagtatgccggccgaccacttggatccctgccgccgcatctgtttgctatcggagcggctgcacatgccgcattaccatcgccgcaggtggtagtcatctccggtgagagtggctccggcaaaacggagtccaccaaattggtgatgcagtacctggcggccgtggtgcccggcggtggatccgcctcagcagtcatcaccgagcagatcctggaggctgctccgcttcttgaggcctttggcaatgcccgcaccgcgcgcaacgacaatagttcgcggtttggaaagtatctggaggtgtacttcaagagtggcgccatcgtgggcgccaagattacgcagtacctgctggagaagtcgcgtatcgtgacacaggcgccgggcgaacggaactaccatgtgttttacgaactcctaggcggactatccgaaacggagagatccaagtacggtctgctggaggcggacaagtacttctatctgaaccagggcgccaccgactgtgccagtggtcgagtggactgggagtcactgcaaggggccatgcaggttcttggagtctccgagggcgagcgagagggcatcgtgcgtgtcctggcggcagttcttcatctgggaaacgtgtacttccatcgccggcaattgagacacggccaggagggcgtggaggtcggttccgatgcagagatcaaatgggccgcccacctgctgcacattagcgcggatggactgcatcgggcattaaccagtcgcaccaccgaagctcgagcggaacgattgcacacgccacttggcatcgatcaggcattggatgcccgagatgccttcgccaaggctctctatgcgggactcttcaattggctggtctcgcggatcaattcgattgttcagaagggcggaacccacgatgcccatcgcatcagcatcctggacatctttgggttcgaggatttggcggagaacagcttcgagcagctgtgcatcaactatgcgaatgagaacctgcagctgtacttcaataagcatgtctttaagctggagcaggcggagtatgcccgcgagcgtctggagtggactccgctggcctgggacgataatctgccggtgatccatctactggccaagaagccggtgggcatttgccatctgttggacgacgagtccaatttcccgcgtgccaccgatctgagtttcctggagaagtgccactacaatcatgcgctgagcgagctatacgctcgtccgcggatcggtgcccaggagtttggggtgacccactatgcgggtcaggtgtggtactgtgtggacggtttcttggacaagaatcgcgatgcgctgaggggtgatgtcctggagctattggcctccagccggctgcccttggtgggtgagttgaccaaacagcttcgtgcccagagagacgctggaaaaactttgccaaagggcagcaatggaagattcgtcacgatgaagccgcgaaccccaacggtagcagccagatttgcggactcactgcagcagttgctccaatcgatgggcaggtgtcatccatggttcgtgcgttgcatcaaaccgaatcaggagaagcacgccctccgcatggatatgccgtgtgtgctgcaacaacttcgttacttgggcatgctggacaccatccagatccggcagcgaggctatccggtgcgcttgcgcttccagcactttgtggagcgttatcgtcacctgctgccatcgcctctggccagaggtacaccctaccgcgagctgtgccgagctctgctggaggccatgccgcgaactggtgtggaaggtccggattatcaattgggagctacgcgggttttcctgcgcgaggcattgcatcgggctctggaaagtggacgaaccgagcgtctgcgccgagcggcggtcagtgtccagaggcatgtgcgtggtatgcttgtccgccggcaattggcgcgtcgccaggcggccgccacccgtctccaggcccgttggcgaggtcagagggcacagcaacggtacgagcgtctccgcaagggagcactcactgcccagcgattgtggcgaggacgccaggcgaggaggagagtccaacaactgcgatccgatcaccgacgcaggcaggaggccagggaggcagctcagcgagctcgcgaggcacgggaggccaagcaggccgtgctggagagaagtcaacttagctacctggacataccagccgaattggcattcatctactccaaactgcagggctggtcaccgccgcacggtgatcgtcatctggtcaaggtattgggcacagttcccggtccaccgtcgtcggcagttcagctgcccgaggatttgggtcagttttcgtttggaaaattcagcagcgtgtactgcaatggcttgagattgcagccgcggagggaacccatcactgctcccctgctaacaagagctgcctcgagggatcaggacttccaggatgcattggccgtgttcaagcttatccttcgctggagtaacgataaagcattggaaggcgccaaggaaaagctattggccgactatattgtgcacaaggctttgagctccagaggattgcgggatgagattctggtgcagttgtgcaaccaagttcatggcctgccgcccaattccggagaggcaactcgactgtggcaacttttgggacagtgtctgtgctgcttccagcccagtgctgccttcagcaaatatctgatgagattcgtggacgatgaggctccagagtcactgcgtccactactgctgcgccagttgctacgccagcagggcggtggaacgtcgagcggcgcagtgggcgctggcgcctgtcggagcttcgtgcccgcctggctggagtggcgtgcctggaccagaggatgcgacatggcactaccgctaactctgccggacgaggccagtcaaacggtcgccgtcgattcgtggaccagttgcgaggaggccgcagctttagctgtttcatctttgggcgtggccagtcgtggatggaccctggtgctggacgatggccaacagctcaccgatagctgtggactagactacgtgatggatttgattgcagagaaggagctgtgccccgcatttcctgctcccaggagtgatctattgcgttctggcgccaagtttgcaagaaccactctgccggatgctgttaaacgtccagcggttccgccaccagctccacccacttccagtggcaaggaggatgtgccgcgggaacgaagaagcagccgggagctactctccagaagctcggcgctcaatgaacgctatttcgaacgtgagcccagtccgggaccgggtcagggatcgagtacgggtcaggcgaagtcgcgatccaagtcactggatgacctgctcgccggtgatattgttcccgtgccaacggattgcgattcccaggagccgttgcacacactgggtctgtcggagagtcgcctgaacgatcgctatcactcggcggagcggctggctccagtcggcaaggacacgggtcctcgttaccagaagtcccagcacgcaggacgccgatcccatgctgcctcccatggttcgcattccagtaaatatgcggacaaggccgagtatgccaccaggtcctcggccatgtccgatacgagtgaggctccatccttggcttcccatgtgaggagggtaagggtcccatcgcaggcatcagatgtggatcagttcctggacgatctatttagtccagtgctggatggttccttggatgagctatctgatgccagatccttggcagcgagcatccgaggaggcagctatgaacaagaaaatgaagcggaatcggaaatcgatgacttggatgactacatcaacgatatattccaaccgataccactcgtccagaacttggagaagctgaccagcaaggatcagttggcggctatcatcaagggtggaggagtggccagtaaacccgaggagagggatgaggaatcggaaatcgaggatctagatgactacattaatgagctctttgaacctattccagtggccgagggattagacaaactgaccagcaaggagcacctagctgttagcatccgtggaggcggcagcacggacagtaatggagccgatccgctgctccaccaactgatgcagctgcccggcgagacggagtcaggtccagcactgtatcagcagcaggtgcagcgcgccttcctgcagtctgcaatggcccagaacctgcagatccagcagcaactgctcgcccagaatcaagctctgcagacgctgcttagtcagcaggcggcagcggcggcggccaataactccacttcgccgccaccagctcctccgatcctgagtagcctttctatatcgccaccgccaccgcaatccccaatgcgcatgaaggccacccggagtagtttggtggatccctcggagacgcgacacttcctggatccctacggcagggccaagaccgtgcgtatcggcaagtggcgctggccaccgccccaggatgagccccagttccagaccgaagaggatttcttcgccttcaagatgcgccagcaccagcgcaagacgacgccacaggctcagcatcatcagatgaccagcaatggaggtatgatggagtcgggtcctggagcacgtggtgcctcggccacggccatcgagtgggaggagttcgagatcgagagtcccacaccgccgcccatgagtggtcagctaatgaggagtagcatccgactggagacaaccacaacgacaaccacatcggcggtgaataacagggacagagaccgcgaaacccaggatgtgggacaaccgatgcagagtgtggtcaccacaaagctggccaagaagagtttcgagatcggtgcggatcgtccgccgccgggcagtgtgggtaaacttaagctcagttccgagatgcgacagcggttggagcaagtaactgctggccattcggttagatcaaccgtttccaccaagtcggagcaaagagctccggccaaactggaggacacacggaagcttatgttgcagcagcagctgggtggactctttgccagcgtgtctggtggaaattccggccctggtggagtagtcgattcccatgcaacggtgcgcacacagatcgagcggatggagggcaaactatcgccaccaccagctccgccgtcgggcggctggcctggagtgctactgccaccggctccaagtgtgccggctccgccgccacccatcagaccacccagcatggcgccacctgccccgccgccagctccccagagtccgccaacggctaggagtcccgaaccggagcccgactatcgcacctcgagcagtcaggtggtcaaggagcatgtgcccgcctttattcagcgccaggagcgcgacacattcggtgcagtgcgtcagcagcagatgatcagcagtcaccatctgcatctggaggaccactcagcctcctcctcaccggcggtggccgcctgggagcaggcggaacgggaaagatctcgcagccgaagcaggagtcgcgatcgtgaggattactcggagtcggtgtgggatcgggcggaagtggagggacccgcctccggaagtggcagtgaaaaggagcgcgagaagcgggagcgtgaacgcgagcgtctctacgagattcgccaagtggaacgggagcgggaaagccataaggtctaccagccggcgccgccgcgtgtcatccaggctagcatggacaccaccggtggccatcgccgggaggaccgcaccggcggattggccaccttccgcacccacatggcccagaagtacgaacacgagcggaagcgcaagagctcggccagctccggaatgcgcgaggagctggactcgatgcacatgaccacgccgccgcccgttattgtgccggctccggtgccaccgccttcgtcgaccagcccgggattgggtgtggtgtctggcgttctgatgggatcgggttccgggggcagcactgcatgcctgacctacaaccgggtgccgtggaagttgcgcgtgcggaaggaggtcttccagccacacgaacccatcggtccaccggtggcgctggacttgctctttgcccaggtgctgggcgacgttttcggggtgactccctgcctgcgaattacgccgcaggagaagagctccgccctgaacatgctgcacgggcatggcgtgagtgtggacacgctgtccaatcgaaacggatcgggagccggcggtggaggaaatggaggacaggtgcgtgccctggtcaagcggcatctggtggatatggctcgcgattggccgctgtatttcgctcgactgttcgccgtacaaggagcgccgctctatccggatgttagcatcatgggcgtctcgcacagtggactctacctggctcgtcgagatgccgactatctgatcgtggtgcaggccatctcctttggcgaaatccagagtgcagtcaccctgccgcgtcctgctgcactgcagctcaatctgaggaatggaaagcatctggcactccatgcagcccgcgccgccgccatccagtcgatggtcaccacttttgtccaggagttccgcaagactgcagaaatatgttttgatatcacataa

SEQ ID NO: 3564 - protein, 2424 aa, DROSOPHILA
MDWAEGDLVWFDPGMGHPIPGEIQEVHRAAQVIVVQALIKGKMRIVRFHLEPWQRGGGGSVTPSPAQSPSLALLSPHVLRRQRPASLEDFEDLPNLSAKHPALPSSRLRRLKCRYPQVVKRLSTLCSDVIARHPQTFALQPGEGSLRARQDLGSSGVEDMTLLDDLHEASLLWNLRLRYDKGLIYTFAGSILIAVNPYKMFPDAYGLEVAKQYAGRPLGSLPPHLFAIGAAAHAALPSPQVVVISGESGSGKTESTKLVMQYLAAVVPGGGSASAVITEQILEAAPLLEAFGNARTARNDNSSRFGKYLEVYFKSGAIVGAKITQYLLEKSRIVTQAPGERNYHVFYELLGGLSETERSKYGLLEADKYFYLNQGATDCASGRVDWESLQGAMQVLGVSEGEREGIVRVLAAVLHLGNVYFHRRQLRHGQEGVEVGSDAEIKWAAHLLHISADGLHRALTSRTTEARAERLHTPLGIDQALDARDAFAKALYAGLFNWLVSRINSIVQKGGTHDAHRISILDIFGFEDLAENSFEQLCINYANENLQLYFNKHVFKLEQAEYARERLEWTPLAWDDNLPVIHLLAKKPVGICHLLDDESNFPRATDLSFLEKCHYNHALSELYARPRIGAQEFGVTHYAGQVWYCVDGFLDKNRDALRGDVLELLASSRLPLVGELTKQLRAQRDAGKTLPKGSNGRFVTMKPRTPTVAARFADSLQQLLQSMGRCHPWFVRCIKPNQEKHALRMDMPCVLQQLRYLGMLDTIQIRQRGYPVRLRFQHFVERYRHLLPSPLARGTPYRELCRALLEAMPRTGVEGPDYQLGATRVFLREALHRALESGRTERLRRAAVSVQRHVRGMLVRRQLARRQAAATRLQARWRGQRAQQRYERLRKGALTAQRLWRGRQARRRVQQLRSDHRRRQEAREAAQRAREAREAKQAVLERSQLSYLDIPAELAFIYSKLQGWSPPHGDRHLVKVLGTVPGPPSSAVQLPEDLGQFSFGKFSSVYCNGLRLQPRREPITAPLLTRAASRDQDFQDALAVFKLILRWSNDKALEGAKEKLLADYIVHKALSSRGLRDEILVQLCNQVHGLPPNSGEATRLWQLLGQCLCCFQPSAAFSKYLMRFVDDEAPESLRPLLLRQLLRQQGGGTSSGAVGAGACRSFVPAWLEWRAWTRGCDMALPLTLPDEASQTVAVDSWTSCEEAAALAVSSLGVASRGWTLVLDDGQQLTDSCGLDYVMDLIAEKELCPAFPAPRSDLLRSGAKFARTTLPDAVKRPAVPPPAPPTSSGKEDVPRERRSSRELLSRSSALNERYFEREPSPGPGQGSSTGQAKSRSKSLDDLLAGDIVPVPTDCDSQEPLHTLGLSESRLNDRYHSAERLAPVGKDTGPRYQKSQHAGRRSHAASHGSHSSKYADKAEYATRSSAMSDTSEAPSLASHVRRVRVPSQASDVDQFLDDLFSPVLDGSLDELSDARSLAASIRGGSYEQENEAESEIDDLDDYINDIFQPIPLVQNLEKLTSKDQLAAIIKGGGVASKPEERDEESEIEDLDDYINELFEPIPVAEGLDKLTSKEHLAVSIRGGGSTDSNGADPLLHQLMQLPGETESGPALYQQQVQRAFLQSAMAQNLQIQQQLLAQNQALQTLLSQQAAAAAANNSTSPPPAPPILSSLSISPPPPQSPMRMKATRSSLVDPSETRHFLDPYGRAKTVRIGKWRWPPPQDEPQFQTEEDFFAFKMRQHQRKTTPQAQHHQMTSNGGMMESGPGARGASATAIEWEEFEIESPTPPPMSGQLMRSSIRLETTTTTTTSAVNNRDRDRETQDVGQPMQSVVTTKLAKKSFEIGADRPPPGSVGKLKLSSEMRQRLEQVTAGHSVRSTVSTKSEQRAPAKLEDTRKLMLQQQLGGLFASVSGGNSGPGGVVDSHATVRTQIERMEGKLSPPPAPPSGGWPGVLLPPAPSVPAPPPPIRPPSMAPPAPPPAPQSPPTARSPEPEPDYRTSSSQVVKEHVPAFIQRQERDTFGAVRQQQMISSHHLHLEDHSASSSPAVAAWEQAERERSRSRSRSRDREDYSESVWDRAEVEGPASGSGSEKEREKRERERERLYEIRQVERERESHKVYQPAPPRVIQASMDTTGGHRREDRTGGLATFRTHMAQKYEHERKRKSSASSGMREELDSMHMTTPPPVIVPAPVPPPSSTSPGLGVVSGVLMGSGSGGSTACLTYNRVPWKLRVRKEVFQPHEPIGPPVALDLLFAQVLGDVFGVTPCLRITPQEKSSALNMLHGHGVSVDTLSNRNGSGAGGGGNGGQVRALVKRHLVDMARDWPLYFARLFAVQGAPLYPDVSIMGVSHSGLYLARRDADYLIVVQAISFGEIQSAVTLPRPAALQLNLRNGKHLALHAARAAAIQSMVTTFVQEFRKTAEICFDIT

SEQ ID NO: 3565 - DNA, 3029 bp, DROSOPHILA
aaaaaccggccggcaaagttatgaacattttccacctcgaggtagacacacaaaaaacgagagagcaaatgagcaactgcaattgtgtgcaggtaggtatgcgcaagaagcggacataatacatcttgcatctgccagctgtcagacatttctctctgtccctctttctcttttcgtggatgattcgcaggagaaaactagttatgttgcacacaagcacacattttctacaattcgcaaaagctgctcacagcttctgcatgtctggctgcgtgtgtatgttagcggctgcaactcttgttgccaagtcatagttgttgttgtaactgtctgcgccagaaggccaaaaaaaaagaaaaatatacacgacgccctgcgaatttccatcacgaaactggcccacctcaacattttcaggtcacagattttctcgctctccattttttgaacctacttttttttgtttgttgtttttttgtttttgttattctacttgtttttatcacaactacgcttttccgattgcaaagtttatgcgagaacttgctcaattttttgcttatcaattaatattgagagtgatgtgaccgtttgatgccggcagtgatgagcgacccccgatggcaactatcgtatgagcgcagctagcaatcgatgatttttgagtaaccatggcactgagcatggcggtaaatatcgaaagtaatcggttcttgaattcaaaacttgttatgtcccactccctttttaaagttatgcagcgaaaatattgttgtataagttaaccaaaatcagaccaatagaaaaactaaaagaaagggcgttaggctataaaatctaaatcgaagcataaataaatagtaagcatatagtaatcgtagcagtgttgttcaaattaagcaacattctgattggaacaataccttttacaattcgattaaattttcgaaggagttgcacttgttcgtctgtgtacgtaaaacatttggagtaaaaaaccatgcctaaagactactacaagatactgggcatccagcgcactgccaatgatggcgaaatccgcaaggcatatcataagcaagcgctgcgctaccatccggacaaaaacaagagccctcaggcggaggagatctttaagcaggtggccaaggcatatgaagtcctatcagacaaaaagaagcgcggatcgtacgactcccgcaatgacaagggtacccgacgcaataccgcgaatcaaggtagcggtttcggcgatggaacggcatttggtagctgtggtggtggcagtggcagtggcagtggcggtggcagtggcggtggtcgccagaacaacccgcgggccaactttggacgtttcttcgacaacagcgaatcatattctacgttcttcgaggatatcgaaaacgattttgacagcgacgatgacgtcctgttgggtggaggagcgggcgcgcctaaacgtcgttgcgaacaacagtcaccccagtcaagcatcgaacatgtaatatacgttgctctggaggacattgccaacgggtgcaacaggcgcatgaagatctcccgggcttcgggtaggaacggcgttgatggggtacaatatgacagaattctcactgtcaagatacctccgggctgtaaggctggcaccaagatctgctttcccaatgagggtattcaactgcccaaccttgagcccgccaacgtcgtgtttataatccgggacaagccacacccaatctttcgccgcgatggcaacaatctgctgtacacagccgaaatctcgctgaaggatgctctgtgcggtttacacgtgatggtgccgacgcttcttggcaggccgatggaactcaagaccgacgtgggcgaggtaatcagtccgaaatccgtgcgccgcattctgggctacggattgcccgattccattaataattcccgtcgcggctccatcgtcgtcaggttctccatccagtttccagacgccatatccaaagaactcgcatcctcgctcgacagacttctgcaaaactgatcgaatggacacctggagatgttatccgtctttatgaacggatcaacggatcatacatacaacaaaaaatcatctgtgctccacataaaattacatattttttttctatgtgattcaataaagatcttataatctacctctaacaagcattgtccgctacaaatacctctaataagaatgaaaccagtgaagtacagtttaattatacgtataatgattaaacacaattgtgaggggtcaggtttaaacgtcggccggtttgaactgcggattgtgcgagcgtgccatcttggcgcgcagccactcgtccgcgtgacgctgcttaatgtggacatacatattggagcgggaacggcactccttggggcaatgcggacagttgtacagctgcaggcccgtgtggatggccatgtgctcgtccaggttgcgctgctgcttgaaggttttctcgcagaacgtgcactgcagattggtggtcagcttgtgggcatatttgacgtgaccgcggagcgctgtgcgcgatgtgcaggtcttgccacaatgcggacacacggtgtccgtgctgtcgtgtgtgaagcggtgcaggcgcaagctgtgctcgttcttcagccaaacacggcagatggggcactccacagccggggccacgacgccctggtgctccagcaaatggcgctcgaaggagggcttgaacttgaacttcttcccgcaaatgtcgcaaacgtgacgatgcaggtcttcgtggatggattggatgtgccttcgcaggcggtgtacattggcaaagctgtaacagataatttcatatcaaatactcaacttgcaagacagtttttttatcttaaaaaaattatttctttcttgctattctcgaaacagtgtgagtgcggaataagtagacagctatccctctcatttgcgtgtggaatgaataaagattactaattcaaatatggggcaagaattccaattcgatcagagaccctgctctattctcacc

SEQ ID NO: 3566 - DNA, 1029 bp, DROSOPHILA
atgcctaaagactactacaagatactgggcatccagcgcactgccaatgatggcgaaatccgcaaggcatatcataagcaagcgctgcgctaccatccggacaaaaacaagagccctcaggcggaggagatctttaagcaggtggccaaggcatatgaagtcctatcagacaaaaagaagcgcggatcgtacgactcccgcaatgacaagggtacccgacgcaataccgcgaatcaaggtagcggtttcggcgatggaacggcatttggtagctgtggtggtggcagtggcagtggcagtggcggtggcagtggcggtggtcgccagaacaacccgcgggccaactttggacgtttcttcgacaacagcgaatcatattctacgttcttcgaggatatcgaaaacgattttgacagcgacgatgacgtcctgttgggtggaggagcgggcgcgcctaaacgtcgttgcgaacaacagtcaccccagtcaagcatcgaacatgtaatatacgttgctctggaggacattgccaacgggtgcaacaggcgcatgaagatctcccgggcttcgggtaggaacggcgttgatggggtacaatatgacagaattctcactgtcaagatacctccgggctgtaaggctggcaccaagatctgctttcccaatgagggtattcaactgcccaaccttgagcccgccaacgtcgtgtttataatccgggacaagccacacccaatctttcgccgcgatggcaacaatctgctgtacacagccgaaatctcgctgaaggatgctctgtgcggtttacacgtgatggtgccgacgcttcttggcaggccgatggaactcaagaccgacgtgggcgaggtaatcagtccgaaatccgtgcgccgcattctgggctacggattgcccgattccattaataattcccgtcgcggctccatcgtcgtcaggttctccatccagtttccagacgccatatccaaagaactcgcatcctcgctcgacagacttctgcaaaactga

SEQ ID NO: 3567 - protein, 342 aa, DROSOPHILA
MPKDYYKILGIQRTANDGEIRKAYHKQALRYHPDKNKSPQAEEIFKQVAKAYEVLSDKKKRGSYDSRNDKGTRRNTANQGSGFGDGTAFGSCGGGSGSGSGGGSGGGRQNNPRANFGRFFDNSESYSTFFEDIENDFDSDDDVLLGGGAGAPKRRCEQQSPQSSIEHVIYVALEDIANGCNRRMKISRASGRNGVDGVQYDRILTVKIPPGCKAGTKICFPNEGIQLPNLEPANVVFIIRDKPHPIFRRDGNNLLYTAEISLKDALCGLHVMVPTLLGRPMELKTDVGEVISPKSVRRILGYGLPDSINNSRRGSIVVRFSIQFPDAISKELASSLDRLLQN

SEQ ID NO: 3568 - DNA, 3484 bp, DROSOPHILA
cttggtgaagaacagcatcgtggtcatcgatgccacgcccttccgccagtggtacgaggctcactacgtgctgcccctgggacgcaagcgtaaccccaagcacgcccagaaagaggacgagaacgacgtgctgaccaagaagcgcagcgaaaaggttatgaagaagtacctggagcgccagaagtacggcaaggtcgagcaggccctcgaggatcagttcacctccggccgcatcttgggtgtgtattctttctaattcatgattaatgatttttgttatagtgatgtaaaaaccctagcgatccagctactttattgtgttgatcttgttttaagagagacgcaagcctgttgggtgtgattctgcttgtcatagttactctgatcagaccactaaacttatacttttccatttactggaagccccgctctaattccctgttatttttcctttcagcttgcatttcttcccgccccggacagtgcggtcgctccgacggctacattttggaaggcaaggagttggaattctaccttaagaagatcaagtctaagaaataaaggcactagataagcttgcaagacatgatttgcaaacaaaaacggaataaaacaacttgttttttataggaagtgcatttttctgattttgttctttaattttcctgctgacaaagaaatgcagcccaaatagtggacgcttttgttacccaaataaagtccagataaaagataagaatgttcgtggatagtggagggcaaaggactctcccttaaatgtctattgaattttcgtttcataagtatgatacagtaatacgtaatcattaataatagtttaaatatcattcatattggctataattacataacgcagacaggatgtcgaatcccataaagtacaacaaattcatgttaatttaaaactgccaatgacaatcttagaacaaactaaaaactgctttcaattttcttcttatactgctgtcagctaaagttcctagtgttcgaatagcatggtcatcacggccattaacgcaatgccaaataccagtgctagcagctgcttaatggactccttgcgctcctcctccttcaagagatcaggtaatactgtgaccagagcaatgtgcagaaagccgccggcggtgaacggcataatccacgaagtacgtgcctctgtaaatgtaaagataagtttgcttgtttgtcacacggagagcccatttaagcttacccatggccgacgttacgccggagcctccgatggccaccagagcaccgagcaggccagctcccgccgtgagtagttgcgcacgcgcggcgtcccagcgactgaatccggatcgaagcaggattgcgaaatcccccacctcgtgcggaatttcatgaactgtatgtagggaaataagtgaggaactatcctatgtttcaatagtatctataagtacttacgcaatatggcaaaagtggctagaatgccgtgtctgaaggacaccaaaaaggatccagccacggctagaccgtgtgtgaaattgtcaattgagttggccaagaggttcagataaccagccaccttcttcggctgttccttcctttcctttgacttctgttcctgctcgcgtaggaaacagactttacctacatcttcgatgtcgcaggcgccgccacaactctcagaggtttcgccctctggtagttggccgccatgtcgacgcaacaggcagttggctatctccacgcacttgggctgagggttctcctcgtccgcgctggcatatccggaaaagattttctccacgatcgtgaagatcagtatgccggaaagtacccaaaggcccgagcgcagggatgggtgactagaaggatctttaggaggaaaacgaatattatggagatgatttcacaacttggatttccccgcaactcaccttgattatcgccctcccaggcttctggcaacaggtgaaggaacacatcgcccagcagaccgccgaccgcgaaactcagaagcactcgcaggagttttgaatctgcagctgtagggtgagatgtgattcaagttcaattgatatacttttcgtacgcatgtgacttacgatctttgtatccctccttagccattttctcctccgtgggaatgatgatcagcgggaatatgccactcagtccaattaccaccgatcccagcagggagaaaacccatggcgtgtactcaaagcttttgaagtactcgggcatgtactggtccatcaggttggagtatatcatggcgatgtgttcatcgaagaagctgctgttcgtggtcattttcggctgcctttttacggctacttatgcgctgctctgtgctggaactgggttgggtttcttcagtcactgctgcctgctcatgtccagtgactttcggtggagtatgtgccgtgatcgatgatgactcggctagtaaagaaaatataatttaaatggtttaagaaatgtcagcacacacgtaaattttgatacaaatagccagttaagcaaatgtttccccaaatccgccacctggcaacaaaatcattgaataactagatgcggttcttagtatcagacagacggtgatgcgaaaatcctttagatatggacaatgtcagccataatcaataaaggggcagggaaaaactctctcaactgcgctcgttgtcaggttcgataagcgagtctctgtaaaatttaatcatggcaacttaagtgtgactagacggcttcatagggaacggcagtcaatcaaactaagaccattgcccgatagctactccatcaggatgagtaagcgtgtcctgcctcactataaccaataaaatatcaaattgttcgttgtggaacttgttacccgtatcacagcgaacctggtagactttatctaaaatgcaggtacttaaatgataaatatatatttgccaatatggcttgttcgagttcgagcaataattaattggctttttccataattaataagcaatttagatgcagttagttagtttgaatgtgattgctttccaggattttttattttagaatctgctgtacgattagtagaagaattctacttgtaaatcaaacttctctcgatcgtaaactacttttatatcactgccaccaaccaaaacagattgtaaattgggcgaaaattaatttccaagctcgataaccgacgcttccaatgtgcagaaacagactaaacgaattttcaggagacgctgcttcggaacgcccacgtcaagatactttgtttccatttgatttccgatttgatgtgcacgatgcagcttaaactgttcactttgccgcgataagattacgatggcgctggcacaatggagtgacatgatttcggcggttttgctaagcggcaatactccgcatgtgtattggggaatcaaacttggaagcggacgaatgatgtctaatccccgacagaacgggcagaatgggaatgcctcgg

SEQ ID NO: 3569 - DNA, 1242 bp, DROSOPHILA
ctgacatttcttaaaccatttaaattatattttctttactagccgagtcatcatcgatcacggcacatactccaccgaaagtcactggacatgagcaggcagcagtgactgaagaaacccaacccagttccagcacagagcagcgcataagtagccgtaaaaaggcagccgaaaatgaccacgaacagcagcttcttcgatgaacacatcgccatgatatactccaacctgatggaccagtacatgcccgagtacttcaaaagctttgagtacacgccatgggttttctccctgctgggatcggtggtaattggactgagtggcatattcccgctgatcatcattcccacggaggagaaaatggctaaggagggatacaaagatcctgcagattcaaaactcctgcgagtgcttctgagtttcgcggtcggcggtctgctgggcgatgtgttccttcacctgttgccagaagcctgggagggcgataatcaagatccttctagtcacccatccctgcgctcgggcctttgggtactttccggcatactgatcttcacgatcgtggagaaaatcttttccggatatgccagcgcggacgaggagaaccctcagcccaagtgcgtggagatagccaactgcctgttgcgtcgacatggcggccaactaccagagggcgaaacctctgagagttgtggcggcgcctgcgacatcgaagatgtaggtaaagtctgtttcctacgcgagcaggaacagaagtcaaaggaaaggaaggaacagccgaagaaggtggctggttatctgaacctcttggccaactcaattgacaatttcacacacggtctagccgtggctggatcctttttggtgtccttcagacacggcattctagccacttttgccatattgcttcatgaaattccgcacgaggtgggggatttcgcaatcctgcttcgatccggattcagtcgctgggacgccgcgcgtgcgcaactactcacggcgggagctggcctgctcggtgctctggtggccatcggaggctccggcgtaacgtcggccatggaggcacgtacttcgtggattatgccgttcaccgccggcggctttctgcacattgctctggtcacagtattacctgatctcttgaaggaggaggagcgcaaggagtccattaagcagctgctagcactggtatttggcattgcgttaatggccgtgatgaccatgctattcgaacactag

SEQ ID NO: 3570 - protein, 355 aa, DROSOPHILA
MTTNSSFFDEHIAMIYSNLMDQYMPEYFKSFEYTPWVFSLLGSVVIGLSGIFPLIIIPTEEKMAKEGYKDPADSKLLRVLLSFAVGGLLGDVFLHLLPEAWEGDNQDPSSHPSLRSGLWVLSGILIFTIVEKIFSGYASADEENPQPKCVEIANCLLRRHGGQLPEGETSESCGGACDIEDVGKVCFLREQEQKSKERKEQPKKVAGYLNLLANSIDNFTHGLAVAGSFLVSFRHGILATFAILLHEIPHEVGDFAILLRSGFSRWDAARAQLLTAGAGLLGALVAIGGSGVTSAMEARTSWIMPFTAGGFLHIALVTVLPDLLKEEERKESIKQLLALVFGIALMAVMTMLFEH

SEQ ID NO: 3571 - DNA, 7914 bp, DROSOPHILA
agccatgaactgaagcagagcaccctcgatgcccacaaagctgccactgccatcgggacgccaaaccaaatagggcatatcctcccaagtggcgcaggtcaaaagacagccatagaaattccccaacttgctaggaaaataatcttggctagcccaacgttttgtgcccacttggtagcgatttactacattggccgagattacctggcagccgtgtaacgcactgaatggaaagtaactgaccatgaggatatgatcgccaggtggacgcagcactacgcccacgttcagtacacttagtcgccacagaaatcgaagggtcgcctgcatctcctcaccatatgcatccgtgggcatggacatgtatatcagtgtgtgcgacaaatcctgggtggctcgaatccgagcgtagatcgccgaaagagacggaagaccatcgaccagagccaagacagcatggacatatggtttatactccatggactgctggagcaagagcctacgtgcctgcaaattgttaggcacaatcatcagcacctggtcaagcagctcctccaaatggccaccagttgactgggaatttgtgtgggtgtatatgtacaaggtcttgaagcgacccatttccgagttggccaccacttgagccagagcttccgccaagtcccaatccgaactggattccattgtactggccaccaaggagcagcaagaaagtatatataaccagtacttcatggctaaagagttgccaaaggaatgtgttaatgtggccactttggagtactgaagtcttcagatccccggggaaattttggtaatggcccggaccaatcgcgttaatcatatcacattaaagtcgattcccttgggaaactaacttactgttaacgatactgatttataggctggctaaaaagagttgatagcccttactttttttggaaaatgttcttgtttctacatttataatattaatttttattggcaattataataaaagtcaatcatcaacatcatcgtcatcgaaattgaagtaatcgatgtcgttctcatcccggctttttttgctgctgaatcccctaggttcactgctctcgctgggctcttccacatcccggtcatcctcctcatccggttctggttcgggatctttctctaaagaatcgttggtctcgtcctcgaacaggctacgctcagcggctcccaattcgaagacgggttcgtcctcattcttgggcttggtcttagttttcggcttagaaatcttgcccagaaccggaggctgtacctctacacgggtaagattcgtatggtgattcagcatacccttgtacaaatggggaaatctacgctggaaatccatcttgatccgaagaagtctctccaacatgccgggtgtcaggatgccatgctgcgtaccttgacccatgatgtgcgtgtcccttcgatggcgaccgtccctcagataggcatcgtagctcccaccgcccgtgtagagaggatggtgaggatcgtatggcttctggttccacggatcatcgggcctctccaccggcagcagacccataaacggatgcagcaatccctcgccgtaggtgaaaatggaacccacttgggggtcagatgatggtgcgttttcgatttcggtttcggatggtgctgatgatggactggcgatatggacgagggatatgcaaatgaaagatggatggatatgaatgaattgcgaacgaatagtgaatatgcttatactatatctaaattatgtataggattagttgggatctgtgaattagttaaatgggctgaaatcttatgctttcgtttgaatgggactcctgatggtcgtggcaatagacttgtgttgcctcctgcgcaacctttttcgcttgatgactttgacgggcttaatagatttgggtttggttttcgaaaggttattgctctgggttcttaataggctggattttttctccttttgaatttgcaggcgcaccagatccttgagcacatccaccaaactgtccagcttagtgctgctcacggtggcctgcgtagtcacctgcgagctctgctttttcggcttggacatggacttcttgggtcgttggggcattttcgcttgacgaggagatcgtacccatacctcgtcgctcgcctttcctatctttggaatgggaacccttcttgccgtgctcctccgtctcacaaactttcccctcatcgcgtacggagagggtgtggtggtggtggtggtgccatcgctcgaatcgcttccactatcatttagggccgcattgagcagctgcgcctgttgtttcacacttaaagcccttttagccttgccctccgtatccgtgctgggttcatctgcttggaactccggataggggccatactcttggctgccatttccatcgtaattgcagttcttgggcatctccaggttttgaccctgggcaaactgacgctcatgggatttggttaggtagtccgtgtcatagccacgattggccagaatgcgttgccaattgttatcgtcgtcgtagtccagtttattggacgagccactttgttcatccactctaggcgatccaagggaaagtccaggttttgttgagtaactaccacttggtgaaggagtctctgtggtcgtactaatagaggtactatcctcgtcctcttccagctcttcctcctgctccactggggcttgctcttcggcaatcactttctcctccacctttggcttatcctcctgcttggatggttcctccaccacgggtgggttcttctctgtgaccggttctttggccacattgtttgatattatcgtgctgcaacgcaaattcagtttaaggatctcattcttcagctcctccacaatactgtgcagctgatgaatctcggcctcctgcttcgatatcgacttggtgacatgagaactctcagcctcagcctgtgagtcttgctgcatgtccagtccctcatctttggtgctttcggttgttgttgttgtggatgtgctagtggtggtggtgacttcaggtgtcacagttgcttctgaagtagagtcactgcctgttggagtggcagcttctgtggtacttgtgatcggagatgctgtggaagtggttagccgcacaaagtccttatgattgtactggggctctgtgttgggatcatgctgtagttgctcctcctccatgggctcctgttgcgcatcctcttcatactgatccccaccgatctccagcggttccatactggctcgctccaaagcttcgcgaatggaggccgcattgtagcgcatcagggcctcggcgggatcttcatctggactcagcgtgatctcttttagtcccagtttatattctcttctaagttcgttaagagaaccctcatcgatggtctccaaggttccatattcaacgctacgcttgttccggtgactggctttgcactggcaagttcccgaagttctactagaaaccactctagattccaagcctcttcttccgcatcgacaactcctgccgcacagacaatccaacctgccacatccgcaacccttggatgtggtcgcatttaaccctgcctctcgcccaaacctgtggaaatgtgctaaccttttgtggactcgatgctcttgcggttgctcttgtggagctggtgtcaacgtcgttggaggattagagttgctcttctggctctccgatccaccgacttcgcctggttgcttcgggtttattgtctgaaatgcgtcgcctgtttaatgccatgagaaaaaggcgaatgaatcgtatgaaatggatcaaatgaaggcaactgtctacatgttccagtgtatggctgtgtgtgtttgtgtgtgtgtgtggttgtggtgctcaatgtggtgtggttgtagtggtgtctggtatatccgagtggtttaacactaatctcaacttaccctggccattgtctggtgctggcgcaacatctcatctacctcatcgttacccacggcagccctgtagccttgactttgatacgaattgactggacgaggaacaccataggcattcgatccatagccacctccgccgtagcttgttccgtaactctgaaccaccggacgctggggtgccgcatagtaatagttaattaccgttggcggcgccgacttggacttggacttcttgcgcttgttgccgccaactcccagggcatcgactgtgggagagacagatggcactgagtcaggattgcgaaagactccgaagagattacctttgtgcctggcggtgccttcgttctccggcatttggggtcccgcctcgccaactaagtcatcctctgccttattatcttcgtcctctacttcacgctgcatcatcgatggcatctgctgctgcatcatcatgggcccttgctgctggacagactgggggttctcctccgcccactggcgctccttcatcatcatgggggtctgctgcatcatctgtctctgctgctgttgaatctgggcctgatcctccgaccattgtctttgctgcatctgctgcatcatcatttgattctgttgtgccatctgctgagcctgttcgattttggtctgctcctcggaccattgcctttgctgcatcatttgcggattctctgccatctgtcgctgctgttgcatcattggattctgttgggccatttgcatcctggtctgatcttctgcccactgcctctgttgcatctgctgaaccatttggggatcctctgtccactgcctttgttgcatctgtggcatcatcatgggtgtctgttgggccatctgttgagcctgctgaattttggcctgatcttctgaccactgcctttgcctctgctccgtcatcatgagaccttgctgtgccatctgttgtgccatctgttgatcatgctgaatcttggcctgctcctccgaccattgtctttgctgcatcatcattggattttgctggatctgctgttgattctgttggatcttggcctgctcctccgaccattgtctttgctgcaccatcattggattttgctggatctgctgttgattctgttggatcttagcctgctcctccgaccattgtctttgctgcatcatcattggattttgctggatctgctgttgattctgttggatcttggcctgctcctccgaccattgtcgttgctgcatcatcattggattttgctggatctgctgttgattctgttggatcttggcctgctcctccgaccattgtcgttgctgcatcatcattggattttgctggatctgctgttgattctgttggatcttggcctgctcctccgaccattgtctttgctgcatcatcattggattctgttccgtcctgtaggccgcgtaaaccttgtcctgcttgcccttctcgctctccatctgttcgttggccatgcgataggcatacgccataatctggacgatatcctccttggacagagtctgatcctgggatttggcctgtcgcttcaaggcatttgccttctgggtgtttatgccggaatttctagcccttcgttgcgcttccttgttgaccaatcggcggacataatcatcccgaagggcttgctcaatatcagcacgggtgatcttgtgaatgggtgtccgactcagtggataactgattctgtagggtgaatctccgttttgagctgcggcgctggacctcatctgcttagccataagttcgatcttctgcagcattctcaattcggctatcacctggcgctcgaatgccctcaatttggcctcgacccgcagatcctccagagtcttttcttcagtcgcatcctgattctgagttgtgggcattcggaaccagaggagaggcacttgctcctgatccttgacctgagcctgttgttgcctctcctgctccatttcaagtgccgatttgatcttcatctgtgcctcttgcgaatacggatcctcaggacgtacccttacctcggaaatgtcggaggcctgggcatccgtgccagcggcagcaggttgtgccggtgtcattcctgggaagaattgcctttgcatttgagcgacgaaatcaagatttggaggagcaaatgtgggtacactctggcccagaagactggaggcatcaaagttagccgggttaaagaaggtgaaagcgttctgcagagcggcttgtcccagtatggctggttggggtgcatctggaacaggtgctgccggaggatctgcagctggagctggcgccggaggaggagcagcagcgggagcaggagctggagcaggaactggagcagcggcacccagaagaccaggcacggtaggcatagcaggcagttgggccaaaaacgagcccacttgcggtcccagatccatggaaggcagttggaagtcctgcggcagagcgggccaattcattagctgaccaagtggatttggtggcggattttgacgggcaactcgagtcttggccgtcgcatcatcggccaggacaaggaccaccttggaggctgccgctgtaggctgtagattgtcgggaatggcgcccagaatcgagtaggctgggaaaaggctgccccacttgagcaggctgcccaacgccgggaacatcatgtaaaatgcgtccatctggggattgccagtgcggatgggattaatggacggcatctggccaaggatctgaattgaaaaatataatcaagaggattgcattaaacaaactcaatgattaattctctctaatcgtactcacctcatcctgactgggaatccttggtttggtgtccgtggtggaattggtcgttgatccagcatccgttgcaggatcatcagaggttacttcactttgtccggcagcctggacgacaagaagcgccaggagcggcagaaggctaaacaatctcatcctgtatttgggcaaaactcggaaaaatcgctaaagatcgatctgtgttcgccggagctcgttggccgactgactgccgactgccgccggttagtggtccaaatagattttttgccaccgcgtcggcggcgaagaactgcagacgtcttcaaaatcgtgacccggacccgggtccgccacacgcaccggggtacggccagtgtttccgtgtgtgtgcccccaattgaaaaacagaccgcagcagccgtcgcagctgcatttgctgcaaaaaaccttgcccaactattccgctcaccaccattttccacgaattcagcgcaaatgatgcacagtagacagtatgaacgaaatcaggtctggaatcacacggaaggcgccgaaaatataccacaaagccgcgaaatcaataggggaagttatcttcacgtcactcttttgccactaataattctcaactaaaaaaaaaaaaaacaaacaattgaaataaatatttaaacaaaaactttctttaaggaaacggtaatattataacatttaaagagtcattatgaaagatagaaatacactgcagcgcaatccgcccctgatttttgttgagggccgtggtgtgtctgcccttcaagcgtcgatccgtagaattcttgcgatcgtcttatggtttatgtgtcaccagaagcaccaccaacaccaccaccgtggtttgctgaggtcagcggtggttcagcttgtagacacgacacgagaaacaaaagcttctgtcatcgcagcgggtggcttttgtggaggtcagcaaaaagtgcgaaacgaaactcggtacagcgacctttggctggctccgatttggtttcggattaacgcagactctgatctttataaaattactcatgagccgcagctatctcacatttaatcacgattccggcgactgaaatgcgtaagctgcctaagaaaaaactcattgaattaaaatcttaatattattcacaacacaggtgtggtt

SEQ ID NO: 3572 - DNA, 5301 bp, DROSOPHILA
atgagattgtttagccttctgccgctcctggcgcttcttgtcgtccaggctgccggacaaagtgaagtaacctctgatgatcctgcaacggatgctggatcaacgaccaattccaccacggacaccaaaccaaggattcccagtcaggatgagatccttggccagatgccgtccattaatcccatccgcactggcaatccccagatggacgcattttacatgatgttcccggcgttgggcagcctgctcaagtggggcagccttttcccagcctactcgattctgggcgccattcccgacaatctacagcctacagcggcagcctccaaggtggtccttgtcctggccgatgatgcgacggccaagactcgagttgcccgtcaaaatccgccaccaaatccacttggtcagctaatgaattggcccgctctgccgcaggacttccaactgccttccatggatctgggaccgcaagtgggctcgtttttggcccaactgcctgctatgcctaccgtgcctggtcttctgggtgccgctgctccagttcctgctccagctcctgctcccgctgctgctcctcctccggcgccagctccagctgcagatcctccggcagcacctgttccagatgcaccccaaccagccatactgggacaagccgctctgcagaacgctttcaccttctttaacccggctaactttgatgcctccagtcttctgggccagagtgtacccacatttgctcctccaaatcttgatttcgtcgctcaaatgcaaaggcaattcttcccaggaatgacaccggcacaacctgctgccgctggcacggatgcccaggcctccgacatttccgaggtaagggtacgtcctgaggatccgtattcgcaagaggcacagatgaagatcaaatcggcacttgaaatggagcaggagaggcaacaacaggctcaggtcaaggatcaggagcaagtgcctctcctctggttccgaatgcccacaactcagaatcaggatgcgactgaagaaaagactctggaggatctgcgggtcgaggccaaattgagggcattcgagcgccaggtgatagccgaattgagaatgctgcagaagatcgaacttatggctaagcagatgaggtccagcgccgcagctcaaaacggagattcaccctacagaatcagttatccactgagtcggacacccattcacaagatcacccgtgctgatattgagcaagcccttcgggatgattatgtccgccgattggtcaacaaggaagcgcaacgaagggctagaaattccggcataaacacccagaaggcaaatgccttgaagcgacaggccaaatcccaggatcagactctgtccaaggaggatatcgtccagattatggcgtatgcctatcgcatggccaacgaacagatggagagcgagaagggcaagcaggacaaggtttacgcggcctacaggacggaacagaatccaatgatgatgcagcaaagacaatggtcggaggagcaggccaagatccaacagaatcaacagcagatccagcaaaatccaatgatgatgcagcaacgacaatggtcggaggagcaggccaagatccaacagaatcaacagcagatccagcaaaatccaatgatgatgcagcaacgacaatggtcggaggagcaggccaagatccaacagaatcaacagcagatccagcaaaatccaatgatgatgcagcaaagacaatggtcggaggagcaggctaagatccaacagaatcaacagcagatccagcaaaatccaatgatggtgcagcaaagacaatggtcggaggagcaggccaagatccaacagaatcaacagcagatccagcaaaatccaatgatgatgcagcaaagacaatggtcggaggagcaggccaagattcagcatgatcaacagatggcacaacagatggcacagcaaggtctcatgatgacggagcagaggcaaaggcagtggtcagaagatcaggccaaaattcagcaggctcaacagatggcccaacagacacccatgatgatgccacagatgcaacaaaggcagtggacagaggatccccaaatggttcagcagatgcaacagaggcagtgggcagaagatcagaccaggatgcaaatggcccaacagaatccaatgatgcaacagcagcgacagatggcagagaatccgcaaatgatgcagcaaaggcaatggtccgaggagcagaccaaaatcgaacaggctcagcagatggcacaacagaatcaaatgatgatgcagcagatgcagcaaagacaatggtcggaggatcaggcccagattcaacagcagcagagacagatgatgcagcagacccccatgatgatgaaggagcgccagtgggcggaggagaacccccagtctgtccagcagcaagggcccatgatgatgcagcagcagatgccatcgatgatgcagcgtgaagtagaggacgaagataataaggcagaggatgacttagttggcgaggcgggaccccaaatgccggagaacgaaggcaccgccaggcacaaagtcgatgccctgggagttggcggcaacaagcgcaagaagtccaagtccaagtcggcgccgccaacggtaattaactattactatgcggcaccccagcgtccggtggttcagagttacggaacaagctacggcggaggtggctatggatcgaatgcctatggtgttcctcgtccagtcaattcgtatcaaagtcaaggctacagggctgccgtgggtaacgatgaggtagatgagatgttgcgccagcaccagacaatggccaggacaataaacccgaagcaaccaggcgaagtcggtggatcggagagccagaagagcaactctaatcctccaacgacgttgacaccagctccacaagagcaaccgcaagagcatcgagtccacaaaaggttggattgtctgtgcggcaggagttgtcgatgcggaagaagaggcttggaatctagagtggtttctagtagaacttcgggaacttgccagtgcaaagccagtcaccggaacaagcgtagcgttgaatatggaaccttggagaccatcgatgagggttctcttaacgaacttagaagagaatataaactgggactaaaagagatcacgctgagtccagatgaagatcccgccgaggccctgatgcgctacaatgcggcctccattcgcgaagctttggagcgagccagtatggaaccgctggagatcggtggggatcagtatgaagaggatgcgcaacaggagcccatggaggaggagcaactacagcatgatcccaacacagagccccagtacaatcataaggactttgtgcggctaaccacttccacagcatctccgatcacaagtaccacagaagctgccactccaacaggcagtgactctacttcagaagcaactgtgacacctgaagtcaccaccaccactagcacatccacaacaacaacaaccgaaagcaccaaagatgagggactggacatgcagcaagactcacaggctgaggctgagagttctcatgtcaccaagtcgatatcgaagcaggaggccgagattcatcagctgcacagtattgtggaggagctgaagaatgagatccttaaactgaatttgcgttgcagcacgataatatcaaacaatgtggccaaagaaccggtcacagagaagaacccacccgtggtggaggaaccatccaagcaggaggataagccaaaggtggaggagaaagtgattgccgaagagcaagccccagtggagcaggaggaagagctggaagaggacgaggatagtacctctattagtacgaccacagagactccttcaccaagtggtagttactcaacaaaacctggactttcccttggatcgcctagagtggatgaacaaagtggctcgtccaataaactggactacgacgacgataacaattggcaacgcattctggccaatcgtggctatgacacggactacctaaccaaatcccatgagcgtcagtttgcccagggtcaaaacctggagatgcccaagaactgcaattacgatggaaatggcagccaagagtatggcccctatccggagttccaagcagatgaacccagcacggatacggagggcaaggctaaaagggctttaagtgtgaaacaacaggcgcagctgctcaatgcggccctaaatgatagtggaagcgattcgagcgatggcaccaccaccaccaccacaccctctccgtacgcgatgaggggaaagtttgtgagacggaggagcacggcaagaagggttcccattccaaagataggaaaggcgagcgacgaggtatgggtacgatctcctcgtcaagcgaaaatgccccaacgacccaagaagtccatgtccaagccgaaaaagcagagctcgcaggtgactacgcaggccaccgtgagcagcactaagctggacagtttggtggatgtgctcaaggatctggtgcgcctgcaaattcaaaaggagaaaaaatccagcctattaagaacccagagcaataacctttcgaaaaccaaacccaaatctattaagcccgtcaaagtcatcaagcgaaaaagtccatcatcagcaccatccgaaaccgaaatcgaaaacgcaccatcatctgacccccaagtgggttccattttcacctacggcgagggattgctgcatccgtttatgggtctgctgccggtggagaggcccgatgatccgtggaaccagaagccatacgatcctcaccatcctctctacacgggcggtgggagctacgatgcctatctgagggacggtcgccatcgaagggacacgcacatcatgggtcaaggtacgcagcatggcatcctgacacccggcatgttggagagacttcttcggatcaagatggatttccagcgtagatttccccatttgtacaagggtatgctgaatcaccatacgaatcttacccgtgtagaggtacagcctccggttctgggcaagatttctaagccgaaaactaagaccaagcccaagaatgaggacgaacccgtcttcgaattgggagccgctgagcgtagcctgttcgaggacgagaccaacgattctttagagaaagatcccgaaccagaaccggatgaggaggatgaccgggatgtggaagagcccagcgagagcagtgaacctaggggattcagcagcaaaaaaagccgggatgagaacgacatcgattacttcaatttcgatgacgatgatgttgatgattga

SEQ ID NO: 3573 - protein, 1693 aa, DROSOPHILA
MMFPALGSLLKWGSLFPAYSILGAIPDNLQPTAAASKVVLVLADDATAKTRVARQNPPPNPLGQLMNWPALPQDFQLPSMDLGPQVGSFLAQLPAMPTVPGLLGAAAPVPAPAPAPAAAPPPAPAPAADPPAAPVPDAPQPAILGQAALQNAFTFFNPANFDASSLLGQSVPTFAPPNLDFVAQMQRQFFPGMTPAQPAAAGTDAQASDISEVRVRPEDPYSQEAQMKIKSALEMEQERQQQAQVKDQEQVPLLWFRMPTTQNQDATEEKTLEDLRVEAKLRAFERQVIAELRMLQKIELMAKQMRSSAAAQNGDSPYRISYPLSRTPIHKITRADIEQALRDDYVRRLVNKEAQRRARNSGINTQKANALKRQAKSQDQTLSKEDIVQIMAYAYRMANEQMESEKGKQDKVYAAYRTEQNPMMMQQRQWSEEQAKIQQNQQQIQQNPMMMQQRQWSEEQAKIQQNQQQIQQNPMMMQQRQWSEEQAKIQQNQQQIQQNPMMMQQRQWSEEQAKIQQNQQQIQQNPMMVQQRQWSEEQAKIQQNQQQIQQNPMMMQQRQWSEEQAKIQHDQQMAQQMAQQGLMMTEQRQRQWSEDQAKIQQAQQMAQQTPMMMPQMQQRQWTEDPQMVQQMQQRQWAEDQTRMQMAQQNPMMQQQRQMAENPQMMQQRQWSEEQTKIEQAQQMAQQNQMMMQQMQQRQWSEDQAQIQQQQRQMMQQTPMMMKERQWAEENPQSVQQQGPMMMQQQMPSMMQREVEDEDNKAEDDLVGEAGPQMPENEGTARHKVDALGVGGNKRKKSKSKSAPPTVINYYYAAPQRPVVQSYGTSYGGGGYGSNAYGVPRPVNSYQSQGYRAAVGNDEVDEMLRQHQTMARTINPKQPGEVGGSESQKSNSNPPTTLTPAPQEQPQEHRVHKRLDCLCGRSCRCGRRGLESRVVSSRTSGTCQCKASHRNKRSVEYGTLETIDEGSLNELRREYKLGLKEITLSPDEDPAEALMRYNAASIREALERASMEPLEIGGDQYEEDAQQEPMEEEQLQHDPNTEPQYNHKDFVRLTTSTASPITSTTEAATPTGSDSTSEATVTPEVTTTTSTSTTTTTESTKDEGLDMQQDSQAEAESSHVTKSISKQEAEIHQLHSIVEELKNEILKLNLRCSTIISNNVAKEPVTEKNPPVVEEPSKQEDKPKVEEKVIAEEQAPVEQEEELEEDEDSTSISTTTETPSPSGSYSTKPGLSLGSPRVDEQSGSSNKLDYDDDNNWQRILANRGYDTDYLTKSHERQFAQGQNLEMPKNCNYDGNGSQEYGPYPEFQADEPSTDTEGKAKRALSVKQQAQLLNAALNDSGSDSSDGTTTTTTPSPYAMRGKFVRRRSTARRVPIPKIGKASDEVWVRSPRQAKMPQRPKKSMSKPKKQSSQVTTQATVSSTKLDSLVDVLKDLVRLQIQKEKKSSLLRTQSNNLSKTKPKSIKPVKVIKRKSPSSAPSETEIENAPSSDPQVGSIFTYGEGLLHPFMGLLPVERPDDPWNQKPYDPHHPLYTGGGSYDAYLRDGRHRRDTHIMGQGTQHGILTPGMLERLLRIKMDFQRRFPHLYKGMLNHHTNLTRVEVQPPVLGKISKPKTKTKPKNEDEPVFELGAAERSLFEDETNDSLEKDPEPEPDEEDDRDVEEPSESSEPRGFSSKKSRDENDIDYFNFDDDDVDD

SEQ ID NO: 3574 - DNA, 7228 bp, DROSOPHILA
tggactaaactcgcagattcctgtaacttggaagcaccacgagtttgctttagaagatgcctttccgttgaactaaaactagacgagtaaagcgtatctcaaacattgtatcttccgaaccaaaatagtgctgcatacttttcgggatatgtcttattcaatgtaagtaatacaaaaagaaaaaaggtaacttcttaaaacttgtaatatttgtcacaaatgaatgacgactagatttggccatgtctgtaacaataaacgtacaaaatattcgaagttgcagaaatggggatccagcattcggatttggttttttgtcaaacttttaaatatagaatcggaccacatctttttaagaccttaaaaaactgatttgaagttagacccctcataatgccaactaaatttgttaaacaaaaatatgcccctatatgccaatcaaatttaaatacaatgctttctcagcgtttcagttaaatactttgggttgtttaatggttttatacgtatacatgtgctaagtccatgtatcttatatttcgtaaatccatagattttgttcgacgaaactttgctaaatgatattgatctttcaaatataacttgttaatttcctttcatcgccgtggcaaatccttcgagagtgagtactacttgttaaacgcatatatgaggaaaatttattgatgaataatgcgaacatgcaaacggaacacatccccgaattcacacaaagcatctctgtggtatctcttttggttttttatttgttgcatcaactccgcggaactccagctacctcactgcaggtcgtagtagtcgacgttattggcggtcagatgttctctattaatttggagcgtgctgctgtttccacttcaaacttttattaacatatatagtatgggtttgccggtatattgcaaacgggaactaagtgtagattcgtgaatgatatcagactggactgcaaacgtttagtttctagcatgttttttttactctctcctttatttgttggaatttttgagttttatataggtggagttttcaaaatgacattaattcataggggtgagttttatatatagttcgactggctgttgcaggtgctggtttcgaatttttggatggggatgctaaagggcggctccgtttgtgttcatcctcatttagccatcaaccaagttcttactcgccattcttttgttcgtcctcagattcggattctgaaagagaatagaatacaaaatgttagtatgggggcttcaattggtacaaactgaaaagatgtgcagctccggttatgctgtccaaatgattattggccaaatttaactatggaaagttatctggacacccaaccattcaaatgctttggcacaactccccgcttggctcaatcgaatgaagcaaccattcggagcttttatgaggggattgtgcatgcggactaggacaaatgcagctgtccaaacgattattggccaaattaaccacggcattgggttatatgggcacccaatcattctttcgcttttgcatactgtacatgaaccctttaaaactggttcctaataatgggaacactttaaaagcttggtaagaagcatgctcggtgaagtcagctatttgtgtccaagttttcattggcctttgatgctcggattttgtgaggcaacaaggcaagcaaaaactcaaatgctcttgcaattttgtacaatgaaaatgtcatccaggacaagaccattctcaaaaagtgcactgtgtaaagtttcgaaggaagcaaaatttgaatatttatattgtccaggttttcattggcctacgttgttcagtgaatggaaatcaacgaggcaagcaaaaaacccaaatttctcttgcaattacgtaccagaatcaagctatttaagacaagaccattctcaaaaattgcacgctgataacatttatcaaaacatactaaccttcttcggctgactgaagccattcgacaaactttcgcatttgttcaaggaaatgcattttgcccttgtttgagtggccctccttgtaccagcgcaagatgatctcctcggacaggacctcggtcttgtagaacaacaaaatgattttctggaaggccttcatgaagttcatgttctcgtagcagaattcctgcaccttcaagattagggccaattccgaacggtcggtcgaggcgaaagcctgcaacagtgggcagtagttcttcagatgacgaacagcctgatcggtaaccagctcctccttcttgttccattcgcccaatgacatgatggtggaccaaatctggtaaagatcatacatgagatttagtaaggaaatcatccagttggattatttacgcatcgacttacaataacaattatttcatgatcgggaatgttggtgcgctgcgagaagtccttaatgtctgaggttatctcattatatggcttctcatcgttgatatcatcgatgagcgcctgctgcaactcacgcttcgcctcctggctagcctgagccttatgtagcttgacgatctcgttaagttctttgtcaagaaaaacttgtttaaaatattcctcagtacgtttgttcggtgggaaaaagtccataagtctggaaaaacgtgaaaaagtggaaccattattaataatttaagttaacgcattcaataatcaaccttaaatgacgtattgaggtgtacgaaattaaatcagcacccaaatgaagcgaaaggtcatttgcgaattgggtaaaactccgtcgaactttcttactctaggaatatcaattaaagatgcacaactggatcattgagtcatcttcctgagaacattccggggctaaaaacaaatcacaactaaaaacttacttgctttccagtccacccttcttaagcgcctgaatcagatatgcaatgcccttctcttgcttgaacgtctggaacagctctagtagaaactccaatgcaatgccatccttgattaggtgctcgttgtttagtaccagtaaaacatttggcggtacagaaccgttgactgttgatcaaaaatagggttaaatatagggttagtcaaatgttttcgcaaaacaagtttagacggccggctagcaatcctgtccttgggctcgtggcccttagatgtggttagttcatccaagagtcagtataccaagtgaaggattactttagcccctcagctgcaagttgaacaagtgtttatcgaaacaactaattgaaagaccgaatgggcagacgcaagcaatgcacaggaggaacaggaacataaatgttaagacttacctaaccagagcgctgtcatacgcgcaagcttgatgcgttcactaggagtaaagccctttacgaataatagaacctttcccatctcctcttcgaacattttctcaaggtacttgtaccgtctgatgagcttgacaaatacctggaaaaggtaaagtgtgattgcccctgttagcggatggtgaaattttactgtgttctcacgcaggaggcttttgtatttgttgttgcaacattagaaatctttagattgctggcggtagtaattttacaaaataaagacaagtaaaatgtggctttttattttgcatattttgacaccgattgagttgttgagatgcataaccggttctaataatatgcactttgattcaatagcgtgaccttcgcagtggttgcatgcatatagtatatatatatagtgttgaataaagagtagttgttgacacataagaaatcttcagaacgttagtgtttaggacaaaccaaagacaagtaaatgtgttgattgttattgcatattcttgacaccgattacatttttgaaactttatagtcagctctaatgatatgcagccacttcacgaatttcatacttttaagtggatccgaagaaaatcatttagtagtaaataaacgttttagcttggaaaacaacaagagctcaacttgtgttgcaatcaaaccaattttcgtttactcataatcataatttaagtatgacctgctaaaagattacaaacctgctcatggttgcgcatgctctccatgctctcgggcgcatcgaagatgcagtagcttgtgcgcggcttttcgccatcctgagatatagaaccaccaggcactgcaattgaaacgaggatggaaaagggtcagtgaagagactaaacacattacttgcagcggaaaacttacctagtagacctcctgcaatcaatatgtcaaagagaacttcaccgtagcgacgatagtcgagcttgttgcccgcgctgtctagatatttagagatttgttccaggtcgccttcagttttttcgagaccagcaatgaccgcatcacggaatcccgttgggtcatatttttctctttcatctctttttctggtcttgatgcgttgacccgatagcactggtctttcagttttttgactcatacaataaattgctgcaaaggtaaatgtggatcagagatggaagcggttttggtttgcccctgtaagtttttatttctgaccagactaaattatcatggccactagattcatttttagatttatcttaattttagtgtaagatgactaaggtggtctccaagcggtggaaaaccgttccctgtatatgtattctcgttgcgctcataatcaaactacaacattttcacctatgaccggcgtttaagtggaaactctagtgaaaactgagcctaagaaagccttaacctaaaaatgccagcgtacatgtgctttaaacacacacattcaagagcggagaacgggcacacttcacatctctttttaattatctctctttttcacacacacatacccactgtgcattttacagtttgataatgtcgacaaaagaaataaaaagaattgagaggtgaggcgaccaagaaatcgacatagaaacgcagaataaagtgaaattttgacgtggttacttgtgttaggtagcgcgctggggaaatgaggtcattgtgcatgtagtgcacataaaaacgcgccgatgactgtgtgctagttggccgggaaaattgtcatagcagcgaaaacgcaaaaattaaattatctaggctatcaagtacacattggtacatataaggaacggcaacttacgctttcacccaaggatattaagtctggccctgtgtttgccgcttccgcgtgtccttgcaatcaattgaaatcagtcgtgtgcgagtgtagtgtgtatgtgtgtgtgtgtgtgcctgttgctttttcacaactaacgaacgtgcgagaatatgtaatttaatttaacctcacgaagcgctggctggttaatgcttctcactcgagtcgacgaaaaacaaagagacagatggcagatcccttcttttcttacctctcttttcttatgagcgagcttttgcacggtaaaattgacacgcacgcacacacacaacaacaaagaaaaggggagagcaaatagaaaatataattttttgtaacggaatttacttttatgccttcaaaataaacgttaacaattttgctcagactacgtccggaattctatttttaacagctatcacaatcggttactaggtatatgtgttgtttgcctcgaatccagcgcccctctgctcgcaccactttgttaaacgaaattcggagagcgaatgagacgacacacgagcgcacgaacgaagcggacgagccgagaacgaagacatgtggttcggcgccattttgaagcgatacactgacatggcgaaagcggaatgatgggcacagggaaaacgaaaattagggggaaacggtgagaaaaaatgtgggatgggggttcaaagtgtgtatattgctgtcgcgcttattaaataatgagcaaggtacagtcgaacaaaggccgacggccaccaaatgattttttgcatgaatatatgactgcccgatgactaatctggccttaggtacgcacgcagttcgtacataaccccttttccaacgaaagcgcagacaaaggattggtcaaggccagagaaatgaccaggaccgcgattttactcgccctatttgtctttctgtgtacttaggtctactctagcgctatttttcactcctatacttacgattaaaacaaaaaaatctgttttgctgcgaataaaagtaactttttgcgtagctgttgggctgcttcttctggatgacttgcggtatgaccgtggcctgcttcgtacgcaatggtacagagctcactaaggtgtccaaaaggtggcaacattttggtgaagctgttggctggccccactaaccggacctgaaaatggtgcagcgctgccggacatttaacggaatcaaagattccacaaaagtcatgtttgcattaacaaaattcatatttaaccttaacaaattcaacaaattaagttaagtccattttagtagcgttgcgaggagtttattttcgaaaatacgcctttgtatatattatatatttttcctccactttaaacaaaatcgaaaggtgtccatttgtcagctatttaaacaatatggcatcgccgccttacttgctcagtaagaaaatttaactgttttttttttgcgcacctgaaagcggcgatagacattgtttacttttagtttatatttacattatccaaaagccaaatgaactttgagcaggtcaatataccagagaaactagtgccggacaactatttgcaactgggactggctgcgcaacgcagtaagcagcgcagttttaaggagctgctcgaaaaggtaatcaaaccgaaattaaacccaaattaattgataactccatggataattcttcttttcaagcgaaagcttccgaaaaatggttggtccgatgaacgtatcgaggagctggtgcacatgctggcttccttggacagcaataactatccacataaggtcggtttaggagagcgggaggcgcgtatagcctgcagtaagtaagggatcaggaggcgatatcccccgtaatgaatttgtcattcagaactcgtggctcgccgtcactacaacttcggtcatggtatcggcagatctggagacttactagaggcacaacccaaggcagctggctctacgctgctcgctcgtctcacaaacgccctgattctggaccttattcggggaatcggactgcccagctgtgctggctgctttttggtgccaatgtgtacaggcatgacattgactttgtg

SEQ ID NO: 3575 - DNA, 1578 bp, DROSOPHILA
tacgaagcaggccacggtcataccgcaagtcatccagaagaagcagcccaacagctacgcaaaaagttacttttattcgcagcaaaacagatttttttgttttaatccaatttattgtatgagtcaaaaaactgaaagaccagtgctatcgggtcaacgcatcaagaccagaaaaagagatgaaagagaaaaatatgacccaacgggattccgtgatgcggtcattgctggtctcgaaaaaactgaaggcgacctggaacaaatctctaaatatctagacagcgcgggcaacaagctcgactatcgtcgctacggtgaagttctctttgacatattgattgcaggaggtctactagtgcctggtggttctatatctcaggatggcgaaaagccgcgcacaagctactgcatcttcgatgcgcccgagagcatggagagcatgcgcaaccatgagcaggtatttgtcaagctcatcagacggtacaagtaccttgagaaaatgttcgaagaggagatgggaaaggttctattattcgtaaagggctttactcctagtgaacgcatcaagcttgcgcgtatgacagcgctctggttagtcaacggttctgtaccgccaaatgttttactggtactaaacaacgagcacctaatcaaggatggcattgcattggagtttctactagagctgttccagacgttcaagcaagagaagggcattgcatatctgattcaggcgcttaagaagggtggactggaaagcaaacttatggactttttcccaccgaacaaacgtactgaggaatattttaaacaagtttttcttgacaaagaacttaacgagatcgtcaagctacataaggctcaggctagccaggaggcgaagcgtgagttgcagcaggcgctcatcgatgatatcaacgatgagaagccatataatgagataacctcagacattaaggacttctcgcagcgcaccaacattcccgatcatgaaataattgttattatttggtccaccatcatgtcattgggcgaatggaacaagaaggaggagctggttaccgatcaggctgttcgtcatctgaagaactactgcccactgttgcaggctttcgcctcgaccgaccgttcggaattggccctaatcttgaaggtgcaggaattctgctacgagaacatgaacttcatgaaggccttccagaaaatcattttgttgttctacaagaccgaggtcctgtccgaggagatcatcttgcgctggtacaaggagggccactcaaacaagggcaaaatgcatttccttgaacaaatgcgaaagtttgtcgaatggcttcagtcagccgaagaagaatccgaatctgaggacgaacaaaagaatggcgagtaagaacttggttgatggctaaatgaggatgaacacaaacggagccgccctttagcatccccatccaaaaattcgaaaccagcacctgcaacagccagtcgaactatatataaaactcacccctatgaattaatgtcattttgaaaactccacctatataaaactcaaaaattccaacaaataaaggagagagt

SEQ ID NO: 3576 - protein, 422 aa, DROSOPHILA
MSQKTERPVLSGQRIKTRKRDEREKYDPTGFRDAVIAGLEKTEGDLEQISKYLDSAGNKLDYRRYGEVLFDILIAGGLLVPGGSISQDGEKPRTSYCIFDAPESMESMRNHEQVFVKLIRRYKYLEKMFEEEMGKVLLFVKGFTPSERIKLARMTALWLVNGSVPPNVLLVLNNEHLIKDGIALEFLLELFQTFKQEKGIAYLIQALKKGGLESKLMDFFPPNKRTEEYFKQVFLDKELNEIVKLHKAQASQEAKRELQQALIDDINDEKPYNEITSDIKDFSQRTNIPDHEIIVIIWSTIMSLGEWNKKEELVTDQAVRHLKNYCPLLQAFASTDRSELALILKVQEFCYENMNFMKAFQKIILLFYKTEVLSEEIILRWYKEGHSNKGKMHFLEQMRKFVEWLQSAEEESESEDEQKNGE

SEQ ID NO: 3577 - DNA, 12965 bp, DROSOPHILA
acaaaataaactagttcttataaaaccacgcggtgggtccttggtaaggataagtgacaagtgaagcttccgttggtcataattacgagttcccttttcggaccttttctccctttctgggggaccctaaagtcgctgtcaaagtgttaaattattcccctaacacgtgctcatgctctcgtaatcactttgagctgctaatttcgacttcggcccagtgctcgaggcaatctcccacttatttggcctgctccctggacaagttcttgggtcgttccggtctataagtaggtcttaagccttttatcgccgggggaagggtgcgcgcaatttccagtttcgggtcccggggcccaaggagcactactgatcatttcgcaatgataaattaagagctaagagtgtttccatgtacccggccgacaatccactgccaaggatcgggggtagattgattatgtccccatgccggtagacactctcccgtcgacgcgggcttgggtcattgtcaacggaggccacgcctgactaaccagccacaatttgcaataggatctcgcctcgagccgattcggccgaagtgagctaagaccagtttatcggacacactcgcccggcggaggataccaagtctcggagaagatttcttgttgaacatatttccagaagccaacaggtgccaatgggctgtgatcaatcattggtgaatcgatttttaattaagaactcttgttagcaattggagagccagctcctcttggcctccttggccacgttgattgccaacaaaggcctgttgaattctttagcccgaaattcccctaacaaaggagcttggctcaaatcgactctgaatttggctacccagcagcgtttgggtcatgatgtttaaatttgtcctaattagttgacaatgagcgatgatgaatcagcggattatagtcgagcgcacaagggtgcacatcttctacattgaatcgtgtaggtgggttaagaaacttattattcgggcttgtttgactcattgcgaaataatatttttcgagttgttagtttataaatgggttaaatgattattagccatattaaaaaaattgttttcactttgtttccatatacaatatattctctttattttgatatacttctcgttagcggttttatttgtatcaataaaatataagtacgaacttacatacatctagagacgcacaacagatgcaaactacattctttaataatatttatagttatcatagttatacaaataatcaattctaacgctaagtttatgccacttatttgctatgacgaatcgttctaggctttatacaaactcttaaacctgaatcctagggtgcttaagtaaaactcatatacaacacttgtggggaattgggactacaacattataaaatgggagtcgtctacctaatggtcggtccttaactaactacgttcactgtatactccgatttgtctttaaccttgcctgaagttcaaggtcattgattcaaaatgaaaaactaaaatctacatagaatgataggggtatttaatttacaatgctgaagtcatcttgaagatatccctgctgattctacagggccgtcagatcgtagtcctgcttgatgtgtagctgaagattggtcatgagatcggattgttgctgttgaaggtgcccatgcagattcgtgtgacccatttgattgttattgttattgttattgaggttgctgttgttgttgttgttgttattattgttattgccgctgccattgttgttgttattgctgaggtgctgctgagatcccggataagagctggtcgtctcaggtgccgccggtatatagggcggattgcccagggacgagctgacgtcaccgatactctccaaactgtcggaacgaatgcactgaaacgaggaatgtagaggaaatcgattaaaatggcgatcatttagcacatggtctatattttccaacagatagggcattcattctaatttgattcttgtatttatacaatattttaattgataagcttgctaagctaaattcagacttatgcgctttaatgcactgttcattatcaataaatgcactcgcaagagtgccaattctggggagtagacggccccttaagtgctgttcctgtcgactttcagcacgctccactcacctcattcatcaccggagtctgctgcgtctgctgctgctgcgactgctgctgctgctgcgcttgctgctgctttttggaggcggcccgcttggtgggtttcttcgctaccggtgttgggttgccgttggcgtccaccgtcttcttgcgcacgttcttggtgttgggcagcttgttgtccttcttccacttcatgcgcctgttctggaaccagatcttgatctgccgctccgagagaactaacgtatgggcaatctcgatgcgccgccgacgcgtcaggtagcggttgtagtggaactccttttccagttccaggatctgatggcgtgtgtaggcggtgcgttggcgttttggctccattcccggctggtaagacccgttcgctgcacaggtaaagacgtaagtgaattttggtcagtaaaaactcaaatcaatatcaatgcattatatttgttaggtcttaatggatatttaaaaagattaagcacaagactgccacaatgttgcaagctattgtcattttccaaaaaagttaaatattttcgccgtgtatatctcgcagaagacgctggattttcataattaatgatcggatgatattaacaatattgggggtgagtatggggcaccacaattaatacacttcaaattgcgttccataacaggccaagttctcaataaatctcccagataagttgacaacccttaaaaggcccccgccaaagttttctcgctttcaccttggaactggacaagtcaatgggatggtggagcgggtggtaccgcaaggggatgggttggttacgggtcacagggctagcccgcgggcacaggaaagagtcgtgtcagttgggactgaataattaatcaaaatcaaatggcgcgcaactgttaggatgtcagggcttgtccttgggcctcccgaaaaattacgcggccacagttagtttttccggctggaaaattaaacacatctgagggttgcatccttccgcttcccccttcactttcttactcagttttctttcatttttatcgccgccagataaatgcctcgcacctgccacccgtccgagatggacatccaaaattatacgcgctccatcaatttcaatttgctgccatctccgctgatgtttctatcagagttacagtccctcgcacttcccgttcggagttgtgcatttataaaaatttcattgctctgtgacagacagctttcgatttgatagaaatatttcaatcccagctcggcggggccgaaacttagattaatgatatgtgtcaagccaaccgttgacaggcccccaaaacaggggattggagcgtccattggtctgggtggtccatcagaaaaatgtgaactaacatgggtcaggtcactgcaggaggaaactgggaaaaatgctctcaagggctgctgacaagtttttattttgttttcttgagccggagtggcatgtcaaaagtttgagttgggaggtgaaaggatagaaatgatattttgaaaaacctcacagactagaataaaagttttggccgcaaggtgtatcaaaacatgaagtttttaaaaaacatcgcagaggcccaagcacttaacttggacaaaatgtctaagatgacgaccagcttaattcacaaagctttaatattttttcctatctgtaaaatgtaaataaaactaacatgtatgactaatccatcaattattgatttggattgctagtgataacccaaaataacacgaatctaaaatcaaaagaaaaccctagaaggacagcaataaaaacgaaccaagccaactgcaatatcaattacaaaaaccccaaaggagcagggaagttaaacagataacgaaacaacaccgtttccaacgtcagctgctcaaaaatgtaggcgctggcggcggcggcatgctgcgttaattcgtttttaataagtgcgtatcatttcatttcaacatttcaacgaaactgccaggccgcgcgaagcggaagaacttcggtacaggccaaaggaaatcgcagtgtcatggcttaagacgaaaaacgaaaacgagaaagagtgccaattgcatttaaaaccggcaagaatggcagccaatttaacgaaaatgccaaatcatacaaggccaaggaaatcaagattgcgcttgtgcaatctcccaggggagacgttcctcgaagggggatgttatgtggtggaaaagtgctaaagagctgcgaaaatgaattggcgcccgcgggtggacttgctgcgtaggcagcagctgctgtccctttcgatcccacactttcgttcggcggtctgagtcaggctgtcggcatgtttgtcccatccaaaatttcatatgatttatcatgcgtttgtgactctacattttcattcagccagagcgagggagagcggacaaaaactatgtcaggcattatttcataatctgctgttgtctggcggcctcatttgtgggcttaaagcaacccgattttgaggtgcggtggccaccggacaacttccgggcttcggttctttacttcattcattttgcattcgaatcgagaagatgcttgaatataaatgattaattgccaagccgataaacagagagtgcgtaaatatctttggttaatccgaaaaagaaatttgactcgtgccaacccgaaacaaacaacaaaaattgtaatgaaaaatagaaagaaatcaaccaaaaatatttaacggctgtcataattcatttatataaacattcatcaaaaacatttatagccagcgtggaaaaaactacgaaaacctgttcacctattagaggaaatcgcatttcgaatgcagctaacaaatgccaagaaattaattttcggtctcactaatgaatgcccaaacggagattgcgcatacgccacgttatccagctgggttctaagtttaaaactttactttgagctcgaagatttggtttttatttcttatattaaagtgtgtgagctcatggcaacaataacaacgagcaaaggaaaaaggcaagtcaacatttcaacaacagcgggagctgcatcagcagcttgtcaagtgacttgcaatttgtggcaggcaaataataaaaataaacatgagctcatgctacttacacatgtacgggcagaacaccaaaccctcgtgtacatatcacataaatatatatatacgtttacatatgtgtagaatcgtgttccaaagtaaagtacccgcagcacttgaactggttgccaagctgtgggagaatcgttctccaactcgaattttgttaatttaaacgcaaatactttgcgcgcttttcaatggcttaagccaagtgcacaactaaatgcttaaatatgttaatttaagtagagtcgaacgaggcaaagttaaaataatctgcgctatactgaccgaaactaattgcacgggaggagctggagatttccacggttcatgctttaaattgtagttcgttaaaaatttatttgaatttagcataaggtttttgtaatccactaaatatacttttgtattgcaaaaatgacttaaggtagttaactttaatttaataagttgtatttgtatgttgaaaaaaaaaaactcttaaagcaaagttgaatttatggttattattgaattcaagtaactatttaaaaatcgttatattatagttggagctatcttgtgatgtaagatgaagaactttcatttaaaaatagaaatattgtttttaatacatttataagataagtaataagtaatgtaagtaatttataagtaatgtatacttgagcacaacattctttaaaaaagaaagtaaaatccattctatttgaaacgttttcatatcttgctatcgatttcccatttgttaaaagtattcgtttcactttcgattctggtactgaacaatgaaagaagcaagtcgaatgaccatcaacaatgttattcaactaagtcgaaaattcagcacttgtcccaagatgattttgctttgttgtgctaacgaaatggaaatagaatggatccgtaaaatcaagcgaaaccgaaaccgtaaagacgccaaagtgcagagtaccaaaagaaagacaagtcaagctaagaagctcacgactcaaactcgaaggccggcgaacaatggagaacgcgtaagacgaccttggagattcgttgctttcaagacaagaacccacgaaaaccccaccgggttcgtttatatttcatatatatgtgcatatcccggtggtcaatgggcagagtgcggcagcagcaataaaagctccgctaattaaagccaatttcaataatttgcacagctccagagaactttattggcttaaattgctgaaccaaaacagagacggcaataaggggagtcaaacagaaatagaaagagaaagagaaagagaaagagagagagagagttagccagcgaacagggatcgctaattatgttttgtgaagaatccagctgagtctcagctgttcgtgccccatctgtcataaacgcgaacttcttaatttttactgcgtcattttcatcattgtcatgccctgggccgccggtgattactcccctgattcctcgccctatgccacccctttcccaacgatttgcactcttgcgaaggcgcaattccagctgagtttttacagcatctgcggctgagactcgtgtatctgaatccgaatctgtatctgtatctgcggcttgcactttttttgcccgtctcggaggcttttccgcaagtcatcgggtaactgtgactctcaggcaaactctgcctcatggtggaaacttaatcgtggacttgccattgaaattcaggtacaaggctgttcacgttccactgttcattgaaagcgactataccgtgtctatagctcagtgtctccccctctataaacacgaaacttgcacgagtttttagccacctcatcttgagccgccttcgtgcatgaaatcaatattgttcagtcaagtcttcgcacagaatttattccgttcagttttggcattagcatgtggtcaacaaaataagtttatggtctaatttcattaaagtattgtgtaacaacatatttaaacataacattaccagcgcagtctaagaaaccataaaacagttcgtggactttaccaatatatgtttactttccagttgttgcataaatttgtaattgtatttggatttgtccaatgtaatacacttacttaaggcgatataaattatctaatcaaatagattcgattattaatataagcgctctgtttattttcgttcatcacatcaaacttaagagtttcaactgcaacctgactgcagcccgattccattaatttttcacaacctttcaacacttttaatgacacctattaaataatccacaaattgctctccaaatgcgattcacacctagctctgcttctctcattcgacggaggcacaagtttgaaacaagttttaggccgccgcagggccaaagcaaattaaattcggcaagagaccacacgccacatcagcggcattcatagtttgggccttagtttcgggcaagtgctaagcgagtgtaagtcatttgtaaagggaataacatgacaccggcgggaacccggggtcacgggtctgcgttttggggcacaacgagacggagaaggagacggatgccaagacgctggataagatgatgcactggcgataatcaagccccgtcttgttctcgtggtcgtgcgctcatgataaatgtcacaacattaacatcaaatgacacggaccatccgtcactcagtcggagttataccctaccgatggaggggcgggggcttggaatcggaatccgagcatgagcccgaagataagttggtatggtgtaccttgcgactgtgtcaaatatgcccccgagcgatcgtttccctgtctccctgcgcgccgcacaacttcgatatttcgtttttgggtttgatttttgatgctgacactaagaaaaactttccacaataaagaaaatcaaatgcgggctttgttgttttattttaaatgtcccaatattagaaatagcatcttagaaaccggtacgaacacaataaatgtgtaatggtatatattaataatatagttaagccattgcttttatatgaccctcggttcctactgtaaagccaaatttcatcatgttaacatgtttaattggattattaaaaattagaaattatttaaaaaccctttagtttgaagccaactttgaattatgtactatatttttttcagtgaaacgacaaatttccacagtcaagtaaatcgggagtgggtactgggaacccgatgaaccgatgaggcatttgacaatgagcgagtcggagtggcgttaagcgaaacgttataattacccatttgggtcaaggttatggtcgaactggagtatccctgtgtactgtgctgtgctaattaaaaagcaatctatcagtagcttcagacctccatccgatcctctgggaaacgcattcgtcacctacttgccgccccgtggcatccctattttggttttattaaaacaataagcgacgacaatctacagttggccgtcagatgttgttggtaacacactcgaaacatggctgaatgaattccccgtttggggggtgacaattaattagtaattatttctgccaggtcaactcaactgagcccattcagtcggtctctggatctggtgaatgaaaccaggcaagaaacctgttctccatgtccaagttgcattcagtttttgtgccaagaatgagtcgaaaaagctttcattgtaggccttagaaaattactgtgtataattcagagagcctggaaattattttctgggggctaagcatatgaatggatacatacaatttttcagaagaacattgaaatgagaatgagtgttcgttaaaatatcttcgaggtttaatttaacgattgtttcttcctagacaaaaatgtttcaattgcctaaaaaaaaaaactacatatatatgcagctctatactacattcccaggatgactttttatgatgtatcaattggcaccgtaccattcagcagtccaagttgattttatgtcagttcaagtgctgaaagaacctctgaagaggcctaataaccaggagcctcttaaagtgctgattgcagcgagtgggactcacttaacgttatgtgcattatattatattatataggagtagtatgtacaggaacttgtcgtttggtgaacacggttcgcccctcgacgcaaggcgtggcactcttgattttgattaatgagcttggagtcgcagttttcttttttaagttactcggttggctggtgtctttggcttttagattgtttattttcattttgggtttcgcccaggaacgaacattacaggggcctgtcagtgaatcaagtgggtgttggcagctaagtaatttaattagcataccccgaaaaatgggacacgacatgggcgcgaaggggagagcaggagataaagagaaactttcaacttaccaactcccgccacatggatcttcttcatccaggggtagatgatccgttcgccatcggtcgtctccgccatcagatcctcatcgctgtctgagtccccgaggtcgtcgtcgttgtcgttggagcccagctcgtctggagatcgatccagcatgagccgatcctcctctgacatatcgtcctaaacaagtcaatcaaggcctcgattacgcattctctcttggcacatctgctgcaagtacttacgttttcggatcccatatcatcacaccgcaatcgcatccctagctcttgcagttgttgtccggcaggtacagcttcttctatgcgtttttctagttttaggcctgcatggaatggaagtcactttagtttggtacagtgtaattagagtagctaaaatcgaattgaagggcttatatatgtacaaaatattagatcttttttaatattactatgcggcataacaatcttgtgggcttattttaagtgtttttctcaatctgctccctagacattttaaaaggtttggatatacgaatgtaaaatgactttgctatggaattgatatataaataaaaaaaataattatataaatataaatataaatatatatttaatataaggatcgattgataatcttcagattattgaaatagtactaagtatatcctcctatcaaatctcaacggattccaagagacaacagaaattctattagtatggactcacctaattcctgcagtcccagcgccgtgttcgtcggtggttccgtggagctgcactgaaggggcagatccatcatctgggagtgcggcgagtgtccttgggagtgggtgctgcccacacttccgttcgccgtcccataacccccaccgtacccgccgtaatatccatttgccgatccacccactgcgccacctccgagcactgcgccacttcctccgccaccaccgccattgctcgtatttggaacgtttgccgccggtccgtatccgttcgtgggatcggagtgcaccgctcctgcggatatgaattcgggggcgtggtggacgtaatagccgaggctctggtgcggatgggcgtgtggatgcgagtgcggatgtgagggcggagtggcattggcataattggaactgtaaccgccggcggatgcctggtggtgtccagatattgcactgttgctatggtggtgcggtagtgagtgggtgtgcgaatgggagtggctgtgcggattgtggtgatgcgccatatagtcactgaccatgtccgccgggtgcatggaatgcggatgaccagtcatcccacctgctccaccacctccgacagacccaacacctgcaccaccgccgacggcaccactcatatgacccgtagatgcggtcatcgaatagtgtccattgtagtgatgatagtcatcggccaacggcggaaactttgggtccaagccattgcccatggacatgggactctggacatgatgtggtgcatgcggataacccatgagaaaagagctcatgacggaaggtctgttggatcggggttcaccggatgcgttttcctggttattactttgttattcgattttttcttgggcactatcacttggattgcacatactccgaaccttttgcttttagtacattaactattgattaaaggcgctgcttttgcaagtagtaattacttttaagattgtgttggttaaaataaatttcgtattctttttaatatttttaactaaacaaaggggttagaaggctcccgttgtcttcataattttcacttttattgttttgattatactttgtttgcacttttttgtcacttttaaaagccgtggggccttggaattctgagaaacttgattatggtgttattttccggttataaaaaacgtttttacaacgaatttcaatcccacacagggagaaaagtcggacgtttcggtcttacgagtgcgctgcgaacacgaaccgtcccattcgagccgattttttgttatgctcgctggcgataactctccgtgcgagcgaacctgtttcgccactcttcgctcttgtttgcttgtgctctcgctcgctctctctcaccgccattgccatcaaaacgggttttcactgccgaagcaatcgaaggacggcccacacacgcgcacaaataaagccattcatatgtagcagccatgtctgttcaccttttctcacccttcgcctcgtacgccattttccaccactgaccatagttctctcgcaagcgcgactgagagggagcattgtggttaaagcgggatggccagatctttggtcacacccattttgagttgcgtgaacagtcaaggcatacaatattgaactagttcaaagaagtattcttaaaaaaaaaaaataaaaagccattaattaaaactttaaaatataattttacttttactgtacagtgtatatattttttttatattttagtaacgtcttatttatttttttacgaaataagcttattttactttccaaggattaataaattgaaatgacagtaaatcgaatagaaaattaaaaacgcaattgtctacatagagaaataggatttctgaattgattcaatgttatatttatatctcaaacagcactgtttagctcattagcacacctacttacctaccctcgactgttcttccctcagacttactattttggttgtacttttgctgtgagtgtgctggtaccttcaaagtcatggcgcacgctcgaaaattgaactcgacgaaaaagttgtctggacccaagaaactccgcccattttcagaaggctttcatcgatcccggacaagacgtaagtgtggatatggagcacaccatttattttccactttcataaatggattctgtaggaacgatgcagagaacgcgtgggtaacaacagtattgatcgtaaagaggggacggtactattggatgccgatttcttcgtctgaattcagctaccgagttggagagtccgagctgacttgcaacaatttcaattgaacaaccaacgaatatcactttgttctcctctgtgattattgttgtggtctggctggggctaaggctgttattattgttgtcattactaccgtgatttttcctccgatgttgttgttatggcgatgacgggcacatattcaaatggagcaagcgaaacgtggaaaatcaatagaatgattgttgtataatgcacatcgagaaggttggatatttaatgctttaatattgtttttagtaaatatt

SEQ ID NO: 3578 - DNA, 3120 bp, DROSOPHILA
ctctcagtcgcgcttgcgagagaactatggtcagtggtggaaaatggcgtacgaggcgaagggtgagaaaaggtgaacagacatggctgctacatatgaatggctttatttgtgcgcgtgtgtgggccgtccttcgattgcttcggcagtgaaaacccgttttgatggcaatggcggtgagagagagcgagcgagagcacaagcaaacaagagcgaagagtggcgaaacaggttcgctcgcacggagagttatcgccagcgagcataacaaaaaatcggctcgaatgggacggttcgtgttcgcagcgcactcgtaagaccgaaacgtccgacttttctccctgtgtgggattgaaattcgttgtaaaaacgttttttataaccggaaaataacaccataatcaagtttctcagaattccaaggccccacggcttttaaaagtgacaaaaaagtgcaaacaaagtataatcaaaacaataaaagtgaaaattatgaagacaacgggagccttctaacccctttgtttagttaaaaatattaaaaagaatacgaaatttattttaaccaacacaatcttaaaagtaattactacttgcaaaagcagcgcctttaatcaatagttaatgtactaaaagcaaaaggttcggagtatgtgcaatccaagtgatagtgcccaagaaaaaatcgaataacaaagtaataaccaggaaaacgcatccggtgaaccccgatccaacagaccttccgtcatgagctcttttctcatgggttatccgcatgcaccacatcatgtccagagtcccatgtccatgggcaatggcttggacccaaagtttccgccgttggccgatgactatcatcactacaatggacactattcgatgaccgcatctacgggtcatatgagtggtgccgtcggcggtggtgcaggtgttgggtctgtcggaggtggtggagcaggtgggatgactggtcatccgcattccatgcacccggcggacatggtcagtgactatatggcgcatcaccacaatccgcacagccactcccattcgcacacccactcactaccgcaccaccatagcaacagtgcaatatctggacaccaccaggcatccgccggcggttacagttccaattatgccaatgccactccgccctcacatccgcactcgcatccacacgcccatccgcaccagagcctcggctattacgtccaccacgcccccgaattcatatccgcaggagcggtgcactccgatcccacgaacggatacggaccggcggcaaacgttccaaatacgagcaatggcggtggtggcggaggaagtggcgcagtgctcggaggtggcgcagtgggtggatcggcaaatggatattacggcgggtacggtgggggttatgggacggcgaacggaagtgtgggcagcacccactcccaaggacactcgccgcactcccagatgatggatctgccccttcagtgcagctccacggaaccaccgacgaacacggcgctgggactgcaggaattaggcctaaaactagaaaaacgcatagaagaagctgtacctgccggacaacaactgcaagagctagggatgcgattgcggtgtgatgatatgggatccgaaaacgacgatatgtcagaggaggatcggctcatgctggatcgatctccagacgagctgggctccaacgacaacgacgacgacctcggggactcagacagcgatgaggatctgatggcggagacgaccgatggcgaacggatcatctacccctggatgaagaagatccatgtggcgggagttgcgaacgggtcttaccagccgggaatggagccaaaacgccaacgcaccgcctacacacgccatcagatcctggaactggaaaaggagttccactacaaccgctacctgacgcgtcggcggcgcatcgagattgcccatacgttagttctctcggagcggcagatcaagatctggttccagaacaggcgcatgaagtggaagaaggacaacaagctgcccaacaccaagaacgtgcgcaagaagacggtggacgccaacggcaacccaacaccggtagcgaagaaacccaccaagcgggccgcctccaaaaagcagcagcaagcgcagcagcagcagcagtcgcagcagcagcagacgcagcagactccggtgatgaatgaggtgagtgagtgcattcgttccgacagtttggagagtatcggtgacgtcagctcgtccctgggcaatccgccctatataccggcggcacctgagacgaccagctcttatccgggatctcagcagcacctcagcaataacaacaacaatggcagcggcaataacaataataacaacaacaacaacaacagcaacctcaataacaataacaataacaatcaaatgggtcacacgaatctgcatgggcaccttcaacagcaacaatccgatctcatgaccaatcttcagctacacatcaagcaggactacgatctgacggccctgtagaatcagcagggatatcttcaagatgacttcagcattgtaaattaaatacccctatcattctatgtagattttagtttttcattttgaatcaatgaccttgaacttcaggcaaggttaaagacaaatcggagtatacagtgaacgtagttagttaaggaccgaccattaggtagacgactcccattttataatgttgtagtcccaattccccacaagtgttgtatatgagttttacttaagcaccctaggattcaggtttaagagtttgtataaagcctagaacgattcgtcatagcaaataagtggcataaacttagcgttagaattgattatttgtataactatgataactataaatattattaaagaatgtagtttgcatctgttgtgcgtctctagatgtatgtaagttcgtacttatattttattgatacaaataaaaccgctaacgagaagtatatcaaaataaagagaatatattgtatatggaaacaaagtgaaaacaatttttttaatatggctaataatcatttaacccatttataaactaacaactcgaaaaatattatttcgcaatgagtcaaacaagcccgaataata

SEQ ID NO: 3579 - protein, 589 aa, DROSOPHILA
MSSFLMGYPHAPHHVQSPMSMGNGLDPKFPPLADDYHHYNGHYSMTASTGHMSGAVGGGAGVGSVGGGGAGGMTGHPHSMHPADMVSDYMAHHHNPHSHSHSHTHSLPHHHSNSAISGHHQASAGGYSSNYANATPPSHPHSHPHAHPHQSLGYYVHHAPEFISAGAVHSDPTNGYGPAANVPNTSNGGGGGGSGAVLGGGAVGGSANGYYGGYGGGYGTANGSVGSTHSQGHSPHSQMMDLPLQCSSTEPPTNTALGLQELGLKLEKRIEEAVPAGQQLQELGMRLRCDDMGSENDDMSEEDRLMLDRSPDELGSNDNDDDLGDSDSDEDLMAETTDGERIIYPWMKKIHVAGVANGSYQPGMEPKRQRTAYTRHQILELEKEFHYNRYLTRRRRIEIAHTLVLSERQIKIWFQNRRMKWKKDNKLPNTKNVRKKTVDANGNPTPVAKKPTKRAASKKQQQAQQQQQSQQQQTQQTPVMNEVSECIRSDSLESIGDVSSSLGNPPYIPAAPETTSSYPGSQQHLSNNNNNGSGNNNNNNNNNNSNLNNNNNNNQMGHTNLHGHLQQQQSDLMTNLQLHIKQDYDLTAL

SEQ ID NO: 3580 - DNA, 3716 bp, DROSOPHILA
ccttagccgtcttggtctggatgcttaggtgcgccacatgactaatgctggccaaggcctctcctctgaagccaaatgttgctatctgggacaaatcctcgaagcgggtcagcttggaggtggtgaaccgctcgcagacgatggccagatcctcgcgtcgtatccccgtgccattgtcctggatttgaagcagcttcagcccaccggccttcacctgcacctggatgtgggtcgattgggcgtccaaactgttctcgagcagctcttttagggcgttggcgggtcgctgaataatctcgccggcggctatgcggttcaccaccacctcgtccagcttccggatgactccaggctgcaaatattccgccatggcgggaaatcttcacgcgaagtttaatgtaaacaaaaagtagtgtgcccgtttgtttgcgcgggagtatacaagagataaaacggtctatgcggtaaggcggtaaatttgaattgtgatatcacttcgtttataaaacgacgaatgaacaaaaattgcagaaacataacttaatttaaaactaaacgaaaaacggaccggttagttaacaactcctttattaatgggttaacaaaaataactcttttcaatttttacattcgatgttgtattaatatatatatatatggtgttttccgtcataacctttagttcatacatttgaatatttcgtttcttttagtttcaggtatattcatcagctttgaggtaacgtttgatatatttctattgcgttctaacatatatagtcttaacgagaaaacggttgttaaatgtattgagagattacgcgtttcctaacagttagaaataacaattgataaacttcgattcgaaatatgagttaaacttttctttaacctaaaactatttggatttgcaaaaaaattccgccagttcagagcggtaaggaaaaccacgttcttcgtaaacgttggaaataatatgaggaatgttcttgagcggatactatgagaaccacttgcacttgaggcaaatgaaaactgagattccaagtataatggtggtgtacttgaagtagctgcgcacctttttgcgttttcgctctgcgagtatttcgttgaagtcaatgaacaagggattctgagaggggctaaaggaaccaagctaaaaatatatttaaaagaagtgagtgtcctgatacaagaacaattgaaatgcgacacttacatatttgactgtctttgtgatttggttgagtacatctcgatagccctgaaggttgcttttcatcgcagccacctgcatctccgaaggttgccccattttattgtgctcctggtttttgaggatgaagcgcagggaggcctgaataatgaccaagtgttgcagatgacttgcggtgatcagtaggatctcatagaagctggaagaatttttgggttagttgaaatagtaacagaataaaccaccactcacttgttcatctcatcctttttgacccgagctatcgacgagttgctccaatgatgaagatgaaagctgtaataaagggacattttattacaagttccataagagttttaattctactcactcaagaatgcccgtcagtatcttgtgacggaagatgggatactcgatgccgatctcgcgaagtgactgctcatccatgacgaggaaatctgccagcgagatcctcgcaatggcaaagtattgaaccatgttgccaatattgatggcctccagtatgccgttaagttcttgaaaatattccgggcaatcgctcttaaggaagatgcgtggaatgtgatcccttagcgtgttgtagcccaggaagtgcgtcggcactaggtaagtggaggctggtcgcggcaggatctccagcaggtcgtagtatccatggcactccgccacctgggtgggcgtgtagcctttgttgttggctatcgtggcattcgcgcccgcctccaccaacagcttgaccacttccacgtgatttttctcgatggcatgaaagatggcagtgcagccctgattatccacagcatcgaaactagcatccttaataagcagacgcacaacgccggcaaagccattttggcaggcgaacataaagggtgtcattccatatttttccgaaacattgatcacggctccgtgccgcaagagcaggcccacaattctctccgccaggcacggatccttgtgggtggtattgcaggccatcatcagcggcatcaaggaatccagctgccgattcacgttggcccctgccctttccagcagccattcaactattttgtagtggccctcgcgacaggcgagcatcagtaagttaagaccaccttttactggctgatccacttggaggacgagtttgcgcatctcctcctgcatcgtcttgagatccccagcgacgactgcatcgtagagcttttgctcgggatccacgtaaggagctggtttcgagcgtttcacctatacagaaattactcaagtcacccaaggaacaccagaaggaacagaacaaggaacacataccttatccgagaagtagaatccatcgtagctgctatcagagtcggaatctgggggcggtccgtatttgcaaaggttgctcatcatacaggtacttatataaacctaatttagcagtttaagcacacaacaattgtggccaaattcaggaaaaaggcgaaaggaggaaaatggcaaacaaaactagtgaggggaggcgaggttctgaaaaagtttgcacaatcgatttttatcgatatcatggcgcgctttttaaactaagctaaattaagataaccgaaactaatttaagcaatagtaaatttgcagttatattagaaagtttaacactctgattatgcagattcgcaattttgttttgaggtgtcatatgtttaaagcaaattaaaaaaattaaatgccttaaagaagaaaaagttttattttacaagtatacgatttaacatagcgtagtttgcagctctacttctttttatccttcttggcgtgacgaggtcctccgaagttcttgcccttgttgaacttattctttcccgccttgtttgtcagcttcacactgctcgcctttttcttagcagcgatcttggtcatctttttgtgccgattggcctcggacctggaaaagggtgtacaaaattagaacaactatcaacgaaaagcgagaaagagctactcaccttagacgcagagctccgccacgacttacatcggtcaagtcgttagtaaatgccgactgaccgccgcgtcgcttgggtttgccgtcggaggcaccgcttctgtgaacttcggtggcggctcctagtttgcccggacgtttgcgcagcttggccatcttggcgcgcacaagggacaccttctcgatctccttcatggctcgctctttggccagctgctccggtgtcttctttcgaggctcctccttcttcttcttgttgcgctttgcctcgagatccttgaccggtggtccatcctcgccatcgcctccgtactcgggtcgcttacgctttccggccgtttttcccttaccctttccaccagatgctttatcctcgtcgccggttgtcaacgctaagcgatccttctccgcctcgcgttgctgtttcgtctggaaccaaccacgtcgctcgttggtctgtcccagcagctttcgctccgttttggagagctgttgctccgttttggc

SEQ ID NO: 3581 - DNA, 1458 bp, DROSOPHILA
ttttgtttgccattttcctcctttcgcctttttcctgaatttggccacaattgttgtgtgcttaaactgctaaattaggtttatataagtacctgtatgatgagcaacctttgcaaatacggaccgcccccagattccgactctgatagcagctacgatggattctacttctcggataaggtgaaacgctcgaaaccagctccttacgtggatcccgagcaaaagctctacgatgcagtcgtcgctggggatctcaagacgatgcaggaggagatgcgcaaactcgtcctccaagtggatcagccagtaaaaggtggtcttaacttactgatgctcgcctgtcgcgagggccactacaaaatagttgaatggctgctggaaagggcaggggccaacgtgaatcggcagctggattccttgatgccgctgatgatggcctgcaataccacccacaaggatccgtgcctggcggagagaattgtgggcctgctcttgcggcacggagccgtgatcaatgtttcggaaaaatatggaatgacaccctttatgttcgcctgccaaaatggctttgccggcgttgtgcgtctgcttattaaggatgctagtttcgatgctgtggataatcagggctgcactgccatctttcatgccatcgagaaaaatcacgtggaagtggtcaagctgttggtggaggcgggcgcgaatgccacgatagccaacaacaaaggctacacgcccacccaggtggcggagtgccatggatactacgacctgctggagatcctgccgcgaccagcctccacttacctagtgccgacgcacttcctgggctacaacacgctaagggatcacattccacgcatcttccttaagagcgattgcccggaatattttcaagaacttaacggcatactggaggccatcaatattggcaacatggttcaatactttgccattgcgaggatctcgctggcagatttcctcgtcatggatgagcagtcacttcgcgagatcggcatcgagtatcccatcttccgtcacaagatactgacgggcattcttgactttcatcttcatcattggagcaactcgtcgatagctcgggtcaaaaaggatgagatgaacaacttctatgagatcctactgatcaccgcaagtcatctgcaacacttggtcattattcaggcctccctgcgcttcatcctcaaaaaccaggagcacaataaaatggggcaaccttcggagatgcaggtggctgcgatgaaaagcaaccttcagggctatcgagatgtactcaaccaaatcacaaagacagtcaaatataatcccttgttcattgacttcaacgaaatactcgcagagcgaaaacgcaaaaaggtgcgcagctacttcaagtacaccaccattatacttggaatctcagttttcatttgcctcaagtgcaagtggttctcatag

SEQ ID NO: 3582 - protein, 453 aa, DROSOPHILA
MMSNLCKYGPPPDSDSDSSYDGFYFSDKVKRSKPAPYVDPEQKLYDAVVAGDLKTMQEEMRKLVLQVDQPVKGGLNLLMLACREGHYKIVEWLLERAGANVNRQLDSLMPLMMACNTTHKDPCLAERIVGLLLRHGAVINVSEKYGMTPFMFACQNGFAGVVRLLIKDASFDAVDNQGCTAIFHAIEKNHVEVVKLLVEAGANATIANNKGYTPTQVAECHGYYDLLEILPRPASTYLVPTHFLGYNTLRDHIPRIFLKSDCPEYFQELNGILEAINIGNMVQYFAIARISLADFLVMDEQSLREIGIEYPIFRHKILTGILDFHLHHWSNSSIARVKKDEMNNFYEILLITASHLQHLVIIQASLRFILKNQEHNKMGQPSEMQVAAMKSNLQGYRDVLNQITKTVKYNPLFIDFNEILAERKRKKVRSYFKYTTIILGISVFICLKCKWFS

SEQ ID NO: 3583 - DNA, 3163 bp, DROSOPHILA
agcataatccaaaatgcgacgtcgcttgcgagagctctccacaacatgtcctatggaattgcggtgatcctgagtgactagaagtgaggaaaattagatttcagctcggtttatagtcagcaagacataccaaatggcgtcacgtggggtgagaccacatcgatttcatcatcatcgcgttcgatctttttcacctctggctttatgtcctccacattaatgtgcgatgagaggctgtgcagcagggtctcgttggtctccacccggctgcgaatgcggcccacattcatgtgcgtcttctgcagctgcgtctgccggttgtgctcgaagcagagggtcgtcaggatcagctccttcttgttgtcatacttggccaccgcgttgatgcacttcctgccgttcgagtagacgtgcgagcactgtcggaagttggagcgcgggtcgcgcaggatgtgtcggatgcaatactcgtagccctcgatccgcatcaggctgcactcgtaggtgggattggcgcagtacttaatcttgaccagctcgctgtggatctgctcccgcagctggtgctccttgtccggagtgcagggcgtgccggtgaagcgggcgcactgccgcaattggtttggcgaaaagctggacatcgtcctttcaagatttttgccgctttttagaaattgttctctgatttttcagacgaagcgaaatgaaataaaatgctgtggaaacagtgtgaccacagcaaagtagagcataaataccccacacgttgtcacgcttgccaaccagtcagcatcgccatgaaccaaaagagggtatcccacctcccatgttgagtttctatatttaaaaatatcttaagattaaggttaaatttgataaaaatgctgtctaagttggcatctaaaaccaattggagatttattaggttatgaaattcgtttctttctctaacaatattattactctaataaacatagcttagagcctgaggatttatggtttaatggggaaaatggcaaaatgggtggtagttgtcgaactccgatggcaaatcgtctgcttcgcttaaaatgagctggatctgggccattcgtatgccatagcgcaacttgtagtccactgcatccagttgcgggatgcacctccggttgataaggagcaggaaactctgactgatctccatgacttcctccgccctgaggatggaccagtccgacatgtccacatttaggttctgggctctcaagcagatcatgatccggttgtggtccgtttgacccgtgggcaaccagatgcgcgcctgaggcgcaaatggtacatcgctgacatggacgagcttgatgcgcatgtcatgccacgagttgctaatcgcggcaacacagtccgacaggaatacctttgaaaatccgtcttcgcaccggatcactcggtggccacgaactacgtctgagctatcgaaggacgggacgggaccccccggcatggccatgactctgtcagtcaccatgtacgccagctgggcctcgacctcctgccacctttcgttaagcagacggccgtcttcgtggagctcgtccaccagggccatcgtcaggttgtcactctttgccaaattgggcttcgcagccataggaggacttgtattcttgggtccctttgccttcttgtgggcactagcctccttggagccctttgcctttttgggttcaagttcactagccttcttgagtgccgctttattttgcttcttacgcttccttgcttttttacccgcacccctggtaaccaccgatttcgctgctcttgcctctgtattccgtattttcttggctcgagcgcgtgcgcgcctggacatttccttctcctcctttactgcacgtttttgattagcgtcctgtggagataagcggggcttttcttcagggggctcggattttacactccggagagagtcgccacgatcttgaaggaccaagtgtagcagttagcatcgagaaggctgacaacacacgacttaccattgtcatcgattacaatcacatcctcgaacttctgagcccttatattttcgttattgcagaaagagtccttcctttttgtccaaatactggacattttgtcaattattgcgtcttggtttctcagagctaagcaataaacaaaatgtgtttaccatcgaagcgcgaaaaaaggcctaaaaataactgtagttccacgtggttgcaacccatgatagacaatcagcggtggcgcaaaccagggcggaatttaaaaacaatccaaattcgttccttcaatcgtttatttatttcataaactgtattgtctttgtacaaacaggaaaagctcttacttacttgatgaacaaaacgggccgcttgacttgaactgggtatttcgctggcgtgaacaagcttaatgcatagtccatcccatgcgtcggctaattgctcaatgcaatcctctaggaagatcttagagaagccgtcctagcacctgatcatccggtgtcctcgaataacaaatgaggagtcaagcaacgggtgaggtccttgaggcaccgccgcccgtctatccgccacaatgcgagccagcctcgcctcgatctgacaccacttttcgaagagcaagcagccgtctgcgtggcgctcgtctaccagggccattgtcgggttgtcctggatcaactccttgtacttccaggcctaaatagacagatgcatctgcatctccgtttgtgattcttcccatttgagtccgatggtccgtttcgcttacgttgctgctgatcgctactgattggtgctctgcgctgaacacatcaagagcgttctaccctactccttgacacgtttgaagtatcactttccccctccgttccaagccctaggaaactaagaggggtctcaacttaataatgtgggtgcaccagatacccggctaacatacccttataggccggttttacgttcctgttctccaaggaacggggagttgaagcaaggcctggtttttacgtgaatatctagtcatgattaaggatccgtatttccgtgcttctgctgaattaatcttcgcagaagtaaacaaatctctgcctgctttctagcgataactgacacaacctacttcgatattggaagttatcgaggagtgtgaccgc

SEQ ID NO: 3584 - DNA, 1107 bp, DROSOPHILA
tttgtttattgcttagctctgagaaaccaagacgcaataattgacaaaatgtccagtatttggacaaaaaggaaggactctttctgcaataacgaaaatataagggctcagaagttcgaggatgtgattgtaatcgatgacaatgatcgtggcgactctctccggagtgtaaaatccgagccccctgaagaaaagccccgcttatctccacaggacgctaatcaaaaacgtgcagtaaaggaggagaaggaaatgtccaggcgcgcacgcgctcgagccaagaaaatacggaatacagaggcaagagcagcgaaatcggtggttaccaggggtgcgggtaaaaaagcaaggaagcgtaagaagcaaaataaagcggcactcaagaaggctagtgaacttgaacccaaaaaggcaaagggctccaaggaggctagtgcccacaagaaggcaaagggacccaagaatacaagtcctcctatggctgcgaagcccaatttggcaaagagtgacaacctgacgatggccctggtggacgagctccacgaagacggccgtctgcttaacgaaaggtggcaggaggtcgaggcccagctggcgtacatggtgactgacagagtcatggccatgccggggggtcccgtcccgtccttcgatagctcagacgtagttcgtggccaccgagtgatccggtgcgaagacggattttcaaaggtattcctgtcggactgtgttgccgcgattagcaactcgtggcatgacatgcgcatcaagctcgtccatgtcagcgatgtaccatttgcgcctcaggcgcgcatctggttgcccacgggtcaaacggaccacaaccggatcatgatctgcttgagagcccagaacctaaatgtggacatgtcggactggtccatcctcagggcggaggaagtcatggagatcagtcagagtttcctgctccttatcaaccggaggtgcatcccgcaactggatgcagtggactacaagttgcgctatggcatacgaatggcccagatccagctcattttaagcgaagcagacgatttgccatcggagttcgacaactaccacccattttgccattttccccattaa

SEQ ID NO: 3585 - protein, 352 aa, DROSOPHILA
MSSIWTKRKDSFCNNENIRAQKFEDVIVIDDNDRGDSLRSVKSEPPEEKPRLSPQDANQKRAVKEEKEMSRRARARAKKIRNTEARAAKSVVTRGAGKKARKRKKQNKAALKKASELEPKKAKGSKEASAHKKAKGPKNTSPPMAAKPNLAKSDNLTMALVDELHEDGRLLNERWQEVEAQLAYMVTDRVMAMPGGPVPSFDSSDVVRGHRVIRCEDGFSKVFLSDCVAAISNSWHDMRIKLVHVSDVPFAPQARIWLPTGQTDHNRIMICLRAQNLNVDMSDWSILRAEEVMEISQSFLLLINRRCIPQLDAVDYKLRYGIRMAQIQLILSEADDLPSEFDNYHPFCHFPH

SEQ ID NO: 3586 - DNA, 3098 bp, DROSOPHILA
actggatgcgtagatttatatggaagaggagagtaggggggagggtaaacaaatcgattcacttggagaccccgtgtgccaggtaacatatactactacatgctatatattgtagatataccatctatatgtatacatatgtatgtacccactaattggaatggccgtggctgatgaaaagcagacgcacccggttaatcgggctgtttcactttgatcggtccagttttctcggcttccccggatctccatctccgctggtcccacattccgggctccaatggccaacagacgccattttcgaccgcccatctcactccctcttgtggcggaggtggtggccgccgctacactgagcgcaaatgctaattcaaattttgtaagaaaaatcaatataaatttaatgacaatttgcgagcttgaactttataacaaagttgcagagctttcgagagaagattactcgagttaactctttaagatgctgaccttgacattgacattcgatcacacattatatatataatatattagttgggttctttccaaaaggaccataagttttgatatatagtgtagtattatatagtagcggttaataaaacataggcaattaattaaattaaatcgttaagcaagagccggcgataacctttcgcatcgagtgaagcttaaaccgtgagagaaatgtgcgaatcgagagcacaaaaagcggggagagcgggagacatgggcgggtatattggggggctaaaatttccaaaaataataattaattgtttctacaaatactaatacctttaaatgaataaacgaaatgaataacctggtcatcgctaaaagtttactatgatactatttaatgggtatcaaaaactacactacttatattacccccttttagaaagtagttttgcttacgctcctggtcataaaaataaaagcaccaagctttagtcagctgtgcaaaagctgccggagaatcaggtaaaagccaaagcgagttaaggcaaaaagacagccaactgttgccacttcagcggtgtggaaattagaaagtaatatagtccgtgtttttcacgcaatcatggacctgaaacagcgcacatatctcctggtgaccggtgcatcacgtggaattggccgtgagttcgcccagcagttagccaaacggatcaaagccgagggttccatggtgacgcttctgggacgcaatcaaacccttttgcaggagtctaaggcagagattgtcgccacagtgccagatctatccgtgcaaacctattcgctggagctggaaacggccaaaacggaggactttaccaagattctggaggcatccggtggaaagaacaatttcgagcgagccatagtcattcataatgccggcacagtgggcgatacgtcaaagagggccaaagaaatcggagataccgacttcctacagcgctactaccactccaatgtcttctcggccatttcgctaaactgcgagtttatgcgcgtcttcaagggaatcccaaagttggtggttaatctcagcaccttggcagccattgcacctatatcctcgatggcacactattgcacggtgaaggcagcccgtgagatgtacttccgagtgctggccaccgaggagtccgccgaggacaccctggtgttgaactacgcgcccggcgtcatagacacacagatgaccgtccaggttcagcgagaggcccacgatcccgccgtggtcgccatgtttcgagagcaaagggagtccaagaccatgctgactcccgcccaaacgacggagcgattcatcaaagtcctggaagcattcaagttcaagtccggcgatcatgtggattacagggatgagcagttctagctagttaatcagtatgttgctatctgtggtaatggggtttttcgtattgaaacattaaaatgaaactaaaaatgtgcgcaagtgtttttgctacaacacccaatacatcttaatgaacttcaaagctgataagatatgtgtatgatgtttatgatttacgcattcttaaatcttctttccaacaactcggcatctatttataagaaatatacaattcgtaacaacactgtgggactatgtatagtattctctaatgaaattaaacatgaataatgtagctgggttatgggtaatgttatgtactaaaagaaatcggctgcagtgcgtcgtttagtgggtatcttgagcagatcgtccgtgagcgtggatcccgtatcaatggtaacgttcttagccggagtgctaatcttggcctgctgtttgggtttgggttcacccagtattggcgtattggtgctcctcaccacgccgggcgtaacctttcgttttctgccgctcatcggcgatggtgtgtgccttaatcggggcgtgccgcggatacccagcttacccgtggccagtagctgcgctgccggcgacatgctggccagccgttccatattggtgcgtatcagtggtgagccaatgttacgacgcgccgtatccagagccatttgtttttgatttcgcatcctttcgctgaccctttcggccaaagcgatggcgatgttttcgcgccgagagttctcattaatccggaacgagggtccttgtgtgggccgcaatggggtatcgcctccgtccaggcgaaagggagtgccatcgatctcaccccaggtcattatgggcgagaaagcctctccgggtcgcggtgatggtgaacgcaacaaatcgaagccgcgtaccttcggagtagctgtggcaccaccagccccattttggggcacttcatcattcagctttttagtgtccatttcgcgatgctttgcctcatcgggcagcctggtggcattgtgttggatgctctgcttccgttcggccaactggacgcgctcctcctctgtgtactccacgccatcgggcacgtacataatggaattcatgttggtgtagttccaggtttcgatctttctcagcggatctggctcctcgaattgcgtttctatgctgggcagcattagggcccgctgcagttgctctgcggagagcttctcatggttgtacagtactgcgtatttttggcgca

SEQ ID NO: 3587 - DNA, 1098 bp, DROSOPHILA
cgagttaaggcaaaaagacagccaactgttgccacttcagcggtgtggaaattagaaagtaatatagtccgtgtttttcacgcaatcatggacctgaaacagcgcacatatctcctggtgaccggtgcatcacgtggaattggccgtgagttcgcccagcagttagccaaacggatcaaagccgagggttccatggtgacgcttctgggacgcaatcaaacccttttgcaggagtctaaggcagagattgtcgccacagtgccagatctatccgtgcaaacctattcgctggagctggaaacggccaaaacggaggactttaccaagattctggaggcatccggtggaaagaacaatttcgagcgagccatagtcattcataatgccggcacagtgggcgatacgtcaaagagggccaaagaaatcggagataccgacttcctacagcgctactaccactccaatgtcttctcggccatttcgctaaactgcgagtttatgcgcgtcttcaagggaatcccaaagttggtggttaatctcagcaccttggcagccattgcacctatatcctcgatggcacactattgcacggtgaaggcagcccgtgagatgtacttccgagtgctggccaccgaggagtccgccgaggacaccctggtgttgaactacgcgcccggcgtcatagacacacagatgaccgtccaggttcagcgagaggcccacgatcccgccgtggtcgccatgtttcgagagcaaagggagtccaagaccatgctgactcccgcccaaacgacggagcgattcatcaaagtcctggaagcattcaagttcaagtccggcgatcatgtggattacagggatgagcagttctagctagttaatcagtatgttgctatctgtggtaatggggtttttcgtattgaaacattaaaatgaaactaaaaatgtgcgcaagtgtttttgctacaacacccaatacatcttaatgaacttcaaagctgataagatatgtgtatgatgtttatgatttacgcattcttaaatcttctttccaacaactcggcatctatttataagaaatatacaattcgtaacaac

SEQ ID NO: 3588 - protein, 261 aa, DROSOPHILA
MDLKQRTYLLVTGASRGIGREFAQQLAKRIKAEGSMVTLLGRNQTLLQESKAEIVATVPDLSVQTYSLELETAKTEDFTKILEASGGKNNFERAIVIHNAGTVGDTSKRAKEIGDTDFLQRYYHSNVFSAISLNCEFMRVFKGIPKLVVNLSTLAAIAPISSMAHYCTVKAAREMYFRVLATEESAEDTLVLNYAPGVIDTQMTVQVQREAHDPAVVAMFREQRESKTMLTPAQTTERFIKVLEAFKFKSGDHVDYRDEQF

SEQ ID NO: 3589 - DNA, 5540 bp, DROSOPHILA
gcagccatcaactcgcaaatacggttagtgaccagttaacctattccagtgaagaatacatttgaattaaaccacttttagtgaggtagagcagctgattaatggactgccggtgccaccaacaccctattctctcgggaacaccgcctacctggcgcaggaaacttcgcaggatcgacaggctctataccctcagctggtgaacagctacaagtggatggacaaggtgcacgaccacagcttcttggccttcaacaatctcaaccagaacacactcaggcgctcctacaattactgctcgcagaagcgccagcgactgcccttctcgtccttcaacaacgatccagagtaagtacgaagtgcgcagcttcactttaatattaacatctttcttcctctgattcttagccacatagataagctcctgagtgagatcaacacccctccgcatacttcgtacagaatttttcgtcccttcggcacaaacgctgtcaccatcgtaacaataagtaacgtgatgaaggcggctattgtcttcaaaggagtgcttatagagtgggttacggttaagggattcgatgagccgctggagcatgacgacctgtgggccgagtcacgttacgaggtgttccgcaaagtccaggatcatgctcactcagcaatgctgcatttcttttcgccgacgttgcccgatctggcagtgaaaagctatataacctggctgaacagccacgtcaaacttttcctggagccctgcaagcgttgtgggaaattcgtggtgaacggattgcctccgacgtggcgggacctgcgcactctagaacccttccacgaggactgccgaaattgctaaggatttttaagtaatttaacgccgatagttgtaacttgtatacttcatttatttcaaaaacaaaaattatatgtactttgaatgcatgcgggcggattttttaaaatcgctgcgcccgactgaataactacaacggtttaatgcgtttcattggccaaccagtgcagaagtcgtccgcttcgatttctgcacctgcgtctgaacgccgtgctgcacgcacagtcgctcgaagttggcgcgcagttttgcgcggagctcctctcgctttcgctgcacttgctcccggtggcacttgaaggccataaccacctcctggggaatgtaatatgtctcctcgtctttgtcgtcgtattcgtcgaagtcgtcctgcaattaataaagttttattactttaatttcgatatggcaaatcatttgcatagcccactctgtctagaatattttctggtaattaattccgaccctaagctcttgatgataagagtcgacagggcttgccgcaagtcttagattatgtttaaaaaacaataattacaattttctttttctatttttccacttcctatttttatagagacaatcttgcgactcacccacatctgcaacaatgaaaacttgtgatccaactgcgactggtgactgtagaagagcaagtcgtctgagtcctcatcgtggacgtcgtgattacacagtccatccgagcaagacacttccgagccttctggtgacgaaatcgcgctagatgtccgagagccggcatgcgaaggtggatcgctgccgtatccagaatcgcgcacatcctgctcgcacgggcagttaggcatggacgccaggcactcctcgcacttatcgccaaccgttttggcgatgcttgacgaaatgcaactggccacgtcaagttgatcgtgatcagcatccagcggctggaccctagccgtggcttgcatctgcttttggttgcccatctttgtgaaggccgctttcttctgcttctttttcttcgattgcttcttcggtttcgatttcgttggcttggacgttagctcgggttcgggctccgggctccgggctgcctctataacaatgccatcgtccgcacctggatcgcttagctcctcatgctgcatctgactctcctcctccaggtctagttcctcattccgcaactcttcctcctcctcgtcagactcgttggcctcggtatcgtcgcattgccggtgcagcaagttctttttctcgtccttcttcttcttcttcttgagcttcttctgctcgcgcttgatctgcttggccctctcagcacggctgatctcttggtagagtagctccagattgctgattccctgcttctgctccacgaacgtgtcaaagctgcggcaaagggcgtggacacccacagcggccagcacctggcatgcgcgctcctcctcccgcagactgacgtagatgcgacgcagccgttcgtacataatcatgcccacgcaggtcagcacctcttcctgggcaatctccagcgtcttagcgtggcgctcgcgcagtttagagtagctaccgttcacctcgggctcggcccgcttgatcagcgcgtccaggaactctatcttgtttgtggtcacgtggatgtgctggtcgggcacgcacttccgaatatgagcgtacaactgggccgcatagcccttctccttggacgatatttcaccaatgagtattttgtaggcgcgctcaatctgcaagaaaagtgagaagaagtttgtttaataatattgtaatgtaatcaattttttaggatattttgatagtcagctccgaaactgtatgaagaactgcattataactttgaaaactaaaagcgtccaagtatttgttttaattaactcacattagcaaactaatggaatcaattcaggtcattaattttaatatcctatatctaacctttgtacggcagccagagcaaaacttgtgcttcttcaggtagttctccagtacgtcgtgcaattcctttgtctcgatgatggttaactcgttgcggcagttactcttcatggcggaccacacctctcgccatgtctccgaaaagggtttggcacgaaaggcgtccagcgaatgaagaacgcagcgcgtcttgtttcgcagtttgttgtccagcaggttgttgagaacctcatggtgccggtagagcagcgttcccagtgcctgcggagtcttaagcttctcctccacaatgcccagggtggcagtgggtcgcagttccagcggatcaagtgttcggtgccccgtctcggttagttggtgaaacaaccgctctacgcgtctgcggcagccaacgcactggacacattgattgaggacttccataaaactggcactgtcgatctccagcgattgccggcgctcggcctctgtgagcagtttgaatttccgtgaaaactcctccagttcacgtccgcggatcagcggactgtcgatcactagacctttgctgttcaggtccatgagcatctgcagagaaagtagagaatttaatcaggggaggttatggtacataaatggtattgtgagtatctgatctatttgatcgaatgcactagttagcaaagaacaactgatatgtttacattagtattataaagaacttttatccaacgctgtaagtaaataaataattaggatcgcgatccaatgatatttgcggtgaaatgaccgacagtattaatataacgtctaattgtttgcattaaatataataatccgagaaaacatacaatacatacaaaacaacagctgttctttgaaaaaactaacggagctctggacactggcataaatccaccttcaaacgtatcgataacaataggggtcgggtgtgcaaccgatgtcattaactagagattttggccagagaatctgagcctgagagatcatcacctctagagatggtgacggagtgcatgcgatgtgcatacaaacaggttcgtgttgttgcactttccagcaacatggcggccgtggccagggaggcggagaaagaagagttcggtgggtggtgacaggtgcagaatcataattgcagctcaagttcaattaataaatgcacgatacacaccaattcaaagcaaagagaagcgaactcacacttcgtcaccatccgccacttacacataacaatccgccgtgttatgaaagtttttggaccaagtgcacgcacacactcacagcggacgtctctgttgtgtgtgcgtctgtgtacgtgtgttctctgctggcagtcattttctttggatagacggccgtacatatagcggaaatcggtgcggatatatgcttaccattaatttatcgccagccaccaggggcaaatttctgcgaccaacgtaaccggagtcgtcgtcgtccgtgttgtagacctttgtgagtctggccattatgggtaatttgacttcgcgagccaacgacgggcaaaacgaaaattcaggcactttgcgacacagacacacacttttctctagaggtccgggtgtgggaaatggagatcagaatcgactggcgtatggcagcagcgtgcgtattcacaaatagtgttttgacaacaatatccactctctgcgcagttcgagtggctttgggaacgctctagaatcggctacaaaagtgtcttctatgtcaaacacgtagtaggcagcaagtcggtccggtcgccattaaaacggagcagagttgccagtagggggtgttgataatatatcaatgtatcgaggtatccaagcgatatattagtatttatatcgcgatattatatctgcctaagatcgtgaacacaatatatttttcgaatatttcattatattttcggacttgcatcttaaaatgtaaacataagttagtcagtggtttttcagtcaaatacccgcattaatattcgtagcattcgaatctcttagtcgcattactgtcattcacttttcttaacggctatttttattgattgaaaattatttccagaaaatattgtaagaataatgtattctttgctgaatgctgataaagaaaacctaaaactggtgactgtgtaactagcggaggcaaagtacatttaccgtaagtaaactaaaactaaaaataaaaaatatgatttatttattcaataatttaaaattagttggataggcctgtctggcagcacactatcgctacgctactatcgctacgctactatcgctaccacaaacatatcgagatcagaagaaccaatttttgctgaatgtttagtttttaaatattattaagaaaaaataaataagaacctgagaaaaacagtggtgacaactcttacaaatctttcaaagaaataagataagcatgcataaaactgacaattaaattgtaaggccataaagataaataaaattgattcaactcctgactgctgttatatatcgataacattgcaatcgaagcacacgctggtgtccgcgtttcgtcgtgaattcctcaaattcgcgttgttcggaaagttactagttatttgcaacgcggcgatttgcaggtcgtttttacctatttagtctaagcattagtacacccaccaccgcgccaatgccaacactctagaaaacacgagtaagtagagctttgcgtgggtaatagcgtccaactaatacgcccactacgccttcatctgtgtgtg

SEQ ID NO: 3590 - DNA, 2065 bp, DROSOPHILA
acttgctgcctactacgtgtttgacatagaagacacttttgtagccgattctagagcgttcccaaagccactcgaactgcgcagagagtggatattgttgtcaaaacactatttgtgaatacgcacgctgctgccatacgccagtcgattctgatctccatttcccacacccggacctctagagaaaagtgtgtgtctgtgtcgcaaagtgcctgaattttcgttttgcccgtcgttggctcgcgaagtcaaattacccataatggccagactcacaaaggtctacaacacggacgacgacgactccggttacgttggtcgcagaaatttgcccctggtggctggcgataaattaatgatgctcatggacctgaacagcaaaggtctagtgatcgacagtccgctgatccgcggacgtgaactggaggagttttcacggaaattcaaactgctcacagaggccgagcgccggcaatcgctggagatcgacagtgccagttttatggaagtcctcaatcaatgtgtccagtgcgttggctgccgcagacgcgtagagcggttgtttcaccaactaaccgagacggggcaccgaacacttgatccgctggaactgcgacccactgccaccctgggcattgtggaggagaagcttaagactccgcaggcactgggaacgctgctctaccggcaccatgaggttctcaacaacctgctggacaacaaactgcgaaacaagacgcgctgcgttcttcattcgctggacgcctttcgtgccaaacccttttcggagacatggcgagaggtgtggtccgccatgaagagtaactgccgcaacgagttaaccatcatcgagacaaaggaattgcacgacgtactggagaactacctgaagaagcacaagttttgctctggctgccgtacaaagattgagcgcgcctacaaaatactcattggtgaaatatcgtccaaggagaagggctatgcggcccagttgtacgctcatattcggaagtgcgtgcccgaccagcacatccacgtgaccacaaacaagatagagttcctggacgcgctgatcaagcgggccgagcccgaggtgaacggtagctactctaaactgcgcgagcgccacgctaagacgctggagattgcccaggaagaggtgctgacctgcgtgggcatgattatgtacgaacggctgcgtcgcatctacgtcagtctgcgggaggaggagcgcgcatgccaggccaacgagtctgacgaggaggaggaagagttgcggaatgaggaactagacctggaggaggagagtcagatgcagcatgaggagctaagcgatccaggtgcggacgatggcattgttatagaggcagcccggagcccggagcccgaacccgagctaacgtccaagccaacgaaatcgaaaccgaagaagcaatcgaagaaaaagaagcagaagaaagcggccttcacaaagatgggcaaccaaaagcagatgcaagccacggctagggtccagccgctggatgctgatcacgatcaacttgacgtggccagttgcatttcgtcaagcatcgccaaaacggttggcgataagtgcgaggagtgcctggcgtccatgcctaactgcccgtgcgagcaggatgtgcgcgattctggatacggcagcgatccaccttcgcatgccggctctcggacatctagcgcgatttcgtcaccagaaggctcggaagtgtcttgctcggatggactgtgtaatcacgacgtccacgatgaggactcagacgacttgctcttctacagtcaccagtcgcagttggatcacaagttttcattgttgcagatgtgggacgacttcgacgaatacgacgacaaagacgaggagacatattacattccccaggaggtggttatggccttcaagtgccaccgggagcaagtgcagcgaaagcgagaggagctccgcgcaaaactgcgcgccaacttcgagcgactgtgcgtgcagcacggcgttcagacgcaggtgcagaaatcgaagcggacgacttctgcactggttggccaatga

SEQ ID NO: 3591 - protein, 600 aa, DROSOPHILA
MARLTKVYNTDDDDSGYVGRRNLPLVAGDKLMMLMDLNSKGLVIDSPLIRGRELEEFSRKFKLLTEAERRQSLEIDSASFMEVLNQCVQCVGCRRRVERLFHQLTETGHRTLDPLELRPTATLGIVEEKLKTPQALGTLLYRHHEVLNNLLDNKLRNKTRCVLHSLDAFRAKPFSETWREVWSAMKSNCRNELTIIETKELHDVLENYLKKHKFCSGCRTKIERAYKILIGEISSKEKGYAAQLYAHIRKCVPDQHIHVTTNKIEFLDALIKRAEPEVNGSYSKLRERHAKTLEIAQEEVLTCVGMIMYERLRRIYVSLREEERACQANESDEEEEELRNEELDLEEESQMQHEELSDPGADDGIVIEAARSPEPEPELTSKPTKSKPKKQSKKKKQKKAAFTKMGNQKQMQATARVQPLDADHDQLDVASCISSSIAKTVGDKCEECLASMPNCPCEQDVRDSGYGSDPPSHAGSRTSSAISSPEGSEVSCSDGLCNHDVHDEDSDDLLFYSHQSQLDHKFSLLQMWDDFDEYDDKDEETYYIPQEVVMAFKCHREQVQRKREELRAKLRANFERLCVQHGVQTQVQKSKRTTSALVGQ

SEQ ID NO: 3592 - DNA, 5287 bp, DROSOPHILA
agatcccgcgacttgacggtcttaaagtatccgccggcatccgacggtgggccatttcgcttggagtatctagccaccggaatgatggccgtgttggtcaccttggtgctcagtaggtcgttcagtctgttggatccgcgatgtacggtatgtgaaatggacagggatggcgcccagatggtacccaatacgcgactcaatgatcgagacattattatatcatatgcttctgtaaatgcgtagaatctgctggcaatcagtgctattttggatgcgagatgcaatgcgacgacaatggtgcttaccttggatggcggaactggatttggagtgctgtgctctgcagacgctttcaaataatgccggattttatgtggctttagaattttacgttgaattttgttttcagattaaatctattgcctatttgaaagtagagacgactagttttttttgacgcacagctgctactggattcctacgtcgttccgtttttctgtttttctaaactaaaattttcaatatcgacaaacagctgatcccattcgatagtatcgcctatattagggatgagaaaagtaatatggtaaataattaatgttatatatatttcaaaacattaaagtaaatttcgttgttgctacttgagcttaactgttcgttaatttcgcagacaatatatattaatagaatttttgtttttttttgctaaaaaattggtctccaaaatcagctgatagacatcgataaagttgggaaaagcttgagttgcgcgccaatttcaaatacgaatttcaaatcaaaatgattataaaataagtggattggtcatcagtgatataataaacatagtaatttttttaaagttatttttcctactttcgtatttttaagcaaataaaactgaatgccatcttctgcttttgaaacatgttttgtatttaattgaattacatagattggaatttactatcggtatttcgcgtagaactagggacttttactggcactggctgagagcgtgggtgtagaagatcttctcctcgactcctcgcttgatcacgtgcggaatcttcttgggcaccatgctggaaatatataaatacataatatagttagttaaccagtatatatatgatgctggtgacattgaggaacccacgtgatgcagtcgatgatgggacaaacggagacgcagagtgtgcagcccgtgcaatcgtcgttcacgtgcggaatgtgggtgtccttgtcgaattcgatggcctggtagccggaatcggcgcaggtcatatagcactttccgcagtttatgcacatgtcctggaaagcacggatgcaattagaaatttggatactttaatgataactcagcactcacatcatcgatgagcgccaccttctgttgtttgttatccagcttgttgtatgacccgatcttgtctagcgctgctccgatcacatccttgattcttggtgccggattgggtgctccattggacgccggaggagtggccttcacctgctcggcatcccaaagagctcccttctgacttcgcagctcggccatcttgatgtcgcgctgccgctggtagggaccaaagaaacccagcgtggctttgccctcgccggtcaaacggacaacgggcttgcccttctgatggaccggcgtgggtggtgactggccatcccagaagggaccatcgactggtggcggattcgccttcaggtagagcagtgccttcagtgccgtgcaatagtcctcgatgacggtgaagtcctggttctgtacggaggagcagatctgcagaacagtggcgcccgcatgaataaactgcagcgcaacctcaccggaatcgatgccaccgataccgagaatggggaatcccggcacacggttggcaatatcagagatggccttcagagccatcggacgagtggcattgccggagacgccgccgtaagtggtgcgctgctccttgccaatcgccggccaggcggtggagtccgccttgaggcccatcagtccctgaacggtgttgatggccgatccgccatcggctcctccccgctttgcggccgccgcaatggaaacgatatccgtaatgtttggcgttagcttgatgaagaagggcagcttgaccgcctttcgcacccagcgagagatctgctccaccaactcgggatcctggccacaggccaagcccatacctcgctcgcccatgccatgtggacacgatagattcagctcgagggcatcggcacccgactgctccgccttaatggccaactccgtccagtcttcctcgttgaagctgcacataatgctggctatcacgatcttctcggggaagtcacgcttcagttctccaatcgatttcagccagtactcggcccgcttctccgagattagttcgatgttcaggaaacagccctgctgcggtccatacttgtagcccgacgtggtgcccctgacgatgcgcggcgagacattcgtgaccagatccttgtccagaccgaacgtcttggtcaccacaaagccccagccctgctcgaaggcgcgacgtatcatggccgtgctggtggtgggcggtgcggaggccaggccaaagggattctcgaaccggatgccgcacatctccaccgatatgtccacggcatcgatgtccgtatagaagagcggcagtgcagccggcgtgtccagtggcaggccctgcagttgacaatgaatgctccaggcggccaccttgccatcattgaccgactccaccgtggtgttggccactccagcgagatcgccgccgaggaacacctgtttcacactgctctgcatcgtcaccctgtccaccacgggcaattcgccgcggaattgcaacggcgctagtgccgccttgacatcctgatcctccaggccggacccaaaggcggagatcacaaagttcgccttcaagcgctgcgtctgctcctcatcctccacccattcatcgttttcgttctgctccgtgcgacagaattccatggctgtgatcaggccatccttgacgatcactttgcgtggactcaggtacggcaacagctcacagcgttcgtcacgcgccagctccacctcttcgggcacagcacgaatgccggaggatcctttgcggaagacgacgaacacacgcctagcaccacatctcagcgccgaagtggcgcaatcgaaggccgtatcaccggcacccaaaacgatgacattgccatggagcttgggtaaaccggccgctgccttgcaggcgcacaaacccggtttcgagccatccgacaccaagggcaggaagtttttcgaggtgtagaaaccattgctgggctgaaggccagcgaaaatgggattcagcttcggttccggcaggccaatgcccacaaagacggcatcatggccggtggacaggagtccctggatggtcaaatccttggtgcccagcgagcgacccgtttcgatgcgtacgcccagatcgcgaaccaaatcgatctcaaagttaaccgcatcgatgggcagacgatactggggaatttcagcggcactcaggccacccagatagcttctccgctcgtagatggtcacatcccgatagcccagacgggccaggaaggtggcgcacgacagcgatgccggtccgccgcccacgagggcgatcttttgcgacagcggattggcctccgcctgcggtgtcctccgctgccgcacgcccatcttcttgaacacctcggtggcgaactgctggaggccaccaatgttaatcggtcccgcctcggaggcctgcagattgcaaccgcccacgcagagatcgctggtgggacagaccatgccgcaggtcagacccagcggattgtcggagaagatcgccttggcggcgccatagaaattcttattcgcaatgctcgtaatgaagctcttgatgtccagctgcgtgggacaggacttttggcacggagcatcggcgcatttgaggcacctggccgcctcctctagagctccgcgctccgacaatgtggtgtgcttgatgtccgagaagtcgttggccagcgtggtgcacggcggagcagcgtgatccgcattgcgtttccagtgcttcttgttctccttcgtctgcttggtgggcaccacggagcactgcgtcttcactcgcggatttagcgacagcaggtcctaggaattacgaaaggttttcactatcaacgggaagtgaatcatgatccaggacctacctcaatatctggggagtccttgctcaaaagttggggcggactcatcttgctggcactgtttcacctgttaatgaagtgaaagtggaacatatggattacagactgcggttgatggccacgtgcagatcggcgaactaccctatccctatcgcatcgcagccagaataccctaatcgcgaatggtgactcccagtcgtcttatcgctgccccactcgaaatccaaatcgatcctggacaagacgctgtatctaagtgcactaatgccacaccattggtcttatcatcttatgtatgagggcgttatcatcatatcagtcaaggctgcgacggctagcggagattatgatggctttatgatggcacgcatattggcaccacccggttttctatacgtttctgtatctgctgtttttccaccaaaagtttcagaaccccaaaaataaatggtgccaccccacgaagaggaaagattagaaaccggcgaaggttacgatcgggggggcccgtttcgcttcttttttttttagcgataatggggcaagcactcgattcggaagttctgctttcgatttcatttaagtatctagtaggttaagtatctcaagctggcgtaaatgtatctattaaatgtatctcagcttagaagaagtaataaactaacttcgaaatacatattctatttacagttgcttttccttttaactttgagaattgccacaaatattattatattattaaatattattattattattatattatgaaccaaatgccagaaactttgtaaagtaatacgcatttaataaaaaaaaactgtcaccgttgcaaatcgacggcggaagttgttttgtatgcctttagctgtatcttctaagcatgtgcttaatacaaagtaaacattattcattatctattagcacagtgaattaataatggtaagtaaaccgactgttagctattgcctaattataaacgataataaagttgttttacatattaaccattctcacattaccaattacttggctttttgtgaatagccat

SEQ ID NO: 3593 - DNA, 3096 bp, DROSOPHILA
atgagtccgccccaacttttgagcaaggactccccagatattgaggacctgctgtcgctaaatccgcgagtgaagacgcagtgctccgtggtgcccaccaagcagacgaaggagaacaagaagcactggaaacgcaatgcggatcacgctgctccgccgtgcaccacgctggccaacgacttctcggacatcaagcacaccacattgtcggagcgcggagctctagaggaggcggccaggtgcctcaaatgcgccgatgctccgtgccaaaagtcctgtcccacgcagctggacatcaagagcttcattacgagcattgcgaataagaatttctatggcgccgccaaggcgatcttctccgacaatccgctgggtctgacctgcggcatggtctgtcccaccagcgatctctgcgtgggcggttgcaatctgcaggcctccgaggcgggaccgattaacattggtggcctccagcagttcgccaccgaggtgttcaagaagatgggcgtgcggcagcggaggacaccgcaggcggaggccaatccgctgtcgcaaaagatcgccctcgtgggcggcggaccggcatcgctgtcgtgcgccaccttcctggcccgtctgggctatcgggatgtgaccatctacgagcggagaagctatctgggtggcctgagtgccgctgaaattccccagtatcgtctgcccatcgatgcggttaactttgagatcgatttggttcgcgatctgggcgtacgcatcgaaacgggtcgctcgctgggcaccaaggatttgaccatccagggactcctgtccaccggccatgatgccgtctttgtgggcattggcctgccggaaccgaagctgaatcccattttcgctggccttcagcccagcaatggtttctacacctcgaaaaacttcctgcccttggtgtcggatggctcgaaaccgggtttgtgcgcctgcaaggcagcggccggtttacccaagctccatggcaatgtcatcgttttgggtgccggtgatacggccttcgattgcgccacttcggcgctgagatgtggtgctaggcgtgtgttcgtcgtcttccgcaaaggatcctccggcattcgtgctgtgcccgaagaggtggagctggcgcgtgacgaacgctgtgagctgttgccgtacctgagtccacgcaaagtgatcgtcaaggatggcctgatcacagccatggaattctgtcgcacggagcagaacgaaaacgatgaatgggtggaggatgaggagcagacgcagcgcttgaaggcgaactttgtgatctccgcctttgggtccggcctggaggatcaggatgtcaaggcggcactagcgccgttgcaattccgcggcgaattgcccgtggtggacagggtgacgatgcagagcagtgtgaaacaggtgttcctcggcggcgatctcgctggagtggccaacaccacggtggagtcggtcaatgatggcaaggtggccgcctggagcattcattgtcaactgcagggcctgccactggacacgccggctgcactgccgctcttctatacggacatcgatgccgtggacatatcggtggagatgtgcggcatccggttcgagaatccctttggcctggcctccgcaccgcccaccaccagcacggccatgatacgtcgcgccttcgagcagggctggggctttgtggtgaccaagacgttcggtctggacaaggatctggtcacgaatgtctcgccgcgcatcgtcaggggcaccacgtcgggctacaagtatggaccgcagcagggctgtttcctgaacatcgaactaatctcggagaagcgggccgagtactggctgaaatcgattggagaactgaagcgtgacttccccgagaagatcgtgatagccagcattatgtgcagcttcaacgaggaagactggacggagttggccattaaggcggagcagtcgggtgccgatgccctcgagctgaatctatcgtgtccacatggcatgggcgagcgaggtatgggcttggcctgtggccaggatcccgagttggtggagcagatctctcgctgggtgcgaaaggcggtcaagctgcccttcttcatcaagctaacgccaaacattacggatatcgtttccattgcggcggccgcaaagcggggaggagccgatggcggatcggccatcaacaccgttcagggactgatgggcctcaaggcggactccaccgcctggccggcgattggcaaggagcagcgcaccacttacggcggcgtctccggcaatgccactcgtccgatggctctgaaggccatctctgatattgccaaccgtgtgccgggattccccattctcggtatcggtggcatcgattccggtgaggttgcgctgcagtttattcatgcgggcgccactgttctgcagatctgctcctccgtacagaaccaggacttcaccgtcatcgaggactattgcacggcactgaaggcactgctctacctgaaggcgaatccgccaccagtcgatggtcccttctgggatggccagtcaccacccacgccggtccatcagaagggcaagcccgttgtccgtttgaccggcgagggcaaagccacgctgggtttctttggtccctaccagcggcagcgcgacatcaagatggccgagctgcgaagtcagaagggagctctttgggatgccgagcaggtgaaggccactcctccggcgtccaatggagcacccaatccggcaccaagaatcaaggatgtgatcggagcagcgctagacaagatcgggtcatacaacaagctggataacaaacaacagaaggtggcgctcatcgatgatgacatgtgcataaactgcggaaagtgctatatgacctgcgccgattccggctaccaggccatcgaattcgacaaggacacccacattccgcacgtgaacgacgattgcacgggctgcacactctgcgtctccgtttgtcccatcatcgactgcatcaccatggtgcccaagaagattccgcacgtgatcaagcgaggagtcgaggagaagatcttctacacccacgctctcagccagtgccagtaa

SEQ ID NO: 3594 - protein, 1031 aa, DROSOPHILA
MSPPQLLSKDSPDIEDLLSLNPRVKTQCSVVPTKQTKENKKHWKRNADHAAPPCTTLANDFSDIKHTTLSERGALEEAARCLKCADAPCQKSCPTQLDIKSFITSIANKNFYGAAKAIFSDNPLGLTCGMVCPTSDLCVGGCNLQASEAGPINIGGLQQFATEVFKKMGVRQRRTPQAEANPLSQKIALVGGGPASLSCATFLARLGYRDVTIYERRSYLGGLSAAEIPQYRLPIDAVNFEIDLVRDLGVRIETGRSLGTKDLTIQGLLSTGHDAVFVGIGLPEPKLNPIFAGLQPSNGFYTSKNFLPLVSDGSKPGLCACKAAAGLPKLHGNVIVLGAGDTAFDCATSALRCGARRVFVVFRKGSSGIRAVPEEVELARDERCELLPYLSPRKVIVKDGLITAMEFCRTEQNENDEWVEDEEQTQRLKANFVISAFGSGLEDQDVKAALAPLQFRGELPVVDRVTMQSSVKQVFLGGDLAGVANTTVESVNDGKVAAWSIHCQLQGLPLDTPAALPLFYTDIDAVDISVEMCGIRFENPFGLASAPPTTSTAMIRRAFEQGWGFVVTKTFGLDKDLVTNVSPRIVRGTTSGYKYGPQQGCFLNIELISEKRAEYWLKSIGELKRDFPEKIVIASIMCSFNEEDWTELAIKAEQSGADALELNLSCPHGMGERGMGLACGQDPELVEQISRWVRKAVKLPFFIKLTPNITDIVSIAAAAKRGGADGGSAINTVQGLMGLKADSTAWPAIGKEQRTTYGGVSGNATRPMALKAISDIANRVPGFPILGIGGIDSGEVALQFIHAGATVLQICSSVQNQDFTVIEDYCTALKALLYLKANPPPVDGPFWDGQSPPTPVHQKGKPVVRLTGEGKATLGFFGPYQRQRDIKMAELRSQKGALWDAEQVKATPPASNGAPNPAPRIKDVIGAALDKIGSYNKLDNKQQKVALIDDDMCINCGKCYMTCADSGYQAIEFDKDTHIPHVNDDCTGCTLCVSVCPIIDCITMVPKKIPHVIKRGVEEKIFYTHALSQCQ

SEQ ID NO: 3595 - DNA, 5284 bp, DROSOPHILA
atgggaaaaagcgtgcgggacactcacctcgagacaagggaaatggctacaggaagggttggcatcctttttccaccctgcaggtactcttcagtggtgttcttggccttcgagaagaagccgaagtaaactccaattcctgccgaggcgctcagcatcagggagaagactatgtagtccgtgaggctgaagtggaggtcctccaaggtagcagtcgtggcagtggccactgtgctggccaaattgctaacactgcttgccatacttaaaatcgcgaattgggaaagaccgaaccggaaactcctcgctgcttaggtgcttaggttttggaggctgccagcacacttgtggggatctgatcttggacacccttcttaagtagctcctcgagttagatgaccacccttatctcgacacgatatcttagcatgtgagtcgtaatcggagcaaatcgtaaatcaggagtgcttcttatctggccaactgagaaggggccgatgtgaggggttagcatctggaattccggaggcgtatgccctccataaagtaccaacttgtctattaatcgtggtctaaatacgtatcccttttgaataatgcggccactaaatcgtttataagcgggctttccctatcaccagtagcaggaaccgagaacattggtcggcatcccctgactttgataatggaacctttgtctgtgaacttgaatcaccagacggtggtttttacgtacatgttacgcatttgcgagagcagtgacgaccttgaattgccctctaggtcattggaccatagaaaaggatttagttttttaatatcataaattatatttttggatatattttttatggagttggtatcctcaatagatcaaaataatattgaatattgttatattgctaaatggtaactgatattttctaggaattgcgtgtctaaagaataaggggtgcaattataccttgacgatacataaatattcgttaaatatttctttcgattttgtttttatttatcattctaaattgtcttcctcatatttaagcctatggataaaaaacacatttaacaagaatcagggctcggtgacagtttgtttttctttttcggtaggttctatgcggaggtcgggagtcgcagcgaccttggatcctcgaagtggcacctcctcaagatcctgatccgtaacaggcagggagaggaacttccgcacgaagggcgagtacaactttggattctgtttctcgttctcgtcgggtcgccagatatagctcaatgggatcgcacatagaaagaccagagcgctgcccagaaccttgtaccaatagaacgagatgtcgtatagagaaaaatcccgatcgctatggaaggcggtggtcactggtgcgccagaaggaggtttcatcgtgacaggagtgaagtcagtcttgttgctacaatgaagcatccattcagtgagctctacctcggatgggcatcccaatagtgtacttacatagcctccgcaatcatgtaaagacctctggcctcacactgatccagtgagttaggcagcacctcgtacttaatcagtccggacttgaagttcatctggccattggcgataatccacaccatggcgaccacgctgacgataatgcttgtgacagccgttttggcattgcagcgcggcacaaacattcccaagaggaacacacccaccactgcgcccgtatttatgcccgtaatggtgacaaccgtttgcaggatcgagttgaagttctgcaccatgaagccgcccaggatgcaatacccccccattacaaccacgatcagtttcatggcccagttggctctggcctctgtgtgccgaattcgaggctttatgtagtcgaagtaaaccactccggccagggagttgagtgtggcagaaagcgagctgagggcagcactgaacacacaggagatgaagacgccaggcattccggccaggtgtcccatgatgtcctgcacaaagaagggcatcatcttgtccggcttgctaaccagctaaggagggaaaaaatatgtatgtttcatgtttatagtatatcaaaattgaacttacaccagctagcattggatcgcatccatagtagcgggcaaacataatgattccagagatagtgttgaagaaacttataattagaaatcctaggccagaaacgatcaatgatctaaaacgaaaaatttgggatacatcacatgttgtaccgggtaacgagtctatctagatcgaaagatatatagcaaatatcctttacttcttagcatgagagtacgaaggcagggagacgatgcgctgcacacagctctgatttaggccaatgtgacccgtccacatgaagatccctcccatggtggcaccccagaacgtcatccgtatacgaggatccaagccaaagctaaatgattgaattatttagatccgatattcagaccagatcaaatagctcactcaaagttgaatcgtccgccgtccgaggcgcgttccataacagtgaacatgcctcccgatcggattgtgcccagaactccgacagcaaccacagagagtagcataatggcaccctgcaccacgtcggtccagaccaccgccttgatcccacccaacatcgtgtagaagatgcagatggaggacaccattacgttgatcaagtggatgttcatgccagtaactgaaaagtgggagttgatttagatggacttggaccgagtttggtacactacttaccctgggcaaaagcgagcgatggaataaacatatagacgggtaacatcaggaacgaatttgtcacgaaaaagaaggtcaccaactgccgcgttcgcttattgaatctcatctcgaggtactagggtgcgaataaataatcgaataattttgccaattatttgttatgttatgtttcgtagtcttcttagtttagctcacctcataacaattagacacattattttcatagaatacaggaacaattatgtagattaagataggaatcacaaccagcatggctaggaccacgaatatatagttgaatccataggtgtaactttccgctggaatggacatgatggcgatgccggacagctggctgaaatggagccatcataagttattgattgcacttcactctttcgaaacccaatatacccctctcagtgaaaggtaagtaagtaagtaagtgatttatgactaacgcccaaacagaatccccagttccgcgtcggttacacaatcggtttaattaggtggatggggcaagtgcggagaacttcttaaaatacagcgcccttataattgacgcagccactttttacggccgccgtaaaataaagataaattatgacggaatcgggagaaatccggctggaactgccggacactgctacgctctcacctggctaccagagatatcgctatgggcagggtctgcatcttcttcccgccgcgcagatactcctccgtagtgttcttggacttggagaagaatccgaagtacaccccaatgcccgcagaagcgcccagcataatgacaaagacgaagtagtccgtgagtccaaaccgcaggtcctgcgaagcgctggatacagcactggccatggtggtggtggtggtggtggtggtggacatctcgtccgtagtgatgtggatctggcagtaccggtagtgatgcgcttgttgggtgtttcgaccgatctaaccggttcacatttcacggatgctggtggcgaacttgcgggccctggcctggattgtacttaaatatagctcccgcccggggcgtctccttatctgaacttgacgttgccccgtaaatcatccggggtttagtgctccacttatctgtccggcatgccactcttatattttactattgttgcgcctagcctccgaggccatcttcaccaaccaggaggcgacggtgcggacgtggaatcgcgtcctatagttggagtagaacttgacctggagtataagactggggcagcatcttggtaaagcgtttgtgctggaagctgtttgctctcagagtttgttgaaggtgcttaataaatgcataaatgctttgatatcgcttttgaaactatgtatgtcgtacacttgggggaaatgcaatagggttaactcaatttctaattataaataatttgtttaatctaggtttaatccaattaacttattctggtggttccaattgattgaacgctatcagtgggtcaaaaataatctgtacctgctcagctgtaggtaaatttttcttagtattttattgccgggctaagtagagccaaatttagggtttcataatgtcttataaagtggatttggttaagctggaagttattccacgtggatttgaatacttagcagactttattttgcagaaagccttagataaatatgaataaatattcatcggttgcagttcaagctattgccgataacccaaaaccgtgtccagaagtcacatacatcatccatcatcacatggtgctttcttgagaactggtctgtttactcttctcacgtctttgaaactttccatgttcagtgtttgcctttgcataattctattttttgacaggggtaaataatcgggctgggctgcagggggcgtggccgctgttatacgaccctacgccagagtgtgtacagcttaacaccgtggcccaccaaaattaaccacccaaatatttacccatgtcagcgataagaattacgattctgactgggatcttttgcacgactgatacggcagatctttcgcatcgcagcttctccagactcgcacgactggacgctgaagttagagtttatcttccggctatatgtatttagatcgcctggttttgtcgcctgtctcatcgcagttttcaggaggattgtggccactccgttacgatggttaaactaaggtcttttacaacaaaatttaacaaagagatgtaatcttctgtaaataaactcacactcggttacctttaaacacaaccattgagaaatgtacgacagagcaaacattatagatggatagcatcttagaaacagagctttataatctatattgatatgactaacagttagtgaggttatcctgcttataaagcatatcttaatgttaggttccaatccgaatctcagaccttttcgggtttctctaggttcaactggtggggttcatccgacggcgtcagcttgtaatggacgaacggctgcaccaccggagacaggagcttcgggttcggtttgtaatcaggccca

SEQ ID NO: 3596 - DNA, 2582 bp, DROSOPHILA
taagaaaaatttacctacagctgagcaggtacagattatttttgacccactgatagcgttcaatcaattggaaccaccagaataagttaattggattaaacctagattaaacaaattatttataattagaaattgagttaaccctattgcatttcccccaagtgtacgacatacatagtttcaaaagcgatatcaaagcatttatgcatttattaagcaccttcaacaaactctgagagcaaacagcttccagcacaaacgctttaccaagatgctgccccagtcttatactccaggtcaagttctactccaactataggacgcgattccacgtccgcaccgtcgcctcctggttggtgaagatggcctcggaggctaggcgcaacaatagtaaaatataagagtggcatgccggacagataagtggagcactaaaccccggatgatttacggggcaacgtcaagttcagataaggagacgccccgggcgggagctatatttaagtacaatccaggccagggcccgcaagttcgccaccagcatccgtgaaatgtgaaccggttagatcggtcgaaacacccaacaagcgcatcactaccggtactgccagatccacatcactacggacgagatgtccaccaccaccaccaccaccaccaccatggccagtgctgtatccagcgcttcgcaggacctgcggtttggactcacggactacttcgtctttgtcattatgctgggcgcttctgcgggcattggggtgtacttcggattcttctccaagtccaagaacactacggaggagtatctgcgcggcgggaagaagatgcagaccctgcccatagcgatatctctggtagccagccagctgtccggcatcgccatcatgtccattccagcggaaagttacacctatggattcaactatatattcgtggtcctagccatgctggttgtgattcctatcttaatctacataattgttcctgtattctatgaaaataatgtgtctaattgttatgagtacctcgagatgagattcaataagcgaacgcggcagttggtgaccttctttttcgtgacaaattcgttcctgatgttacccgtctatatgtttattccatcgctcgcttttgcccaggttactggcatgaacatccacttgatcaacgtaatggtgtcctccatctgcatcttctacacgatgttgggtgggatcaaggcggtggtctggaccgacgtggtgcagggtgccattatgctactctctgtggttgctgtcggagttctgggcacaatccgatcgggaggcatgttcactgttatggaacgcgcctcggacggcggacgattcaactttgactttggcttggatcctcgtatacggatgacgttctggggtgccaccatgggagggatcttcatgtggacgggtcacattggcctaaatcagagctgtgtgcagcgcatcgtctccctgccttcgtactctcatgctaagaaatcattgatcgtttctggcctaggatttctaattataagtttcttcaacactatctctggaatcattatgtttgcccgctactatggatgcgatccaatgctagctggtctggttagcaagccggacaagatgatgcccttctttgtgcaggacatcatgggacacctggccggaatgcctggcgtcttcatctcctgtgtgttcagtgctgccctcagctcgctttctgccacactcaactccctggccggagtggtttacttcgactacataaagcctcgaattcggcacacagaggccagagccaactgggccatgaaactgatcgtggttgtaatgggggggtattgcatcctgggcggcttcatggtgcagaacttcaactcgatcctgcaaacggttgtcaccattacgggcataaatacgggcgcagtggtgggtgtgttcctcttgggaatgtttgtgccgcgctgcaatgccaaaacggctgtcacaagcattatcgtcagcgtggtcgccatggtgtggattatcgccaatggccagatgaacttcaagtccggactgattaagtacgaggtgctgcctaactcactggatcagtgtgaggccagaggtctttacatgattgcggaggctatcaacaagactgacttcactcctgtcacgatgaaacctccttctggcgcaccagtgaccaccgccttccatagcgatcgggatttttctctatacgacatctcgttctattggtacaaggttctgggcagcgctctggtctttctatgtgcgatcccattgagctatatctggcgacccgacgagaacgagaaacagaatccaaagttgtactcgcccttcgtgcggaagttcctctccctgcctgttacggatcaggatcttgaggaggtgccacttcgaggatccaaggtcgctgcgactcccgacctccgcatagaacctaccgaaaaagaaaaacaaactgtcaccgagccctgattcttgttaaatgtgttttttatccataggcttaaatatgaggaagacaatttagaatgataaataaaaacaaaatcg

SEQ ID NO: 3597 - protein, 623 aa, DROSOPHILA
MSTTTTTTTTMASAVSSASQDLRFGLTDYFVFVIMLGASAGIGVYFGFFSKSKNTTEEYLRGGKKMQTLPIAISLVASQLSGIAIMSIPAESYTYGFNYIFVVLAMLVVIPILIYIIVPVFYENNVSNCYEYLEMRFNKRTRQLVTFFFVTNSFLMLPVYMFIPSLAFAQVTGMNIHLINVMVSSICIFYTMLGGIKAVVWTDVVQGAIMLLSVVAVGVLGTIRSGGMFTVMERASDGGRFNFDFGLDPRIRMTFWGATMGGIFMWTGHIGLNQSCVQRIVSLPSYSHAKKSLIVSGLGFLIISFFNTISGIIMFARYYGCDPMLAGLVSKPDKMMPFFVQDIMGHLAGMPGVFISCVFSAALSSLSATLNSLAGVVYFDYIKPRIRHTEARANWAMKLIVVVMGGYCILGGFMVQNFNSILQTVVTITGINTGAVVGVFLLGMFVPRCNAKTAVTSIIVSVVAMVWIIANGQMNFKSGLIKYEVLPNSLDQCEARGLYMIAEAINKTDFTPVTMKPPSGAPVTTAFHSDRDFSLYDISFYWYKVLGSALVFLCAIPLSYIWRPDENEKQNPKLYSPFVRKFLSLPVTDQDLEEVPLRGSKVAATPDLRIEPTEKEKQTVTEP

SEQ ID NO: 3598 - DNA, 3647 bp, DROSOPHILA
gttcctattttttcatattgtttttaataatttcaaacatgatttatatataagtggcttttggtgttggacccttctaggtgcttgtatccctttttcattcatcctcccctccccacttggcacgatcccacccacccatcgcatgactaattttccggacattatctcgacaggatggcggggctccagtgctcacggatgacgtttcgctgcagctgttcatggagcacctcaagaagctggctgtgtccaccaccacataaatcgactctggctctagtttcaggcgcttgcttccctggcgaagtcgaagaaggcgaacgacacctggaatcaatggtccaggcaatgaaattacgaatatacaaccacttattccaattgatcgtcttataacgcaataaactattcaaattatgttcaacaataagtgtgttaatccgcgatgcttttattcgtaagcagctgaattagaatttacgttgagcggaatgagtttgtaattataaaaacaaggcattaacaaaatgaaatgagcatctctttcattcttcataacaactattaatacaagtaaatccgacgggttcctgaaacctacaagatttgtaaaaattatttttttgtaatataagacagcaaaagatttatttatatttttatcataaatatttgatcaaatttccggacgcatttaacttttagataccaagcaattggttatatttttctgtatttctctagcacccgtgatcaaacatatgcattttttgtttaacttgaatgaaatatcttcgataagctttgggcaaattactcaggtttaaaaaactttgcgacactttcattttcattcattaaattgaaacttctaaatggttggaaaacacaactggtataataagaatagcaaccactgctttcaaatcattagagttttcagtaacccgccggaatgcctctcgactaactgcatcctaaactatttggtacacactgactaagaaggtcgctctttcctcgtgattgccgcatccagctagcctagttgagaaaccgtatggacatcttctgatccacgtcggtgcggtccagagctttgcagaagtcctcgaacgagatcttgccctggcagcacaggtccgcctccaggatcgtcctctccgcaatgctgaccaactggtcctggctaatgttcgccccgaccatcatgtgcaggatggagagcagctcgtctctgctgatcacaccatcgtcatccagatcgtacatcttgaaggcgaacttcagcttctcctcccggctgttgagcttactttgcttgttatccctcagcggccggaagtgggccaggacgttcatgaactgccggaagttcacccgatcgtcgttgctctcagcgaaaaaggaatgaactatccgctcgcacagcggattaatggccagttccgggatacgcatcagatcctcccgggacaaggttccgcaatcattgcgatccaaggaggtgaagcgcgagtaaagtcgctcgatttggttgggggtgactggaaaataaaattgataaaaattaaccaatcgataattagttttgaattaaatacaattaagatagtactaaaacatgtacattcaactgtaaatacctatatgatattaactttaataagcgatttaacagtccgtcaagttaaatcatttaataaagttgtttttgttgaacgacactgttcagataaattacttttgccatggaaaactcgaacgatacctatttacgaacagtgtgggcatgagtctaagcccgttcggaattagttgctataaaatctggctgataagagcgaacgccttatcatcttagctgatactagctggtcgaacattggatacaagttccaatgcggtggcaatttcaattgtgcgcttatcgcgcccggaatattgaaattacacgctctcggacactagataattgccagccccaatatcggtgataggcgtcgacttttgcccccacccacccccgtctcatatatacgtatataactatcgatgacgtcatgtgggaagtgcaggtgcatttgaaatgcaaattgcttttgctgcaaaccatctgtccatataccgcttatataaggcgggcacagatcgctcagactcagttctgcataatttgaacggagttttttagaacacgtacatatagttcgtagatttggaatttttatagaaatgacgaatcgaaactaagcgaatccattttggcaatccatggtcttggacccgaaatgcttttagcactccagtgcgatgttgttgtttgcattgctcgtggcccaattaatttatatccaagtgcgtatttcgatttagtacggcgcattgaaagtctccggttgaaaaagcccaaggttatcacacatcccgaccagaaatcgtactcacagccagtctcctcctggatttgcgcgatctcctcgttccgcaggaaaagcgacgacttattgcccatggtgacggtgtgttgtgcgccgatcggtttgtttaaacattcaacaatcgcagacgagcattgaatggcattcgatttggattggaccacaagtccgatttgtgtacaggctgaatgcaggcggagtgacgggaaaatgccgaaaatcgggtgcaaaaaaatactgaacagccagcgatggttgcactagagacggactttgtcaagtggtggatggtttccctataaatatcgattcacatatttttttgtatctatttaaagtgcacattttttaaggggtcatttgtaagcatttccttacaaacaacgaccaaaaatttgatatattaattaatttcttagaaatatccaatcgtttatgcaaagcctacagtaatttcgtctcatcactagctcgtaactggcaatctcccatctctattggcattcgcaaagaaaacaaagtaaacatttttttttgccggaacgagaattaccgttatggataagttaaattccactctaactgccgtcaaaaacctgcggtccaacgtaaggctgtgcttcgagcacctggccgatggaaccgatggggagagcggcgaggagagccggaataagttcgtaaatgacttccaggagagattcgcagccatcaactcgcaaatacggttagtgaccagttaacctattccagtgaagaatacatttgaattaaaccacttttagtgaggtagagcagctgattaatggactgccggtgccaccaacaccctattctctcgggaacaccgcctacctggcgcaggaaacttcgcaggatcgacaggctctataccctcagctggtgaacagctacaagtggatggacaaggtgcacgaccacagcttcttggccttcaacaatctcaaccagaacacactcaggcgctcctacaattactgctcgcagaagcgccagcgactgcccttctcgtccttcaacaacgatccagagtaagtacgaagtgcgcagcttcactttaatattaacatctttcttcctctgattcttagccacatagataagctcctgagtgagatcaacacccctccgcatacttcgtacagaatttttcgtcccttcggcacaaacgctgtcaccatc

SEQ ID NO: 3599 - DNA, 746 bp, DROSOPHILA
tcactccgcctgcattcagcctgtacacaaatcggacttgtggtccaatccaaatcgaatgccattcaatgctcgtctgcgattgttgaatgtttaaacaaaccgatcggcgcacaacacaccgtcaccatgggcaataagtcgtcgcttttcctgcggaacgaggagatcgcgcaaatccaggaggagactggcttcacccccaaccaaatcgagcgactttactcgcgcttcacctccttggatcgcaatgattgcggaaccttgtcccgggaggatctgatgcgtatcccggaactggccattaatccgctgtgcgagcggatagttcattcctttttcgctgagagcaacgacgatcgggtgaacttccggcagttcatgaacgtcctggcccacttccggccgctgagggataacaagcaaagtaagctcaacagccgggaggagaagctgaagttcgccttcaagatgtacgatctggatgacgatggtgtgatcagcagagacgagctgctctccatcctgcacatgatggtcggggcgaacattagccaggaccagttggtcagcattgcggagaggacgatcctggaggcggacctgtgctgccagggcaagatctcgttcgaggacttctgcaaagctctggaccgcaccgacgtggatcagaagatgtccatacggtttctcaactaggctagctggatgcggcaatcacgaggaaagagcgaccttcttagtca

SEQ ID NO: 3600 - protein, 189 aa, DROSOPHILA
MGNKSSLFLRNEEIAQIQEETGFTPNQIERLYSRFTSLDRNDCGTLSREDLMRIPELAINPLCERIVHSFFAESNDDRVNFRQFMNVLAHFRPLRDNKQSKLNSREEKLKFAFKMYDLDDDGVISRDELLSILHMMVGANISQDQLVSIAERTILEADLCCQGKISFEDFCKALDRTDVDQKMSIRFLN

SEQ ID NO: 3601 - DNA, 10191 bp, DROSOPHILA
acgctttattcgaaatttaacttttaaattttagttatttactgtacagtttgtttgtagttgacgcttcttgattttagttacagttcaaattattgggctttaattacttaattttgcacgccacattcattaacaatgttaaatttctccactccctaattcaaatcgcttaaacaatttcaaatatctttcggcttacaattcaaatctggacagaaaaacatttaaaacttacggaggccattcaatttcataattacgtatctggttttagctaggtttaggaaataaaggaataaagtggaactttagagcgcgatttaaaagttcgacagaactcacacattcacaaatgtatatttaaaaaaccattgcaaatgcgttgtgtactaaacgaattaacgaacatttgagtttcgtgcgttgcagctggcaccttcgtaggaaagtgcagcttgcattcggtgtgttgagattttttaaatttaaaatatatataaaatatttataaatattttgttgtctcgcgttctgttactgctgctacagaccttaacacttactatcttactatttcttgttaaaaagacatctatttaagcgctaataaagtggtttgtggttgctatcgggtatcgcgttttgttgtcctgttcatacagtgatgctgtaactacactgatcctgatcctaagtcgaatgcctgtccacacgtctgtgtgccttatgctgcgggtgtatgtacatggcaagcccgtcagtcaaaccagagagtgctcctagttgagcagtgcatccatggtgtatggaaatggaggatgttgctgctcgaacctacttgctgaagacgataacaacttggttgccgatgctgctgatgctgttaatgtgctcgccggcgacggtcagtccagtattacgatttgtgattcaatgggcctgctactcggctcgggcgccgcaggtttgatgggcagtgtgcgccatggtttgcgcgcggcgcgacgcagatctacggcggagagtatttttcgcgtttttctgtaaaaaggtatattgtaggaatattttaattaaagccggaaatgtaatgattttgaagctgcagattacttacttgtgtgtatcgttagccctaaagtaaacatcatccggtgcatccatccaactgataacctgcttgcgtccgttgccaccgcgagccatctgcgcaatcttctgtttaccattgagctgaagaagcgatcatgtacaaatcaattaaattgaaactagctaaacctaaagtattactcacatgatgcctggagagcggctgtccagatgccgccatcatggccgcaaactgctcaggactgggacaatgcgagggcatgggatccttattcggccgcttggcaggaggtccgctgggaactatagtaactgcaaaagggggaacttggttagtcagaatataagcagaatataaacacctataatcaatgcgttctttgcactcattttaaattttaaaacacatgtaatggaagagctaccttcagtgccattcaattgctggtcctcgtgtgcccgcttccgtatcgtcgacgtggcttgcgtgggaattattgtgagctccttgtcggccggcacggccacgacgtcgggtgacttgttaggcactcggtcatacaccaagctgccatcgggcgctttcgggggtttggggaacgagacgacagccggcagcggcattttgtccttgggcgtcagtactagccattcatgcggtccgctgcccggcgcacctaggcggttggcaatcttggtgacactaccccgatccttgggcttcagcaaaagcaacttcttgatctccgcctgcgattttccactaatacgatttgtaactaagaagaaaagaaacatattatttaacatacgcgtgactcattgcaactaacaaagctgatgagactcacattcttgtttcaccagcatggcattgatcgcgtacgcgctctgtcgcgccgccttcttcggcttcacgatgctgcggcagatagcacgcgccacccgtgtcatgggattggtgtgcaagtaaaaggcagtgcgcgtcttcattatgggccgcggcgatccggagctgatggcgatgccgtgcgcttgcgcatagtggcgggccaggtgagtcttaagcttgaactccttgccgcaattgacaatagaacatctgtgggaagagagaattcaataagcactcggtggtccacgataataagccaataataaagcaaatgaaaagagcatgttttactcgtttaatctcgaaagtgcactgcattcagacatttcttaaatttaataagtatcaaaaggggaatgttacattgccatttgaattccatttataacatatgtatacagttgtgtaaaaattaaacctatcaaaatgtaagcaagtatacgaaaaggacactttaaactgacaaaattaaacattttaatgaactataaacggaaagacaaaaactaatattttgtgagacagaagagttgataaatgccaactttagtttagagctgttttctttcagcatgcacctacctgtgcaactgacgattggtaagatcactgattttctcgtcatcattcaggtcgaccacagccgtgggcgttgtagctagacccgctaacgtggctgtcggcgtcgacgctgccgatgatgacttcttcttggcgtcgccttcgccagcatcgcccttggtcgccgacttcatactgccgtacctccgccagtactcccagcagctcaggcaaaggcggctcgtactgtgcccactgctgaccgagttccactgcggacggattggcgattataataaaaacgttaaataatcgtacttaatcccagttgctcacctgtgatgatttcgttgtaccgcacgattcgcatggcttgccattgctggagagatctgtgctcccgtttgtggttccattatagatgccacctcccgccttcgtagacgttccgttccccttgccattgttgttatactgtggtatgtagacctgcttgagcttcagctccgcctcgacggccttcactcgcttctgctgcacgtagcgatcggtggtcttccacatgtagtagtactcgatgatttgtttcagcgttttccaaggcagctgaaaggatgatttttatttttgaatcaataaagattttattcttacacacacaatcaacgtgcattgccacttacgaaatcttgtcgaatgtcattaaagtctttgccatatttttctagcgcctcttcaaaaagattcgcctccgatgcgctccagtcctcgatttcatcgcgacatagcacaggcccagtggaaggaactagcgacgacatggactcttcaatagagtactcgtgcttgtgcagaatgttcattgcgtgaaactgaaaggtaaacgccagtaaacgtcagatcccatcatagatttgcaatcatctcttaccagtgtgatgtccctgctggccgccgcggcggacatgtgcaacgagggctgcttcaccgaactgctgcagtccagggcgcgggcgaaggtgccgatggagcgtgacacgaccaagaactggtctatcttgcggtcggtcaggctgtgctccggcgtccacaccagcgattcgagttcctccagcttgcggtcgtcggtggcggtgtccttgagcttggcgggtatatcacactggtagcgactgccgacccggatctcgcccttgtcggcaagcagcgtcttttgatttggatcgaacaccagacagtagaagaatgtgtcctgtgggtggatttattaagcaattagaattgaatcgaatggaatcttcctagaccaatttccacccaaatactgcactctttcttcaggaacatggatcttacgtctttattaagatagctctgcagggactccgtctcgttgagcagggtcaccgagcacttgcctcggatctgtgtggcgggtatcgactcgacttggcgtgacagaaatagctcgcggtgcttgatctgatagcgctgcttgctggtcaacgcttcgcccttctccgcgtcgcctcctgcacctccggagcctcccgctccacctccgatggcagtgctgctgctgttgttgttggaagtgccgctgctgttgctgccggagttcccggtggctgagcctcctccgccagacgtttgcgttggactggtgcgctcctcatccagggcagctaaaagaataagccaaatcattagattctttcattcggttcggaattttaagatggtgactgattatttaagctagagttaacttttaaagtaaaatgaaataaaatttaaatataataaatataaatataataaatataataatacaaatcaggtgttccatatcaggtatattgaatttaaaaataaattatgatcccattaaccagaatagaactatgcataaagattatcaacttagataggttactacactactgaaattaccatcgtgctctacataaagtgcaaaacatacaaaatgagggcataagtctgagtctgggtctacgggtctacggaagtggcagagatagtatttgagtaatcatctggaggtggtacctattgagggatcgagcacagcctgcgccgcctgctcctcgcttacgggtgtgcggagccaggtcttcttcagcttggtcgccaacggtgagtcctcggcggtggccactgatgcgatgcgttattttagatttaagatggttaggagtatgatttggtgcgttttggggaaatgcgttcatcgacagagatcatgtttataagttaaagcattttagttaataagtttgaaagagacacctgaatgcgaagacaggtgagaaataatcttttaagagtcgttgtcataggcaaaggaactaaggatgcaggatggtaatacgaacaaacaaatatatgacgaccatatatattccttctcgataaggactcaccaagcataaatgatatgaaatcgcactaatgtaccaaaagaccaaacaactccctaggatacacaaatttaaaagatgagcaaagaacccttcaagcaaaaagtaaattcctggttgttttacaatttgtccaactttcctatacttcaaatatattatcaataatattattttttttttatacaagcaatacaattgaaaatgtttaagcgaattcaaagaaaggtcatacatgtatgtatgtccctattttaataaagtgacgctacttgaatctaaacgttatctatataatatacatctcagctttcccggaatttgtgttttgtgaaatccgaaagtaaccctcatgaatttcctggaagttcgctgggctgattaaaaaatatacgcttggcatttcgcaaagggcggaaggggaggaaggtgaggtgggcggtggacagcaccaccacacctcctcggcggacacacgggcgtgggtgcatggcctgagtcccagaaaagagccgaagctgggtacgtgtatttgtgtatttgtattttgcgcttgtttcgaagacgaagcgagagcaatcaaaaaggggcggaggatggtggatggcggtgggtggtgggtggaggggtaaaggcttgggcgttatttggtggccatagataggacacacaagtgggtgggtgcgccgctgcgggatttgtttgccattcgagcgtatctgctttctataccctttccaattcccggcaaacttcaaggtctgctattgacaatgtgattagccgctgagagtggttattttaggctgtgagctatgtactatcacatttaacaataattaaaatagtaaatataatgttatgctaatgatcgtaagtactggctagtacttagatatttcattctaagcttaacaaaataccattttcctagtggcaaacagaacagaaactaacagaaagtaaaacagaagtataaaatatagtaatcattttattttaaaggttttgaagtgtttctggagttcggaaaaccacctttcaaagatacttgcatcaagtccgtagcttggggttggaatggcggcacacttgtgcctcaaatgtatatttttacgctagttttctgcgcctgattagcgagtggcctgcgaaaaggcgacgcacgcaaataaaaactggatcgtggagcgtaatggataacttatattaaaaataaagcaagatgacagtggtccgatgatgttggggccgaaaggggctgtgttaatgggcattgttggtcttgtgggagtgtaggaggtagaatggggtggtggattggggtgggttgctctgccaggtcagacccacggaaaacgcattttcgcgacggtcacgtatcgaattcgagtgggtggccaaagccaaaaattcaacccaattgggcatggtttttgtgagttttttggaacggcgaagaggaagtggatgaaggcgctgtgtgtatgtatacacaaatgcaaagcgcgccttcctgcgtgtgccacatcgccatagcttcactccactccactgctccattccaatcccctccagatcccaacttctgacttgaacattttcgtgcacacagagcagcagtgtcagtgggtttggggttgggttgggcatgggtatgtgtggcagcttttcagaggtagacagactactactgtagtctacctacagccgaaccaagtatcacattcacattgacgtcggcgccgcctagcagcaaccgaaaacagcaacaaccgcattacgggtagtatagtgcagcccagctcattacagtcgagcatcattagagcaaaccggtggcaccttaacgtatgtacatatgtatgcctaaggttgaacttaataatttacaggctatttccgcaccacgatgcgtgtttatgttcattaccagttcccaaaacacctagtttctatgaccaatatctttttagactatttgctaaatgctttttctaatttgcgacacgaataattcaaattgcgctactggaacgtagatcaatggtgcttctggttcgaagtagagtggttacactgccagttgatgtggcaggttgtttgaaggttccactgcctgtttatgtggatgagtcggatgctggacgaaatccgttttcgctccgccctcacagttgttgtcattgcggttcttgttgctcaggaagtttgactaggattgcgggatggggtggcactgtgggaggttgggtggttcggtgggtggcttcgctttccacatgccttgacacagcgcacacagtggtgccccttacgggttcattttgttgttgttttgtggtgggcatgtgcttagcagatctggtcgtcaggttttaactcttaacttgtttgaaggccacgacaacgactcttggcaacataacctcactttgttgacaataaatatacacacttagaggtaacgtaacgcaagatatggatgcggtttcgagggaacagggtttctctactcacgttggtgtttgtcggccaattgcacgagcggattgggcagatcccggcggcggtagaagcacatgaccttcgcttccacattgccggtttggtttttgttcagctcctcgatgcgtcgtattaagtagggactgttcggcgttgtctcaacgtaaacatagtctgaaaaaaaaacagtttttgaggtggctgatgcaaaagggtcagaaaagggcatggaagggtggggggctgcaactccattaatacgtcacaggtaagcgcacacatacacctatacacgcatccacctaagtgcgaccaccactaccagctaaagcgcaattaaatacatatgggtctatccatccatataactttatacctacaacaactgcagcggaacctgtcgttgactattataaaaaataaaagaaattccgtttatctgtatgtacatacatacatagatacaaacgtcgtgtgcacttctgctacattttgggatgcagatacacagatagatgggtagatagatgaagagagatgaaaaagaaagtgtggaggcagcgagaaagcattgccgaaggtgtgtaactgtgtgcgtggccattaaaaacggctaacaaaaaacgccgatggagacaaaaagttctcggcgataaagagcagataattcgacaagtatatatgccattaatatttattttgattccgttaattgaaagcttgcgtatccgaccgagcttatttgcatttcgaaagagcacacacacccacacacttgcgaaaatcaggtgaagacaacacaataacgtcaccgctcgagcgcgagcgagatggctaacagaaagtgcgtcaggcagggtgaggagtgggaggcgtgagatggggggagatgctcaaaagctcattagcatatgaaaacacaaaaaggcgggtgggcggtgagcccaaaagtgagatacactttcgcacatagtcaaacaaacacacacgctggagagatcacaattcggcaaaaccaaatccaaatgcaaatgcaattcagttccccagccctagaatacacacacacgcatacacttagggcataagttaatgcttatcggttggaacacgtcgaaaacacttgctgcagctgcgacacaagagcagcagggggctccttcaaagaagttaaaaaaaatagaaaaggtctctccttttcgacggattgttcttgagattgataatacacgcacacacacacacatacacgtgcgtcgggtctcccactaaagggttttcggcaattaaaatgcactttcgttattgttggaaagcctcctcagacacaacacacacgcatacgcacacattggacacacacacacatatgcagaagcgaacacgcacaccgtgaaacggcggcgccgataacgaaagatgatagaaaagcgagtacgcgaaaatttttctcacctccgactcgatacatatttgtggccattttcactacgctaccgcaccaaaactttcacatgcaaaacactcggcacacgcttagcactgtttttcaatggtcctgttccaaactagcgcacatttattagcagaaaactcgagttgttatgattgcatttttcacataagaagacgcgtttttttcgtcgccatcttagaaacaactcaactctaaaaaatacacgcacacacacacaatgccgagtaaacagctgcaccagggatgcactccacggtgcgatagtttggccatcgatagcaatcgatacatggggtgttgggtaaaaacttaatgttaaaatttagttggggcgataagaaaaacgataaggggcttttctaggaatacgatttatatttatttatattatatatacttcttgaataacaatatatatcattaagaaaattaactgaaaaaattatgggcgaaccttgttttatttatcattttcaaaacatatttattttcaccctttttttctcatattaaaacattcattcaatcgcatggggcgcatgcgatagtatcgcttgaaaactgtcttccctaacatgcaacgtttgcacttaaaattctgtaatagttcgtagtctaggtttctacgttttgtacgtttgtataaattgtttccagagtgagtgctttgatttgaagagcctcttaaagactcatctcgcgaatttgtttactttcgcgtgagtattttggccgtcgccagcacgaaaggtgtcacgactcgctgtcaatccgtgacgtggcctgaccgaccgatttttccaattggcagaggtctaacagaggtttttccgatttaagtattacatttaagtgttccggcgatgaccacctacgaggagttcatccagcagaacgaggaccgcgacggagtgcggctgacgtggaatgtgtggccctcaagtcgcatcgaagccagtcggctggtggtgcccctagcttgtctttaccagcctttgaaggagcgccccgacctaccgcctattcaatatgagccggtcttgtgcactcgcagcaactgcagggccatcctgaatccactgtgccaggtggactaccgtgctaagttgtgggtgtgcaacttctgttttcagcgcaatccggtgagctcaatggtgatctttagactctctgcggcagtttatgacagtcat

SEQ ID NO: 3602 - DNA, 2632 bp, DROSOPHILA
agagttgagttgtttctaagatggcgacgaaaaaaacgcgtcttcttatgtgaaaaatgcaatcataacaactcgagttttctgctaataaatgtgcgctagtttggaacaggaccattgaaaaacagtgctaagcgtgtgccgagtgttttgcatgtgaaagttttggtgcggtagcgtagtgaaaatggccacaaatatgtatcgagtcggagactatgtttacgttgagacaacgccgaacagtccctacttaatacgacgcatcgaggagctgaacaaaaaccaaaccggcaatgtggaagcgaaggtcatgtgcttctaccgccgccgggatctgcccaatccgctcgtgcaattggccgacaaacaccaacctgccctggatgaggagcgcaccagtccaacgcaaacgtctggcggaggaggctcagccaccgggaactccggcagcaacagcagcggcacttccaacaacaacagcagcagcactgccatcggaggtggagcgggaggctccggaggtgcaggaggcgacgcggagaagggcgaagcgttgaccagcaagcagcgctatcagatcaagcaccgcgagctatttctgtcacgccaagtcgagtcgatacccgccacacagatccgaggcaagtgctcggtgaccctgctcaacgagacggagtccctgcagagctatcttaataaagacgacacattcttctactgtctggtgttcgatccaaatcaaaagacgctgcttgccgacaagggcgagatccgggtcggcagtcgctaccagtgtgatatacccgccaagctcaaggacaccgccaccgacgaccgcaagctggaggaactcgaatcgctggtgtggacgccggagcacagcctgaccgaccgcaagatagaccagttcttggtcgtgtcacgctccatcggcaccttcgcccgcgccctggactgcagcagttcggtgaagcagccctcgttgcacatgtccgccgcggcggccagcagggacatcacactgtttcacgcaatgaacattctgcacaagcacgagtactctattgaagagtccatgtcgtcgctagttccttccactgggcctgtgctatgtcgcgatgaaatcgaggactggagcgcatcggaggcgaatctttttgaagaggcgctagaaaaatatggcaaagactttaatgacattcgacaagatttcctgccttggaaaacgctgaaacaaatcatcgagtactactacatgtggaagaccaccgatcgctacgtgcagcagaagcgagtgaaggccgtcgaggcggagctgaagctcaagcaggtctacataccacagtataacaacaatggcaaggggaacggaacgtctacgaaggcgggaggtggcatctataatggaaccacaaacgggagcacagatctctccagcaatggcaagccatgcgaatcgtgcggtacaacgaaatcatcacagtggaactcggtcagcagtgggcacagtacgagccgcctttgcctgagctgctgggagtactggcggaggtacggcagtatgaagtcggcgaccaagggcgatgctggcgaaggcgacgccaagaagaagtcatcatcggcagcgtcgacgccgacagccacgttagcgggtctagctacaacgcccacggctgtggtcgacctgaatgatgacgagaaaatcagtgatcttaccaatcgtcagttgcacagatgttctattgtcaattgcggcaaggagttcaagcttaagactcacctggcccgccactatgcgcaagcgcacggcatcgccatcagctccggatcgccgcggcccataatgaagacgcgcactgccttttacttgcacaccaatcccatgacacgggtggcgcgtgctatctgccgcagcatcgtgaagccgaagaaggcggcgcgacagagcgcgtacgcgatcaatgccatgctggtgaaacaagaatgtttacaaatcgtattagtggaaaatcgcaggcggagatcaagaagttgcttttgctgaagcccaaggatcggggtagtgtcaccaagattgccaaccgcctaggtgcgccgggcagcggaccgcatgaatggctagtactgacgcccaaggacaaaatgccgctgccggctgtcgtctcgttccccaaacccccgaaagcgcccgatggcagcttggtgtatgaccgagtgcctaacaagtcacccgacgtcgtggccgtgccggccgacaaggagctcacaataattcccacgcaagccacgtcgacgatacggaagcgggcacacgaggaccagcaattgaatggcactgaagttactatagttcccagcggacctcctgccaagcggccgaataaggatcccatgccctcgcattgtcccagtcctgagcagtttgcggccatgatggcggcatctggacagccgctctccaggcatcatctcaatggtaaacagaagattgcgcagatggctcgcggtggcaacggacgcaagcaggttatcagttggatggatgcaccggatgatgtttactttagggctaacgatacacacaaaaaaacgcgaaaaatactctccgccgtagatctgcgtcgcgccg

SEQ ID NO: 3603 - protein, 619 aa, DROSOPHILA
MATNMYRVGDYVYVETTPNSPYLIRRIEELNKNQTGNVEAKVMCFYRRRDLPNPLVQLADKHQPALDEERTSPTQTSGGGGSATGNSGSNSSGTSNNNSSSTAIGGGAGGSGGAGGDAEKGEALTSKQRYQIKHRELFLSRQVESIPATQIRGKCSVTLLNETESLQSYLNKDDTFFYCLVFDPNQKTLLADKGEIRVGSRYQCDIPAKLKDTATDDRKLEELESLVWTPEHSLTDRKIDQFLVVSRSIGTFARALDCSSSVKQPSLHMSAAAASRDITLFHAMNILHKHEYSIEESMSSLVPSTGPVLCRDEIEDWSASEANLFEEALEKYGKDFNDIRQDFLPWKTLKQIIEYYYMWKTTDRYVQQKRVKAVEAELKLKQVYIPQYNNNGKGNGTSTKAGGGIYNGTTNGSTDLSSNGKPCESCGTTKSSQWNSVSSGHSTSRLCLSCWEYWRRYGSMKSATKGDAGEGDAKKKSSSAASTPTATLAGLATTPTAVVDLNDDEKISDLTNRQLHRCSIVNCGKEFKLKTHLARHYAQAHGIAISSGSPRPIMKTRTAFYLHTNPMTRVARAICRSIVKPKKAARQSAYAINAMLVKQECLQIVLVENRRRRSRSCFC

SEQ ID NO: 3604 - DNA, 10283 bp, DROSOPHILA
ttgtggtggtggtgagggatgtgtgcaggcgtgtgtgggatagctctttgaatgaccgaactttcgtcgtttgttacatacattatgaaaatacgctttattcgaaatttaacttttaaattttagttatttactgtacagtttgtttgtagttgacgcttcttgattttagttacagttcaaattattgggctttaattacttaattttgcacgccacattcattaacaatgttaaatttctccactccctaattcaaatcgcttaaacaatttcaaatatctttcggcttacaattcaaatctggacagaaaaacatttaaaacttacggaggccattcaatttcataattacgtatctggttttagctaggtttaggaaataaaggaataaagtggaactttagagcgcgatttaaaagttcgacagaactcacacattcacaaatgtatatttaaaaaaccattgcaaatgcgttgtgtactaaacgaattaacgaacatttgagtttcgtgcgttgcagctggcaccttcgtaggaaagtgcagcttgcattcggtgtgttgagattttttaaatttaaaatatatataaaatatttataaatattttgttgtctcgcgttctgttactgctgctacagaccttaacacttactatcttactatttcttgttaaaaagacatctatttaagcgctaataaagtggtttgtggttgctatcgggtatcgcgttttgttgtcctgttcatacagtgatgctgtaactacactgatcctgatcctaagtcgaatgcctgtccacacgtctgtgtgccttatgctgcgggtgtatgtacatggcaagcccgtcagtcaaaccagagagtgctcctagttgagcagtgcatccatggtgtatggaaatggaggatgttgctgctcgaacctacttgctgaagacgataacaacttggttgccgatgctgctgatgctgttaatgtgctcgccggcgacggtcagtccagtattacgatttgtgattcaatgggcctgctactcggctcgggcgccgcaggtttgatgggcagtgtgcgccatggtttgcgcgcggcgcgacgcagatctacggcggagagtatttttcgcgtttttctgtaaaaaggtatattgtaggaatattttaattaaagccggaaatgtaatgattttgaagctgcagattacttacttgtgtgtatcgttagccctaaagtaaacatcatccggtgcatccatccaactgataacctgcttgcgtccgttgccaccgcgagccatctgcgcaatcttctgtttaccattgagctgaagaagcgatcatgtacaaatcaattaaattgaaactagctaaacctaaagtattactcacatgatgcctggagagcggctgtccagatgccgccatcatggccgcaaactgctcaggactgggacaatgcgagggcatgggatccttattcggccgcttggcaggaggtccgctgggaactatagtaactgcaaaagggggaacttggttagtcagaatataagcagaatataaacacctataatcaatgcgttctttgcactcattttaaattttaaaacacatgtaatggaagagctaccttcagtgccattcaattgctggtcctcgtgtgcccgcttccgtatcgtcgacgtggcttgcgtgggaattattgtgagctccttgtcggccggcacggccacgacgtcgggtgacttgttaggcactcggtcatacaccaagctgccatcgggcgctttcgggggtttggggaacgagacgacagccggcagcggcattttgtccttgggcgtcagtactagccattcatgcggtccgctgcccggcgcacctaggcggttggcaatcttggtgacactaccccgatccttgggcttcagcaaaagcaacttcttgatctccgcctgcgattttccactaatacgatttgtaactaagaagaaaagaaacatattatttaacatacgcgtgactcattgcaactaacaaagctgatgagactcacattcttgtttcaccagcatggcattgatcgcgtacgcgctctgtcgcgccgccttcttcggcttcacgatgctgcggcagatagcacgcgccacccgtgtcatgggattggtgtgcaagtaaaaggcagtgcgcgtcttcattatgggccgcggcgatccggagctgatggcgatgccgtgcgcttgcgcatagtggcgggccaggtgagtcttaagcttgaactccttgccgcaattgacaatagaacatctgtgggaagagagaattcaataagcactcggtggtccacgataataagccaataataaagcaaatgaaaagagcatgttttactcgtttaatctcgaaagtgcactgcattcagacatttcttaaatttaataagtatcaaaaggggaatgttacattgccatttgaattccatttataacatatgtatacagttgtgtaaaaattaaacctatcaaaatgtaagcaagtatacgaaaaggacactttaaactgacaaaattaaacattttaatgaactataaacggaaagacaaaaactaatattttgtgagacagaagagttgataaatgccaactttagtttagagctgttttctttcagcatgcacctacctgtgcaactgacgattggtaagatcactgattttctcgtcatcattcaggtcgaccacagccgtgggcgttgtagctagacccgctaacgtggctgtcggcgtcgacgctgccgatgatgacttcttcttggcgtcgccttcgccagcatcgcccttggtcgccgacttcatactgccgtacctccgccagtactcccagcagctcaggcaaaggcggctcgtactgtgcccactgctgaccgagttccactgcggacggattggcgattataataaaaacgttaaataatcgtacttaatcccagttgctcacctgtgatgatttcgttgtaccgcacgattcgcatggcttgccattgctggagagatctgtgctcccgtttgtggttccattatagatgccacctcccgccttcgtagacgttccgttccccttgccattgttgttatactgtggtatgtagacctgcttgagcttcagctccgcctcgacggccttcactcgcttctgctgcacgtagcgatcggtggtcttccacatgtagtagtactcgatgatttgtttcagcgttttccaaggcagctgaaaggatgatttttatttttgaatcaataaagattttattcttacacacacaatcaacgtgcattgccacttacgaaatcttgtcgaatgtcattaaagtctttgccatatttttctagcgcctcttcaaaaagattcgcctccgatgcgctccagtcctcgatttcatcgcgacatagcacaggcccagtggaaggaactagcgacgacatggactcttcaatagagtactcgtgcttgtgcagaatgttcattgcgtgaaactgaaaggtaaacgccagtaaacgtcagatcccatcatagatttgcaatcatctcttaccagtgtgatgtccctgctggccgccgcggcggacatgtgcaacgagggctgcttcaccgaactgctgcagtccagggcgcgggcgaaggtgccgatggagcgtgacacgaccaagaactggtctatcttgcggtcggtcaggctgtgctccggcgtccacaccagcgattcgagttcctccagcttgcggtcgtcggtggcggtgtccttgagcttggcgggtatatcacactggtagcgactgccgacccggatctcgcccttgtcggcaagcagcgtcttttgatttggatcgaacaccagacagtagaagaatgtgtcctgtgggtggatttattaagcaattagaattgaatcgaatggaatcttcctagaccaatttccacccaaatactgcactctttcttcaggaacatggatcttacgtctttattaagatagctctgcagggactccgtctcgttgagcagggtcaccgagcacttgcctcggatctgtgtggcgggtatcgactcgacttggcgtgacagaaatagctcgcggtgcttgatctgatagcgctgcttgctggtcaacgcttcgcccttctccgcgtcgcctcctgcacctccggagcctcccgctccacctccgatggcagtgctgctgctgttgttgttggaagtgccgctgctgttgctgccggagttcccggtggctgagcctcctccgccagacgtttgcgttggactggtgcgctcctcatccagggcagctaaaagaataagccaaatcattagattctttcattcggttcggaattttaagatggtgactgattatttaagctagagttaacttttaaagtaaaatgaaataaaatttaaatataataaatataaatataataaatataataatacaaatcaggtgttccatatcaggtatattgaatttaaaaataaattatgatcccattaaccagaatagaactatgcataaagattatcaacttagataggttactacactactgaaattaccatcgtgctctacataaagtgcaaaacatacaaaatgagggcataagtctgagtctgggtctacgggtctacggaagtggcagagatagtatttgagtaatcatctggaggtggtacctattgagggatcgagcacagcctgcgccgcctgctcctcgcttacgggtgtgcggagccaggtcttcttcagcttggtcgccaacggtgagtcctcggcggtggccactgatgcgatgcgttattttagatttaagatggttaggagtatgatttggtgcgttttggggaaatgcgttcatcgacagagatcatgtttataagttaaagcattttagttaataagtttgaaagagacacctgaatgcgaagacaggtgagaaataatcttttaagagtcgttgtcataggcaaaggaactaaggatgcaggatggtaatacgaacaaacaaatatatgacgaccatatatattccttctcgataaggactcaccaagcataaatgatatgaaatcgcactaatgtaccaaaagaccaaacaactccctaggatacacaaatttaaaagatgagcaaagaacccttcaagcaaaaagtaaattcctggttgttttacaatttgtccaactttcctatacttcaaatatattatcaataatattattttttttttatacaagcaatacaattgaaaatgtttaagcgaattcaaagaaaggtcatacatgtatgtatgtccctattttaataaagtgacgctacttgaatctaaacgttatctatataatatacatctcagctttcccggaatttgtgttttgtgaaatccgaaagtaaccctcatgaatttcctggaagttcgctgggctgattaaaaaatatacgcttggcatttcgcaaagggcggaaggggaggaaggtgaggtgggcggtggacagcaccaccacacctcctcggcggacacacgggcgtgggtgcatggcctgagtcccagaaaagagccgaagctgggtacgtgtatttgtgtatttgtattttgcgcttgtttcgaagacgaagcgagagcaatcaaaaaggggcggaggatggtggatggcggtgggtggtgggtggaggggtaaaggcttgggcgttatttggtggccatagataggacacacaagtgggtgggtgcgccgctgcgggatttgtttgccattcgagcgtatctgctttctataccctttccaattcccggcaaacttcaaggtctgctattgacaatgtgattagccgctgagagtggttattttaggctgtgagctatgtactatcacatttaacaataattaaaatagtaaatataatgttatgctaatgatcgtaagtactggctagtacttagatatttcattctaagcttaacaaaataccattttcctagtggcaaacagaacagaaactaacagaaagtaaaacagaagtataaaatatagtaatcattttattttaaaggttttgaagtgtttctggagttcggaaaaccacctttcaaagatacttgcatcaagtccgtagcttggggttggaatggcggcacacttgtgcctcaaatgtatatttttacgctagttttctgcgcctgattagcgagtggcctgcgaaaaggcgacgcacgcaaataaaaactggatcgtggagcgtaatggataacttatattaaaaataaagcaagatgacagtggtccgatgatgttggggccgaaaggggctgtgttaatgggcattgttggtcttgtgggagtgtaggaggtagaatggggtggtggattggggtgggttgctctgccaggtcagacccacggaaaacgcattttcgcgacggtcacgtatcgaattcgagtgggtggccaaagccaaaaattcaacccaattgggcatggtttttgtgagttttttggaacggcgaagaggaagtggatgaaggcgctgtgtgtatgtatacacaaatgcaaagcgcgccttcctgcgtgtgccacatcgccatagcttcactccactccactgctccattccaatcccctccagatcccaacttctgacttgaacattttcgtgcacacagagcagcagtgtcagtgggtttggggttgggttgggcatgggtatgtgtggcagcttttcagaggtagacagactactactgtagtctacctacagccgaaccaagtatcacattcacattgacgtcggcgccgcctagcagcaaccgaaaacagcaacaaccgcattacgggtagtatagtgcagcccagctcattacagtcgagcatcattagagcaaaccggtggcaccttaacgtatgtacatatgtatgcctaaggttgaacttaataatttacaggctatttccgcaccacgatgcgtgtttatgttcattaccagttcccaaaacacctagtttctatgaccaatatctttttagactatttgctaaatgctttttctaatttgcgacacgaataattcaaattgcgctactggaacgtagatcaatggtgcttctggttcgaagtagagtggttacactgccagttgatgtggcaggttgtttgaaggttccactgcctgtttatgtggatgagtcggatgctggacgaaatccgttttcgctccgccctcacagttgttgtcattgcggttcttgttgctcaggaagtttgactaggattgcgggatggggtggcactgtgggaggttgggtggttcggtgggtggcttcgctttccacatgccttgacacagcgcacacagtggtgccccttacgggttcattttgttgttgttttgtggtgggcatgtgcttagcagatctggtcgtcaggttttaactcttaacttgtttgaaggccacgacaacgactcttggcaacataacctcactttgttgacaataaatatacacacttagaggtaacgtaacgcaagatatggatgcggtttcgagggaacagggtttctctactcacgttggtgtttgtcggccaattgcacgagcggattgggcagatcccggcggcggtagaagcacatgaccttcgcttccacattgccggtttggtttttgttcagctcctcgatgcgtcgtattaagtagggactgttcggcgttgtctcaacgtaaacatagtctgaaaaaaaaacagtttttgaggtggctgatgcaaaagggtcagaaaagggcatggaagggtggggggctgcaactccattaatacgtcacaggtaagcgcacacatacacctatacacgcatccacctaagtgcgaccaccactaccagctaaagcgcaattaaatacatatgggtctatccatccatataactttatacctacaacaactgcagcggaacctgtcgttgactattataaaaaataaaagaaattccgtttatctgtatgtacatacatacatagatacaaacgtcgtgtgcacttctgctacattttgggatgcagatacacagatagatgggtagatagatgaagagagatgaaaaagaaagtgtggaggcagcgagaaagcattgccgaaggtgtgtaactgtgtgcgtggccattaaaaacggctaacaaaaaacgccgatggagacaaaaagttctcggcgataaagagcagataattcgacaagtatatatgccattaatatttattttgattccgttaattgaaagcttgcgtatccgaccgagcttatttgcatttcgaaagagcacacacacccacacacttgcgaaaatcaggtgaagacaacacaataacgtcaccgctcgagcgcgagcgagatggctaacagaaagtgcgtcaggcagggtgaggagtgggaggcgtgagatggggggagatgctcaaaagctcattagcatatgaaaacacaaaaaggcgggtgggcggtgagcccaaaagtgagatacactttcgcacatagtcaaacaaacacacacgctggagagatcacaattcggcaaaaccaaatccaaatgcaaatgcaattcagttccccagccctagaatacacacacacgcatacacttagggcataagttaatgcttatcggttggaacacgtcgaaaacacttgctgcagctgcgacacaagagcagcagggggctccttcaaagaagttaaaaaaaatagaaaaggtctctccttttcgacggattgttcttgagattgataatacacgcacacacacacacatacacgtgcgtcgggtctcccactaaagggttttcggcaattaaaatgcactttcgttattgttggaaagcctcctcagacacaacacacacgcatacgcacacattggacacacacacacatatgcagaagcgaacacgcacaccgtgaaacggcggcgccgataacgaaagatgatagaaaagcgagtacgcgaaaatttttctcacctccgactcgatacatatttgtggccattttcactacgctaccgcaccaaaactttcacatgcaaaacactcggcacacgcttagcactgtttttcaatggtcctgttccaaactagcgcacatttattagcagaaaactcgagttgttatgattgcatttttcacataagaagacgcgtttttttcgtcgccatcttagaaacaactcaactctaaaaaatacacgcacacacacacaatgccgagtaaacagctgcaccagggatgcactccacggtgcgatagtttggccatcgatagcaatcgatacatggggtgttgggtaaaaacttaatgttaaaatttagttggggcgataagaaaaacgataaggggcttttctaggaatacgatttatatttatttatattatatatacttcttgaataacaatatatatcattaagaaaattaactgaaaaaattatgggcgaaccttgttttatttatcattttcaaaacatatttattttcaccctttttttctcatattaaaacattcattcaatcgcatggggcgcatgcgatagtatcgcttgaaaactgtcttccctaacatgcaacgtttgcacttaaaattctgtaatagttcgtagtctaggtttctacgttttgtacgtttgtataaattgtttccagagtgagtgctttgatttgaagagcctcttaaagactcatctcgcgaatttgtttactttcgcgtgagtattttggccgtcgccagcacgaaaggtgtcacgactcgctgtcaatccgtgacgtggcctgaccgaccgatttttccaattggcagaggtctaacagaggtttttccgatttaagtattacatttaagtgttccggcgatgaccacctacgaggagttcatccagcagaacgaggaccgcgacggagtgcggctgacgtggaatgtgtggccctcaagtcgcatcgaagccagtcggctggtggtgcccctagcttgtctttaccagcctttgaaggagcgccccgacctaccgcctattcaatatgagccggtcttgtgcactcgcagcaactgcagggccatcctgaatccactgtgccaggtggactaccgtgctaagttgtgggtgtgcaacttctgttttcagcgcaatccggtgagctcaatggtgatctttagactctctgcggcagtttatgacagtcat

SEQ ID NO: 3605 - DNA, 2832 bp, DROSOPHILA
agagttgagttgtttctaagatggcgacgaaaaaaacgcgtcttcttatgtgaaaaatgcaatcataacaactcgagttttctgctaataaatgtgcgctagtttggaacaggaccattgaaaaacagtgctaagcgtgtgccgagtgttttgcatgtgaaagttttggtgcggtagcgtagtgaaaatggccacaaatatgtatcgagtcggagactatgtttacgttgagacaacgccgaacagtccctacttaatacgacgcatcgaggagctgaacaaaaaccaaaccggcaatgtggaagcgaaggtcatgtgcttctaccgccgccgggatctgcccaatccgctcgtgcaattggccgacaaacaccaactggccaccgccgaggactcaccgttggcgaccaagctgaagaagacctggctccgcacacccgtaagcgaggagcaggcggcgcaggctgtgctcgatccctcaatagctgccctggatgaggagcgcaccagtccaacgcaaacgtctggcggaggaggctcagccaccgggaactccggcagcaacagcagcggcacttccaacaacaacagcagcagcactgccatcggaggtggagcgggaggctccggaggtgcaggaggcgacgcggagaagggcgaagcgttgaccagcaagcagcgctatcagatcaagcaccgcgagctatttctgtcacgccaagtcgagtcgatacccgccacacagatccgaggcaagtgctcggtgaccctgctcaacgagacggagtccctgcagagctatcttaataaagacgacacattcttctactgtctggtgttcgatccaaatcaaaagacgctgcttgccgacaagggcgagatccgggtcggcagtcgctaccagtgtgatatacccgccaagctcaaggacaccgccaccgacgaccgcaagctggaggaactcgaatcgctggtgtggacgccggagcacagcctgaccgaccgcaagatagaccagttcttggtcgtgtcacgctccatcggcaccttcgcccgcgccctggactgcagcagttcggtgaagcagccctcgttgcacatgtccgccgcggcggccagcagggacatcacactgtttcacgcaatgaacattctgcacaagcacgagtactctattgaagagtccatgtcgtcgctagttccttccactgggcctgtgctatgtcgcgatgaaatcgaggactggagcgcatcggaggcgaatctttttgaagaggcgctagaaaaatatggcaaagactttaatgacattcgacaagatttcctgccttggaaaacgctgaaacaaatcatcgagtactactacatgtggaagaccaccgatcgctacgtgcagcagaagcgagtgaaggccgtcgaggcggagctgaagctcaagcaggtctacataccacagtataacaacaatggcaaggggaacggaacgtctacgaaggcgggaggtggcatctataatggaaccacaaacgggagcacagatctctccagcaatggcaagccatgcgaatcgtgcggtacaacgaaatcatcacagtggaactcggtcagcagtgggcacagtacgagccgcctttgcctgagctgctgggagtactggcggaggtacggcagtatgaagtcggcgaccaagggcgatgctggcgaaggcgacgccaagaagaagtcatcatcggcagcgtcgacgccgacagccacgttagcgggtctagctacaacgcccacggctgtggtcgacctgaatgatgacgagaaaatcagtgatcttaccaatcgtcagttgcacagatgttctattgtcaattgcggcaaggagttcaagcttaagactcacctggcccgccactatgcgcaagcgcacggcatcgccatcagctccggatcgccgcggcccataatgaagacgcgcactgccttttacttgcacaccaatcccatgacacgggtggcgcgtgctatctgccgcagcatcgtgaagccgaagaaggcggcgcgacagagcgcgtacgcgatcaatgccatgctggtgaaacaagaatgtttacaaatcgtattagtggaaaatcgcaggcggagatcaagaagttgcttttgctgaagcccaaggatcggggtagtgtcaccaagattgccaaccgcctaggtgcgccgggcagcggaccgcatgaatggctagtactgacgcccaaggacaaaatgccgctgccggctgtcgtctcgttccccaaacccccgaaagcgcccgatggcagcttggtgtatgaccgagtgcctaacaagtcacccgacgtcgtggccgtgccggccgacaaggagctcacaataattcccacgcaagccacgtcgacgatacggaagcgggcacacgaggaccagcaattgaatggcactgaagttactatagttcccagcggacctcctgccaagcggccgaataaggatcccatgccctcgcattgtcccagtcctgagcagtttgcggccatgatggcggcatctggacagccgctctccaggcatcatctcaatggtaaacagaagattgcgcagatggctcgcggtggcaacggacgcaagcaggttatcagttggatggatgcaccggatgatgtttactttagggctaacgatacacacaaaaaaacgcgaaaaatactctccgccgtagatctgcgtcgcgccgcgcgcaaaccatggcgcacactgcccatcaaacctgcggcgcccgagccgagtagcaggcccattgaatcacaaatcgtaatactggactga

SEQ ID NO: 3606 - protein, 655 aa, DROSOPHILA
MATNMYRVGDYVYVETTPNSPYLIRRIEELNKNQTGNVEAKVMCFYRRRDLPNPLVQLADKHQLATAEDSPLATKLKKTWLRTPVSEEQAAQAVLDPSIAALDEERTSPTQTSGGGGSATGNSGSNSSGTSNNNSSSTAIGGGAGGSGGAGGDAEKGEALTSKQRYQIKHRELFLSRQVESIPATQIRGKCSVTLLNETESLQSYLNKDDTFFYCLVFDPNQKTLLADKGEIRVGSRYQCDIPAKLKDTATDDRKLEELESLVWTPEHSLTDRKIDQFLVVSRSIGTFARALDCSSSVKQPSLHMSAAAASRDITLFHAMNILHKHEYSIEESMSSLVPSTGPVLCRDEIEDWSASEANLFEEALEKYGKDFNDIRQDFLPWKTLKQIIEYYYMWKTTDRYVQQKRVKAVEAELKLKQVYIPQYNNNGKGNGTSTKAGGGIYNGTTNGSTDLSSNGKPCESCGTTKSSQWNSVSSGHSTSRLCLSCWEYWRRYGSMKSATKGDAGEGDAKKKSSSAASTPTATLAGLATTPTAVVDLNDDEKISDLTNRQLHRCSIVNCGKEFKLKTHLARHYAQAHGIAISSGSPRPIMKTRTAFYLHTNPMTRVARAICRSIVKPKKAARQSAYAINAMLVKQECLQIVLVENRRRRSRSCFC

SEQ ID NO: 3607 - DNA, 4032 bp, DROSOPHILA
tataaataatttgtttaatctaggtttaatccaattaacttattctggtggttccaattgattgaacgctatcagtgggtcaaaaataatctgtacctgctcagctgtaggtaaatttttcttagtattttattgccgggctaagtagagccaaatttagggtttcataatgtcttataaagtggatttggttaagctggaagttattccacgtggatttgaatacttagcagactttattttgcagaaagccttagataaatatgaataaatattcatcggttgcagttcaagctattgccgataacccaaaaccgtgtccagaagtcacatacatcatccatcatcacatggtgctttcttgagaactggtctgtttactcttctcacgtctttgaaactttccatgttcagtgtttgcctttgcataattctattttttgacaggggtaaataatcgggctgggctgcagggggcgtggccgctgttatacgaccctacgccagagtgtgtacagcttaacaccgtggcccaccaaaattaaccacccaaatatttacccatgtcagcgataagaattacgattctgactgggatcttttgcacgactgatacggcagatctttcgcatcgcagcttctccagactcgcacgactggacgctgaagttagagtttatcttccggctatatgtatttagatcgcctggttttgtcgcctgtctcatcgcagttttcaggaggattgtggccactccgttacgatggttaaactaaggtcttttacaacaaaatttaacaaagagatgtaatcttctgtaaataaactcacactcggttacctttaaacacaaccattgagaaatgtacgacagagcaaacattatagatggatagcatcttagaaacagagctttataatctatattgatatgactaacagttagtgaggttatcctgcttataaagcatatcttaatgttaggttccaatccgaatctcagaccttttcgggtttctctaggttcaactggtggggttcatccgacggcgtcagcttgtaatggacgaacggctgcaccaccggagacaggagcttcgggttcggtttgtaatcaggcccagacttcaggatgtaactcagcggaatacctatcagccaggtgatgacgaagcctgtgaccgtgtaccagttaaaggagaggtccaggatgctgaattccttctcccccacaggggcttctgtggtggaaccaaggaacagaggtgaagctgtgctgatgtcctttatggttccgttcagggaagctggacaagcggatgtgctcgtgggcagagtgtcatagtgattgcggccccagctcaaaatcacaatggtggccatacaggcaatgctagcgagaactccaactaaagcggcctgaatgaaaagaatggttaggaaatctgcatcattgggaaatcctgaaaacttaccctgccatgggattttggaaccagcattcccagcataaaaacgccacacgtcgagccaaagctcatgcctccaatagaatagatcacttgcagaatggagttgaagttctcaataaccatcccacccaagatgcagtagattccggtaaagaaaacgaacagtttcataatcacgttggcccggtgctccgtgtgtcgaatgtgtggcttgatgtagtcgaagtagacaactcctcccagggaattgatgctggcggaaagcgtgctaagggcagcactgaacacgcaggaaataaatacacctggcatgccccacaagttacctacggtatcttgcacgaagtacggaaccatcttgtccaccttagagacatgaccagactggatgggatcgcagtcgtggaagcgggagtaaatcacaatgcctgtgaagcagttgaagaacatgatcaggataaacccgaagccaaagagcaccagcgatcttctggcgtgacccagtgaaggcagggacacgattcgctgcacgcagctctggttcagacccacgtatcccgtccacatcatagtcgccgatgtgaaaatgttccatatggtagagcgcgtggtcaggtcgaagttgtagttgatatccaggcgtccaccttccccggcaatgcgcagcacttcaaagaagcctcccactcggtgggcgcccaaaacgcccactaggaccacggatgcaaccataatggctgcctggataacatcggtccacaccacagccttgatacctccgaacatggtgtagaagacgcagatgctgcacacaacggtgttgattaggtgcacattaaatccggtcactagcagataagaaaaattaccaacgagggaaagaataagttgactagttagcacttaccctgtgcaaaggccagggaaggcaggaagataaagatcgggagcatgaaaaacatcgtcaatatgaagatgaaggtctgcagcactcgcaccttccggcaaaagcgcatctccaagtactgggtatatgaaaatatgtacaataatatacagtgttcccttggaaaatcgcactctaggtcacctcatagcagtttgtgatattattgttgtagaaaaccgggatcaccaagtaattaagaagcggcaccacaagcaccatgcaaaccacgttgaaaacccagttgattccgtaggcgtacatttccgccggaatggtcattatggagatcgccgacagttgactggccaccagcgaaatggcgatgggaatcgttttcatccgcttgccgcccatcaggtactcctccgtggtgtcctcgcccttggcaaagaaaccgaaataaactccaatagcggcagagatgctcagcaccagggcgaatacgccgtaatccgtggcgttgaaaacgaactgtgagtcgggaaccacggtggcagcggttgccaggacggtagcgttcaaaagggacgacatatcggaaggattcgctcgaggaggactcacagccacgaataactaaagcactattcactagtcactattcacttcccggctccgattgcggagaatctcgattagcggcatcacggcgaccgcctcgtctttttataaggtactgtgcctagcctgctctaaatattatctatcgacggcgctctcgcgtacgaccttatctagatggtggtattatccactagaatcttagatccatcagtcaattccccggcttgcttgcttcactcacagtgggagtccgataagagctccagagttggccgagattacgtaatccggcacgcactcattcattgttttcgctgtcatccagccaccgttggatgtttacccttaaatctcgattataatcctgctgagaacctccagtcattctcgccttgccagtcaccctaggagctcttctcagatagagctctctcggacatcgcactccggaattggccccagacaaggccactccgttgttgacgcttatcgagggccaggggatagagttttatgggcctatagtgagttttcaaaaataacacagatagctttgatagatgctgattcttatcattaacgtaatggaattactgcggttctttctgtaactacagaaataggttttattaatctgcagctaatatggaactaaggcttagttcagttattgtaatctcccttattatctcaagtatatctcaagttgtaaaactacaacagaataaactcaataagctcaatttccatccgttactactttcaaatttcgctcgtccatttggagtatgcataatgcgtcaatatgattataccgtaggaccatcagcagttgtggtggctacgatgtcgtaatcggggtattccacagcttccacttcgtttggcgtctcatcataaggcatctcatagtgcagctttttgggtgcacttccacgtatgtacatatatatgtatatgtacatagaggacggccacctcggcacgcattcaattgggaaatctaatgatgcgaatgttggttaagtggctacagcttcagattc

SEQ ID NO: 3608 - DNA, 1852 bp, DROSOPHILA
ggaagtgaatagtgactagtgaatagtgctttagttattcgtggctgtgagtcctcctcgagcgaatccttccgatatgtcgtcccttttgaacgctaccgtcctggcaaccgctgccaccgtggttcccgactcacagttcgttttcaacgccacggattacggcgtattcgccctggtgctgagcatctctgccgctattggagtttatttcggtttctttgccaagggcgaggacaccacggaggagtacctgatgggcggcaagcggatgaaaacgattcccatcgccatttcgctggtggccagtcaactgtcggcgatctccataatgaccattccggcggaaatgtacgcctacggaatcaactgggttttcaacgtggtttgcatggtgcttgtggtgccgcttcttaattacttggtgatcccggttttctacaacaataatatcacaaactgctatgagtacttggagatgcgcttttgccggaaggtgcgagtgctgcagaccttcatcttcatattgacgatgtttttcatgctcccgatctttatcttcctgccttccctggcctttgcacaggtgaccggatttaatgtgcacctaatcaacaccgttgtgtgcagcatctgcgtcttctacaccatgttcggaggtatcaaggctgtggtgtggaccgatgttatccaggcagccattatggttgcatccgtggtcctagtgggcgttttgggcgcccaccgagtgggaggcttctttgaagtgctgcgcattgccggggaaggtggacgcctggatatcaactacaacttcgacctgaccacgcgctctaccatatggaacattttcacatcggcgactatgatgtggacgggatacgtgggtctgaaccagagctgcgtgcagcgaatcgtgtccctgccttcactgggtcacgccagaagatcgctggtgctctttggcttcgggtttatcctgatcatgttcttcaactgcttcacaggcattgtgatttactcccgcttccacgactgcgatcccatccagtctggtcatgtctctaaggtggacaagatggttccgtacttcgtgcaagataccgtaggtaacttgtggggcatgccaggtgtatttatttcctgcgtgttcagtgctgcccttagcacgctttccgccagcatcaattccctgggaggagttgtctacttcgactacatcaagccacacattcgacacacggagcaccgggccaacgtgattatgaaactgttcgttttctttaccggaatctactgcatcttgggtgggatggttattgagaacttcaactccattctgcaagtgatctattctattggaggcatgagctttggctcgacgtgtggcgtttttatgctgggaatgctggttccaaaatcccatggcagggccgctttagttggagttctcgctagcattgcctgtatggccaccattgtgattttgagctggggccgcaatcactatgacactctgcccacgagcacatccgcttgtccagcttccctgaacggaaccataaaggacatcagcacagcttcacctctgttccttggttccaccacagaagcccctgtgggggagaaggaattcagcatcctggacctctcctttaactggtacacggtcacaggcttcgtcatcacctggctgataggtattccgctgagttacatcctgaagtctgggcctgattacaaaccgaacccgaagctcctgtctccggtggtgcagccgttcgtccattacaagctgacgccgtcggatgaaccccaccagttgaacctagagaaacccgaaaaggtctga

SEQ ID NO: 3609 - protein, 591 aa, DROSOPHILA
MSSLLNATVLATAATVVPDSQFVFNATDYGVFALVLSISAAIGVYFGFFAKGEDTTEEYLMGGKRMKTIPIAISLVASQLSAISIMTIPAEMYAYGINWVFNVVCMVLVVPLLNYLVIPVFYNNNITNCYEYLEMRFCRKVRVLQTFIFILTMFFMLPIFIFLPSLAFAQVTGFNVHLINTVVCSICVFYTMFGGIKAVVWTDVIQAAIMVASVVLVGVLGAHRVGGFFEVLRIAGEGGRLDINYNFDLTTRSTIWNIFTSATMMWTGYVGLNQSCVQRIVSLPSLGHARRSLVLFGFGFILIMFFNCFTGIVIYSRFHDCDPIQSGHVSKVDKMVPYFVQDTVGNLWGMPGVFISCVFSAALSTLSASINSLGGVVYFDYIKPHIRHTEHRANVIMKLFVFFTGIYCILGGMVIENFNSILQVIYSIGGMSFGSTCGVFMLGMLVPKSHGRAALVGVLASIACMATIVILSWGRNHYDTLPTSTSACPASLNGTIKDISTASPLFLGSTTEAPVGEKEFSILDLSFNWYTVTGFVITWLIGIPLSYILKSGPDYKPNPKLLSPVVQPFVHYKLTPSDEPHQLNLEKPEKV

SEQ ID NO: 3610 - DNA, 4878 bp, DROSOPHILA
gcctacagggccgagtggctaacccaattgccctgcatccaggaatcccagttcgtccgcgccgataccagccaaccgctggacgcctgcgccgcagattacgaggcgaaggtcaaaagtcaagtcgatcgcttcgatctgctgctgcttggcatgggacccgatggccacacctgctccctctttcccgagcagccagccaccctgcaggagaccaagcgcctggttatccccatccggaactcgcccaagccgcctcccgagcggatcactttcaccctgccgctgatcaataaggcacggaatgtcgccttcgtggttacgggcgccgcaaaagccagtgtcgtcaaggtgaggtctctttagcttgataagatggaaaagaatatgagcaagaaatctgatatttttaaccacaattcaaaaacttcatttgtaaggtttatttttgttgttattatattttttagagtgtgtttgtcgatctggacaagaagtttcccgctgcgtgggtgaatccgaccaaagggcagttgacattgattgtggacgcgggtgctggaaaagaaattgaaaccttaaaatgacattccttagttaactatcgcatcttgtaaataataattaccttgataatcttttcgagagcgtttaatttgttgagctattaaggttggagaaaataaataaacactccaaatattgtgattttacaattatttttgaatttctttatatatttatttaatgtttagaaaatgtttgtaaaatgcaaatctggtttaaaaaagctatcggcaacatgaaaaatatcgatatttacgcagtgtggccgaactcggtaacacaacaaatggcgcacccagtatgacggcactcgcgagcacaacaaacgcttcgtattgttaaaataaaagaaaaattatgaaaattcagcagcaattgtgctaattgtcgatgcccacatgcaatagcaaagatcgaaggacgcgcaacagccatggcaacgccacagccgcagccgcagctggagttgggttcgtgccaggaggcgcaaactgagccggcggtcagcaagttggtttcccagttagagcccctgaccacaatggacaccgtggacgcggagcgcgtctgccgcgtgtgcctaaaggatgtatcgttggagggggagctacacttcatcttcaacgaaacgcccgtcgagcaggacgcaaatctggcccgcatcctggacgagtgcaccctgcaccagtgcgagcgaaacgacggcatgcccccacatatgtgcagctcctgcgtggaggcggcccgcaacgcctaccgcttcaagcggcacgcggagcgttcctactgctcgctggtcgcattgctgggccggtcgccccagctgaaggcgcgaggagccgaggcggccagtcagacggatcaggtggccttgctgccatgcgaaatgtgccacgaccagttcctcaacagcctggagctcaggctgcaccgcaaccaggtgcacagaacgaccaaggaggccacgtcggctggcacagatggcctgccatccgaggattttaagtgcaaattttgtccgcagcatttcccgcatctccgacagctgcgcagccatttggcgcgcagccacgagcagaccgcacgtctacagtgcgcccattgccaacgcacctttagccggcgggatcatttgctgcgccacatacgcaatcagcaccgggatgtggaggaggatcttttgcgcacctggccgccggcggacgagaatactatgaacagcgatggcggagatgagctggtctctgcggaggtgctgttaaacgaggaggataacgaagatgaagtcgttggggaagcctttcagtgcaatacgaatcccatttccagtaacgaagatgatggcgaagaagccaatggggccaatcaaacgctgtggctgcacatcaagccggaaccctgcctggaggcggaagaagtcgacctggccatgcagctaaagctcgagaagaagcgtcgacggcgggagaaggcagaagctcaagcggaaacttccatcgatcggactgtgaagagtaagtgtggtatgcttagataaacagagaaatgtagaacccatttatcattcttcagacgaacacattgccatcggcgactctcagttcagcattaaggaagagaatcaacttgtgggcagcgatgacgaggcgccaatgggagtggaagacttcatgaagctccatgtcagcggagagctgccgcttagcgatgaggagcggttcgatggttttgcagacgatgacagtgaccttgacgatgatgacgacgacgacgacgaggaggacgctggggatgatgatgacggagaattccggttgaaacaggagccgctggatggcgaaaagccgctgaagaaggccaagtccggcaggcggcgacggcggcgcaacaaggacgagcccaatcccgataaccgctgcgaggtgtgccagcgcaccttctcgcgccactgccacctgctgcgccacaagctgtcgcacctggagaagaagccccacaactgcccgcactgccccaaggcgttcgcgcgcagcgaccacctcaaggcgcatgtgcagagcctacacagcaacaaggagcacaagtgttcgctctgtgaggccgccttctcgcgcctggacgccttggagcgtcacaaggtcagcaaacacaacggtgagggcctggagccgggcagcgaactgaagctgcagctggcggagcacacttgtgagtactgctccaagcgcttctccagtaagacctatctacgcaagcacactctgctgcacaccgacttcctttacgcctgcaagacttgcgacgagacattccgcgagcgagcgcagctgagggagcacgaaaagacccacaccgggcagcggaacttcctgtgctgcatctgcggcgacagctttgcccgcaacgactacctccgcgtgcatatgcgacgccacaacggtgagaagccctacaagtgccgcttctgtgtcaaagcctttccccgtgccaccgatctcaaggtccatgagcggtaagtgatgaatccactatccccactgttgctatccgctgttttttctttttttgtttcctaaacgatttttgcctggacttgcagttaccacacgggcaccaaacctaatctgtgcaatacttgcggcaagagcttccaccgcgcgtacaatctaacgatccacatgcgcacgcacaccggcgagcggccgtacaagtgcgaccagtgtcccaagagcttcacgcaaagcaacgacctgaaggcgcacatccggcggcatacgggcgagcggtacaagtgtccgcactgcgatgcctacttcctgcagttgtataatatgcgcaatcactgcatgagcgcccacaacaagcacatcgagacgaagacgggacgactgcagcgcacgggtctgctagacgatggcggtcagtcgcatttgaccaccgtcgttatgccgccggcacggtatccaaatgaactcgatccccagctggcggcgacggctgcggcgactgcagctggcggtgctgagagcacatcgtcgaccaccgtcattcactcgccgggtacatacaatgcgacagctgcagctccagctaataccttcgatggagccaactttacacccacggcagtgaatacgcctgctccgtttggcgcctttaactttccgccggccgttatgggtatgtagggaatagcatcatccttgtcataaccatactccatctctgtcgttttcgctacagcgcatctcatgtacaaccaaggaggaagcagccagcacagccagagcggaagcgatgcgggcaaatagctatcgatgctgaagtgcgtgattctgctactgctcctgctcctcctgggcttcacacggctccaactcatcccgaacatcaaactattccagtgtagacttaagctttcctctgtacataaacggtatccgaattgggaggagctgttgcaccgcaccgggctctggccaattgaagggttcatcactggcgcaggcaccacacgtgccgcccattttaatgtgttaatatgtatttaatagtcaaataagaactgctctactacagtgtaggcggttggaatctttttataaagcttgcatcagtgcgattgtatattagtatattaaaattaaattgcacatagctccccctccctcaaacaattgacaaattgaattgtatattagtatattaaaattgaagtccaaatagcaccccctccctctaacaattgacaaatttagttgtatattagtatattaaaattaaagtgcaaatagctccccatccctctaacaattaacaaatttagttgatgatcaaataaatcgtgaaagcatagtaaaacatcgaaatgtacagctatttctttttggtggaaaactagcaaaaaattattaacaaatgtacaaccaattcctgaaatttacacacgaattatgctgaaagaaatgtgaaatacactcgagtcttgtggtcaagcgaaaaaactcacataaattttattctgaaaacgtaaaacagaaaataaaaaattaaaatacatcaagaaactccaactgttatgaaatagtgtagtaggtacgcgttaagctagtcaatctccagtggaactagaactgtctgcgcggctgcacgatcatcaggctttcccgcggcaccggcagattggcattcatttccgcacgacgagttcgcggcacggccaattgatgacgctggcgcggcagcatcgaggagcgactggtcggctgaaattcgtcatagctgacaccctgctcgggattctcgtccgtt

SEQ ID NO: 3611 - DNA, 2670 bp, DROSOPHILA
atggcaacgccacagccgcagccgcagctggagttgggttcgtgccaggaggcgcaaactgagccggcggtcagcaagttggtttcccagttagagcccctgaccacaatggacaccgtggacgcggagcgcgtctgccgcgtgtgcctaaaggatgtatcgttggagggggagctacacttcatcttcaacgaaacgcccgtcgagcaggacgcaaatctggcccgcatcctggacgagtgcaccctgcaccagtgcgagcgaaacgacggcatgcccccacatatgtgcagctcctgcgtggaggcggcccgcaacgcctaccgcttcaagcggcacgcggagcgttcctactgctcgctggtcgcattgctgggccggtcgccccagctgaaggcgcgaggagccgaggcggccagtcagacggatcaggtggccttgctgccatgcgaaatgtgccacgaccagttcctcaacagcctggagctcaggctgcaccgcaaccaggtgcacagaacgaccaaggaggccacgtcggctggcacagatggcctgccatccgaggattttaagtgcaaattttgtccgcagcatttcccgcatctccgacagctgcgcagccatttggcgcgcagccacgagcagaccgcacgtctacagtgcgcccattgccaacgcacctttagccggcgggatcatttgctgcgccacatacgcaatcagcaccgggatgtggaggaggatcttttgcgcacctggccgccggcggacgagaatactatgaacagcgatggcggagatgagctggtctctgcggaggtgctgttaaacgaggaggataacgaagatgaagtcgttggggaagcctttcagtgcaatacgaatcccatttccagtaacgaagatgatggcgaagaagccaatggggccaatcaaacgctgtggctgcacatcaagccggaaccctgcctggaggcggaagaagtcgacctggccatgcagctaaagctcgagaagaagcgtcgacggcgggagaaggcagaagctcaagcggaaacttccatcgatcggactgtgaagaacgaacacattgccatcggcgactctcagttcagcattaaggaagagaatcaacttgtgggcagcgatgacgaggcgccaatgggagtggaagacttcatgaagctccatgtcagcggagagctgccgcttagcgatgaggagcggttcgatggttttgcagacgatgacagtgaccttgacgatgatgacgacgacgacgacgaggaggacgctggggatgatgatgacggagaattccggttgaaacaggagccgctggatggcgaaaagccgctgaagaaggccaagtccggcaggcggcgacggcggcgcaacaaggacgagcccaatcccgataaccgctgcgaggtgtgccagcgcaccttctcgcgccactgccacctgctgcgccacaagctgtcgcacctggagaagaagccccacaactgcccgcactgccccaaggcgttcgcgcgcagcgaccacctcaaggcgcatgtgcagagcctacacagcaacaaggagcacaagtgttcgctctgtgaggccgccttctcgcgcctggacgccttggagcgtcacaaggtcagcaaacacaacggtgagggcctggagccgggcagcgaactgaagctgcagctggcggagcacacttgtgagtactgctccaagcgcttctccagtaagacctatctacgcaagcacactctgctgcacaccgacttcctttacgcctgcaagacttgcgacgagacattccgcgagcgagcgcagctgagggagcacgaaaagacccacaccgggcagcggaacttcctgtgctgcatctgcggcgacagctttgcccgcaacgactacctccgcgtgcatatgcgacgccacaacggtgagaagccctacaagtgccgcttctgtgtcaaagcctttccccgtgccaccgatctcaaggtccatgagcgttaccacacgggcaccaaacctaatctgtgcaatacttgcggcaagagcttccaccgcgcgtacaatctaacgatccacatgcgcacgcacaccggcgagcggccgtacaagtgcgaccagtgtcccaagagcttcacgcaaagcaacgacctgaaggcgcacatccggcggcatacgggcgagcggtacaagtgtccgcactgcgatgcctacttcctgcagttgtataatatgcgcaatcactgcatgagcgcccacaacaagcacatcgagacgaagacgggacgactgcagcgcacgggtctgctagacgatggcggtcagtcgcatttgaccaccgtcgttatgccgccggcacggtatccaaatgaactcgatccccagctggcggcgacggctgcggcgactgcagctggcggtgctgagagcacatcgtcgaccaccgtcattcactcgccgggtacatacaatgcgacagctgcagctccagctaataccttcgatggagccaactttacacccacggcagtgaatacgcctgctccgtttggcgcctttaactttccgccggccgttatggcgcatctcatgtacaaccaaggaggaagcagccagcacagccagagcggaagcgatgcgggcaaatag

SEQ ID NO: 3612 - protein, 889 aa, DROSOPHILA
MATPQPQPQLELGSCQEAQTEPAVSKLVSQLEPLTTMDTVDAERVCRVCLKDVSLEGELHFIFNETPVEQDANLARILDECTLHQCERNDGMPPHMCSSCVEAARNAYRFKRHAERSYCSLVALLGRSPQLKARGAEAASQTDQVALLPCEMCHDQFLNSLELRLHRNQVHRTTKEATSAGTDGLPSEDFKCKFCPQHFPHLRQLRSHLARSHEQTARLQCAHCQRTFSRRDHLLRHIRNQHRDVEEDLLRTWPPADENTMNSDGGDELVSAEVLLNEEDNEDEVVGEAFQCNTNPISSNEDDGEEANGANQTLWLHIKPEPCLEAEEVDLAMQLKLEKKRRRREKAEAQAETSIDRTVKNEHIAIGDSQFSIKEENQLVGSDDEAPMGVEDFMKLHVSGELPLSDEERFDGFADDDSDLDDDDDDDDEEDAGDDDDGEFRLKQEPLDGEKPLKKAKSGRRRRRRNKDEPNPDNRCEVCQRTFSRHCHLLRHKLSHLEKKPHNCPHCPKAFARSDHLKAHVQSLHSNKEHKCSLCEAAFSRLDALERHKVSKHNGEGLEPGSELKLQLAEHTCEYCSKRFSSKTYLRKHTLLHTDFLYACKTCDETFRERAQLREHEKTHTGQRNFLCCICGDSFARNDYLRVHMRRHNGEKPYKCRFCVKAFPRATDLKVHERYHTGTKPNLCNTCGKSFHRAYNLTIHMRTHTGERPYKCDQCPKSFTQSNDLKAHIRRHTGERYKCPHCDAYFLQLYNMRNHCMSAHNKHIETKTGRLQRTGLLDDGGQSHLTTVVMPPARYPNELDPQLAATAAATAAGGAESTSSTTVIHSPGTYNATAAAPANTFDGANFTPTAVNTPAPFGAFNFPPAVMAHLMYNQGGSSQHSQSGSDAGK

SEQ ID NO: 3613 - DNA, 2830 bp, DROSOPHILA
aactgcgtggtattcagagttctcttgaggaagagcaacactgtaatgacggcatgcccaccaccttgtgccatcagggtgtccagcagctgctgcttctcatgcagcgacttgaacatctccaagggcgcagtctttccttgcagcagcttctgtgcagtggcttctagattggggctgtacagggtgctctgaagctgtcggcgcagcagcttcagctcctcctccggcgagacacccttgggcaggaccctgtcgtccagcgcctgttcctgcagcaccagtttcaatgcctcctcgctcagaatggatttgatcgagagattcagggcgacactgttattgaagctggcctccgaaatggtgtcgtcggcgaggatgccattgctgaccagatccggggcgaggtccacctcgtcttcgtcgtcgaagctgaacgctgcgcgagaggatcggttccaatagctttcgctgtccaattgcaggtccattgttattattcgttattaaatgtaaggttctattttgtgacgaccagtgtggctgcgctaatgaatttaccgtttaatgcacagacatggtcgcactattttcggctattcaaatatttaaaaatagtttcagtgaaatccgttatgaaaaagctgttaattgtttataatcttcgttgaatcaaacgattgacacagaaaattaagcaatttagaatttagaacttctttccaaattggctagaaacgggaacgcatttgatttgtgcaataaactagcaacggctaattcagcagaacatcaagtttcatcataaactcttttcgctttcttttattcacaaatagttggcttttaatgaaccttaaagtttttattattttgtacgattaaatccgcgtagattttttcactttaagcgagaaagcatttacgtgcacgtttttatgcgtctttcatgggtgccaactgctaaaatagtgaaactgcccgaatcaagtatgttgcattactttgacttattcaagacctggtctagccagggatgcagtgcatcgaggcgggagtagactcccggcttgtccgccagggcgcaccccactccccacgacacgatgcccaccagctgctccctcaccgacaagggtccaccggagtccatctggcaggcatccgtgccgcccttgaggtagcctgcacagagcatccgatccgtcacagttttgcccagtaggttcctgcaggcggtctgattcacgatcggcactcgggcatatctcagactgtccgagggaggaccattcatggacttaaatccccagccggcaatggtggcataggtgccttcggctactctctctgggtttatgggaatggcctttacctacagagcaaattgctgaactaactcattttagctgagagtatttcaaacctttctagatagtgttaggtttttggtcaacctgatgataccgatgtcatagtccatggtcttgggattgaaattctcgtggacttgcaggtcagcgaccgagaacagttccccatcttttcggtagcgcgacgttccgccgaccttaactttcagcaggcgatgtggcactccgttcagacaatggccagccgttaggatggtgtggttatttattatggagccgccacaatggtggatgccgtacagttggatggacactatgtacggaatgttggcgatatcggctgggaagccaccgactatgcgtggatctgggcgactctccagagatagacacccagaagcctggaggagaagcaatttccaccataacttgtacatcattcgcagttaaacggagaaagaatcgctttaaagtaggaatgtgcggtctttggatcgcaccttaagtacggaagaacgtgaaaaataatgagaaaaagcatttcaataagtgcccattactttgtaattaggaagaggtttcgtttatctcgcaactgtttcagcttcgccgacagacagaatatacaatatatgtaactaagctccgttcgtgccgtcagttattaagagccggactaattaaagttcaaaatagttgaaatgcgaggaaagaatggaccaaatggattaaattagggaatacttaactaccaagtaggtgctccaaggggccacttacctagcaatctgccatgaatcatctttcaataactagggctttcttcggtccgattctcctcgcttttcacaaatgtatatcatttgaatagcattaatggccaaatctggcctccactcatctattgtttgcccaatttgttatcaaagcacgacccgttttctcggcgaacggactcggccaactgatttgcattggcttgacccataaatttggaaatcaaacaccgtttgatgggccattctggctctggtctggcatactggcatatccacgtcgaaagcgctgtccccgccaataaagtgggctattcgagatcggcagatatcactgatctccagccagtgcgaatgggggatggggatgggggctagtcgaaatggagtaaaagtaaacaccgaacataagcccacacaaatcgttatggtggatttggcctaagccgattaggctagaatgggagaaaatgggtgacgagcgatttcacgcgacacctgcgtacgtacctttctcactcccaactcccaactccacactcctcatttctcattagtgaaagtgaaaaatagtaaaaacgcaagcgacagttataagccaaaacccattgttacgcgtcgcttttctggcagcccttgggcgctaacaggcccataagaaaattattcgaggagccataa

SEQ ID NO: 3614 - DNA, 779 bp, DROSOPHILA
tctccgtttaactgcgaatgatgtacaagttatggtggaaattgcttctcctccaggcttctgggtgtctatctctggagagtcgcccagatccacgcatagtcggtggcttcccagccgatatcgccaacattccgtacatagtgtccatccaactgtacggcatccaccattgtggcggctccataataaataaccacaccatcctaacggctggccattgtctgaacggagtgccacatcgcctgctgaaagttaaggtcggcggaacgtcgcgctaccgaaaagatggggaactgttctcggtcgctgacctgcaagtccacgagaatttcaatcccaagaccatggactatgacatcggtatcatcaggttgaccaaaaacctaacactatctagaaaggtaaaggccattcccataaacccagagagagtagccgaaggcacctatgccaccattgccggctggggatttaagtccatgaatggtcctccctcggacagtctgagatatgcccgagtgccgatcgtgaatcagaccgcctgcaggaacctactgggcaaaactgtgacggatcggatgctctgtgcaggctacctcaagggcggcacggatgcctgccagatggactccggtggacccttgtcggtgagggagcagctggtgggcatcgtgtcgtggggagtggggtgcgccctggcggacaagccgggagtctactcccgcctcgatgcactgcatccctggctagaccaggtcttgaataagtcaaagtaa

SEQ ID NO: 3615 - protein, 253 aa, DROSOPHILA
MMYKLWWKLLLLQASGCLSLESRPDPRIVGGFPADIANIPYIVSIQLYGIHHCGGSIINNHTILTAGHCLNGVPHRLLKVKVGGTSRYRKDGELFSVADLQVHENFNPKTMDYDIGIIRLTKNLTLSRKVKAIPINPERVAEGTYATIAGWGFKSMNGPPSDSLRYARVPIVNQTACRNLLGKTVTDRMLCAGYLKGGTDACQMDSGGPLSVREQLVGIVSWGVGCALADKPGVYSRLDALHPWLDQVLNKSK

SEQ ID NO: 3616 - DNA, 3725 bp, DROSOPHILA
ctcggaaaatagtacaaaaacaataaatattacaaaataacagtcgctcgcagttacagatataatgtcttccattctttaaaacgaacattccttaatcgctgaagaatggctcaaaaagttttaaatgtaaactgaaaacgtaacctttttattatttaatatttgaaacacttaaattctgcgagcgactgaaaaccacattaacaaacacattcacatggaaagcacacagatcaattaacaaccattaggcagcctagcggtactttagtgttgtgcagctcaaaaaaaaaagcataaaaaaacttagcgcaaaatcgcaattgcaattagataataaagaaaattcgattaaatatctaagcaatagttttgcctactaccgcccgccgcttttactcctctctctctctctatctatctatctatctctatctctctttatcactctatctctctctatttctgtatccgcctgtttcttttcacaatatttatgaacgtatgtaacgattttaatgtaactcgtttatttatctctttcttctatctatggcatacaatccatcaaaaacaaaaaaccaaaatcactttctgattcccaaaaccaaacccgaataaattacagataaattggatggaactttctcaagatccagatcatcgtcaatgtccagcattgatatgtcttcctctgaatctgttacctgtttagcttttatcgagagttatgcaaaacgaaatggtaagactgatcggtgattagattatatcttaacatctatacatatatttaacattgtttttacttagatattttgacacttgttcctactttgtggattggaactagtttcggttcgatactgacattgttcatcaccatgcccgagcgagatgtgcgcaaatctcagccagtattgataacaataaatggtaagtgataaagccacgcacataaatgaaaacctttttaaatatcttctccttttttcaggtggccccgtggtacgactcaaaggatccataacttccatgtcttttttagactcatacggttcgatcataccctatacgtttgagacctggcgtgacgagaagagggacaacaaagatcgtaagcatctcgacttcataccacattgatctgatgcccccgactaatccacatatatatccaatatgatttcaaggcacaccaacaaagagcagcagccgcaccagtcccacattcacaccgacaactgccaatacattatcaaacacttcggtcgcgggtggtgcgtccgcaggcggaggagctggcggcggtggtggtgccggcggtggtgcggccagcggtggcgcagccgcaggagggccagccggcggtggtgccggagcaggatcggcggctggagcggccggcggcgttggaagcggtgtaaccagcggcggggggatgagcagcagcagcgccagcagcagcggcatcagcggaagtgtgagcaccggcctggaaactctcaccgatcgacaatacatcgttatcgcaagcgagaagcaaacaaaagtcttcgatgtcgccaaccagtgctgcatcaaccgcatacaattatcggaaatggattttgcagtcaaggcagaaactatcacgatgaaaggtgactttcactttgttttattttcattttattagtggagcaagaaagtcataatttgttgtaattagtgcaattgattgtaattaatacatatatcaacgttcccttcattccagatggctcttgcttagcaacctatctttcgaatggccatctaatggtacatagtcttcctagtctaaaactgttattggatactgatttcttaccacttatggaactaaggtgagccgtacacttataaggtactcttagcatttttacaactaatggttctatcgtctatttagttttcaaacaaaatgtaaacagggaattgtggatccaatgctttcgatatggggtcaacagatcattgttcatgaagatacaactcagtaagtcctaagctaaaatatatatttttatttccaacttttactaatcttgttccattatccacagaatatcaaaaatattttgctttagtcataaaggtcatggattgtacatggcatcgcccaccgaaattcaaaaattcacgatatcatcggaattttggtaaaccaaaacaaacataattcattgtactttaaacattgcatattaatttgtaattctttcccttattcaagtcaatttattttggagatgatgggtgaactatatacggtacacgaaatgcccgaacagccgaaggagggtttcttcaagggtctatttggtggtggcgccaaactcctggatcgcgaggagctatgtgagtagatctgcatcagatctgcatgtcgttaccatcgatcatttcaataatccgtacaattcctatccctatccttgcagttggcgagcagagcgggaaaccgaatcgatcggtggcacggcacatacccggccccaatttggagcagctcggccagagggcttccaccgccgcatcggagatcagccgggcgcaccagctggccatggagcgcggcgagaagctaaatttgctggaggagcgcgccgagcgcatggccaacactgctcaagatttcagcggcactgcgcatcaattaatgcttaaatataaagacaagaagtggtatcagttgtaaaatatctattttaggagccaattctaccacagttattgtaatattgcttttataacactttctactacattacgagtaaagtacacttatttaatttctgttttcaagtcgtcacgttatttacaaaaaccgaaaaccaacaaaaaaaaacaacaaaaaccgaaaattcacaaaaacaaaaaaactgaaagagaaaacccaaccaaaaaaaaactgtttttaataaaaatatatagaccaaaaaacaggcactgtggagtcttaatgtattcatgaatattgtgggttattaaagtatttttaatttgatttctttgtttcacatgttttatacgctcgaacaaagtgggtgctgctttcaatcgttctttatagtaacatcaactctgagtagactttagtatcagattcgaacataacagcagcacacgagtgaaaagtgttttctgttccccatttgaattatccgcgcagtgttgtgtcagtgctgaaaatcgccgcagagtcgcgaagtcaatttcaatccgatagtttagcagtgtgccacggtgaagtatcgtttctcgttcatacctatctgagcgtatcgttccacgatatcaggtggcagtgtttggttgaacctatcgggccctatcgatataagcaaaagcatttttgctggatctaccattttattttagttaataaaatacatatatttcctctctttttgttccgtttgtgcgcgtacaaaactagctgcgaactcgtgcaatatttcataaactgaatgggaaaacaacgataacgacgaaagaaaacgaaaacggatctgcgacgaaattttccccgttccgtttttttttctccaccagcagcagaagcagcagagcaaaagcagcgaatatatttgtaaaagagagccccaaccttgagaaaaaacaaccagcagggcaataattagttgaatttatcgtctgctggtaagaaatgaacccaaatgtgaacttagaccgtt

SEQ ID NO: 3617 - DNA, 1100 bp, DROSOPHILA
gtggccccgtggtacgactcaaaggatccataacttccatgtcttttttagactcatacggttcgatcataccctatacgtttgagacctggcgtgacgagaagagggacaacaaagatcgcacaccaacaaagagcagcagccgcaccagtcccacattcacaccgacaactgccaatacattatcaaacacttcggtcgcgggtgtaaccagcggcggggggatgagcagcagcagcgccagcagcagcggcatcagcggaagtgtgagcaccggcctggaaactctcaccgatcgacaatacatcgttatcgcaagcgagaagcaaacaaaagtcttcgatgtcgccaaccagtgctgcatcaaccgcatacaattatcggaaatggattttgcagtcaaggcagaaactatcacgatgaaagatggctcttgcttagcaacctatctttcgaatggccatctaatggtacatagtcttcctagtctaaaactgttattggatactgatttcttaccacttatggaactaagttttcaaacaaaatgtaaacagggaattgtggatccaatgctttcgatatggggtcaacagatcattgttcatgaagatacaactcaaatatcaaaaatattttgctttagtcataaaggtcatggattgtacatggcatcgcccaccgaaattcaaaaattcacgatatcatcggaattttgtcaatttattttggagatgatgggtgaactatatacggtacacgaaatgcccgaacagccgaaggagggtttcttcaagggtctatttggtggtggcgccaaactcctggatcgcgaggagctatttggcgagcagagcgggaaaccgaatcgatcggtggcacggcacatacccggccccaatttggagcagctcggccagagggcttccaccgccgcatcggagatcagccgggcgcaccagctggccatggagcgcggcgagaagctaaatttgctggaggagcgcgccgagcgcatggccaacactgctcaagatttcagcggcactgcgcatcaattaatgcttaaatataaagacaagaagtggtatcagttgtaa

SEQ ID NO: 3618 - protein, 353 aa, DROSOPHILA
MSFLDSYGSIIPYTFETWRDEKRDNKDRTPTKSSSRTSPTFTPTTANTLSNTSVAGVTSGGGMSSSSASSSGISGSVSTGLETLTDRQYIVIASEKQTKVFDVANQCCINRIQLSEMDFAVKAETITMKDGSCLATYLSNGHLMVHSLPSLKLLLDTDFLPLMELSFQTKCKQGIVDPMLSIWGQQIIVHEDTTQISKIFCFSHKGHGLYMASPTEIQKFTISSEFCQFILEMMGELYTVHEMPEQPKEGFFKGLFGGGAKLLDREELFGEQSGKPNRSVARHIPGPNLEQLGQRASTAASEISRAHQLAMERGEKLNLLEERAERMANTAQDFSGTAHQLMLKYKDKKWYQL

SEQ ID NO: 3619 - DNA, 4440 bp, DROSOPHILA
gatggctgcaactgctccggtaattatgcgcgtcatggcgtcctcgatcagcaccgccaagcgggctggcggcatcatacgcgacgtgctcaagaagggtgacctgggcatagtggacaagggcaagaacgatccgcagacggaggcagatcgctctgcccagcgttgcattatcgcctccttggccaaaaagttccccaccgtcaagatcattggcgaggagggtggatccgatctgaatgtctgcgacgactggctggtgaacgagttggatgaggaattcctgcagcacagttgccccgctgagtggaaggatgtcaagcccgaggactttgtcatatgggtagatcccctagacggcacagcggagtatacacagggtgcgatctggagatacctgtagagctccttatataaaactaaatgttctcctttcatccgcaggacacgttgaacacgtgaccgtcctgatcggcatagccgtgaaggatgctgctgtgggcggcatcattcatcagccattctaccaacagcccgatggcgaaatgggtcgcaccatttggggcctgaagggtctgggcacgggaggattcacggcagtccccgcgccagccggccagttcatcataaccaccactcgctcgcattccaatgccctgcatcagcaagccctcaacgcattcgcatccacagaagttctgaaagtcggaggcgctgggttcaaagtgctccagctgctggagggaaaggcccacgcgtacgtcttcgccacgccgggctgcaagaagtgggacacctgcgcacccgaggccgttctagaggcccagggcggctgcctcaccaacatcaacggcgagcactacgcctacaatgcggatgtggagcacgtgaatcgacagggagtgctggccagcctgggacaggaccatgccgcgctggtggaaaagattcccgccgaggtgcgggcagcagtgggagccaagtgagatagctttgaattccagcactttattagtttatttgcactaaaagtaaacacacataaattaagcaataacaggttagaaatttgaaaattgttaaaactgggctcagaatgcattctttatttatcgaaactgccgctgttgttgctctgtgtgctgctgttggccaccgagttgttcaggtagcgattccgcttggccttggtcattttgcaggagtttacggaggccgcgaagcgcagcgacttgacggactcttggaaacagtcttggaacggcgagacgttgatgaacataagcgttttcgagttgccgcccagcgagggcatcagcaggtgcgtcagcttggagttcctgtacgggatgtggtcctgcttctgcagcagcgccaggattacgttggtgagctccgatagcgagcgattgatgttctttgtctcggtcatccgggtgctcgtcttgggagactcagagccggccaaatccaccaggtttatggaacccacggagatctcttgcttttcggcatggcgtccgatgagctcaagcttggtaaccgcgtgggaacgagaggagcgctcgttgccagctgtcgaggcggtggcacggttcatcttggccgtgtgcatgaggtggcgcaggtgatttggatccagaaccgtctcctccgttatgttggacacgtagatgtcgttcttgttgttcttggccattcgaatctccatgtccttctgctcgttgctcagcagatcgtagagcacctcgttgtagatctccagaaaggtggccttgatctcgtactcccagcccaagttgcgatatccccggatggagtcgaagagcagatccaccgtgcgcggtatgacgcccacactctccggcactccgtccattgtgtaggtcttgccactgcccgtctgtccgtaggcaaagatgcagatattgtagccatccagggccgactggatgagcggcgagaccatctcgaagatgtccgactgcgaggagagcgggtggaagacctggtcgaatgagaagatctgctggcccatcttgcttttggcctgtgcgtcaatgctctgcagctccacggtggactcgtcgtgataggtccaggtgcaacacatacggttctcctcggactccagcggcggtcgtattcgacagaagacccggatgttgccgcgcaggtccatgaccgtgttgtgcagctctttgcgctccatgttcgactggaagagctgctctttgcaggtctccagctcggcggcctgctgctcattgcagcgcaggagttcctcggtgcgctggcgcagatgcaccacttctgtgcttagagcagcatgctccgtttttactttctgcaacacacacattgttgttacatttaacctgggtttctgtttacttgagtactcacctcatgtattgcttgcagctcggatagctcctctttggtcctgcccagcgtcgatgtgattgtttcaattttggcggtatgctgcttcacctgcctctgaagacactcgttgtcgctctgggtgttcttcagcgaggactccgtctcgataagcttgttctgcgtctcctccagttgctgaggcatggactccagctcgcccatgtcctctgtttgcttttcgtactttgtcttaagcaccttgtgcttctctagcagatcgtggaagcgggccttgaagtcgtagggagcgatgcgcttgggagcagcagccgcggctcctgacgaagctgctgctcctgttcctgctggtttcttggcggctgctcctcctgcagcccgtggagcaggacgcgttactggtggtcttttgacagctgttgctgttattgacgaaggcgccgcaggacgcactagtcgctggctggaaacagtgagtgcaccgcccaggcgggatactttgctgggaatgctgggcaatgaaggagcagccgcagtgcgcttgttaccacgcagttcgttgatgtcgcaagcgctacggctacgtctcagcttggcccggtggcccaacttcatgggctctggggaggcggcacgtgctatcggaaattagcaaggacttaaggtgaattctttggaaggatgcttctttactcacctcctcctccgcgacgctccagcacctggggcagattgttgaggtcccttgagaggggcggcaataagttgccgcagtatgtctggttggcattgacattgaaggcgcctgctccagcggctccacctcccaatcctgcgcgaattcgatctgtgggcagcacggttttaatcggcatttggggtttcttcaggcccgacggtttcggtagccgggattccatcgccaactgtgttgtgcctaacttagaagatacgtctgcctccttgcaaccgattttatcaattagttttgcgttgttgacaagcgacgccgtcgattcccgccgttatttttgattgcagggatgctctggggcagtgtgaccatttgtcgggagagtacggcgttgccagccaagacgacttccagtttgtcaatcagatgttttcagtgctgcagctttggccctcgggcacaaattttcgccttgactcgtgcatcccgcaggttttcggcgcgtgaaactcacccaagcgggtgtgaaatacggtggctgttgcattcgaaccgttcattttgtggaaaagtcgcggcggactgttcaacagcctgaagagtgaagtcttgtgcgcagcactagtgtcgttgccggacggttgcggcaatccggggcgaacttcttgaaagcgttttgctttctttttgcgagcttgtgcggtgtgaaggaaggccgcgctattctgaaatttatttgttgcctcgaaaaagctgtggaaattgcgttccagttggaaagcagttgcgtgatcgggtcgttgccagaccggccgcaggtctcacgcgaccatctctagtttgttttcattcggattggaaaaggctcgttcccatcgaactgattttgtgaattttaaaattggcttcccccacgtccgccaatccccccgagatgtcggggcaggcggagctcaaggagctgggcatgttcgagctgcgcccgctgatcactaacatcagctgcaagctgtccgcggtgacagcggggctggacgaaaagcgacagttcctatgcctcgtttctgaggaaaacgagatcctgctgcgctacataagcgccgcctccggccaggaggtggtcaagatgatatcctggttccgcaaccgcgtcatccacgacgtctgcttcgatccggcgggcgtttggctgctggtgctatgtgagtttcagcgtatgatggcatgagcaccacccacttttttgtgttgggtgggtggttgctgtggtggtgctgctaaaattactttgcccccatgtgtgcgtgtatggttattgattttctgctgcctcccctttg

SEQ ID NO: 3620 - DNA, 2322 bp, DROSOPHILA
caaaaataacggcgggaatcgacggcgtcgcttgtcaacaacgcaaaactaattgataaaatcggttgcaaggaggcagacgtatcttctaagttaggcacaacacagttggcgatggaatcccggctaccgaaaccgtcgggcctgaagaaaccccaaatgccgattaaaaccgtgctgcccacagatcgaattcgcgcaggattgggaggtggagccgctggagcaggcgccttcaatgtcaatgccaaccagacatactgcggcaacttattgccgcccctctcaagggacctcaacaatctgccccaggtgctggagcgtcgcggaggaggagcacgtgccgcctccccagagcccatgaagttgggccaccgggccaagctgagacgtagccgtagcgcttgcgacatcaacgaactgcgtggtaacaagcgcactgcggctgctccttcattgcccagcattcccagcaaagtatcccgcctgggcggtgcactcactgtttccagccagcgactagtgcgtcctgcggcgccttcgtcaataacagcaacagctgtcaaaagaccaccagtaacgcgtcctgctccacgggctgcaggaggagcagccgccaagaaaccagcaggaacaggagcagcagcttcgtcaggagccgcggctgctgctcccaagcgcatcgctccctacgacttcaaggcccgcttccacgatctgctagagaagcacaaggtgcttaagacaaagtacgaaaagcaaacagaggacatgggcgagctggagtccatgcctcagcaactggaggagacgcagaacaagcttatcgagacggagtcctcgctgaagaacacccagagcgacaacgagtgtcttcagaggcaggtgaagcagcataccgccaaaattgaaacaatcacatcgacgctgggcaggaccaaagaggagctatccgagctgcaagcaatacatgagaaagtaaaaacggagcatgctgctctaagcacagaagtggtgcatctgcgccagcgcaccgaggaactcctgcgctgcaatgagcagcaggccgccgagctggagacctgcaaagagcagctcttccagtcgaacatggagcgcaaagagctgcacaacacggtcatggacctgcgcggcaacatccgggtcttctgtcgaatacgaccgccgctggagtccgaggagaaccgtatgtgttgcacctggacctatcacgacgagtccaccgtggagctgcagagcattgacgcacaggccaaaagcaagatgggccagcagatcttctcattcgaccaggtcttccacccgctctcctcgcagtcggacatcttcgagatggtctcgccgctcatccagtcggccctggatggctacaatatctgcatctttgcctacggacagacgggcagtggcaagacctacacaatggacggagtgccggagagtgtgggcgtcataccgcgcacggtggatctgctcttcgactccatccggggatatcgcaacttgggctgggagtacgagatcaaggccacctttctggagatctacaacgaggtgctctacgatctgctgagcaacgagcagaaggacatggagattcgaatggccaagaacaacaagaacgacatctacgtgtccaacataacggaggagacggttctggatccaaatcacctgcgccacctcatgcacacggccaagatgaaccgtgccaccgcctcgacagctggcaacgagcgctcctctcgttcccacgcggttaccaagcttgagctcatcggacgccatgccgaaaagcaagagatctccgtgggttccataaacctggtggatttggccggctctgagtctcccaagacgagcacccggatgaccgagacaaagaacatcaatcgctcgctatcggagctcaccaacgtaatcctggcgctgctgcagaagcaggaccacatcccgtacaggaactccaagctgacgcacctgctgatgccctcgctgggcggcaactcgaaaacgcttatgttcatcaacgtctcgccgttccaagactgtttccaagagtccgtcaagtcgctgcgcttcgcggcctccgtaaactcctgcaaaatgaccaaggccaagcggaatcgctacctgaacaactcggtggccaacagcagcacacagagcaacaacagcggcagtttcgataaataaagaatgcattctgagcccagttttaacaattttcaaatttctaacctgttattgcttaatttatgtgtgtttacttttagtgcaaataaactaataaagtgctgg

SEQ ID NO: 3621 - protein, 700 aa, DROSOPHILA
MESRLPKPSGLKKPQMPIKTVLPTDRIRAGLGGGAAGAGAFNVNANQTYCGNLLPPLSRDLNNLPQVLERRGGGARAASPEPMKLGHRAKLRRSRSACDINELRGNKRTAAAPSLPSIPSKVSRLGGALTVSSQRLVRPAAPSSITATAVKRPPVTRPAPRAAGGAAAKKPAGTGAAASSGAAAAAPKRIAPYDFKARFHDLLEKHKVLKTKYEKQTEDMGELESMPQQLEETQNKLIETESSLKNTQSDNECLQRQVKQHTAKIETITSTLGRTKEELSELQAIHEKVKTEHAALSTEVVHLRQRTEELLRCNEQQAAELETCKEQLFQSNMERKELHNTVMDLRGNIRVFCRIRPPLESEENRMCCTWTYHDESTVELQSIDAQAKSKMGQQIFSFDQVFHPLSSQSDIFEMVSPLIQSALDGYNICIFAYGQTGSGKTYTMDGVPESVGVIPRTVDLLFDSIRGYRNLGWEYEIKATFLEIYNEVLYDLLSNEQKDMEIRMAKNNKNDIYVSNITEETVLDPNHLRHLMHTAKMNRATASTAGNERSSRSHAVTKLELIGRHAEKQEISVGSINLVDLAGSESPKTSTRMTETKNINRSLSELTNVILALLQKQDHIPYRNSKLTHLLMPSLGGNSKTLMFINVSPFQDCFQESVKSLRFAASVNSCKMTKAKRNRYLNNSVANSSTQSNNSGSFDK

SEQ ID NO: 3622 - DNA, 4709 bp, DROSOPHILA
gcggtgtgtgcgtcagctggacagaaaaacaaaaaaaaaaagtaccctaagaccctcccacccactccccccgaaatgcacagacagattgtaaaatgcatcttaatataatatgtatgtggataattaatcaaattggaatcaaacaaattatacattaacggaaaatgtatgtaaaatagatgtttttaaattgtaagccattaatatccttaattataaaaccaattggacaacactcaaaaaataagcaaacggatcgcggacatatttaaactattgtaacacaatacaaatggtctgcggctttaagatacgtctatgcataactttcaccctttttggacatttttttaagtatttcaagcccgtttcgtttgaagcatttaagtttttaaagatccaaatgagctcattggaaactgttgtgttaggcaaaggtctcttccgggcgatctctcctaacttaattcgtaaatacaggctagagtacgaggaaactttttcaatgaaaagaagagaaacacaaattctaatagtaatactaatgataaataatataatacacacagcaaaagcgtatattagttttggaagccgttgcaactgaaatgatcagtcagaccgtttttgtatgtagcatatcttctgtataaggcattcttcatttcaatattcttttgtaaataaatcttaaatatatacaagagaaattaaacttgtttggccattatgaaaatggattcggtattgtatcttgtcgtatgctatatgtgttttgcgtttgagaattttagttcctaattgaattgatgtctctcgagaattttttttgtttggataaagtctaattcataaacatgtcattttatttcagaaatagtcgttactaaatattaaagcaatcttattagaactgtaagcatttcattattatgcttattcgccaattcctattcaaacttaaaaattcgaatgcaaatgtacagatgtggtaatactaagcttctgttgcgctgccgttttccttctccttgatttgctcttcggaaagcggcgtcttcagaggcaattcctcgagctccaaaactggacttggcttgttcaacatgctacgcacgaatggcgagtagagcttggggttctgcttttcttccttgtccaagggccacacatagctcatgggaatggcccacgcgaagactagaagagcacctaggaccttgtaccagtaaaaagatgtgtcgtagatggaaaagtcgcgattgctatcgaatgcggtggtaagttccttgggagcttccagcgagggaatcgcagttgtgccaacgttggtaacattcttgtttcttctgaaaatagttccattgcaaaaagttattttataacatttatatattacattcactacttacatcgcattcaagatgacctcgaagcccttggcctcgcactggtccagcccattaggcaagggatcgtacttaatcagcccagccttaaagttcatctggccattgatgatgatccacagcatcaccaggcagctgaaggcaattccactcaccgccaccttggcattgcaacgcggcacaaacatgcccagacaaaacactcccacgacagcgcccatattaatgccggtaatcgtccacatggtctgaataatggagttaaagttctgcacgatgaagccgcccactatgcagtacgctcccatgaccacaatcaccagtttcatagttgcattagctttggcttcggagtgattgattcgcggcttgatgtagtcgaagtaaaccactccggcaaaggaattcagactggcagaaagggaactcagcgaggcactgaaaacgcaggagatgaagacgccgggcatgcccatcatgtgacccattatatcctggatgaagaacggcatcaacttgtctggcttgctgaccagctgaaagaaagtaaatattaaataagaattaacctgaggcaacggatcagaaatctcactccagcctgaatgggatcgcatccgtagtagtaggcaaacatgatgattccggtgaagcaggtaaaggacatgatgagtaggaagccaacgccagccataagcagacacctcttggcgtggccatacgagggcaaagacacaatcctctggacgcagctctggtcaaggccaagcttacctgtccacatcagaaggccgctggccattccactgatgaaggtgaggcgcaggcggggatcgatgccaaaactaaagaaatcacattcgacattaagcaaaactatatgaaatgttaagccacccatttacttgcctaaagtcaaaacggcccccctcagcggcgttttccaagacattggttatgcctcctgtgttcgaggtacccaaaatggccactagaacaactgagatcaacataacgcttccctggaccacatctgtccagacaaccgccttgatcccgccaagcatcgtgtagaaaacgcagatggacgagaccaccgtgttaatcagatgaatgttgtatccagtaactgcaaatgaaaatgaattttaattcaaccactgacgcgcctgcgattaaaatctatttccattataccttgagaaaaggccagcgagggcacaaacatgtacacgggaagcatcagaaattggttgaggataaaggtgatggtcaccaattgtcgtgtgcgcttgctaaatcgcaactcaagatactgaagaagaaaatgaaatcgagattgcttatgaagaatgtttgtctaatcaaaggaacaagaaactgtattaaaaggattcaaactggtttgcagttaaagaacctcgtttctaaaaatgttatgtatcctttacttacctcgtagcaattggagacattattatcgtagaaaacgggcacaatgatatatataagaacgggcacagacaagaccatggcccacaccacgaagatcatattgaatccaaaggagtaagtctccgccggaacggacatcatggccactccagacagctggctgaaaaggatcgagagattagtggaaacccattgtgaccttcctttagatgatgagccctcctaaggtcatttcaattaacaactcgttctggcctggaaaaaagaggggctcgaaccttaattgatctatttcacaagattcgcggtattagtgaaattcatctaagcttttttatggccgcaataaccggcatgcgcatttggataagatagacggatagacgtacgagactagaaataaatggcttaagagaaaggaggcccgatacaacgacactatctttataacccatggtgtgtctggtgtgcctcactggcgctacggagtgacgacatggaaatttatgggaaaaagcgtgcgggacactcacctcgagacaagggaaatggctacaggaagggttggcatcctttttccaccctgcaggtactcttcagtggtgttcttggccttcgagaagaagccgaagtaaactccaattcctgccgaggcgctcagcatcagggagaagactatgtagtccgtgaggctgaagtggaggtcctccaaggtagcagtcgtggcagtggccactgtgctggccaaattgctaacactgcttgccatacttaaaatcgcgaattgggaaagaccgaaccggaaactcctcgctgcttaggtgcttaggttttggaggctgccagcacacttgtggggatctgatcttggacacccttcttaagtagctcctcgagttagatgaccacccttatctcgacacgatatcttagcatgtgagtcgtaatcggagcaaatcgtaaatcaggagtgcttcttatctggccaactgagaaggggccgatgtgaggggttagcatctggaattccggaggcgtatgccctccataaagtaccaacttgtctattaatcgtggtctaaatacgtatcccttttgaataatgcggccactaaatcgtttataagcgggctttccctatcaccagtagcaggaaccgagaacattggtcggcatcccctgactttgataatggaacctttgtctgtgaacttgaatcaccagacggtggtttttacgtacatgttacgcatttgcgagagcagtgacgaccttgaattgccctctaggtcattggaccatagaaaaggatttagttttttaatatcataaattatatttttggatatattttttatggagttggtatcctcaatagatcaaaataatattgaatattgttatattgctaaatggtaactgatattttctaggaattgcgtgtctaaagaataaggggtgcaattataccttgacgatacataaatattcgttaaatatttctttcgattttgtttttatttatcattctaaattgtcttcctcatatttaagcctatggataaaaaacacatttaacaagaatcagggctcggtgacagtttgtttttctttttcggtaggttctatgcggaggtcgggagtcgcagcgaccttggatcctcgaagtggcacctcctcaagatcctgatccgtaacaggcagggagaggaacttccgcacgaagggcgagtacaactttggattctgtttctcgttctcgtcgggtcgccagatatagctcaatgggatcgcacatagaaagaccagagcgctgcccagaaccttgtaccaatagaacga

SEQ ID NO: 3623 - DNA, 1954 bp, DROSOPHILA
cagcctccaaaacctaagcacctaagcagcgaggagtttccggttcggtctttcccaattcgcgattttaagtatggcaagcagtgttagcaatttggccagcacagtggccactgccacgactgctaccttggaggacctccacttcagcctcacggactacatagtcttctccctgatgctgagcgcctcggcaggaattggagtttacttcggcttcttctcgaaggccaagaacaccactgaagagtacctgcagggtggaaaaaggatgccaacccttcctgtagccatttcccttgtctcgagccagctgtctggagtggccatgatgtccgttccggcggagacttactcctttggattcaatatgatcttcgtggtgtgggccatggtcttgtctgtgcccgttcttatatatatcattgtgcccgttttctacgataataatgtctccaattgctacgagtatcttgagttgcgatttagcaagcgcacacgacaattggtgaccatcacctttatcctcaaccaatttctgatgcttcccgtgtacatgtttgtgccctcgctggccttttctcaagttactggatacaacattcatctgattaacacggtggtctcgtccatctgcgttttctacacgatgcttggcgggatcaaggcggttgtctggacagatgtggtccagggaagcgttatgttgatctcagttgttctagtggccattttgggtacctcgaacacaggaggcataaccaatgtcttggaaaacgccgctgaggggggccgttttgactttaggcaagtaaatggttttggcatcgatccccgcctgcgcctcaccttcatcagtggaatggccagcggccttctgatgtggacaggtaagcttggccttgaccagagctgcgtccagaggattgtgtctttgccctcgtatggccacgccaagaggtgtctgcttatggctggcgttggcttcctactcatcatgtcctttacctgcttcaccggaatcatcatgtttgcctactactacggatgcgatcccattcaggctggactggtcagcaagccagacaagttgatgccgttcttcatccaggatataatgggtcacatgatgggcatgcccggcgtcttcatctcctgcgttttcagtgcctcgctgagttccctttctgccagtctgaattcctttgccggagtggtttacttcgactacatcaagccgcgaatcaatcactccgaagccaaagctaatgcaactatgaaactggtgattgtggtcatgggagcgtactgcatagtgggcggcttcatcgtgcagaactttaactccattattcagaccatgtggacgattaccggcattaatatgggcgctgtcgtgggagtgttttgtctgggcatgtttgtgccgcgttgcaatgccaaggtggcggtgagtggaattgccttcagctgcctggtgatgctgtggatcatcatcaatggccagatgaactttaaggctgggctgattaagtacgatcccttgcctaatgggctggaccagtgcgaggccaagggcttcgaggtcatcttgaatgcgataagaaacaagaatgttaccaacgttggcacaactgcgattccctcgctggaagctcccaaggaacttaccaccgcattcgatagcaatcgcgacttttccatctacgacacatctttttactggtacaaggtcctaggtgctcttctagtcttcgcgtgggccattcccatgagctatgtgtggcccttggacaaggaagaaaagcagaaccccaagctctactcgccattcgtgcgtagcatgttgaacaagccaagtccagttttggagctcgaggaattgcctctgaagacgccgctttccgaagagcaaatcaaggagaaggaaaacggcagcgcaacagaagcttag

SEQ ID NO: 3624 - protein, 626 aa, DROSOPHILA
MASSVSNLASTVATATTATLEDLHFSLTDYIVFSLMLSASAGIGVYFGFFSKAKNTTEEYLQGGKRMPTLPVAISLVSSQLSGVAMMSVPAETYSFGFNMIFVVWAMVLSVPVLIYIIVPVFYDNNVSNCYEYLELRFSKRTRQLVTITFILNQFLMLPVYMFVPSLAFSQVTGYNIHLINTVVSSICVFYTMLGGIKAVVWTDVVQGSVMLISVVLVAILGTSNTGGITNVLENAAEGGRFDFRQVNGFGIDPRLRLTFISGMASGLLMWTGKLGLDQSCVQRIVSLPSYGHAKRCLLMAGVGFLLIMSFTCFTGIIMFAYYYGCDPIQAGLVSKPDKLMPFFIQDIMGHMMGMPGVFISCVFSASLSSLSASLNSFAGVVYFDYIKPRINHSEAKANATMKLVIVVMGAYCIVGGFIVQNFNSIIQTMWTITGINMGAVVGVFCLGMFVPRCNAKVAVSGIAFSCLVMLWIIINGQMNFKAGLIKYDPLPNGLDQCEAKGFEVILNAIRNKNVTNVGTTAIPSLEAPKELTTAFDSNRDFSIYDTSFYWYKVLGALLVFAWAIPMSYVWPLDKEEKQNPKLYSPFVRSMLNKPSPVLELEELPLKTPLSEEQIKEKENGSATEA

SEQ ID NO: 3625 - DNA, 10622 bp, DROSOPHILA
taattttgttagtcgcttaaatttctatcgatttgcaaaacaacatttttacgcgcccactcagcgccctaaagcggccaaaccggttacacccacatttgtttttgcattcacactagctgagtaacggctatctaatagtcgggcaactggactatagaattctctataggttgttagttgcattagaaaacatattcgaggtgaagaatacaaggaattcaatcttaaatatattaaattaacaccatgtcttaaaagcgggctctacatatctgtatcctttatttatttattaacaatatgatcaacaaattttaagtctaaaaacaaaaaagtattaaatggaacagcttttaatgtacatagaaggctaaggcatttacaaatgtcgaattcataaaatcgtaaaaatgattactaaaactgctaaaactttgctctaaagaaattatataatgtggcaaacggtaaaattgcaaaaattgtgaatatactctatttaaatgtggaacaagcctgtgtttattacaatgttaaagttggatgctgcctgtaatacttttcatcgaatctgctggtagagaaaaaatttcgtaccaatttcgcaatagaaacaaaaattcttttttttatgttttaggttagaacgacatcagtaaatatcctggaattatttgacgaccctcgtgtacgtgcaaattgccaaggacaattcaaactaagtaaaattgttgtcgttgtttttgtctgtaccctgtctcacgcaattatcacagcagtattttcaattatgtaaaataaattatttattacaaattttaatagtcttttaaagtagttcgatgttatttaatgttttgtatgaactattcaaacatttttagttaaaaatatttctagacacggacaaagacggacaggtattgcaaggtcaattaagtctaggctagttaactatggttctgattcgatttatataaaggttcagatatttgtcttaattagcttgataagctgcctttagcttttgatattccaaaattcgagcaataccatattcctggaaaatatgtgaacatttaaaaaagtaccttttataaaaaccactctaagattactcacccaataaccaaactcaatcgccgatgtgacattaattacggaccaaaggctccagaacagatgagacagcattgtaaagaactgaatctcagcgtctaccttcatcaactcctggccagtgatattatagttctcgtcatcgtgaaatttctttaaatagtttacaatgaagtcgcgccgttgctgaacagttgcgcagttgctggagttgtggtagaagtaagggaactgtgggttagtgtagtcgaaagtccactcaataaaatgattggcaagatcatagccacggtagttgtaggcacaatactcaaagtcgatgataataagatccggctcattatcggccatgaagctggaatccagggctgagtcattcgtagtgtccaactccgggcatggtgaaggcgacacgctacgtgatttgctattcgacacgaagattttttgaataaaatttaacgggttatcagttgacttcgctcttgaacgatcgtggtatacttactgtgtctccgtatccgatatattgctatttccatcaaggctatcacccaaagtttcgtcgaagttggatctgtaaattaaataagtttgtatattttcaaattttatcgcaatttttgttggccttaattttttgatacattaatataatttataaatataatttaaaacaagagataatgcaatagtcgagttccccgaccggttcggcggctttagggcgttagagtgggcgcggcaaatcgatagaaatttgcataactgataaaatactgaaaaaatttcgaaaaatgtttcaaaagtgtgtgcgcgacagttttgggcggtttgtgggcgttagagtgggcgcggtaacatgggtgaacaaagttgcgctgcgtctttgcctctagaatctgtattctatctagtcaaccttacttactacgagtaacgagtacaaaaaatttcaatttgtatttaattttcaggtaattgtaaatggtttaatcggtaatacttaataaatgttaggagtccttaatgtattcaaatagattaaacagagagccaacaatttgtgtaattcaacccacctcaggctactgattgactcccggggggtccgttcgttttgaccagctgacggttgtcgcatcagaatattaccttcttgcagatcattatgacagaacacaactggataatctccttcatcgataatcgacctaatccaggccatctcttgaacgtagtcaaaggtccgcatcaattccatttgcttcttcagtaccgaagatttttgattcgtttggacactgccgttaacaatgctctctaaaccggaaacccaacgctgcatacaattccaaatccaatcgggctccttagacatgggtatattaagactgtggatctcacccattttctcagccactctctttaatattcgttgctctcccaattctgctgtggtcaaagcgcgtgcctattggaaataaagcaaattttatttaatatctgtttatttaaatttattgaatatttggatcttattactcttttactctttactctttaaggaacgccgaatgtagtttggttttaatattcgtttgaagccacgaatagatacacaataattaaaactattttgaaaagagatctttttgaaacgtatattctgttttccgttactcgtagcgttcaagggtatactagatgtaatatgtaacagaaagaaggaggcttttacgaacatataaagtatatatgtatattctaaaccaggaacaaaatacgaggtgttctggctatatccatcgtctattgttttgtcaacgtcgagatctcagtaactacaaagcctagaaggttgattccgagacatagaagcagcgcaagtttctttactgatgctgccgcgcccactctaacgctcaaaaacacgtcttgccaaattctataagaatatcaaaaacttattggaaacgcagctttctaatctcgaccataatttaaagttatttccatattatctttcttgcatgcttctatcgatttgccaaaattgaaaatttctgataggcgagagactcgataattgcgttctctcttgttaagaacagaaatgcgcagaaaaatacatcttgcttaagctttgctcatttttttttttggcttattgactataccggaatatattgttcaatacgtccgcccggaaagattccgtgcagtttgggcccatagttccgttcactgagaagggcgaaaaccacggactcggtaatcatgctctccagggcgtgatcaccatgggtctgaccatatattcgcagaaggacctgtgggtgtatatcaaggattagctttcaaagagggtaacaggtactgtggatgacctacctcacggggttgctgcttgggggcgtgcaatcgtttcgaagaactgcattcgcgactattactatcgcatcgctgacgtttgtgtgcttgtgtggcgccaggagctgcgtcggcgacgtcatcgttatttattaattccctcgccatcaatgttacgcccaccgccttggcagccgactcatcgtcgtgtatgaaaactccgcttctattggtcacagttgcggtggcccctatgatgtcttcctgctgctgtttctgttcgtccagctcatcgtagtcatttaaatcgggaaggcttacgtaatacaagaaatttgacagcccgccactgcaagaaaggagttttgaaaatattgtgatgcagcagagtcttttccgtcttctaacaatttacatttcccttttaaattcattagatacatgaaggagccttatgattaactatcctattggaacaactacacaagaataaaggcaatacatttatatttaatgaactagagggcttaccttatgcgcttcactaccaaactctccggagtaaccactttccagggcccagttagatagtctcggcaaatacgcgcggccgcatgtcgaatttcctcaagggtggcctaggtattaaagagagggtggagggatgtgttttagaagatacttgaaagagaaagagaatcacaaagagaatcccaaaaaagatagagagtaagaggcatagaaataaactaaaacaattctgcccggtactagtggtttactaaaaatagtaaaaacaattcatgaaagaaaatgcaaatgcacttaaaggggtagattaccaacaaaattaatattgattaggtaggcgatggctaaaacagtaatactatttaaagctctatatttaaatcgagaatatatatatagaatataatatatatatatatatagaatatgtatataaaatatacataaatatgtctgtatatatacatatatgatttaaaaaaaatggcctacattgctattgaaatgctgccagatattttcatagttgcaacgtttactcaagcaacaatttagatttttattatctggctgctggaggcgtttgagtgctttattattcctaagatttcgctgtttcatgctacgcgtagtttatccaaatatttatgtactatatgatagaaatcgtattatataaatttaaaaaatgtagcgaaggcacacagttagtcttttcgttgagctcttagcagttagtagttcccagctgggcgtacgaaaacaaactgactcatcgttacaaaaccaagacccagacgaaacagaaataaaaatcccgtaccgctctcgctctcgctctctcggcggctgtatacgttccttttctacgaactaaggacgcagtccccacccaccgtcctcacctttccaacgtttaggtagaaaccaaacaaaaccactactttggttttttacatatgttgcgtgcaatagcgaagaatgagggtagcaggtaaaatagctggaattgtgtacctgacgtacaacaaatgttcttataattctttggtaccctcacaagccaattatggaagtttccacgcatcttgacacacatcgaacatttacaagaaaacccccaccacacacactcttatcaagactgtttgctgttgctgttgttcttatacccgttactcgcagagtaaaagggtatactagatacgttgattacttatgtaacaggcagaagaaagcgattccgcagcgaaaatttgttgactcatgttgccacgcccactctaacgtcgacaaacctcccaaaacggtcacgcccacacttttaggccattttacaatttttttttcattttattccccagtattatctatcgatatcccagaaaaattatgaaatttcgcgttcccattcccactagttgagtaacgggtatttgtaagtccgggaactcgactatagcattctctcttgttatttctttagttaggcaaaacagaatgcaacgataaataaaactgaaactaatttagtaatgatttagtaattttgtagcatgttaaaataaagctgtgaaacgtacgtatggatgttttgcgcactacgtacgtatgtttttaatgaggtcgtcttaatcagccaaatgaagctggggtcggaaaaaaggaatttttgaaattggaattttttccgacctcagcttacttgatctgttttattcgtattaatcttatttctttgaaaatagttgccacattttaacaatttttaggtattatatgttttacaaagctacaatttcatgctcaatgttttacggctgcttgaatgaactttgcccaggcttaaaacaaacgaccactgcaaccagatgcaagcttcttatctaattcagggatcttgacgttttgtatacaaatgtttattatatgtgtacacattaatggtttctattagatgctttaaatcgatttgtttttaaaaataactaatttattgtctcaacctaagattcaaaaaatattttcattaaatgcgtacgtaatactaccacgaattacgtacttagacatgtccaactttaccttatattattaagctttttattcattggccaacttaagttggaaaaacctggtagctcaagagcttagtccactcgctttcaagcttttggttatttaagaaataaagtaaagtaatttccataagttgcgatctatgtcattaattttgatggctctaaaagttaaatattatcttaatttaaatggtggtgtgtacgtgccaatgatagaaaacatttgattgctctcaaaatgccttgatcgttttttatgagatgtgctttgtcaaaaaaactgatttcgagaaatgcttttaagtttttataaaaaccattttttcagctgctaacgagaagttgcaccgatttgcaaatagaaatcggtgcaaatttcttaaaagtttagtcgtggccgttttgggcggtttgtgtccgttagaaggggtatgtccaaaatgtatagcaaaatttgtattccgatagcaatttgcaagccaaacaatatcacaaaaaatgaatatctgtctaatctcttctttctagcttttataatttctgagaactcgacgttcttacggacggaaagacggacatggccagatcgactaggatattgatgttaattaaaacaagagagcatgctatagttgagtaacccgactatcagatacccgttactcagctattgtgaatgcgaacgagaaatttaatcatttaaatagacattggggaataaaatgagaaaaaatttataattgttcaaaagtgtgggagtaaccggtttggcgtctttagggcgttagagtgggtgtggcaaaaagtcattttgcaaatcgatagaaatttaaactactaataaaattatgaaaaaaaaaatatccaaacattttttaaaaatgtggggctttcgagtaggcgttgcaaaaagtttttttggcaaatcaatagaaattttcaaaacaataaaattaaggaaaaatatccaaaaatttttcaaaaaattgtgactgggcgtgacaaaatttttgaaatttagaaatttgcgagattaataaaaatgtgaaaaaaaatcaatactttgtgcggcttgtggacgttagagtgggcttggaaacatgggtcaacaaagttgcactgcgtctttgactcttaaatctgtatgctgaatctcaaacctttatagttcctgagatctccagacgaactgacggacagacggacatagctagatcgactcggctattgatcctaaccaagaatatacatatgtacatatatactttatatagtcggaaacgcttccttctgcctgttacatacttgtcaacgaatctagtataccctcttatgtataaatacacttcagaccgtcggaaagacgtcctcctaccttttaccctacaagcaaagggtataaaacaggtttctcacctaaatgaagtgcaacaggtaaaagatggttattaaacacgagcttcacttctcggtgataacattcattacatgttaataaagttgagaaaaatattgtagtatttgccaatatgtactggcaactggtactggtactggtacattgaataagtaaaacttaaacccattttgcttttacactactttagccaaagtaattgaaacgcattagtctattgtcttcgctttaaccatactagcgccacatggacataatcggtccccaaattgtacttggccaatatatttttgccatgtatcagcatgataaatataatactttttgtctatttgtgcacacatatgtaagtaaaattcttcggctgcatcaataatttaactttcccaataagttctccctcgattcttggtgtaaccacgttggatttgcggttaagttaaaaatacgacagggcgatagaactctacgggaagtgggtatgtgaaatgtaagatgtgtatgtatgtacatgtagctgcgcaatatcaataacagggacttataaagataatttagttaaatgtgggaaatatgatcttaccgtcattgggatgttaactgcgcaatgacaacaatccaccttacttagtaacaatgtatagctaaactatgtaattcgatcgcacaacttgtaggccaggacggttaaattttaagtaagcggcgcacgcaatacaaaatcggaatataaacaagagagaatgctatagtcgagttccccgactatcagatacccgttacttagctagtgtgaatgcgaacgcgaaatttcataatttttctgggatattgatagatattggggaatgaaataagaaaataattaaaaatttttcaaaagtgtgcgcgtgaacggtttggcggctttagggcgttagggcatggcaaaatgtgttacggcaaatcgatagaaatttacatgaataataaaactatgaaaaaataacgaaaaatggttcaaaaatgtgggcgtagctatatgggtcattaaacttgcgctgcgtctttatgtcttaagtctgtatgctgaatctcaatctcccgagatccggagatctcgacgttcatacggacgtcgcacagacggacatgactatatcaactcggctattaaattgatcaagaatatatatacgtcatatagtcggaaacgcttccttctgcctgttgcatacttttcaacgaatctagtatacccttttactcaacgagtaacgggtataaaaagtactgataagtcaataaaggagattggtaacggcaatgcacgaataagtgagcgatccacgaggcgataacaaaaattttctgagattaaaaatcgacgtggaaccgcaaaaatgaaaaatggaatgcaaaacatttattttttaataggctgtgttgattataaggcaggtacttaaagacaatatacttcctacctagaccttaatttagcgataacatgccaatgaaccatactttcgttaacacacgacaaggcaaatgacaagaagtctttataaacattgtaatgtttgtaagtgcgtgtaagtagctttaccatctggcgaccgagactgaagttcaagtttcgtcacgtgctaaaaaatgtgtacaaacatacaaacatatgtacaaacattcacatacctttacaatataaagataaaaacatacatacgaaattgggcaacgatctgaatgcgtaaagccccaacaataacagagcattgtacgaaaggtaaggggcaaaattggcgaaacacaaacttttaaaaccttggtgaagcattgttaggcgatgccactgataccagtctcgaatatcctttcttaccttttgcaggttggtggccattgtccttcgctttcttatttatttatggtattttaattttggtaatttaattttggaagccaggcaccgacaaataagcggtgtctgacagcagcacttcaaaaacagatttttgcggtgaattgggcgtcacgtggtttttattatagtgcaatataaaataacattgagtatatacgcagtctccgttaacggtttcaaagcgcctactcacaagaacgattcagattcgactacttagcactcgccgcctttgatcggcggcgccatggagaaaagctcagttttggtgaagcagtagctgcgagagtcgagtcgatattcggctctctcttactcgatttgctactttatctgttattaaggggtactgcaacacttttgatctgctctcgaatttgtaattgggatgttaaaacaataatgaatcgaactgcataataaatttgaactgaatttcaactacgggctgaatgatacaactgttgctggcatctggttcaatgtgtttcctttttttatctaaatcgtatctctctggtattttccaagtcgattccgtattaaaataatacacaaaagttcgtgaacgtcaatatgacaaagtattttaatattttaattattaagtttcacaatttaaaggttgacgcttagcatgcatctctatggactgcagtgtgcgaagtcaactaatatacattcacgatgacaaacaaataaactttaggtcaaagtaaacacaacaaaagatagtactatagcactcagctattgttactcagcaagcgggagtacaaattagacatttccaaatcctcaggcatatgaatacacaatacataaatatagtaataaaatgaaaaacaaatacattttttttttttaatttttggcttgtggcgcatgataacatgatccgataataaatttcgtaaaaactttacgatttcgatttaaaatcgcaaaatcgtaagaatttttttatttataaaacgggcacttttgaatggccgtaatgaaaagtaaatgcctgttttctatcaaataggattttatttactaaggggaaatacgtggtctattgatgtttattccacaccattacaagattattctgacatttagttattttagaaaaattttttctgacctcagatttgacatacgatattttgccgtcggcaacaattttcgattaagacgtcaccaa

SEQ ID NO: 3626 - DNA, 1701 bp, DROSOPHILA
tgagtaggcgctttgaaaccgttaacggagactgcgtatatactcaatgttattttatattgcactataataaaaaccacgtgacgcccaattcaccgcaaaaatctgtttttgaagtgctgctgtcagacaccgcttatttgtcggtgcctggcttccaaaattaaattaccaaaattaaaataccataaataaataagaaagcgaaggacaatggccaccaacctgcaaaaggccacccttgaggaaattcgacatgcggccgcgcgtatttgccgagactatctaactgggccctggaaagtggttactccggagagtttggtagtgaagcgcataagtggcgggctgtcaaatttcttgtattacgtaagccttcccgatttaaatgactacgatgagctggacgaacagaaacagcagcaggaagacatcataggggccaccgcaactgtgaccaatagaagcggagttttcatacacgacgatgagtcggctgccaaggcggtgggcgtaacattgatggcgagggaattaataaataacgatgacgtcgccgacgcagctcctggcgccacacaagcacacaaacgtcagcgatgcgatagtaatagtcgcgaatgcagttcttcgaaacgattgcacgcccccaagcagcaaccccgtgaggtccttctgcgaatatatggtcagacccatggtgatcacgccctggagagcatgattaccgagtccgtggttttcgcccttctcagtgaacggaactatgggcccaaactgcacggaatctttccgggcggacgtattgaacaatatattccggcacgcgctttgaccacagcagaattgggagagcaacgaatattaaagagagtggctgagaaaatgggtgagatccacagtcttaatatacccatgtctaaggagcccgattggatttggaattgtatgcagcgttgggtttccggtttagagagcattgttaacggcagtgtccaaacgaatcaaaaatcttcggtactgaagaagcaaatggaattgatgcggacctttgactacgttcaagagatggcctggattaggtcgattatcgatgaaggagattatccagttgtgttctgtcataatgatctgcaagaaggtaatattctgatgcgacaaccgtcagctggtcaaaacgaacggaccccccgggagtcaatcagtagcctgagcaaatcacgtagcgtgtcgccttcaccatgcccggagttggacactacgaatgactcagccctggattccagcttcatggccgataatgagccggatcttattatcatcgactttgagtattgtgcctacaactaccgtggctatgatcttgccaatcattttattgagtggactttcgactacactaacccacagttcccttacttctaccacaactccagcaactgcgcaactgttcagcaacggcgcgacttcattgtaaactatttaaagaaatttcacgatgacgagaactataatatcactggccaggagttgatgaaggtagacgctgagattcagttctttacaatgctgtctcatctgttctggagcctttggtccgtaattaatgtcacatcggcgattgagtttggttattgggaatatggtattgctcgaattttggaatatcaaaagctaaaggcagcttatcaagctaattaa

SEQ ID NO: 3627 - protein, 495 aa, DROSOPHILA
MATNLQKATLEEIRHAAARICRDYLTGPWKVVTPESLVVKRISGGLSNFLYYVSLPDLNDYDELDEQKQQQEDIIGATATVTNRSGVFIHDDESAAKAVGVTLMARELINNDDVADAAPGATQAHKRQRCDSNSRECSSSKRLHAPKQQPREVLLRIYGQTHGDHALESMITESVVFALLSERNYGPKLHGIFPGGRIEQYIPARALTTAELGEQRILKRVAEKMGEIHSLNIPMSKEPDWIWNCMQRWVSGLESIVNGSVQTNQKSSVLKKQMELMRTFDYVQEMAWIRSIIDEGDYPVVFCHNDLQEGNILMRQPSAGQNERTPRESISSLSKSRSVSPSPCPELDTTNDSALDSSFMADNEPDLIIIDFEYCAYNYRGYDLANHFIEWTFDYTNPQFPYFYHNSSNCATVQQRRDFIVNYLKKFHDDENYNITGQELMKVDAEIQFFTMLSHLFWSLWSVINVTSAIEFGYWEYGIARILEYQKLKAAYQAN

SEQ ID NO: 3628 - DNA, 6853 bp, DROSOPHILA
tggactaaactcgcagattcctgtaacttggaagcaccacgagtttgctttagaagatgcctttccgttgaactaaaactagacgagtaaagcgtatctcaaacattgtatcttccgaaccaaaatagtgctgcatacttttcgggatatgtcttattcaatgtaagtaatacaaaaagaaaaaaggtaacttcttaaaacttgtaatatttgtcacaaatgaatgacgactagatttggccatgtctgtaacaataaacgtacaaaatattcgaagttgcagaaatggggatccagcattcggatttggttttttgtcaaacttttaaatatagaatcggaccacatctttttaagaccttaaaaaactgatttgaagttagacccctcataatgccaactaaatttgttaaacaaaaatatgcccctatatgccaatcaaatttaaatacaatgctttctcagcgtttcagttaaatactttgggttgtttaatggttttatacgtatacatgtgctaagtccatgtatcttatatttcgtaaatccatagattttgttcgacgaaactttgctaaatgatattgatctttcaaatataacttgttaatttcctttcatcgccgtggcaaatccttcgagagtgagtactacttgttaaacgcatatatgaggaaaatttattgatgaataatgcgaacatgcaaacggaacacatccccgaattcacacaaagcatctctgtggtatctcttttggttttttatttgttgcatcaactccgcggaactccagctacctcactgcaggtcgtagtagtcgacgttattggcggtcagatgttctctattaatttggagcgtgctgctgtttccacttcaaacttttattaacatatatagtatgggtttgccggtatattgcaaacgggaactaagtgtagattcgtgaatgatatcagactggactgcaaacgtttagtttctagcatgttttttttactctctcctttatttgttggaatttttgagttttatataggtggagttttcaaaatgacattaattcataggggtgagttttatatatagttcgactggctgttgcaggtgctggtttcgaatttttggatggggatgctaaagggcggctccgtttgtgttcatcctcatttagccatcaaccaagttcttactcgccattcttttgttcgtcctcagattcggattctgaaagagaatagaatacaaaatgttagtatgggggcttcaattggtacaaactgaaaagatgtgcagctccggttatgctgtccaaatgattattggccaaatttaactatggaaagttatctggacacccaaccattcaaatgctttggcacaactccccgcttggctcaatcgaatgaagcaaccattcggagcttttatgaggggattgtgcatgcggactaggacaaatgcagctgtccaaacgattattggccaaattaaccacggcattgggttatatgggcacccaatcattctttcgcttttgcatactgtacatgaaccctttaaaactggttcctaataatgggaacactttaaaagcttggtaagaagcatgctcggtgaagtcagctatttgtgtccaagttttcattggcctttgatgctcggattttgtgaggcaacaaggcaagcaaaaactcaaatgctcttgcaattttgtacaatgaaaatgtcatccaggacaagaccattctcaaaaagtgcactgtgtaaagtttcgaaggaagcaaaatttgaatatttatattgtccaggttttcattggcctacgttgttcagtgaatggaaatcaacgaggcaagcaaaaaacccaaatttctcttgcaattacgtaccagaatcaagctatttaagacaagaccattctcaaaaattgcacgctgataacatttatcaaaacatactaaccttcttcggctgactgaagccattcgacaaactttcgcatttgttcaaggaaatgcattttgcccttgtttgagtggccctccttgtaccagcgcaagatgatctcctcggacaggacctcggtcttgtagaacaacaaaatgattttctggaaggccttcatgaagttcatgttctcgtagcagaattcctgcaccttcaagattagggccaattccgaacggtcggtcgaggcgaaagcctgcaacagtgggcagtagttcttcagatgacgaacagcctgatcggtaaccagctcctccttcttgttccattcgcccaatgacatgatggtggaccaaatctggtaaagatcatacatgagatttagtaaggaaatcatccagttggattatttacgcatcgacttacaataacaattatttcatgatcgggaatgttggtgcgctgcgagaagtccttaatgtctgaggttatctcattatatggcttctcatcgttgatatcatcgatgagcgcctgctgcaactcacgcttcgcctcctggctagcctgagccttatgtagcttgacgatctcgttaagttctttgtcaagaaaaacttgtttaaaatattcctcagtacgtttgttcggtgggaaaaagtccataagtctggaaaaacgtgaaaaagtggaaccattattaataatttaagttaacgcattcaataatcaaccttaaatgacgtattgaggtgtacgaaattaaatcagcacccaaatgaagcgaaaggtcatttgcgaattgggtaaaactccgtcgaactttcttactctaggaatatcaattaaagatgcacaactggatcattgagtcatcttcctgagaacattccggggctaaaaacaaatcacaactaaaaacttacttgctttccagtccacccttcttaagcgcctgaatcagatatgcaatgcccttctcttgcttgaacgtctggaacagctctagtagaaactccaatgcaatgccatccttgattaggtgctcgttgtttagtaccagtaaaacatttggcggtacagaaccgttgactgttgatcaaaaatagggttaaatatagggttagtcaaatgttttcgcaaaacaagtttagacggccggctagcaatcctgtccttgggctcgtggcccttagatgtggttagttcatccaagagtcagtataccaagtgaaggattactttagcccctcagctgcaagttgaacaagtgtttatcgaaacaactaattgaaagaccgaatgggcagacgcaagcaatgcacaggaggaacaggaacataaatgttaagacttacctaaccagagcgctgtcatacgcgcaagcttgatgcgttcactaggagtaaagccctttacgaataatagaacctttcccatctcctcttcgaacattttctcaaggtacttgtaccgtctgatgagcttgacaaatacctggaaaaggtaaagtgtgattgcccctgttagcggatggtgaaattttactgtgttctcacgcaggaggcttttgtatttgttgttgcaacattagaaatctttagattgctggcggtagtaattttacaaaataaagacaagtaaaatgtggctttttattttgcatattttgacaccgattgagttgttgagatgcataaccggttctaataatatgcactttgattcaatagcgtgaccttcgcagtggttgcatgcatatagtatatatatatagtgttgaataaagagtagttgttgacacataagaaatcttcagaacgttagtgtttaggacaaaccaaagacaagtaaatgtgttgattgttattgcatattcttgacaccgattacatttttgaaactttatagtcagctctaatgatatgcagccacttcacgaatttcatacttttaagtggatccgaagaaaatcatttagtagtaaataaacgttttagcttggaaaacaacaagagctcaacttgtgttgcaatcaaaccaattttcgtttactcataatcataatttaagtatgacctgctaaaagattacaaacctgctcatggttgcgcatgctctccatgctctcgggcgcatcgaagatgcagtagcttgtgcgcggcttttcgccatcctgagatatagaaccaccaggcactgcaattgaaacgaggatggaaaagggtcagtgaagagactaaacacattacttgcagcggaaaacttacctagtagacctcctgcaatcaatatgtcaaagagaacttcaccgtagcgacgatagtcgagcttgttgcccgcgctgtctagatatttagagatttgttccaggtcgccttcagttttttcgagaccagcaatgaccgcatcacggaatcccgttgggtcatatttttctctttcatctctttttctggtcttgatgcgttgacccgatagcactggtctttcagttttttgactcatacaataaattgctgcaaaggtaaatgtggatcagagatggaagcggttttggtttgcccctgtaagtttttatttctgaccagactaaattatcatggccactagattcatttttagatttatcttaattttagtgtaagatgactaaggtggtctccaagcggtggaaaaccgttccctgtatatgtattctcgttgcgctcataatcaaactacaacattttcacctatgaccggcgtttaagtggaaactctagtgaaaactgagcctaagaaagccttaacctaaaaatgccagcgtacatgtgctttaaacacacacattcaagagcggagaacgggcacacttcacatctctttttaattatctctctttttcacacacacatacccactgtgcattttacagtttgataatgtcgacaaaagaaataaaaagaattgagaggtgaggcgaccaagaaatcgacatagaaacgcagaataaagtgaaattttgacgtggttacttgtgttaggtagcgcgctggggaaatgaggtcattgtgcatgtagtgcacataaaaacgcgccgatgactgtgtgctagttggccgggaaaattgtcatagcagcgaaaacgcaaaaattaaattatctaggctatcaagtacacattggtacatataaggaacggcaacttacgctttcacccaaggatattaagtctggccctgtgtttgccgcttccgcgtgtccttgcaatcaattgaaatcagtcgtgtgcgagtgtagtgtgtatgtgtgtgtgtgtgtgcctgttgctttttcacaactaacgaacgtgcgagaatatgtaatttaatttaacctcacgaagcgctggctggttaatgcttctcactcgagtcgacgaaaaacaaagagacagatggcagatcccttcttttcttacctctcttttcttatgagcgagcttttgcacggtaaaattgacacgcacgcacacacacaacaacaaagaaaaggggagagcaaatagaaaatataattttttgtaacggaatttacttttatgccttcaaaataaacgttaacaattttgctcagactacgtccggaattctatttttaacagctatcacaatcggttactaggtatatgtgttgtttgcctcgaatccagcgcccctctgctcgcaccactttgttaaacgaaattcggagagcgaatgagacgacacacgagcgcacgaacgaagcggacgagccgagaacgaagacatgtggttcggcgccattttgaagcgatacactgacatggcgaaagcggaatgatgggcacagggaaaacgaaaattagggggaaacggtgagaaaaaatgtgggatgggggttcaaagtgtgtatattgctgtcgcgcttattaaataatgagcaaggtacagtcgaacaaaggccgacggccaccaaatgattttttgcatgaatatatgactgcccgatgactaatctggccttaggtacgcacgcagttcgtacataaccccttttccaacgaaagcgcagacaaaggattggtcaaggccagagaaatgaccaggaccgcgattttactcgccctatttgtctttctgtgtacttaggtctactctagcgctatttttcactcctatacttacgattaaaacaaaaaaatctgttttgctgcgaataaaagtaactttttgcgtagctgttgggctgcttcttctggatgacttgcggtatgaccgtggcctgcttcgtacgcaatggtacagagctcactaaggtgtccaaaaggtggcaacattttggtgaagctgttggctggccccactaaccggacctgaaaatggtgcagcgctgccggacatttaacggaatcaaagattccacaaaagtcatgtttgcattaacaaaattcatatttaaccttaacaaattcaacaaattaagttaagtccattttagtagcgttgcgaggagtttattttcgaaaatacgcctttgtatatattatatatttttcctccactttaaacaaaatcgaaaggtgtccatttgtcagctatttaaacaatatggcatcgccgccttacttgctcagtaagaaaatttaactgttttttttttgcgcacctgaaagcggcgatagacattgtttacttttagtttatatttacattatccaaaagccaaatgaactttgagcaggtcaatataccagagaaactagtgccggacaactatttgcaactgggactggctgcgcaacgcagtaagcagcgcagttttaaggagctgctcgaaaaggtaatcaaaccgaaattaaacccaaattaattgataactccatggataattcttcttttcaagcgaaagcttccgaa

SEQ ID NO: 3629 - DNA, 2060 bp, DROSOPHILA
caatatacacactttgaacccccatcccacattttttctcaccgtttccccctaattttcgttttccctgtgcccatcattccgctttcgccatgtcagtgtatcgcttcaaaatggcgccgaaccacatgtcttcgttctcggctcgtccgcttcgttcgtgcgctcgtgtgtcgtctcattcgctctccgaatttcgtttaacaaagtggtgcgagcagaggggcgctggattcgaggcaaacaacacatatacctagtaaccgattgtgatagctgttaaaaatagaattccggacgtagtctgagcaaaattgttaacgtttattttgaaggcataaaagtaaattccgttacaaaaaattatattttctatttgctctccccttttctttgttgttgtgtgtgtgcgtgcgtgtcaattttaccgtgcaaaagctcgctcataagaaaagagagttgtgaaaaagcaacaggcacacacacacacacatacacactacactcgcacacgactgatttcaattgattgcaaggacacgcggaagcggcaaacacagggccagacttaatatccttgggtgaaagccaatttattgtatgagtcaaaaaactgaaagaccagtgctatcgggtcaacgcatcaagaccagaaaaagagatgaaagagaaaaatatgacccaacgggattccgtgatgcggtcattgctggtctcgaaaaaactgaaggcgacctggaacaaatctctaaatatctagacagcgcgggcaacaagctcgactatcgtcgctacggtgaagttctctttgacatattgattgcaggaggtctactagtgcctggtggttctatatctcaggatggcgaaaagccgcgcacaagctactgcatcttcgatgcgcccgagagcatggagagcatgcgcaaccatgagcaggtatttgtcaagctcatcagacggtacaagtaccttgagaaaatgttcgaagaggagatgggaaaggttctattattcgtaaagggctttactcctagtgaacgcatcaagcttgcgcgtatgacagcgctctggttagtcaacggttctgtaccgccaaatgttttactggtactaaacaacgagcacctaatcaaggatggcattgcattggagtttctactagagctgttccagacgttcaagcaagagaagggcattgcatatctgattcaggcgcttaagaagggtggactggaaagcaaacttatggactttttcccaccgaacaaacgtactgaggaatattttaaacaagtttttcttgacaaagaacttaacgagatcgtcaagctacataaggctcaggctagccaggaggcgaagcgtgagttgcagcaggcgctcatcgatgatatcaacgatgagaagccatataatgagataacctcagacattaaggacttctcgcagcgcaccaacattcccgatcatgaaataattgttattatttggtccaccatcatgtcattgggcgaatggaacaagaaggaggagctggttaccgatcaggctgttcgtcatctgaagaactactgcccactgttgcaggctttcgcctcgaccgaccgttcggaattggccctaatcttgaaggtgcaggaattctgctacgagaacatgaacttcatgaaggccttccagaaaatcattttgttgttctacaagaccgaggtcctgtccgaggagatcatcttgcgctggtacaaggagggccactcaaacaagggcaaaatgcatttccttgaacaaatgcgaaagtttgtcgaatggcttcagtcagccgaagaagaatccgaatctgaggacgaacaaaagaatggcgagtaagaacttggttgatggctaaatgaggatgaacacaaacggagccgccctttagcatccccatccaaaaattcgaaaccagcacctgcaacagccagtcgaactatatataaaactcacccctatgaattaatgtcattttgaaaactccacctatataaaactcaaaaattccaacaaataaaggagagagt

SEQ ID NO: 3630 - protein, 422 aa, DROSOPHILA; identical to SEQ ID NO: 3576

SEQ ID NO: 3631 - DNA, 3426 bp, DROSOPHILA
cccagctcgttggaccgccttacaaatgcctcgcatttttctcaattacaatgaacaacttacattcgggttcacttttcgccacacaacccactccgcattttgaccatgtgagtgtttacgtcaagaggtgaacaactgactgccattttttaaccatgattgaagagttaaacgctgtggcactttgagcgggctcggttaactttttggcaaatgacttcggcagcgttaaccgttggaataccagctcagaatggaggttacatgctgtttttggtgtcaaggtgggaccttgcggactcagatggcagctttaaggaagaagatcttgaaagatctgttatttagggtttggaaagtggcatccaaaaaagttaatggatttttaaaagatttggatgttctagccatcattctaacgaaactgtggcttttaaagtgtaaagtttgaattgtttattgttataaattaataagatccatggagcattgggtgttgtttagaagtgattaatttttcatttatatctgcacttaccatatatttttagattccctctcgataaaacaatgaaatacttttgacaatgccttgtctcctggcttagttttattgaatgacaaaccctttaattcgttgcttcaagaggtgtttattctctcatggtatttaacttacaccgtatacaagccaacccaaccacataggaaaagaccgattaaactttatcagagaacgttatttacttaagcatattaatgtgtgtttgcacaagccgacggatgcagagcaaaattcataaggcacaagcggtggctcgatctcaagtgtgtccgaaaataatgaagtctgaatgggagctaattgaatgaatcattaataatataaacacagaccgcatccggactggcgaattgccgaaaaagcgagacgagaggagaaagtgagggttccagtcttgttgcgtgggaatggaaatcagacgttgagggcttattacgacaaggagggcactgggatgacggtctggaagagatgcagtcgcgcatcggcgtgtcccagcttattggtggcattgcagtagtagtccccaaagtcctcctcgcccacgctatcgatgcgcagcacagaggttgtggttcccgaggaggaggcggtgttggccacctcgtggtgccggctagactgcaggggcacgccattcttgtgccaaactacagtcggagccgggtagccctgcacggagcactccagctccgcggaatgggacaccatttgggcgatcttgggcctctggacggcaatctgcggacggaactccacttcgacccggatcaacctcttgtccggctggccctctccgttctgcgcgatgcagtagtagccgccgcgatccatccggtgcacggaacgaatccggagagttggttcggccagcaaatggccaccggcaggcatcactgcattatgctcgcgggcccaggagatcgtaggcttgggaaagccattggcatggcaggtcagctccagattctgtccctctgtcaccagggtgctcttgggggtgttctccgcaatcaccggcggggtcttgatctgcaggctcagcttcttggtcaccttctccgtggccgaaacaagcacctgacactcgtacggacccatgtcactgacttcgatgttctgaatgcggaaggtgtaaatggcacttccggtcttgggtccttcggtgaccgttacgttgtaccgctggtcgggcagactgaggatattccgcatggagagcaccaccgagttggtgtccgactcgctgggacgcttggcccagctcaccgagagctgtcccacctcctccacggtgcagttgaactccacagagtcgcccacactggccaccacgtccttgctgatctggctgatcactggggcactaagcaccgaatccaagctgatcgcaaggcagaatataagaccgattagaagccgcagacgcgccatgtctggtctgtaagaaatcaaaatagatttgagatttattagtgtatcactttatgttgagtcttttgatcgcgttagccattctaaatatttcgtatgtaatggagaactgccatttttaacccatcttcgaattcaatataataaactaaaactaggttcaattatagaataataatttaaaggtcacaagtatatctttaaaagtatctttcaaaagtaaataagaaggaaagaattctgcacacacactcgttttgaaacatttataaggcttgtacacacttttcagctttatcgtcttattttaatataattcatacatttctgtttatttacaggatgttgctgttgattttgtgactctttttcctcgactatctctcagttcaatgtgggttcaatgcgcttcacttcgcgttcgggactcgactgaattgaaagaggcgaccgagctcggctcaaaaatccgtatctctgctgaggttctgagaatcgggttcttatttttgtattcttcctgacgcgccgacgtcgatggctcggtttctcaaggaaagtcccgaaatttgtacaccgcgagaatgaagcagatagacaccattatgattgattaccgcggctgtgtctagacaacgttgcttcttaatggatacactggtaaaaacggagataacttagttttccgatatatcaatacttatttttttttttaatgaatagccaggtaaacgaaatcaatttgatttaaaattaatttttttgtagttaaggatgtgaaaaaagattttaaatggcagtgtttagtaaatagtttaaaatttagtaaaaaaaatagtttaccttttattatattgcatattttttaataattagtaacagcttttttcagtgtatttgccgatgaagaagtcatcgacgttttggatcttatcacccctcggttatgtacattgtcgccttcacagtatttgtatctgtgtttgttcagtatctctatctgtattttgtatctgtgtttgcattttagttcgtatttaaattgtttacttgtgcgtgagtttgacttcgggctcagttatcaatgcactttccttctggtctttaattgatttgttttgctgctcgctgctgttgtttatgcctctgcctgtggccctcctgccccgcccacttgacagcccccgccccaagataagcggtcagttgcaaaaacaaagcgccagcgaaagcggccgcaggcgaactgagagaccgcgtgcgaaattcaaattcaaattcgtgccgccatttggccataaacgtttcggggttcgtggaaggacaataaaaggagcagcggcggggtgggaaagttggaactctacccatttgtgtgatttatggcatggcgcactactttccgctggcggctaacaacaaca

SEQ ID NO: 3632 - DNA, 1110 bp, DROSOPHILA
cgaacgcgaagtgaagcgcattgaacccacattgaactgagagatagtcgaggaaaaagagtcacaaaatcaacagcaacatcctgtaaataaacagaaataccagacatggcgcgtctgcggcttctaatcggtcttatattctgccttgcgatcagcttggattcggtgcttagtgccccagtgatcagccagatcagcaaggacgtggtggccagtgtgggcgactctgtggagttcaactgcaccgtggaggaggtgggacagctctcggtgagctgggccaagcgtcccagcgagtcggacaccaactcggtggtgctctccatgcggaatatcctcagtctgcccgaccagcggtacaacgtaacggtcaccgaaggacccaagaccggaagtgccatttacaccttccgcattcagaacatcgaagtcagtgacatgggtccgtacgagtgtcaggtgcttgtttcggccacggagaaggtgaccaagaagctgagcctgcagatcaagaccccgccggtgattgcggagaacacccccaagagcaccctggtgacagagggacagaatctggagctgacctgccatgccaatggctttcccaagcctacgatctcctgggcccgcgagcataatgcagtgatgcctgccggtggccatttgctggccgaaccaactctccggattcgttccgtgcaccggatggatcgcggcggctactactgcatcgcgcagaacggagagggccagccggacaagaggttgatccgggtcgaagtggagttccgtccgcagattgccgtccagaggcccaagatcgcccaaatggtgtcccattccgcggagctggagtgctccgtgcagggctacccggctccgactgtagtttggcacaagaatggcgtgcccctgcagtctagccggcaccacgaggtggccaacaccgcctcctcctcgggaaccacaacctctgtgctgcgcatcgatagcgtgggcgaggaggactttggggactactactgcaatgccaccaataagctgggacacgccgatgcgcgactgcatctcttccagaccgtcatcccagtgccctccttgtcgtaa

SEQ ID NO: 3633 - protein, 333 aa, DROSOPHILA
MARLRLLIGLIFCLAISLDSVLSAPVISQISKDVVASVGDSVEFNCTVEEVGQLSVSWAKRPSESDTNSVVLSMRNILSLPDQRYNVTVTEGPKTGSAIYTFRIQNIEVSDMGPYECQVLVSATEKVTKKLSLQIKTPPVIAENTPKSTLVTEGQNLELTCHANGFPKPTISWAREHNAVMPAGGHLLAEPTLRIRSVHRMDRGGYYCIAQNGEGQPDKRLIRVEVEFRPQIAVQRPKIAQMVSHSAELECSVQGYPAPTVVWHKNGVPLQSSRHHEVANTASSSGTTTSVLRIDSVGEEDFGDYYCNATNKLGHADARLHLFQTVIPVPSLS

SEQ ID NO: 3634 - DNA, 3120 bp, DROSOPHILA
gccaatggcaagcggctggacatcctgaccctgctcacattcgtgtgccagcgggtggccgtggactttgagtcctgcaccccggacactccggagatgcaccagcagaagcagataccctgcataaccaccatgctgacgcgcattctgcgtttcagcgacaagcagttggcaccagccggacgggtttgatggctaatggtatggatcaaacggtgggtacggcgaggtgtgtgataaaccaagtcgcaattaagttagaacctcatgggctatcggccttgcagcatattttttatacaacacttttttaacctgcccaattgctcgacgagattggtgccactgcccgttttattttatttaggcacaaagtatctttcgattgacatttattaatgtcgcatttactcgtctgtatttatattttttggggtgggtagagtagatcgatttaacttagaaatctaagaggtttttactccggccaaaattttttgacaattttaacttgccaactgaacaaagacgatctcaaaattttaaattctctactaaaccttatcatagaacaacttgcgcctctttgattctcgatcaggaatgtcggcccacccttatctatatctaccttagaccatttacagacaagacctttttacaattttatacacatagatatctttatagtataagcctgtgtgtcatggtcgtccaaaacgaaaacaaacgattttagcctgtagtcgagtgttttatgaacaatatatactatttctatgccatttgtactcttatataatgcacattagcaaatgttctcctttcaagttaaccgctaataaatccgattgaaaacaatgagaaatcaatgaccattggctgtttgctgttgaccctgtcgcctcttttgggcgccaagttgagcggcatttcccgaaaaggtagcacgcggagacggaaaaatagacgagtccagccattggctgaccctgatcgtacgatttcagagcttacaatcactttattcttagagctggacacaacgagaataaattccaatttatagttcacttaaagcacacgggtatgggttgaattcagagaaatttaaagcctgtcagcaaatccgactctccggctagataaatgcacgtttctgataactttcgactaattaaaaacgtagaatatgcgctcacaattttctagttgaggaacatctagatgtggccgccctcctttagcttggccaccagggcatccacgtcggcgacggtggcgccggcctggcgcacaggaggatcctccacggagatgacctcgatgcggggcgaggtgtccacgccgagatccttggccgtaaccttcttcagcggcttcttcttggccttcatgatgttcggcaacgtggcgtagcgaggggtgttcagccggagatcggcgctcagcacagccggggtcttggtcttgattgtctccaggccaccatcaatttcacgcgtgatggtcagaccggcgtctgtcttctcgatcttgttgcagaaggtgccctgcggccagtcgagcacggcggcggtcatctgggccgtttggttggcatcatcgtcgatggcctgcttgccaaggatgaccaggtcggctttttcgtcaagagccaacttggccagaatcttcgacacgtggatgggctgcagaagctcgtactcggcggccgggatctctacgtggacgccgcgatcggcgcccatggccagggcggtgcggatcacctcctgcgactgggccgggcccacggagacggcgatcacctcctcggccagctttttctccttcagcttcaccgcctcctccacggcgatctcgtcgaagggattcatcgagtgcttcacgccctgggtgaccacgccagtcttgtcgggcttgacgcgcacctggacatgataaatgtaacctgaattagtttaattgccgcttaattaaggcgattacgcaaaacagagcgcaacaagtgataaaaagacaatgggacaagatgcgcaacaggcgacttttcaggctcaccttgacggcgtagtcgatcacacgcttaactccaaccaaaacacgcgccattttctgccaaattagttataaaattgatgaaatttacggaaatttactgagtttcaagaacttacctcttcaagatggaaatgaactgatttgttggcggcgggggcgcgggtggtccaaaggtcttctccggctacagcgttgccagacagagcagccgattatttgcagctataaaatgtccaaatattcccgctgaaatacatttttaaattcatgtatcttaaaggactaacaactttaagcaaaactaggaaacataatttctgaaactgtggagttgatgaattacgaattcaactatttacgggggagtagctaaactttgtgcttttcgctcctctctagccgccaacagctgttctactttcaccgcaatcacttctctgcagcgacgaaaacatctcattccaatcttgaaaagatctcccgcatccttgtcccatacaaataaaataacgatggctgcaactgctccggtaattatgcgcgtcatggcgtcctcgatcagcaccgccaagcgggctggcggcatcatacgcgacgtgctcaagaagggtgacctgggcatagtggacaagggcaagaacgatccgcagacggaggcagatcgctctgcccagcgttgcattatcgcctccttggccaaaaagttccccaccgtcaagatcattggcgaggagggtggatccgatctgaatgtctgcgacgactggctggtgaacgagttggatgaggaattcctgcagcacagttgccccgctgagtggaaggatgtcaagcccgaggactttgtcatatgggtagatcccctagacggcacagcggagtatacacagggtgcgatctggagatacctgtagagctccttatataaaactaaatgttctcctttcatccgcaggacacgttgaacacgtgaccgtcctgatcggcatagccgtgaaggatgctgctgtgggcggcatcattcatcagccattctaccaacagcccgatggcgaa

SEQ ID NO: 3635 - DNA, 990 bp, DROSOPHILA
agaaaatggcgcgtgttttggttggagttaagcgtgtgatcgactacgccgtcaaggtgcgcgtcaagcccgacaagactggcgtggtcacccagggcgtgaagcactcgatgaatcccttcgacgagatcgccgtggaggaggcggtgaagctgaaggagaaaaagctggccgaggaggtgatcgccgtctccgtgggcccggcccagtcgcaggaggtgatccgcaccgccctggccatgggcgccgatcgcggcgtccacgtagagatcccggccgccgagtacgagcttctgcagcccatccacgtgtcgaagattctggccaagttggctcttgacgaaaaagccgacctggtcatccttggcaagcaggccatcgacgatgatgccaaccaaacggcccagatgaccgccgccgtgctcgactggccgcagggcaccttctgcaacaagatcgagaagacagacgccggtctgaccatcacgcgtgaaattgatggtggcctggagacaatcaagaccaagaccccggctgtgctgagcgccgatctccggctgaacacccctcgctacgccacgttgccgaacatcatgaaggccaagaagaagccgctgaagaaggttacggccaaggatctcggcgtggacacctcgccccgcatcgaggtcatctccgtggaggatcctcctgtgcgccaggccggcgccaccgtcgccgacgtggatgccctggtggccaagctaaaggagggcggccacatctagatgttcctcaactagaaaattgtgagcgcatattctacgtttttaattagtcgaaagttatcagaaacgtgcatttatctagccggagagtcggatttgctgacaggctttaaatttctctgaattcaacccatacccgtgtgctttaagtgaactataaattggaatttattctcgttgtgtccagctctaagaataaagtgattgtaagctctgaaatcgt

SEQ ID NO: 3636 - protein, 253 aa, DROSOPHILA
MARVLVGVKRVIDYAVKVRVKPDKTGVVTQGVKHSMNPFDEIAVEEAVKLKEKKLAEEVIAVSVGPAQSQEVIRTALAMGADRGVHVEIPAAEYELLQPIHVSKILAKLALDEKADLVILGKQAIDDDANQTAQMTAAVLDWPQGTFCNKIEKTDAGLTITREIDGGLETIKTKTPAVLSADLRLNTPRYATLPNIMKAKKKPLKKVTAKDLGVDTSPRIEVISVEDPPVRQAGATVADVDALVAKLKEGGHI

SEQ ID NO: 3637 - DNA, 11638 bp, DROSOPHILA
agtcgtttgctcattaaattttaactataatctgggtaaagtgcgttctttcaagtcagctcatatagccagcacttgtgccattgttgcataactacattcctttatgttccaaaaatatgtattagtgttaatgttggaaaattataactagagctgtaatcagctttcatcctgaaggcagaatgtttttgctctactttataaaaattacaaaattaatatatccagcacaggcaaaagtgccaatacataataagcattgaattatacattgaattaattattgaaccaaacatttgttttcgtaggatatgtttgtatccaaaagtatttttccggaaatacacgaccacctttcccttgggcatttcgataaaaatgaaatgaattcactgcgctttgagagcaaatgatgaaaatgaaacaaattaaaacactcagcgtgaagagctgtgggccatttggcatatgacagctacccgctgaaggaccaaaggactgaaggacccttctttgggaaggtcctcgttggtggtgccgaacctcatctgcattcgcattgtgagcagtgtgtctttatttcgcacggcacgaattttaattgcatatttctggtctggcatttggttgctaagccaagaactaaggatccggacctcaaatgcaactcgacaggggaaatagtagtcgaaatgggaacgggagcggtaatacgactgcgaatagtggtgcgctgattgcagatgcagcacctgctaattgcccacctgtcacaagcagccaggtgaaagagcactggaaaaaaaagactacgaaaaaagaagcacaagtaataaaaaagaatgctagaggtgtaataataagtactcatctaatataagacttgtttcacatggcattggagttataaatttacaaaattgttagtataagggctccttttctcgcagtgtcttcgttggtggcccaaaaggtcgcccgtgtgtgtggctggaaaatgttgccaaaccgcactttcagcaaggtcggttggcctgacttgcggcccagtgacaagttgattgtcgtcccgtgtttgccgaccaggcccaagaactccacgttctttgcccttcgaaaatgtgtgggcgaaatcacagaagaggaccaaaactggactcacctccacctcctcatttcgatttctcgacttgtagggcggtagcgataatttgccaaattgactgcattctaatttctgccacaaggcttctgcggaaaggaaattaaatttctgaacctattactgaccgacgtgtgaaggtgcaggcagcatgttgcggttatcgaaagggtctgggatttctaggtgtgtggtggacggggttgcaatcatgccacacaattggccccttagttcatcaatgattaatgaggcctgaattgcacatgttcgaccaaacggaagtcattggtatttgtgcactccaaataaagccattgtaaagcaaccttgttggagttatgctgattggctaggctaaagttggcaagaataaataaatatttacttgttggccattttaggtattttgatagctctgttaatatttatacgtaattaagccacaaaatagagcgcttactaaggtatgcatattaagtattttgcatcatcttattatgtgattagttgttttctttgttctaatctgaataatttccctaatttacacagatccactcatcgtgatgagtttggaacgcagcgtgtttacaagaagacctcgccaaattgtgtgctgactttatatttacccactcgcgagataacactcaccggaaataatccgtccgttttgaggggcatcgtctacgtggatccgaaggccatccagggatatcgcgtatacgcccagctgacgctgacgttccggtgagtttacgccctcttttcatttctcgtaatggtcaagccgttaatggttctggcttgctcaaattttttttttgtcgatttttccatttctactttaggtatggccgcgaggatgaggaggtgatgggtctgcgattttgcaacgaggccatcatgtcgctgcaccagatttggccacgactcgaggagcccacgccagagtcgctcagtccactgcaggtaatcctatggaattatgcatgaggggttccggggatttcaggttcgaagtccttcgtccttcttgcgctaacacttctgtgcgcgaatatgacgggcccttgaccgacagttgaagggtgagctgtccaactttggcattaacaattgatgacgttgcggaggagagctctctgattttccacatccgcaatccgcgcccaccgctccattctcgccattctcactagtcccactctccaaaatcgcactatccaaaccggagactccgctccatcaatgcgccaggggaaaacggctcagtgcacaagaccataaataattggacaatttgctgggacttgcaacgccatcatttggcacctcggcttctcggcgtcacacaattggggagcatatgaaatttcagcaggactttggcaggattctcactggccaccagcagaagttcatagccacaaaatttacccttgattatttaaccgatggggccttacattaattttgttagaaagtaagcacattcaaaattctatctaaggtacattggtacatggtaccctttgtaaccagatattcagcttgatttcttatgtctattttattgtcccagacttgacttataactctgctttattcaaacccctattgcctttcgtgagtggtaatgtttaactgtctggatgacgaactgtttcaatgatttggtttcctcttgaaaccccacttcagatcagcattccaagccccttagccacttgtttgcactgccccacggatttttatgagcagcacgttgagtccgttcgttcgtctggcaatccgtcaggaattccgtagccggatgctgacatctcacgtgcgcccttggatatgtgtacgttgtacaccgttggggtatactcgcatatgtataatggacacaaaatgatgggtgccattgttccttgaaagtgtagtgccttcgggcggtttggtgcacttaaaccaattgaaaatcaatttcatttaactaaaagccaaacaaatgtttgccattgcctctccgaatgctttgtgcattgtttcaggtccttgcgcgagatttctatggattcttcgagcactctttggacggttgaccgaaaactttcgaattcaacttttcgcatttttattaaatttgacatggaataatttatttgttcctgacatcccattttcgttggcccacgacccaaaacgaaatttggttagccaatggggttcctctcgctccacatcatcataaagtggagggtcctctgacacaaacaccaacaaggaccgatacacacacacatatatatatatatactggcacaggcataattaaataaatttgattttaataacttgccgaacgacatgagccggtaaagataaagaaaagctgcccgaaaataggcctcagcaaacagaggagacaaaaaagctgggaagtatatacaaagaatattccactgaaaaaaaaatcgtttgaggtttgtaaaaagcaaatatttcatgtatttgtccagtgatgagtttaaatattatgcgaaaagattgactgttatgtgatagaagtattagagtagtaatttaagcccagctcactttcttaaacactctcacttgcatcccaggagataaaccactttataacatttgcggttcggttgggcttaaagagaattcaggacaacgagtgcctgaaggacacgctttcgttgtcctgagcaacctgagagtacacgcgcaaatgattaaacttttataaatattcatttgagtgagccacaagtactttatgcgaaacgtatacatgttaaaacgaagcgaacttcttaattaccgcatttaaaggtttttaccaattgtaaaagccttggagaaaatcaatagattatcacgtgaataccttggcagaggaaaattacagatgtgcataatcaaatgcaaatgaaaaagtacacaaaaacgaaagaagcgaaaataaagccaaatgataaataaataaaaatattatattcttgccgggcgaataagtaagagaatcaattatgccaatctgagtttcggctgaaatcgaaatgctaagctgcgccatgcctccattcatttgcctctcttctcatttcaggaggccctgatgaagcgccttggcgatggagcccatcccttcaccctctcgctatcctcctacgccccacccagtgtccagttggtgcccgccaagcgctattacggagctcccattggcaccagctacgatgttcgctgcttcatcggtaagtcttgggatcgcctgggacgtaaggattatattgaggggaatctacatcaaccattcggcagtagagattaaaatgaatcctttgaatattgaatacatataaaaatacatctgaattgaatcttaacacttgtaggggaggaaaacaagaagcaggctgtctagctagctactaaatattaagtcgaaaaatattaaattgcttacacgttattacaaaaatggcccatccccggaccttaaggtcctggtcatgtttaagcacatatatactcgctgactacaaaagtggtctggagtggagtggagtgtcttgggactgggtcaattgacggacatctggctttcacctgaagcactcacccacagaaaccacctgacacaactcacaacgcacacccccacacccgcccaatcaaacccattgaaacgccatcaaagatccagacatcgtcgccaactgaatccagtggtgacttggactgtaacaatcaagtcgatatccagcgctcaattatatgtgtataaatatccatttaaacaccaatggccccgcccccaacagtctaccttccctcaaatcgaatcgtatccaatcgaatcgaatttatcactgacgtcagtgcaagggggatttattttcactttttgtttttcagttttgttttgtttttttttttttgtttttattcgacggggggcgtctcgaaaagggacagccccagttaatataaaagcgcgaaggaaagctatttttataaattcaatttgacacatacgtccataaaaatccaattaaactcgttagttttaaaaacaaaatacgaaaatatatatcaaatgcttcgagtgcaaataggcttaaaaacttgtcagcaacataataaacgcccagcgcaagtgtataataaaatcaatattaaaagccgtcgggtcggattcaggatcagatacagatacaaattcagatccagattaagattctgttgatattattttagtcgctgagtgacgcccgagggtaaaaccgactatgtccgtgatgccatatatatatatttttttggtcggaatatacggactgtaatatcctgtcagctgaaactgtgcgttttggacagtgccgccagccaagacaaaactctgtccaacttcccagcaccaagcactcatcatcactcccacttccgacttcccacttctgagtgccagccaacgcctctgtctctagcactcgtacaattgttgaatatggcatgcaaagcccaactgcggttgctccaggcaacccacgcaggacacaggacgtaggccacaggacgcaggacatcttgggcagaaacgggggctttgcgttggctgggacatggacagaacctgctccagctgccgctgctactgctgctgctgatgcctctgtggctccgtaattacacgatatcagccggttgctggaccagaatccctatttcgccaaatgccagcaagtttggggcaatgtggttcgctgcacaacttacgatggaaaatgggaaatttatggtcagaattaggatgagtaagcgtattcgaacatattgttttattgttggatcgagaaaaagaaaagatgcactccatgacaaccggttgaatcaaggagttgcagtaattaatctggactaaatgccagccgattgtaattccaaatggcatatctgttcattaatttcgtcatttaccttgtttaaccagcagtttcgaagttagaaagggcaaatggaaattgaatgcgttatttgtaatttgataatttgcaggggatattccaatcaattattattgatgatataattatttcaaattacgtgatagcttaaaatgaaaatgatttcaagagaacaatgggagcaaccttaagtccacaattcgttgttaattaagtacttacatataaatcgttgaaagataagtaaatgaataagaacaatgataaaaatactataatattttgataagataaatatgagatctgtatcaaaatgccatccaaattcactgggttttgaaaatcactgatatggacaacatatgcacaatacacctactataacttaaagccccattatcatgatcgcacgcccctcatcccgtatcgttcgtatcgcccccgtatccaatcccatagagcttctgagcgacgacgagccaacgtgagcagaagccaagatcaagcgccccaatccgctggccaggtgggtctcccggctctgctgccgcggctgctgtgcttgtatgtgcacggcccccgaccaaggtatatgaggcaatatctgattgatctgattgtgaaatggttgtgtggaatgtggacatcgattccggatcgaatcgcatcggattggattgaattggattggattggatcggttcaagtcgaatcgaatccgatcggatcggccatgctatcggtgtcgtctttgtcctgttgctgctcgtgatcgtgctcctttccatttccgtttccgtttctaaatctctttccgtttctctttttgtttactcttacgttccattccgttccattccaaattcttggtgttgtggcttgctctatcttttactcctttaccctgtccttgtctttatatcttttttgtacacccccctctcagtgttgggaaaatcaattatttaataataccctaaactattattttcgcttgttttcttaaaaaaagaaacttccattatctttttcaagagattttatagagattacatgaaagttaaactgtcaacacttcgctagcctccacctgttcccttccattgttgtgctccatctcttttgctgtttgatatagcccacctgttagaaccccgtatcgtgtccttcctccgacttgcatctctccatctacccatttaccactttcatatgtatgtgctccaccttcatttgtttcatgttgagtgtgtttgctatccgttcaagtggccggctgcctgcctgaggtaatcgaaaataaaataacgaatctcatgatctcatgacttgccattcggacgatcgacggaccaggactgcaaaaacaaaaatttaaaacaccagcaaaattataaggatatttcgcctagaaagtccttgcaacaattgaaaagctttcgcaagcgtcggcggcggcaacggcagcggcaaacgaacttttgaattcttatacctaaatcaaataatcaatttcccgcccactctttcgttctctgtctattttttcaactgacggtttagcggacaaaacggatgagaaattccatcgtcgggcttcggtgaagatgggcgtacgggtcatctatcgcacggatgtctttcatcagcatttggcgcccgagcagtatgccgccttcgccgggcgtcaaaacatcgcccaatcgccgccggccagtgccacgcccccgtcgtgcggcgagggcggcgaacagcatacaactcacacccaacagcaatcgcaatcgcagcccagtagcggatccaagcacaagtcgaagtccgagcgcggtgactccttccccaagctgcgtctctcgccaaaatcctttcgattcagcggtcgtttcggacgcagcaagagcgagatcgaaaagtgtcccaatgatcctttccacagctacagcaagtccttccaggaggtgagtttaaattgaatgtgatggccaatattgtgcctataaaaacaacccttaccgactttcagcactgcgacagcatgttgccaccgcacactggagccggggtcaccggcggaatcggtggcgtcagtgtgggtccttgtggcggtcctcaaggatccgtcgacaagcccttcctgctgcacgacggccgggtgggattgagggccagcttggacaagggctggtacacacacggcgaggacgttcaggtgaccgtcaatatacgcaacgatagccgcaagacggtccgtaaagtacgggtaagttgcaatggccagcccaggagttacccattctaccagatggctcgggaattcctcaaccatttctctggttatgcaggcaatcatttaaaatgccataacgcatacgcaacgtggtacagtcgaggtgaaggctgaaaaactgttgcttttaggtctcacctggaatgcaggcttttgtgggaaatatctaaggtggctggtgaaaagccatgggtgtgcctaggtaaatggaaaacgaattaatttgattggtcttaaaacgttttaatgaaaccttaagcaattttgattcaaagcggcaattactaaagtacttagtacaaaagttgtaatttagaaaacaatagtcgcattagtcggcgggttgtcgattaggtcagtaattggcttttgtttaaaggattagtgtccctgtaaggaacttaactgtcggcgccactgatttaagttgcatgcccctgcttggcaacgagcagtgaaaactatattcatcgtagtcgactttattcctaggatacacacacacacacacacacacacacacacacacaaccacacactcactgcggtacataatctgcattggcacttcgtctatgcaaactggaggggtttgcaggaggttttgatatccattacttggcgggtgtgcctgaaactgggaacatcttaaatctattaaatcaaatttgatgttgacttcaaagttttcgagggtgcacaaggcacgttattaattaaatgcaaaacatacatatatttaatcacataagcaggcagcccattgttgagtcagtgcctcttgtgattggtgtttgcaaggacttgctgcaagttatgacagttaatcaaacgctcccttgggccagacacttctagttaagctgattgtgagttgcttagctccaaccttccaatggcaatgagtttcgatgccgaatgaataacggtggggattgatttgcagtttactgggttattcgaggcgggtgcttcctggactttccattgtcttttgcttggtccgttgctgtaacactcatcacacacacacactcacacacacatcgctttccacctcaagccctattctaatgaaatatagcaattaccaaagataattttcaaattactgcatgcccattgaatgtgattcaattagagactcctgttttcccaagcaagacaaaaggtggaaataacaaaaggcagcttaaacatagattttaacgaggccttaaaccattggtttaagcttaacataaaaatggtggcttaaaagaacaacgaaaaaatatagttaaaaaccttagaaaaagagttaatgttcttatgcctagacttttaagaaattgattgatttggctgcgaattacttgacattataacccagcatgctgaacttcttaaagctctattattttaatattatcatatgcaaaaccttggaatttcttccttacccgacatcgcgtgctaatcgctgtggggtaatggaaagattacccacgcacctggttttgcctcaaatgaagggaatgacagacagaaagacaggtgtacagaaagtggggtggcgacaaatcgaaaggatcccatgggtccaagggctccaggactccaggactccaggactccaagacaggcagttgattccttaagcacacccactcacgcacatatgcaaattgcgcttagccgaatgaaattgtcaagcgaaggacactcagccccctttccgcacagattgctcaaggggaggggggaggaaaaggatatgaaaggctggcaaaagacgcagttaaagtgaaaattgtgtttatacattttatgggctttattacacccccccacccctcgttattcagcttgactttttattgtgccccgaaggcctttctatgtgagccgcacacacctttcttctggctcctttggcattcatagagcctccatgtgttcacgcctgccagcctgccaccatgccacgcctacaaacacgccgacgcctaccgtaaaaggcagactgtatttaacgggaaatggagcgcacaaaagtgtgctgtagttttacattgtgccgggctatgcctaatccgtgcccaaccctccccttcccatttctttttttttatcctttttttgcgtatctactccagatgaaccatcaacgttccctgatcacgtacttcaagaacacgaagatgaaaaacgacttaatgtagcaatagattattgtactgcagtctctattttatattttaaatttaaaaaatatatatatgtatataacaggaaataatacgcctagttggccctatttatttataaacagtcttcatcttagctgtgccacattttatggccaagttatggggttaaatcccgttggattatatcagatttagacaccatatttatttttttcttttaataatatataatcagtatttcttcgatggcaataaaatcacttgtgcattaaatacaaatgaaacatcataaatcgttgaattcgtaacaaaatgcactatccacctgcatttaaactgggaaacttttgttaatgtaaatttttgtataaggcaagaagtttaaggatcttgttgtgcaagtagacattatagaaattttaatttatattaatgataaaaatgtcaaatgaagtcgagatgcttaacagcaggtattggtgtcattcattggccctctgcagatctgtgctagattagattaattggttaatccggtgactctgcagcgtcctcctcttcctgctcagatggcatcgggctgatcgggttgtgaagtacataacgatggtatatgtccattgccaacgagctaaatatgtcatatacattcattccactcttggcggaaacctcttcaaagccgagtgccccacgatgggcatagttgaacccctgctccatgctcacctggcgatggttcggatcatcacttttgttgcccaccagcaggacggttaccttatccggacacatgcgccgtatctccttcatccagccatcgatgttttggaaacttttggacgacgttatgtcgtagacgagcagtatgccatgggcactgcgataattggacggcatcagcgaattgaagcgcttgtcgccggaggtatcccagacctgcagcatcatcacccgactgaccagctccacgctgcgcgccttgacatctatgcccatcgttctcaggtat

SEQ ID NO: 3638 - DNA, 1371 bp, DROSOPHILA
atgttgccaaaccgcactttcagcaaggtcggttggcctgacttgcggcccagtgacaagttgattgtcgtcccgtgtttgccgaccaggcccaagaactccacgttctttgcccttcgaaaatgtgtgggcgaaatcacagaagaggaccaaaactggactcacctccacctcctcatttcgatttctcgacttgtagggcgatccactcatcgtgatgagtttggaacgcagcgtgtttacaagaagacctcgccaaattgtgtgctgactttatatttacccactcgcgagataacactcaccggaaataatccgtccgttttgaggggcatcgtctacgtggatccgaaggccatccagggatatcgcgtatacgcccagctgacgctgacgttccggtatggccgcgaggatgaggaggtgatgggtctgcgattttgcaacgaggccatcatgtcgctgcaccagatttggccacgactcgaggagcccacgccagagtcgctcagtccactgcaggaggccctgatgaagcgccttggcgatggagcccatcccttcaccctctcgctatcctcctacgccccacccagtgtccagttggtgcccgccaagcgctattacggagctcccattggcaccagctacgatgttcgctgcttcatcgcggacaaaacggatgagaaattccatcgtcgggcttcggtgaagatgggcgtacgggtcatctatcgcacggatgtctttcatcagcatttggcgcccgagcagtatgccgccttcgccgggcgtcaaaacatcgcccaatcgccgccggccagtgccacgcccccgtcgtgcggcgagggcggcgaacagcatacaactcacacccaacagcaatcgcaatcgcagcccagtagcggatccaagcacaagtcgaagtccgagcgcggtgactccttccccaagctgcgtctctcgccaaaatcctttcgattcagcggtcgtttcggacgcagcaagagcgagatcgaaaagtgtcccaatgatcctttccacagctacagcaagtccttccaggagcactgcgacagcatgttgccaccgcacactggagccggggtcaccggcggaatcggtggcgtcagtgtgggtccttgtggcggtcctcaaggatccgtcgacaagcccttcctgctgcacgacggccgggtgggattgagggccagcttggacaagggctggtacacacacggcgaggacgttcaggtgaccgtcaatatacgcaacgatagccgcaagacggtccgtaaagtacggatgaaccatcaacgttccctgatcacgtacttcaagaacacgaagatgaaaaacgacttaatgtag

SEQ ID NO: 3639 - protein, 456 aa, DROSOPHILA
MLPNRTFSKVGWPDLRPSDKLIVVPCLPTRPKNSTFFALRKCVGEITEEDQNWTHLHLLISISRLVGRSTHRDEFGTQRVYKKTSPNCVLTLYLPTREITLTGNNPSVLRGIVYVDPKAIQGYRVYAQLTLTFRYGREDEEVMGLRFCNEAIMSLHQIWPRLEEPTPESLSPLQEALMKRLGDGAHPFTLSLSSYAPPSVQLVPAKRYYGAPIGTSYDVRCFIADKTDEKFHRRASVKMGVRVIYRTDVFHQHLAPEQYAAFAGRQNIAQSPPASATPPSCGEGGEQHTTHTQQQSQSQPSSGSKHKSKSERGDSFPKLRLSPKSFRFSGRFGRSKSEIEKCPNDPFHSYSKSFQEHCDSMLPPHTGAGVTGGIGGVSVGPCGGPQGSVDKPFLLHDGRVGLRASLDKGWYTHGEDVQVTVNIRNDSRKTVRKVRMNHQRSLITYFKNTKMKNDLM

SEQ ID NO: 3640 - DNA, 4324 bp, DROSOPHILA
aacttcctccaagtgtccctttgcggccatgcatcagggcagcggtcttgaggcgccggctaaggacaacggaaacgcagccacagccaagtgcccgttcctgcagaaaacggtccaaatgttcgactacgccgacgaggagcagccgacgccgcagcactcggtgctcattgaggatgtggaaaacctgttctgcggtctctaccagcacgcctgtcacagtcggggcatctacgagaaggccaaccagctgggcaagacgctggcggaggacctgatcaagcgcggcgccctcgacgtgatgaaggtggcccaggcagagattcacggcaaagtggcgtcgtcttgagcccgtcatcaatatcatcgtttacattaagtagaaaagtgtaactagacaaaatgtttttcatttccgcctcgttgttgaactcccgtggagaactcatgcttcccctgatttaacatcggtattgtattcaatccttctgctctccccggcgaatgcatcgttaatggttggtttccgcgtaaacgttattttagttttgtttttgtttcgggaatatgacaaataaatgtataagtgaactcatattgtgtcattttttctctccactgattgaaacaagcaatttcgtagctttttgccattttttattaacagttcatcgctcagtacaaatatgtttattacattcaagctaatttatatactcttggtgagtacaagtggtgtaaccaatgcggttataataaagtcttaatatacaaattaaacttatcttttgaattgaacttaataatagttaaaaatgtatgaagtaaccttgttataaattgcagttttcatcgacttttatcaactttatatagaccctttcaaagttagccattgaaaattcaaagaattatacttaacatagcaataagctaacgtaaaactacattggtcaagagaatgaaatgaaaaacaaaaataaaagggagtctagtgcaactagtggcgcttgcgcaggtgcgaggataggaagttggcctccgtgaagaccttcttgcaattggctacgccgcatggaagtccaccttcggaaccacagttcgagaagtgagccacgtaatccatttggttctggtagacttccttgcatagggtgcactgtagtttggcggcgtgctttttctccatgtgcgagtccaagcgttgacgcgatttgacgaacttcccgcaccggtcgcagctgagggtcgactcgtcggctgttgagtcaccaatggactccaggcgagcctttttgtgcggccgcacgttgtagttgatttcttccactatgtctacatcagatgaggggagcgtgtcctcagatttgtcttgtttttttcgtttttctgactttgcaggcgaattgccattggttgtggacacagacagatctacgtgactggtcttctttgtctttttagctggcgaccgaggtgcaatcatgcctccatcgacctggtgctgaatgttgttcctggatcgtataatcttttcttctgcgggtccttcatcatcctccgcggtgttgtcagtcttaaaagcgtccacaatttccacaacctcatcctcttcttgcagaatctttcggttggtgaactttgcggctttagtagggctttgttgtgatttcttaggtccttcaaccttctcggccgtgttttcaatctgagtcgtacccagaatgtctacgtcctcatcctcgtcctgcagaatctttcgcttgctggagttcggcgcttcagcaccgtcggcatgtagagtcatgtgcgttttcagcgactgtttggtagccaaactcttctcgcagacgtggcacttgaaaacctttggcttgtcgatgctgtggacggtcttcatgtgctcctgcatctgcttggcggtcatcagctcacagtcgcagatctcgcactgaaaattattcgaatccgccctgggagtggaggcgctggatccattgatggcaaatgtatattccgagtcgatcacgttctctaacatccttttcttcattaatgactcatttagcgctttaaaggaggcgattttggtagcctgggtctggtctgcgtcctcactatctgtgccctttttgttgttcacttggtcgtcgatttcgtcaaccactttggtttcaacattacatttgatctctgtctttttctctttggactttttttcttttggcttcttcctttgactcacagcattggtctcctttgcctttgcgtcaattttattcttggcccctgacttagcctctttttccttgctttccttcgccttagtcttagcctcgctttcaaaagtgcgtgagtgagtgtcccttaaatgatttttcaaagtcttaagcactccaaaagtcttaatacacaaggtacaggggtatatgcgtggtctttgaagaccgtgctccttctgcagatgctccttgtacggtttgggaaactttgcgtgaaattcgcactctggacactgaaagttatttgtgttaatggtgataggacctttatccgagtcctcctcttcctcgctctcggtcagtacttcgatggcatcgttgccgccgttgccaaagagattaaggaaagcctttttagtagacgacacctctttggcgggcgtcagcttaaccgaatcgttaagattatcctcgaagagtcgagatatctgctttttaggggtcttatcgagtttcttgggcgaagcactaatgatctcgatttctgtattagtattagctccattcacaaagcttggcgggaaagctgctatggacttgctgcgctgacggagggtggtgttcttttttggcaccttaaccgccttcttatcgctttcctgtgtcgatggctcctctatttccgctaccttagtcttcttggcgggctgctcctgtaccctgtccaccgtctcgcggaccttctcgattagtgccgcgctggacatgaatgtggaggtgcagacgaagcatatcttgatgggcaaggatgatgggatctgaaatgggatgggatgatttagatgacgagaagggaaatcagaatgccgccatttccaactcacgcttctgtgggtgatggtctccagtacgtctgttattttcctgcccaggaacaccttctgacctgaaaaaacactcttggacccttggcttgtgccgcaatggtcgcatcgcacctctttttgcaccttggtcatattttcactaagttttccagcaaaaacaaaaacagaaatcaaacaacgtgcgcacgtttttttttttgcggggctacagttaccaaacactgctatctatgttaatcaactgcagtgctgccagaccgagtcaccaaaatataccacatagtgtgcttatatattatggttgcacgttaaaagaagcaactgcagaacgttcgcagaacgaatcttaatcttaataatttttgcatcaaatttagaaagagtgtagaaaacagtttttaaactacctataatggcagtagcaactttaaaaaatattaccaaagcagtatattgcgcattccggtcacactaagttacattaacattctgttaatgctcacgtcgcgttatgcaacagctttgcgtgtcgatatataatcgataactctgaacttggtttccaatttaaaaatagtttatttaggcattagaagctacagtaatgcaaaatgatatgtttagtttgtttctttgtgttggtgctgacctggatgggctgtgccgttactttgtcttggattttttgagtcggttcccgcgcctgcaaacaaagagatgaaaaatgttatgaatgacaaggacatggcaagggaatgcgccaggatcaagcggttcgcagttttcatgtcttaaacgtatagctttatttgaatactttctctgctcctcctttctctttctctcataggcataatattgtatagtactgtgttgtgttggatttgtttcagtgtacggttggtgtacttagccgacgtttagttaactaggcattactaggtattgttcatgttgtttctgttaaatatacttaatataaatatgtatttcctttatttgttatcctcctgggcccatccgatttcatatggattcatagtgcctcgctttcgggggtggttacttgaattttgttaaagtgtgggttacacatataaaaaatatttgcgtcctctcacgctacacgtttatataaatatgtttcttgggattgggactgcacacttactctactggaaaaaccattgaatagtctttcgccttcttcgttct

SEQ ID NO: 3641 - DNA, 2258 bp, DROSOPHILA
gtaactgtagccccgcaaaaaaaaaaacgtgcgcacgttgtttgatttctgtttttgtttttgctggaaaacttagtgaaaatatgaccaaggtgcaaaaagaggtgcgatgcgaccattgcggcacaagccaagggtccaagagtgttttttcaggtcagaaggtgttcctgggcaggaaaataacagacgtactggagaccatcacccacagaagcatcccatcatccttgcccatcaagatatgcttcgtctgcacctccacattcatgtccagcgcggcactaatcgagaaggtccgcgagacggtggacagggtacaggagcagcccgccaagaagactaaggtagcggaaatagaggagccatcgacacaggaaagcgataagaaggcggttaaggtgccaaaaaagaacaccaccctccgtcagcgcagcaagtccatagcagctttcccgccaagctttgtgaatggagctaatactaatacagaaatcgagatcattagtgcttcgcccaagaaactcgataagacccctaaaaagcagatatctcgactcttcgaggataatcttaacgattcggttaagctgacgcccgccaaagaggtgtcgtctactaaaaaggctttccttaatctctttggcaacggcggcaacgatgccatcgaagtactgaccgagagcgaggaagaggaggactcggataaaggtcctatcaccattaacacaaataactttcagtgtccagagtgcgaatttcacgcaaagtttcccaaaccgtacaaggagcatctgcagaaggagcacggtcttcaaagaccacgcatatacccctgtaccttgtgtattaagacttttggagtgcttaagactttgaaaaatcatttaagggacactcactcacgcacttttgaaagcgaggctaagactaaggcgaaggaaagcaaggaaaaagaggctaagtcaggggccaagaataaaattgacgcaaaggcaaaggagaccaatgctgtgagtcaaaggaagaagccaaaagaaaaaaagtccaaagagaaaaagacagagatcaaatgtaatgttgaaaccaaagtggttgacgaaatcgacgaccaagtgaacaacaaaaagggcacagatagtgaggacgcagaccagacccaggctaccaaaatcgcctcctttaaagcgctaaatgagtcattaatgaagaaaaggatgttagagaacgtgatcgactcggaatatacatttgccatcaatggatccagcgcctccactcccagggcggattcgaataattttcagtgcgagatctgcgactgtgagctgatgaccgccaagcagatgcaggagcacatgaagaccgtccacagcatcgacaagccaaaggttttcaagtgccacgtctgcgagaagagtttggctaccaaacagtcgctgaaaacgcacatgactctacatgccgacggtgctgaagcgccgaactccagcaagcgaaagattctgcaggacgaggatgaggacgtagacattctgggtacgactcagattgaaaacacggccgagaaggttgaaggacctaagaaatcacaacaaagccctactaaagccgcaaagttcaccaaccgaaagattctgcaagaagaggatgaggttgtggaaattgtggacgcttttaagactgacaacaccgcggaggatgatgaaggacccgcagaagaaaagattatacgatccaggaacaacattcagcaccaggtcgatggaggcatgattgcacctcggtcgccagctaaaaagacaaagaagaccagtcacgtagatctgtctgtgtccacaaccaatggcaattcgcctgcaaagtcagaaaaacgaaaaaaacaagacaaatctgaggacacgctcccctcatctgatgtagacatagtggaagaaatcaactacaacgtgcggccgcacaaaaaggctcgcctggagtccattggtgactcaacagccgacgagtcgaccctcagctgcgaccggtgcgggaagttcgtcaaatcgcgtcaacgcttggactcgcacatggagaaaaagcacgccgccaaactacagtgcaccctatgcaaggaagtctaccagaaccaaatggattacgtggctcacttctcgaactgtggttccgaaggtggacttccatgcggcgtagccaattgcaagaaggtcttcacggaggccaacttcctatcctcgcacctgcgcaagcgccactag

SEQ ID NO: 3642 - protein, 724 aa, DROSOPHILA
MTKVQKEVRCDHCGTSQGSKSVFSGQKVFLGRKITDVLETITHRSIPSSLPIKICFVCTSTFMSSAALIEKVRETVDRVQEQPAKKTKVAEIEEPSTQESDKKAVKVPKKNTTLRQRSKSIAAFPPSFVNGANTNTEIEIISASPKKLDKTPKKQISRLFEDNLNDSVKLTPAKEVSSTKKAFLNLFGNGGNDAIEVLTESEEEEDSDKGPITINTNNFQCPECEFHAKFPKPYKEHLQKEHGLQRPRIYPCTLCIKTFGVLKTLKNHLRDTHSRTFESEAKTKAKESKEKEAKSGAKNKIDAKAKETNAVSQRKKPKEKKSKEKKTEIKCNVETKVVDEIDDQVNNKKGTDSEDADQTQATKIASFKALNESLMKKRMLENVIDSEYTFAINGSSASTPRADSNNFQCEICDCELMTAKQMQEHMKTVHSIDKPKVFKCHVCEKSLATKQSLKTHMTLHADGAEAPNSSKRKILQDEDEDVDILGTTQIENTAEKVEGPKKSQQSPTKAAKFTNRKILQEEDEVVEIVDAFKTDNTAEDDEGPAEEKIIRSRNNIQHQVDGGMIAPRSPAKKTKKTSHVDLSVSTTNGNSPAKSEKRKKQDKSEDTLPSSDVDIVEEINYNVRPHKKARLESIGDSTADESTLSCDRCGKFVKSRQRLDSHMEKKHAAKLQCTLCKEVYQNQMDYVAHFSNCGSEGGLPCGVANCKKVFTEANFLSSHLRKRH

SEQ ID NO: 3643 - DNA, 27423 bp, DROSOPHILA
tgggtgtgtgtggagcaaagaggtgtatgagctttagaaaaatatgaattatgtttgattccatttccgttccattctattccatttagtattgaaaatatgaaaaagtttattcgatataatgcggttaacactatgctgtactatatgatcgaatgttgctattacttgaatgctgctttcattagttatttagttctgcgatctctgctgattcgaaagttgagcgacatcgaggaggtaaattatagtcgctaccgtatgagtattcgattaataattatttacgagaaaaatatagtacatatgtatgtatgtttgtagcaatttgttgttctccctttactaaatatatttatttaaatttatatatctgtatatatagaccgaccttgtttacttttgtctcaaaggtaaatgaataactttcttgtttgtggcttaattaaattgtcaataaatatatcgatttggtatttatttatagttacatacaattattaaactctcgtgttcttgatcttttgcattactggtcaagtgactgatacactgatcgtctgctgtatattacttggtttttcttttttttaccccaaattcgaagccagcagtaactacataggttatctaattcatgcaaaaccttttgctggctgtaaggaaatcatgaaacaaataacgaaaataacaaaatggctgttggtttttgtttttgaataaatagttttatttgaaaatggtttttgcgtttttgtttttttctttttggtagaattttacaagttgaatggaaatacatacgtattaaatattacagtatttgattgggccaggatatagtagagaggtcgggtggggtcatggaaatgggaaagtgttggctgacctaagtaaatgcgtagaagtgaatgttcgctgatcggtgtataaaatcttggaattgtacggactttgtggccaacacaacttttgaaaagtttcactggatctgctggggttgccaattaaaagttgaaacgatgtcgtttagcttttttttcgcaaattgtccctactcttctgttctttgttctttttgaatgttaaataatatttatttcgctaataaacttacttagttgatgtttaagttgtgtgtgtttgtgtgcgtttacataaattaggcttaaaaactataaaacataaatggatttccgtccaactatagagcaagagcacaagtgaggatatttgcgtaaaggatgaggagaaggaggaggagagaagtcgtgaactgggcagatacaaaagaaatactattaaaataacaatataaattcattgcagctaaatcgttatgtaaaatcaaaatgcacaaaatacatacatacaaagcatatacataataattataataataagtctaatcaaacaattcaacatacttggggttaaatgccattcgctagatacagtcacatacataggtacatgtatgaagatgttttatcattaaatgtagaatttataaattattatattattacatacaatccttagtttcattgtgggagatttgagttctgcgttccattcattttgattcatattttgtgtgtgggtgtgcgtagatatggcaaaaatatatagcatgcttttgtgcgccaccaaagttgaattgcgtgtttgatcgtcgctgatttgccctgctcctcgtttaaatgccacaaatcattgtaagttacaacaaatcagctcaataagtgaaggaaattatatttagtttgtgttcagtatgcgtttgttttcgtgtttgtgtgtttgccagctaaacttctcctatacacgtaaactcaacaaagtacaatttacattgaagtatatcaatcaattatcgatggctgctgctactgctgctctttacataagttagttaagtggccacatacgcgttgctttacttgactcttatctggattttagtttagttttgcttcgtttttgttcttgtaaatacaatagatagattttatatccgtttcatttatctttaaattttacttaacgttaaagattttgctttccatattttgtgttttttcctttcctcgtttcttttcttttcatttgtttttttttctcttttggtttgttattttatatatttactttagaccacacgctgacactcaatcaaatgaatattgatatttcctttgccgctggattttgttgaaactttcgaacttaagtctaaacaagcatgacaaatgcagagcgttgatggcatgaataattttaaagagagattgcaacaggaaacatttaatatataatatttatatatatgtatatatatatatatatgtatagaagtgtatgtatatatatatgcggtatatgtagatatacgctcgtttggtttttgttttaataaatacatgaggaaactaaactacacataaattatgaaattctataaaaattattcagaccaaacaacaactgtatgcaatgttggcgcttgtgtttgtcgtgtgagtgtgttagtgtcatgtcgtacatgtggctttgcataatgcatatgtatgtgtttgtatatgtttgtatataggaaatgcctttcaatcaactgccttttttcagatgtgactttaatcgcgtgtccccgtgtcagttgcctgctgcctcatttagtcatagtcgccctgatcatcattagcattgtgtgtatttgcatctgcatctgcttcaatattatcgatattatgtaatgtacttgtcgctcattttccctataacatccattcgggatttccgtccgtccgccgtttttttttgttaaacaaataaaagttctttgggctttgcttgttcagtgtcctatgttttctgtgtggtttgcggttggtttgttggttggttctatcatctgctcctaaattgtttggttttttgatcaatgctggtgggttgttgtgctcccgcgctgctctttaataccgttacggtgttccctgctaacgcccccattctgctccacataatcgtcatcatcatcaatatcgactcggacgtcgacatcgtcgggatccggcctggaatccatcttagtacagtccacagccgcgcaggttgtttgctatgatgacatcggtgacagcatcgaatacaaactgaatgttattggtatctgtggcacacgtcatgtggcagtagatttcttttgaggttgatttgtttttcgcttcaaattgagcctgaatgtaagcagccgcctcgccgtactcctgtccacctgaaacgtccgtccaaatattggattaataaccagacttttacattcgagttcgaatggaccactcacctgtgtattcggggaagcaaatcgtcaggggactcttgcgaatcttctcctcgaacaaatccttcttgttcaggaatagaataatcgaggtgtccgtgaaccatttgttgttacagatcgagtcaaacagtttcagcgactcttgcatgcggttctatagaatgataaagatatcaaaatagtgagatatattcacaacaagtatttagacagcctaccgtggtttcatcctcatgcaagacttgatcgtactcggacatggccacgcagaaaatgatcgccgtgacatcttcgaagcagtgtatccatttcttacgttccgagcgctgaccgcccacgtcaaacaatctgtacgattaaatagtggattatcatgaatatgtatctttttaaatcgcatctttttacttacttaaagttgaggtttttgaaggagaagtgtacctcaacgatgccagtggtcttgacgcgagtgcgcaagatatcttgttcagttggctggtaatccttggcgcctaaccgatccaaatcgtccaggaaactgcaaggaaaaggagcaaggagagagtgttacaggccaggagcaaaagcattccatttcccatcacacatcgtttgaccagacaaatgtttacccaacccttccacccgtccattctcaattttccgcccgtatctgccaagacttgagcaaacaattaaggcgcagaccaaagcgctgagcaaacaattaaaaacaaaaaacctgagcgcgtgtcgagaccaaagagaaatgggaaatggggaaaagccccggcactcacacgcccccacacacacacacactcacacactcacacacacacagctcacttggctatgcaaacagctttccctgcagaaagtagccattcaaaatgattcctatttccgtgacttgttctggttctaatttccgtgcatacaagccatatttgtatatttcccataatagttttattcgccggttatgtaaccgtcacccaagcaaaggcatcggtcagatacagacggaggtgttcagatacacatatagagtctgcgtgctcgggcagcaagagtgccaacaagtaggtcatcaaagagggtccaccagtgagtccagtggccagttatatgagtatgtgtgctttggggccataattaacgtgccgcacgcaatgcctttaaaaaataaagggctgtgcggcagctaattttatttgttggccagctcttttttgctatcggctcgcaaatagttttttgaggctggtcgaggaatctgcgcttgttatcgcatcaatctccgcttgacttgctctcgtgctgaaatcggatgcattggtcaactggttttcgcccaaattacacgcacaattgcccaacaagttggccaaagttagtagcagcggcagcagtacttcaaaagatggccatggctcccctcctgcagtttggccacagggaaattggctaagtcatgctcgcccagcataacctttcttgcggaaaagttggccgtgtggtcaactgcataatcaaagctaatgcccgatattcgttacaatttcttagacaaatgttaattgaacggctgcaaacggatccgatgggctcgccgattgggcaatcgcttggttagcacttggctatacccgagatcttatttaacatgtccatcataaaagttttcttttctgtttactgatccgaaaccgcagacacacatgcagttgtaattcgtaagcccggaaaatgtgttgcaatgtgtggcatgtgcctgagttgtggtttcttgaaagtggatcatagacctgacaaacaaattgcagcgaaagtaagctacagattgaaaaactatgattgttttgaagaaagaacagaatcggagaaagcttgacggtttgattactctttgaatttcttactgaaatgtttataaataatgtgcttaaaattatttaaaaccttttctagctaagctcaactccttcatgttttcttcacctcagctgtcgtttcccaggttagtaaagctgtcatgcgaaatttattagcctgtttccgctgactattgtcttaccagcttttatggccttttcaattaagcgatttgcgcgcaatttagcccagcaaatgggtcgttagtcccagcagcgttttataataaattatttatgtattttacataagcctcaaaccacgaaccccatccgaaactcatcaggtccctcattaatgtcaatcaagggagtacaagacgttatgtgtatattatcacgaacttttgctttttgatttctattattaggcactttcaatttcatattaatatcaaaaaaaccaaagcccactagtttctgggctagaaagaccaataaagttagctgcagcagtggcatcaattagcacaaataccttaaatgacaaaacaaacagaagcgcgacaaaaaaaatacaacaaaaagacaaaactctgagagtttgccgagatcggcagctggtggagccaaaagcgtttggcgtataagtagactaagaagcccggcgatcgcgtttagtgcgtcgcggttggtctacgaggcaacagctcttgagactccagagcttcattcgcagctctcggactcggattcggattcggtttcggttttggttgtggtttcggttttcaaaagtcagagttaccgcagataaacttcgcgttgcgtgacaaaagacctggcgaatctccccggcttttcaagtgcttgtgagcggagcgagtgagtgggaaattggccaaagccacaatagaaatccgcacaacaataggcatcaaaagctgtttttaattgtgcacaaacggattgaaagtgttcgggaaaccaagaccgccaataaattaaaactaaaactgaaactcaatcggcaacaagttgattgaaaacccaaccaactggcagtgcaggccgagaaaaacgctttggcaaaccgatagaaaaaaatataaatcaaacgctcaagtgagtttttctcgagaggtgttttcccaatgcattttgggcgtgtcaagtaaactagttgcactctgaaaggcattcagtcaacttgactgtcgaagaaatcaacgtttagcgtgaaaggccaatttgattataatcggaaaactgatgggggcagaaaaaaaaatcgagtatttaatggtaggcttttcaatgcaatgctggtgtcaaataaatcgtaaaaaaagcagttaaagtcctcaaatttgttttgttttactgcaaacccctgaaatgagtagttaaaatagtaaatacaatttgaaatggctgataaacaaaggaaacggcaattattctcatgaacgacaaattaaagtgacgaaagtgagttttcccagctgcatttttccagcaaattaggcatgctggctaaactagttgtatctcgaatcttggccaacttgggcggcgtgaaagccaatttgaatatgctttttggccacacctcgaagggcgagtgagtcgaaaaccaatatccaagtgatttgccaagatgtcgaatgccagcgagagtgacataatcgttcgggatctttcgaccaccttttgctcatttagcagctgaatgctaataggattcctttcgatttcgtcttcattcgagcgtgaatgaaacgcggcccagagaacagctgtcctccccgccccaaccaactgctgttttggaacaatggccataaaagtcaacgacaagtggctgcttgacatttcttctgcattactcgcaggcgctaggattatcactcaagttcattataaccgcctgggtgataaaaccatgctatatatacgttatatatatatttatataaatatatatctcagatagttgttgttgctaccgctcgagagcctcaaggtcgtcgcttgtgcgacaagggcaaggataagccgctctgcttcgccgccattgtgccgcacaagtgtacacaagaaataaacgcaaacagagggaaaaaatggaaaaaatgaaaagaataatggctggcagctcggctaagtttctgaattcgggtgcgcagatttctgtttcatcaaattttcggcatttaaattatattgcctttggggagcaggcgcacaaaatgcctgaaagcagcagcagcagactcacaaaagtgccactgccaccattgttcgatggcatacgcggcgtatgagcaatcttgcctctttgccactttttccgcctgcgggggagcaactgcttttcaaactaaatgcgtgtgtgccgtcaagttctgtggacttattgggtagaaaatcaaagtttatacacagccagaaaagtgatggaattaagtccaaaaacaagtcatcttagaacttaggctgtttcaaacttggaaagtacattttcatagttagtaggacctgcacagttgtaaatggtttggttattttaaaaagtatttgaacattattgaatggcctttactttatgttaatttaactcattcaagttaaatcttatatcatatcctttgttgcttgccgcttttatttccaagaactgtttactactaaacttactaaaagcattgtaaagttgaacttctatggttctccttcaaagcctttgcttgtagtagactaagttttatgcacaataaacaagacttggtcagggttgatttggccctcattggcgctacttcaatagctcttcaatttgtgttttctttgtttgaactcacattgcacgagggcttgtagctgtgctcaatttaacgctagctaactccgacttgattattggcagcgaccataaaatggaaggcaccgagtctaccgacaaatgggaatcccctcctaccatgcattactcttaagtgctcccccgagatccaaaatccgatgacaagggacaatcgacgattgtttgcccgggtttgttttgcaactaactcgaactaagtgctgtcagtgctgaaagttaaaatgaatatggattttgcgagtatgccacaatatttgcactctaacgaaacgcagttcagttcagcttttcagagtatagaattcaaaagagggtgggattagtcgttttgaataataaacgcgaatggcctttatttattattgattgattttcccggcaaaccacttggaaatgcatcaaaagtttcgccgccacgaggagcgaaagaaacgccaagagaatcagcataaatacacaatttagtttgccgccggcaggcagattgctcaactttttacataataccattcccaacaggaccgagtggatccgaggaccaaaccgaagatgtcgggcttacgcaaaacatccattgcgctgatgaggcgctccacatccagcaccaccatactgccgcattccgggggcgttggtggtgccgtgtcgccgcccagcagcggagtgggcgtggccacggaaattgaaaaatcaattgcaatgcaacggctgcggacgggcgagtcgtcgaatccgaagaaattaaatgtcaggttcgtgattttcccacaccaaagacttggcttacatggaaataaaatgttgaataactttgccaagtttaactaaatatttttgaattaactttacaaatagaagacttgttctttgcatttctaaatctacttagattcagtttgaatctaagtaataaaacgcactactaacctaatgtaataatatggtgcttatatgtttttttcactgtatacaatttgcactaattgacagccaacagcccgttacatcagtagcaacaactaggactacagcaagctcactaccagcagaaaccacttcttcaccggcagctgcagtgcgtccttattcggaagtaccgggtccataccccttgccactgattggcaactcctggcgcttcgctccactaataggtgagtggccattattggcatccgttgtaactccgaccaggataactaatgaaccattgccatcgaccgacaggaacatacaaaatcagcgacttggacaaggtcatgaatgagctgcatgtcaactatgggaagatggccaaagtgggcggtctcattggtcatcccgatctgctgttcgtcttcgatggcgatgagattcgtaacatattcaagaaggaggaggcgatgccgcatcggtgagtgattaatcaacttttgccatcatccttcggtggtgcagtgcgaaattgcgtatacgacgtgtgtggcatgtcagtttggtatgattgattatctccagcttgttcgtaagtcgtgatctgaactcactttgggttatataattcgatagttagatgtgattgaaatgttaggctttgagactattattgttattgaataaccctaacatgattcgcaattcgttaaatatgctgtttatttaagattatgcctacccatgtcctgcatggctgcacctggtctgtgtagcgagaaataccccacataaatgccagggcccacgcacatggtatagcatatagcatatttatccacacgcaaagtcagtcatgcatgggtggtttggaacccctttgcctcgccttttaccctccacaatgcaaatgcaattcctgtttacttatgcgcataccgaatgaatgcagcctgtaattaaattattaactaacgaaggcacaaaatggcgattgcgcctgggaatgcgaattaagcgggatgtgtgaaaacatggcgacagattgaaatcagtggtaaaattcgaacatcagtgcaaaattgcttttaatctgactgacacatttgtgtgggaagtgaaaatgaaatcagcaatttatatgagattgaatgagtaaataaataactaccattgaaagtcataagcttatacttataattaaatatcttgaatggtgtttagtttgaggtgttttgacgctttaaatacaatatttttgggattgtaaataatccatcccgataaaacaaagccgtcaaattgaaattagttgcgactttcacttctcgtttggctttgcgatccgtaggcctagcaaccgagattcaaccgaaataaaaccaaacaatccgaactattcacaaactatccgacaagcgtttttgcatcatagaaataaataaaactgaccgaaatgatggagcaagcaaagaagtagacaaactgaaaaacaaacaaaacgaaagtcacacagatcgctaacgtgtccataacttttataagctttcttttcttcgcctttcattcctcctatcactcggatttatctgcgagcactatgcgctcgcatagtggccatgaaccaaatttaacaagttacgcttatatttcgcatacctcgagtatctaaccatatcatatcacatcgaaatgtgatttgcggacaaaagtgcggatcgatagtgaatcgcagacaaacccgcattgtttgcatttggcgaacgcgtttagcaagtcatcattaaaacgactgaaaagaatcactaatagattggacatgagacaacattaacgtaatgttggctcttttttttttttgaccgccagacagattgatgaatgaaccatttgccggcgcagatgtgtgaagccaactactgctcactggccaacagaccaactggctaactgacggattgacagacgtagcgactgcccaactgattgatgaagatatttggccaagagaaatgtacacaagtgtgtaccagaggcgtcggctttgttgacttctttttacgaggcccataaaatccgaaaagtgtgtgtgggaatatctaagtcggaaaaagtaatcgccggcttttgggccaaagttgcgatcgtgacaatcttggggtcaacttgtggttacaagcttgtacattgagggttttctttctgggggttcccggttttggtgtttagcatgcctatgtagtcactgcggattaagcgtgaaatcttcactcaaacaaactagtttatgtgatgttttcagcatttgatacttcacttctaccatagaccatttcacatttaggtatatcaaacattagcattttaaaaacttaaatagcaaattcaactcatagagagccagactatttttaaacgattgcgttcttctcaattgactgctaaaatcgaaatttgcataattcgcggggaatattactagttctatagacatttcagggttgcgttctctcgacgtttcgaaaacatacatatttacacttaaatctcgcatttaattgagcatttcgttgcctggggcaacaccattgtcagttcgaatgaagtaacaacagtcaagtcaaaggcggcaaattgttggctaaattgtggggcagggtgctgcataaaacaaaagccaataaaaacgcttcttctatttgcccagtgacatgcgagtgtaggcaaatataatgcaagttcgaggtgggtatatgtacatatgtacatatgcatgtatatacatatatatatatatacatatatatctgaggtcctgaaagctagtagatggagttgaatcgcttcattttgtgtttgatgttgtcgtcgccggtctgtctgcacgcaagggcaagcgacctcaaagggggcgtttgggtggccaaaaatggggtggggttttagccacaccatacccaggcatgctcacacttttacagacagaaaaaagtgaccaaattgttaatgaaatcgcgccactttaggtcttcagactgaagtttgttaatgcaattttggatgatataagtatctctcttttcggacatttaaataaacacacctttgtctaattaaagatacaaatatggttaaaaaagacttatattcaacaatctaattattgtagtatatcattaagagcttcgtcttattggactataattgaataagtttgtatggataatcagctagaatgcttgcacattaagttatagcacatttagtttcatagattttactcccacataataattttattgagaatgtgctaatagttttcgctctgtgtactttccggcttgtccctttgtgtgcactcactttttattcgccatggaactcagaccgtcgatgccctcactgcgccactacaagggcgacctgcgacgcgatttctttggcgatgtggccggcctaattggcgtgtaagtaatgtgcttatataacggatattgtggcaggctccaaccaccgtacttactatttttgcacattatttttttttgtacctcattcaggcatggccccaagtgggaggccttcagacaggaggtgcagcacatcctgctgcagccgcagaccgccaagaagtacattccgccgctaaatgacattgccagcgagtttatgggccggtaagtcggagcctaagcatccagccaagctgtgatgcaatcaacatatacttgggtatacctacatatactctatatccatctgcagtatcgagctgatgcgcgacgaaaaggacgagctgccagccaatttcctgcacgagctctacaaatgggccttggaatgtaagttgttgccaatttcgtttcacttatgcgattatgacactttgctggccaatcgcattgaaatattgaagacgcaattaggctatacttttcgaatccaaggactattgcagtgcccccttgacagttataaactaatttcgggaagattttcaagtgttttagttatttttattttgttaagactgtaaagaaaacttttttagagcatcaacaaatttaactaacgctgtgcatccttctagttaaactatttatttaaagttttcagtacaatttgttagctcgaacaacaagtaaacttcatcaactcttctattagcatattagaaaacttttaattgcctgttttagctacaacatggtattagtttttcttggaaagcgtaaagtgtactgtacagtgtattggtcttcctagaagagaaacgatagtgcttataaaatttatgagctgccttgacgtaactttgttaattaatttattgaaacgaactctagctgtcggtcgcgtttccctggacacgagattgggctgtttgtcccccgagggcagcgaagaggcccaacagatcatagaggctatcaacacatttttctgggccgttccggaattggagctgcgaatgccgctatggcgaatatatcccaccaaggcatacaggagcttcgtcaaggctttggatcagttcacagcgtgagcatagcataaaaaacgcgaataattgagcaaataataacatcaagaaatcactttgcatcccagaatttgcatgaagaacattggcaagaccatggacaaggccgatgccgatgaggctagaggattgtccaaatccgaggcggatatatccattgtggagcggatagtgcgaaagacgggcaatcgcaaactggctgccattttggcactggatttgtttttggttggagtcgatactgtaagctaatatactatctaatcgataaatttagtaatatttaatgcataaatctatcttgcagacctctgtggcagcctcctccacaatctatcagctggccaaaaacccagataaacagaaaaaactcttcgatgaactgcagaaggtgtttccccatcgagaggcggacatcaaccagaatgtcctggagcaaatgccctacctgcgagcctgtgtaaaggaaactctacggtatgacagttttccattcaattgagttaattgagtgacttctttaacaagtaaaattccctttaacattttagaatgcgacccgtggtgattgccaatggacggagtcttcagtcggatgctgtcatcaatggttaccacgtgcccaaaggcgtaagtttccgggaaatggtgaccatttggaatgccagctcactgccatctctgtttcctttcagacacacgttatctttccccatttggttgtttcaaacgatcccgcatatttcccagaacccaagcgttttctgcccgagcgctggctgaaacagtccacggatgcaggtgagttggataccacagaacgctttcgttgagcaccataaaatgccgagcacttggctcttaaaaaacagtgaatgttttggtgacagactaaaatatatagagaagagcagaaaaaaggcttaaaaagtacagtttaaataaaaatgggtatataatcaaacttttgatcgcaccagaaataaaattatcaagtatctagtagttattatatatgtatgcatattttatgtgtatctgcagatttgttaacgtacaatgcttaattgtttattgcgctttcgatacacaaaaatttaagtgctttcgtgcgcagatataatttattttctttcacgacaggttacacggtatttttttggtccaaggtcgcattttttttttcgcagtgttttaaccagagtggcgtttcttttcagctggctgcccccatgccaaccaaaaaattcacccattcgtgagtttgccctttggctttgggcgtcgcatgtgcgtgggtcgtcggttcgccgaaatcgagttgcacacgctgctggccaaggtgggttttaatcatgttttgcacctggctttgccagagttacccccttttaatttgccatatttgattcccggcacagatcttccgcaaatacaaggtctcgtacaattccggagagtttgtgtaccgtgtgaactccacgtacattccgcagtcgcctctgaatttcaaactaacgctgagggacgagtgagctgtctgcaccaaagggaaccggaggcccatcatggagctcaaagctgcagttacacacggcggatgtgtgatatttatagtcaaagctcagctgctgttgctatgcttcattttaattaagcaaatgtacatggagcacagttccgacaaattcagtacatcccatcgccacgagcgcagttttgtgggtgcgtgtgcgagtaactaaactcaataatcgttgtgtatttatgctgatacatgtgtatataggacccattatatccgccccatgctttagtagtagttttcttctcgaagaataattgtaaccaataaagcgtcgaaaagtatgcaataagctgtctgtttctgtttgtttttcttgccatgcattatcattaatcaaaagcctagtgagcttaacttgggacaaagtgtgatggctaaggtcaagcaaacgccaatctagactcatgattaattactttttagtaagtgtatcattagctctgttgcttgaatatgctttgctgactttaaggggcatttgaagactttttcctaaagccacaaagctgcacaatttaatttatttttagaaaattatacaacgcataaaacgcaaaaatattcggttacaagagtaattaaattggcgaaaatcacgtattccaaagtcattgggatgtggcttaaaatagacctgaagacagggccaataattatatatttggccttggaaagctgaagagtattgaatttcaggtggcagaaatataaaagagcgtagtcctcaattaattttaaggtgcagtcttgctcttttaatctgctaaacaattagctttaaactttaacaattagctacaatttacttttgctagactctattgtacagactattaaatcactaccaaatataccatttaaaataatattcaactattcaatcagcctgcgtgtttgccaactaattgaaataattcgaaccaccatttgtccgcatcacttggcactccattccaaggtggataaattggtgcgttagtgcgatttgatttggtacttactattttgcggaatcgtttagttggtattcgttgctgcgcgagaagcactcctggacaccggcgtcctgccagaggcgtttcatggcggccagcagctcctccgagaagggctcggtgtcgtgcatgcgttggcatacgtcgaacaccatcttggcatcgctctgtttgggttgggtggggaggtagagtggcatggaaatggccgggttagtgactgtgagcgtgaatgggcactcaatggggacttacctctcgctcgttattgctgtactgaatacttagggttggcatcgcgcgcaatattgcaactaatgattgtattgtgttgctgtagacaaccggtcgatattgtttaaagtcctccgcagtgaagccgctctcgtgaatgattttcatctgtttgactattgtgctcttgcccgactcaccggcacctagaagaaatgcacaaaaagttagcaatgcgtggtggaatttaagattacagatgtaatgtaatgtacatatataggatctatttatgcgtctggttatgcggttatcggcgccgataaaagaacccgacgggggttgcaaatatttatgctgcgtttagttctcgagcactaaatgtctgtgctttgtattcctcaagttggacttaatggcctttgagcacacagagccagccagccccatccacccacatcagcatcgtgattattattatcatcatcgccgttgtcaatgtatcatcttgagatgccgttgggccaaagaaatgagaaaaacgcaaggaggtggggcataaatggcagagaataaatggcaaacaaaggattaattgtttggccctggtcatccggcgattgtgtatatagactcctttactttcgtctacatctctatttcattgggtgtttttaatttttttttttttgctagctgaaggctttgaaggatttgcgagctgcgattccagcagaatttccatgcaattgaatgcaatttgttaattgagtgtctactgaagggggttttgtgataaacgagataatcaagataactggcagctcggctggaaaattgcttagccaagctgtccttgggaaaatggaataatttgataaatgctaatttcatttgcccattttcgtttcccactaagcttaatcctcactaagaagctttaattaaaacacaattggttggccatagtatgaaaatgcttgataaaactactccttgagtgcctataaactaacattatacgtacatacatcaaagcttacattatttcaatattataatgatactgaaatttgttaaccttctgatttctatcaaagaaaaggtgcacaactcgccatgaaactaaaatagtttgcaattcaaaattgtttttccatgtaaaagaataaagagttcattgtccaccacttgaaaaagtccacacttcttgaaaagatcttagaacagttcacgaaaaaagagcttctctcagaaaatgtttagatttggaaaactcaagagcagcagcgaacagggaaattttgcctggcttgtttatagaggcaattgggggactgagtaggcacctgagattaatgttttgtttgtgtggaaatcgaaggcaaagtgcttaattttaatgccttcgtggattgcaggaaaacaaaagattcggcaacggagcaggatggagctattttcatacgcgttgctctgattattattattaattcttggatgcgcacggcatggcagtacaaaaaatacaattttttttaaataaacatttccagtacactcgccatcacacacacgcagtgggtgttgcctgaaaatgaacatttttattctgaaacatacgcaaaactgtcagaaactgaaatcttctccccctgccaaacattttcgcccgaaaatgctcagtccgagcaaaagaggaaattaaatgaaatgcccgaaatgtaaacagcgaaatggggctgttgcttgcttggaaatatgcagccggagatgagatgagagctactgcagagtatatgaaaatatagatggaaattactcacgcgcccagctgaacgaatagcgaaatgcaattttcctacattttccgaccaaatttggtcaattctcatactctttcgcaagcggaaacaattcgcaaaccttatttatgccgatgcaatgtctatttttcatttgttaatgcctccgagcggacatgtttattacgctcgcttatcacaaatcggaatccaattgcaattacaatcaactgccatatattattatttacatatgtacatatgcgcacactatatagcccgacttttgcacacaaactctccattcgattcacccgcaagcgagtgaccttgaactttctgtctgatgcataaaaatattattgtgattattaaattgatggcatttcacattcgctccaagggaactgtgccaagaaaatggaatcaccacttgcagttcctctgtcggcacaatcgatataaagtaattaaataattaaatagcgaagttgagtgggatttatttatcgggttgcaaaagttccagtcatgatgactttcattttcaagatggactgattgtatgatgatttattcctccaagccgttcgtttatttttaaaaagagtcaaggaacttacattatgttaaagttttatttttgaaagaacaacgagtaagaatgtcgtgactaaaaaaaaaacagaaacacgtttagctaagaacgcgtcaaagcaaaggaccttagactgtcctgttctgcaccacaaatagcatcggtcaaaggccaaggctgccatagagccgaagctcatgccctaaggacattttagcggatttaatgagacgccagggcagccgctaagtatgctacactaattttagccgtgccgcgaatcaaatattcatgtgtgtggcacactcagcgagttgagttgggttggtttccgttcgattcatttggtttcgattacgttcccggggacaactcacccagcagcaggagtttgatgtcctttgccgcctgtatgccgtcctccttgagattgcgctcgatgaggcgactcctggcggctgcggctcgctcctcggcagactgtgcgcagcccatggtgcgtattgcctcgacgcaaaacgttttgaaggtcgtttggtatcggccaactcaatggccgactacgttgccagcgagaaaaaccaggtgtacaacgtgcggggactcgaattcggggggctaaactaactccgctatccgagggattcgatcgtgtcactggactttaattttcagtacggcacttcaactgatttttcaatcacttctttatggttttttcaggtttttgaactttggttttcttcaattcaacactgcaatatataattatgtcaccaaacaattcagttttgtttttatctgcgcattttgttgtgatccgcgcaaaagggattctcaaggatacccgatttgaccgctaacggtagagtctaattgtaaactgaaaaacccgcatgtccaagagcgaggaaacccgttactcgctacgaaactcgggaaattttgttgtctttggctaggaaaaactagaaacgaagagagagagagtgaaagcagcgaatagaaaagctctaggcgagggcttttcgagccatggaaaaatgtgtaattaaggagcgtggttttcattaaccaaaactcaaaatgcgtacaaatatggcaaaaatcaataatatacgactgctgcattttcttttattttatatttttatgtgaaaatgttatttttttgtaatatttgctattcattgcaacgagaacatacaattaatggtacaaatttgacaacttttgtttaaacttattattcacgcgctgtcttacaagtggtcataaacaaaagacagggagggagtgagaggactggaaaattgaggcgttttacttttttcttggttttcagccaaataagaaaagcacaaacaaaacttttcttttgtacacttggcagctatttgtttttgtattccagcaaaatgattcatgcgtttattcgaaaaaaaggaggtaggagggggtagaacttcggcgaagtcacatattaagcgccaaactgaattgttgcggtggcttttaatttatactatatattattacatatttttgttatatatatttaacactttttcagcgttttttgaactttaaaactttaatttaacggtttagctctcttttgtgcgagttttctagagagctggcagaattcaactgagctaacggaactatgtgcctggatgcgctggaagtgctctctctctcgtattctggtgccgcccacgtatagtatacacgaaagctccgagagacgcagagagagaggataagagagaacttgcgccggcgccactggaaagtgtgtgagccacaataacgagtctgcgcaggacgaaaacagcgagtggtcgcgagacaaggacaaccccaaaatcaacgagtgcgcccacgcgatattcctttttcctcgctggttttcttgttttttttttttttttagcaacttaaagtggctttgcagtttaaatggagaatgccattggtaccccctccccacacacaattaagtcgatggctttagaactttgccacgtttatgggccaagccaaagcacattagcacaaaacagttggccagcagcaggatcttttgtgtcctctctcgctcttcccaagcctacataacggtagagcggaaaatcgagaaaaatcaccattagataaaacaatcgcattcgttcgattgatgggattctgtcgacaggaactgtgattgaatggctcaatgcctcaaatacctgcaactgcaaatcgagataataggtaagtcaattaaggctatcataaaaaatgccattgagcctcaattaaggaattgacatggccatcggcggtcgaaatgccaacaaatatttatgattaattgtacagtgcagcctcactgtcataaagaaatgttcgtataatttggaatagacggaaagaactttaatattaatataactacctatgtacaaattgaacaaatgcttgttttgttgtatttaaaaaaatttaatcgattgcatcccacttgttcttaatccaatataaacttatttaattacttagtattcagcaaataagtacaagtacatctcaaatttccaaaagttatagaatagtcagttttgctctactgctttaattttgccttgaactcatccaccagtcaattagaagttgacatcttgattctgaacctacaacaagaggcaatgacgaggaaagttttccggtaaagctttattttcccaagaattctggcaccaccgccccaaaatagttaaggtcggttgtaattacctgttgttgtttcaaagagttaagagttaaaggaaagcaggcaatttaattcactacgagcaaatggcgtgacaaaaagaaaatgttgaaaaaaagggactattgaaaatgcagaacatgcacggaaaaataaagtgacatttactggttgttagatcaaaattgaaattgaatactttcgaaatgtatgtaagacggtttagttacccaaaatgaaaatttaaatttattataaatgaatctttaaaccgaataactttttaaaaattctgaatttgcaacattttttttagcaacttttagaactaagtccaccaatatttaatactgctctttgcacactatttgaaattcaaaagggatcccctgttgtcacctcgatgcccctgacgaatttaattaaattatcactgtgcgaatatggactaaaatgattgaagaagagcaaaaaaaaaaaaaaattgaaaacaatgaatgggccaatgaaattattgaatgaattgggatccagaagcagagggtgaactacaatatatatatatatgcgatttggtgaggggccggaaccacaaaccgcagccaacgacaaacggcaagcaaattgacgtttttttctgtttttgttttatcacgcgaactctgcgctctttcgaataagtgacagacagcggcaaagtggagcacttgtgcacttgtccgaaacaatctgcacctaccccatgctcagcccaagccaaaaccacccatccatcgaatgccattttccattttctgtggcgttccatgggttgcaggtcgcgaggccttttggcactcgggcgacatttgactttgctcaattacgttcgatttgtgctgtatttggcatcttttatagtttatttaacgagcctgtttattgtcattttgtggactgcttggctccgaaatttgggagaagcgggtcccagcctaattgctttgctacatatgtttggtgttccagattggatgggttgtcgacagctccatattgataaaaaaaaatataatttgatcaagaaatataagtaattattcaagaatttgaaagaaaaatcggtgacgcattttaaggctttagaaaaacggaatgtttcattctccccaaagttacaaatcgaaatgttttccaagaattggtcttaataggtcccggagcgtatttaaattatattctccagatcgcaataaatatatttaagatgttacgcactttttcagacgaattaaagtaaaaattccactatataaaaaactcgtatataaactataactttaaaaaatatttaaacttgtaacgttcttctgattggaatatggttattattttttatcattggaaaagataaaacaaaattcttttcgagttcataaacatagagtcttatcttttttaactcataataattatttaaaattctaccaaagaactaatagtttttgttcttatctatctaggaatgttggggttttacaaaaatgaaacttctacgacgtttatttgccaactagtcagtttgagttagcaattgtttcttgattgtttcacgtagccatatcactcgacggcacaagggccggcaaagtggcaaacaaacgagcatcgaacgtttcctcaatagcctttcctttcggcttgaaaattatgcctcaagtggcggtttcttcaaacttccgccaggaggcgccactcgagaggcacagtgctgtggtgaagtatgcagccacacccaggacatgtacacgtttcctctcgctcccttccgtccggtgccgctgtgtccattgtttcgttagtgtttcctggccgccattcgatgcttccgcctgccattcgtctgcccctcgacctgcccccgactccggcttctgggcaccaccccctgcagagagaatcgcccataccgtcgcactttcaatgttgcaacatggctgcaatacactccctcctcggcactcctcgctactcgactctgctccttgttgcttgttagggcgtttaaaagttttgcctgattgcacagaacaacagcgagcaactgtgtgggaagtaatgggcctacacagcaaacaaaaacgggttacagagcaggggaatatgtattaacttgagaaacttgttccaaaaaaaaaaaaaggcatctatcttaactaagtcatataagaagtactttgatctggtttatttttggtttaagcattaaatgttttgtaaactttatatctttaacttttggtttgtttgaatgctgctttaagtgcatccacgatatggagattttgcttgtttttcgcaacatgtttgtgtacaatgttaaagtgaaagagaaattcccgtgcatattgcagctttgtcctttttctgcctgactgcatccctatctcgttttcgggggcaagtcaaagtcaatgggattaactgacatttcggtgtcagtggcgcaaccaggttaacaaacactgcacctcgaaaccatgctacatggtgcacacccgcccactggcacacacgtgcaattgtttcaatgtcaagtggcgtcgattgccctcatcttttggcggatgcagacgcacttggacaaaatctaaggctaaggctaaggctgcagctgcagctcacagatgcactcgacgatgagattcaggctgatgcaggatagagatgacagcaaagacaatatctacatgatgattttttagcatctttaaattcttaagctatgttcagataatttgcactgttttcttagatttggctaattctagtcattattttatatattttttaaaaacattgtaattatttcatcactatcgaactgtttggtactgaaaccactttaatcggaccgagtcatccgcaggccacatggctcctcgaaactgtttaggttttcacactcgcctgccacgagggcggatgcaactgttgctgctgccattgtctaagatgttgcatgcacagtggtgcatgagtccattttattttcggatatccatgccacatgcaacacccaaaagttgacccaaattacttcggtttcgccttggccaaaaaaaacacgctaaaaatagttttgtcatggaatcgattcatcagcactcaaatagagtggaataaccttgagttcgattccttttgtggggcaacaagtcattacatttaatttaaataaccagtcagtacatacaaaaatcatagtttttgaatttacttttattccagtctttgaatcttctaaaaaatgtgaactctgatataagccttgatggaaattgaagagcagctaatccaaaattgcgtccagtacatccagcatttccgccgcagagtaaaagtgtgtgcaataaatatccccctatctatcggcacataaaaccgaaaataaaattttccaagtgccccggaatctggcggccgatagataaaccagcaatttccaccaaaatagaacgaacaatagagtcgagtcgagtggaaaggtaaacgctgagcaggatttccatttccggtgagaaaaacccaagtggaaaaacgagaaaaagcgacgaaaagtgcacttacccagcagcaggagcttgatgtccttggccgcctggattccatcctcctttagattcttctcgatctgtttggatcgctggatggcggcgcgttcttcggcggatgtggtgcagcccattgtggttgggtttggatactgatttggattcggattcggatttacacggggcttttcggttttcgggcttttgttttccaattttcctggacttttttctttatgtcttatttgcttatgtacagtttaacgatttcaactgaaatggagtattgaacccatcaacaataacaaatacacgggtcagcggatgattcactataaacagtgcgcgatcgataaggcgaaccaatgaatatcaaggatgtgttaaatatacagccgagttcaaaataataatgttgagttatcttaaattaattttgtctgctgtgtataaacacaaattgtaattgtaattgtaatattctttctgttactcaactattatgagaaacacagctgtatattaatttgtatgtaatagttaaaaagattattttaaactgatgttacaaggtttatggaacacatcgttcgctctatggatgttgtactgtactgagacaagcactaattttatgaccgccactgtctgtgcaatgggccgcgcactgtatcaattatgttgcttttgttttttatcagcagacgcaaagtaaaaataaaagcaatgatagccagctaatttgcatatggagcatgtttgcgatatcgatacaaaattcatcaatcgcgctgataagataaatccatcagataatgctggatcgcgataagaacgatggtaatttatcatgtaagtgaattagtctcgaggtcaaagagccaaaaactcaagcttattttttggataccacttattttttgttgtcacacttttaataaaacttttataaattttgtttgtttttttttttttttggttttatttgtatgttttttatgcagtgtgtatgtattaagcgtgggcgtaggcgctaaaaaagcgccgggttggtggaaaaaaaggcggtgggttgtggagttttctttttcgagcgtttgcctaagcacattaacatatgcaaaaagtaatgccgtttttatgcaaactgttaaccatttcggatgtataaattttcatttagtttgtcgctgtttcactcacacgcgcgcacacactcactcactcacacgcacgcactacgcactctcacgcgctgcacacgccacaccccccgcccactgggccgccacccaccaccccacgagttttccttttcctttttttcagcttttttcagcttcacatttaccaccgcctagttttccagtcgtatacacaccgcactagtgtatgcgtgtgtgtgggtctgcttcagcctgctgtgtgcgtgtgtgtgcaggaggctctcttttgcgtttggctgttcttattggttccgttcgctttgcgcttctttttcgcgactcgctgtatttattgcaccgatcgtgatagtttaccgttgcacttgccgagcacttgcacttgtatttttggccgcagtgatattggtaaattgcacttttctggtgtgcgaaaatttagctgctctctctcgcttcgttcgctctttccaactgcagagcgaggcgttcgaacagctgttggcggcgtcggtgcgcagcactggacgcggcgggggtggctgttgaccagcactggccgcaacaacagctgctgcaaaacaagcttatatttaaaaatttaaatttgttaaaatcttccgctatttatatacatataatttaataaaatgttttatataaatatgaaagaacatgctcactttagtttcaataaatattttgcatcactttgtatgtacagacatttatttttttattatgttttgaaacttatctggattttaaatagcaggccactcaaaaggatctcatgaatacaatatttgagctttaagtgatacaaatagagatatattttttatttatattattgcaaataattattaaaaattcgcatacctttcataacaattgcagtgcatattctcccaaatatattcatatttaaaataaaacaactattttaatttaaattcgcctgaggtttgaacggttaaataaaataaatgattaattcaacaaagtgtgcactttccagcactatttatagcaacagccgattattatagcaggaatctatcgattatacttaactttcttagccaacactg

SEQ ID NO: 3644 - DNA, 4301 bp, DROSOPHILA
ggcggggggtgtggcgtgtgcagcgcgtgagagtgcgtagtgcgtgcgtgtgagtgagtgagtgtgtgcgcgcgtgtgagtgaaacagcgacaaactaaatgaaaatttatacatccgaaatggttaacagtttgcataaaaacggcattactttttgcatatgttaatgtgcttaggcaaacgctcgaaaaagaaaactccacaacccaccgcctttttttccaccaacccggcgcttttttagcgcctacgcccacgcttaatacatacacactgcataaaaaacatacaaataaaaccaaaaaaaaaaaaaaacaaacaaaatttataaaagttttattaaaagtgtgacaacaaaaaataagtggtatccaaaaaataagcttgagtttttggctctttgacctcgagactaattcacttacatgataaattaccatcgttcttatcgcgatccagcattatctgatggatttatcttatcagcgcgattgatgaattttgtatcgatatcgcaaacatgctccatatgcaaattagctggctatcattgcttttatttttactttgcgtctgctgataaaaaacaaaagcaacataattgatacagtgcgcggcccattgcacagacagtggcggtcataaaattagtgcttgtctcagtacagtacaacatccatagagcgaacgatgtgttccataaaccttgtaacatcagtttaaaataatctttttaactattacatacaaattaatatacagctgtgtttctcataatagttgagtaacagaaagaatattacaattacaattacaatttgtgtttatacacagcagacaaaattaatttaagataactcaacattattattttgaactcggctgtatatttaacacatccttgatattcattggttcgccttatcgatcgcgcactgtttatagtgaatcatccgctgacccgtgtatttgttattgttgatgggttcaatactccatttcagttgaaatcgttaaactgtacataagcaaataagacataaagaaaaaagtccaggaaaattggaaaacaaaagcccgaaaaccgaaaagccccgtgtaaatccgaatccgaatccaaatcagtatccaaacccaaccacaatgggctgcaccacatccgccgaagaacgcgccgccatccagcgatccaaacagatcgagaagaatctaaaggaggatggaatccaggcggccaaggacatcaagctcctgctgctgggtgccggtgagtcgggcaagagcacaatagtcaaacagatgaaaatcattcacgagagcggcttcactgcggaggactttaaacaatatcgaccggttgtctacagcaacacaatacaatcattagttgcaatattgcgcgcgatgccaaccctaagtattcagtacagcaataacgagcgagagagcgatgccaagatggtgttcgacgtatgccaacgcatgcacgacaccgagcccttctcggaggagctgctggccgccatgaaacgcctctggcaggacgccggtgtccaggagtgcttctcgcgcagcaacgaataccaactaaacgattccgcaaaatatttcctggacgatttggatcggttaggcgccaaggattaccagccaactgaacaagatatcttgcgcactcgcgtcaagaccactggcatcgttgaggtacacttctccttcaaaaacctcaactttaaattgtttgacgtgggcggtcagcgctcggaacgtaagaaatggatacactgcttcgaagatgtcacggcgatcattttctgcgtggccatgtccgagtacgatcaagtcttgcatgaggatgaaaccacgaaccgcatgcaagagtcgctgaaactgtttgactcgatctgtaacaacaaatggttcacggacacctcgattattctattcctgaacaagaaggatttgttcgaggagaagattcgcaagagtcccctgacgatttgcttccccgaatacacaggtggacaggagtacggcgaggcggctgcttacattcaggctcaatttgaagcgaaaaacaaatcaacctcaaaagaaatctactgccacatgacgtgtgccacagataccaataacattcagtttgtattcgatgctgtcaccgatgtcatcatagcaaacaacctgcgcggctgtggactgtactaagatggattccaggccggatcccgacgatgtcgacgtccgagtcgatattgatgatgatgacgattatgtggagcagaatgggggcgttagcagggaacaccgtaacggtattaaagagcagcgcgggagcacaacaacccaccagcattgatcaaaaaaccaaacaatttaggagcagatgatagaaccaaccaacaaaccaaccgcaaaccacacagaaaacataggacactgaacaagcaaagcccaaagaacttttatttgtttaacaaaaaaaaacggcggacggacggaaatcccgaatggatgttatagggaaaatgagcgacaagtacattacataatatcgataatattgaagcagatgcagatgcaaatacacacaatgctaatgatgatcagggcgactatgactaaatgaggcagcaggcaactgacacggggacacgcgattaaagtcacatctgaaaaaaggcagttgattgaaaggcatttcctatatacaaacatatacaaacacatacatatgcattatgcaaagccacatgtacgacatgacactaacacactcacacgacaaacacaagcgccaacattgcatacagttgttgtttggtctgaataatttttatagaatttcataatttatgtgtagtttagtttcctcatgtatttattaaaacaaaaaccaaacgagcgtatatctacatataccgcatatatatatacatacacttctatacatatatatatatatatacatatatataaatattatatattaaatgtttcctgttgcaatctctctttaaaattattcatgccatcaacgctctgcatttgtcatgcttgtttagacttaagttcgaaagtttcaacaaaatccagcggcaaaggaaatatcaatattcatttgattgagtgtcagcgtgtggtctaaagtaaatatataaaataacaaaccaaaagagaaaaaaaaacaaatgaaaagaaaagaaacgaggaaaggaaaaaacacaaaatatggaaagcaaaatctttaacgttaagtaaaatttaaagataaatgaaacggatataaaatctatctattgtatttacaagaacaaaaacgaagcaaaactaaactaaaatccagataagagtcaagtaaagcaacgcgtatgtggccacttaactaacttatgtaaagagcagcagtagcagcagccatcgataattgattgatatacttcaatgtaaattgtactttgttgagtttacgtgtataggagaagtttagctggcaaacacacaaacacgaaaacaaacgcatactgaacacaaactaaatataatttccttcacttattgagctgatttgttgtaacttacaatgatttgtggcatttaaacgaggagcagggcaaatcagcgacgatcaaacacgcaattcaactttggtggcgcacaaaagcatgctatatatttttgccatatctacgcacacccacacacaaaatatgaatcaaaatgaatggaacgcagaactcaaatctcccacaatgaaactaaggattgtatgtaataatataataatttataaattctacatttaatgataaaacatcttcatacatgtacctatgtatgtgactgtatctagcgaatggcatttaaccccaagtatgttgaattgtttgattagacttattattataattattatgtatatgctttgtatgtatgtattttgtgcattttgattttacataacgatttagctgcaatgaatttatattgttattttaatagtatttcttttgtatctgcccagttcacgacttctctcctcctccttctcctcatcctttacgcaaatatcctcacttgtgctcttgctctatagttggacggaaatccatttatgttttatagtttttaagcctaatttatgtaaacgcacacaaacacacacaacttaaacatcaactaagtaagtttattagcgaaataaatattatttaacattcaaaaagaacaaagaacagaagagtagggacaatttgcgaaaaaaaagctaaacgacatcgtttcaacttttaattggcaa

SEQ ID NO: 3645 - protein, 354 aa, DROSOPHILA
MGCTTSAEERAAIQRSKQIEKNLKEDGIQAAKDIKLLLLGAGESGKSTIVKQMKIIHESGFTAEDFKQYRPVVYSNTIQSLVAILRAMPTLSIQYSNNERESDAKMVFDVCQRMHDTEPFSEELLAAMKRLWQDAGVQECFSRSNEYQLNDSAKYFLDDLDRLGAKDYQPTEQDILRTRVKTTGIVEVHFSFKNLNFKLFDVGGQRSERKKWIHCFEDVTAIIFCVAMSEYDQVLHEDETTNRMQESLKLFDSICNNKWFTDTSIILFLNKKDLFEEKIRKSPLTICFPEYTGGQEYGEAAAYIQAQFEAKNKSTSKEIYCHMTCATDTNNIQFVFDAVTDVIIANNLRGCGLY

SEQ ID NO: 3646 - DNA, 3460 bp, DROSOPHILA
aagctgctgttaagaccgttagctgtgctgttaggcgcatatcttgtttacaagcggtttaattttataaatatagctttgttttaataaatatccaagaaatttaaactattacacatggacacattgccgggaagttcctccgccctgagcacagacgacgagcaaactgccctgatttcccccactgtggtggccggcttaaagaacctgggtgccatcatttcgctgccactcaccaaactgctcattgccaattccttgaaactgacgctccatccagatgccagtgagttggaagctggaaattggtgtttcgcgtagacctaatcctaatatgtacacccccacagccattgctccggtgcccgagctgtatgccaagaacgccgcctgcgccaaacagagcgagtacgcggtggtcaccctcttcgccctgggcaccaagcacggctgggatggccttcaattgcgccagcagctggagcaactcaacctcgatgcagctgccgtcgacgagctgagtcgcgtttacgaggacagccgcaaggatctaattctccgccaactgcaaataggccatagctttccgcacattaccgacatccagtggcgcatcgtgtgcgacgtgaagtcttccacctcggactgcagcacgggcgcggcctgcttccacatcaatctgggcaactttcggcagagcagcggcgagcgggtgaccatcgttgagtttgtctgcaatgccgaggagctgcagtcgctaatcaatcgtctcaaggagatcgagcggcactgccaacagatggccgtggtctagggaaacaagctcttcaaattcttatcgattatatttcgcagcatataacaccagcattgtcggctatatacagtgtcggaacaggaaacctaaacagttaacacagtcatcatcgcttaaaaggctacggcttcatcatttggagtccaactccaatggcaaccacttcgttgatcatccgcgtcaatgggcaaccttgtgcggcggcggcacaagcagcttcatcagctgcccatagtgattcggcgctgtgctatagatggtgcccgagaagcgggtgctgtcgttcttctcggcggaaatcactgtgcaacggttctgttccgaaagccgcatgtttagaccacggaagcgtgagtccagcctgtatagattagccccttcccgtggtagaaagaatggacgtccgctaaacggattcatgaagtccgcccagtagccgtacgatagcaggcgatcgcacatctcccgcgctgccaggacaaactgcaaaggtagttggcattagttatgtatgtagatatactcgtttagataataggtaaataccaacaaactaacttctctgtattctcattcatcaacccaaatctaaaacttattacaaatgattgaaaatgttatggcttactttaaaattgggtgccaaacttaaggaaggtcaacccacctagctttcaacgtgctaaactggtttgattgtatataaacaaatgatcagagcaataacgaggtcattcctccaattcatccaaatacactgcagtgtgatttcccgctacagtgtggatgcgtgaataaaactgatttctcaccttggcagcgcccatttcgatgtctccttcgtggctgagaacaagcatggtgatgtttatgcactgctgtgcgacgacgggtaccgggaagatctccaagagtggcacacggataagcaggggacacttacagcaggtgaattccaggcgcgatttgtccgtattgggacccttgtgaaagttaaccaggtggccaagcggctcgagcagaccgacggtggtgctgtcgccctgccaggcgggcccaatgccatttggcagatagaagcgattgcctctttcggcggtcagttcccagttgggctcactctccaaactatttagctcatcgtcgtcgtcgagatcccgcgacttgacggtcttaaagtatccgccggcatccgacggtgggccatttcgcttggagtatctagccaccggaatgatggccgtgttggtcaccttggtgctcagtaggtcgttcagtctgttggatccgcgatgtacggtatgtgaaatggacagggatggcgcccagatggtacccaatacgcgactcaatgatcgagacattattatatcatatgcttctgtaaatgcgtagaatctgctggcaatcagtgctattttggatgcgagatgcaatgcgacgacaatggtgcttaccttggatggcggaactggatttggagtgctgtgctctgcagacgctttcaaataatgccggattttatgtggctttagaattttacgttgaattttgttttcagattaaatctattgcctatttgaaagtagagacgactagttttttttgacgcacagctgctactggattcctacgtcgttccgtttttctgtttttctaaactaaaattttcaatatcgacaaacagctgatcccattcgatagtatcgcctatattagggatgagaaaagtaatatggtaaataattaatgttatatatatttcaaaacattaaagtaaatttcgttgttgctacttgagcttaactgttcgttaatttcgcagacaatatatattaatagaatttttgtttttttttgctaaaaaattggtctccaaaatcagctgatagacatcgataaagttgggaaaagcttgagttgcgcgccaatttcaaatacgaatttcaaatcaaaatgattataaaataagtggattggtcatcagtgatataataaacatagtaatttttttaaagttatttttcctactttcgtatttttaagcaaataaaactgaatgccatcttctgcttttgaaacatgttttgtatttaattgaattacatagattggaatttactatcggtatttcgcgtagaactagggacttttactggcactggctgagagcgtgggtgtagaagatcttctcctcgactcctcgcttgatcacgtgcggaatcttcttgggcaccatgctggaaatatataaatacataatatagttagttaaccagtatatatatgatgctggtgacattgaggaacccacgtgatgcagtcgatgatgggacaaacggagacgcagagtgtgcagcccgtgcaatcgtcgttcacgtgcggaatgtgggtgtccttgtcgaattcgatggcctggtagccggaatcggcgcaggtcatatagcactttccgcagtttatgcacatgtcctggaaagcacggatgcaattagaaatttggatactttaatgataactcagcactcacatcatcgatgagcgccaccttctgttgtttgttatccagcttgttgtatgacccgatcttgtctagcgctgctccgatcacatccttgattcttggtgccggattgggtg

SEQ ID NO: 3647 - DNA, 1055 bp, DROSOPHILA
aacgacgtaggaatccagtagcagctgtgcgtcaaaaaaaactagtcgtctctactttcaaataggcaatagatttaatctgaaaacaaaattcaacgtaaaattctaaagccacataaaatccggcattatttgaaagcgtctgcagagcacagcactccaaatccagttccgccatccaagaagcatatgatataataatgtctcgatcattgagtcgcgtattgggtaccatctgggcgccatccctgtccatttcacataccgtacatcgcggatccaacagactgaacgacctactgagcaccaaggtgaccaacacggccatcattccggtggctagatactccaagcgaaatggcccaccgtcggatgccggcggatactttaagaccgtcaagtcgcgggatctcgacgacgacgatgagctaaatagtttggagagtgagcccaactgggaactgaccgccgaaagaggcaatcgcttctatctgccaaatggcattgggcccgcctggcagggcgacagcaccaccgtcggtctgctcgagccgcttggccacctggttaactttcacaagggtcccaatacggacaaatcgcgcctggaattcacctgctgtaagtgtcccctgcttatccgtgtgccactcttggagatcttcccggtacccgtcgtcgcacagcagtgcataaacatcaccatgcttgttctcagccacgaaggagacatcgaaatgggcgctgccaagtttgtcctggcagcgcgggagatgtgcgatcgcctgctatcgtacggctactgggcggacttcatgaatccgtttagcggacgtccattctttctaccacgggaaggggctaatctatacaggctggactcacgcttccgtggtctaaacatgcggctttcggaacagaaccgttgcacagtgatttccgccgagaagaacgacagcacccgcttctcgggcaccatctatagcacagcgccgaatcactatgggcagctgatgaagctgcttgtgccgccgccgcacaaggttgcccattga

SEQ ID NO: 3648 - protein, 284 aa, DROSOPHILA
MSRSLSRVLGTIWAPSLSISHTVHRGSNRLNDLLSTKVTNTAIIPVARYSKRNGPPSDAGGYFKTVKSRDLDDDDELNSLESEPNWELTAERGNRFYLPNGIGPAWQGDSTTVGLLEPLGHLVNFHKGPNTDKSRLEFTCCKCPLLIRVPLLEIFPVPVVAQQCINITMLVLSHEGDIEMGAAKFVLAAREMCDRLLSYGYWADFMNPFSGRPFFLPREGANLYRLDSRFRGLNMRLSEQNRCTVISAEKNDSTRFSGTIYSTAPNHYGQLMKLLVPPPHKVAH

SEQ ID NO: 3649 - DNA, 5637 bp, DROSOPHILA
tgaaggtcgatagccggcatgtggtgctcatcacgggctgcgattcgggattggggtaagctaagcgaagcgggagcaagtggagcctaataacgcaatgatctcgatagccactccatggcagtttactgccacgaatcgctgcacatgaccgtgatttcctgctgccacaacatcaagtcggaaggagctaaactgctgcagggcctagcctcggccaaggatggactgagcagaatgcacaccttggaactggatctattggaacccgattccattcgcctggtgcatcgccagctaagggacatactggccaaagaccccagctatcggctgacggcactgataaacaatgctggagtaatgtgcttcggggaattcgagtggcagctaacggagcagatcgaggcgcagatcaactgcaacctgctgggcaccatgaggctgacacatgaactgctgcccctgctccggcagcagcagggcaggatcatcaatgtgaccagccactgcggattgcaggctctgccggcactgggtccttatgccgcctccaaggcagcccttcgcttctggacggattcactccgcgtggagctgcagcagtatggcatggaggtggtcaacttcataccaggctccttcgtcctggacagcaacattgcggccagacagcagcagcatgctcagaagatgcgcgaagccttcagtgcggagcaacacgctctgtacgacacttacttcgaggccttcaatggttatctgaaagtactgagcggcttcaagccgcccaatcgcctgaggaacgagtcgctgctggcaaagtttaaggatgcattgaccagctcacaacccttggctctgtacatcgaggaaccccgtagatatcgcctctatcgctggctctttacgctctgccccactccgctagtggattggctcacggtgcgtttctgcgcgatgcccacctacgagtcaacgaacaggcaggagaagatttagattaatccgtagtctatacattttaaatatacattgtagcacattggaatacttggctaagggctgtggcaaataaaacgagctgaatccagggaatggaaaacgccaaaatgtgatcacagaacgcaactgggtggtggtgtctagaagacatagccgcgacagcgctcgaacaccgcatcgttgagcagctggaaccactcgctggcataggtggagtcctccgctgcccggaacagctgaagcttttcctgcgcgggcagcgcggagcagagataaaagctgatggcagtttccgtcaggtcggcatggtagttcttcagcgcccactcgagcaggcgcaggcagttgtgtgagtccaggtactggatgagtctttgctgcaataccgcctccatatcgggcatgatgtacacgcgggccatctcgtaggcctgcagcagggcggggtaatccggctcggttagatgccgctcctggcacacgattaaatgcagaaagtagcgcagtccactggcagtgtaatctggcagctgaatctcgccttggtgaccctcgcggaaatcactgttgagcatcttgttgaacacttcgctggtgtcgcagagcagctgcttattaaacccaatggaggtggaatccgctccatgaccaacgaggaatcgcatgtcgcagttggcgtgcagcggtgcggtatcatttgcaatttggttgcagattcctgctgtactctccgctggttcggcttctggcataacgatgcccagggtatatcgcgccatcgatgtcaccgcatccgccgcctcatctgcgtagtggtcctcggtcttcttgcgcagcatcatgtcgaatagcatattcagcgcattgccgtcgtacaggaactgatagagcaatcgatggcttttaactatgtaggccaccgaaatggcggctctctgttgggatatcacatcgtcgcagcgcaggagacgcactagctcctccttgccataattcgattctcccacattggttaacgtctccaagaaggcgaagccgtctttgcgaatctgaaatatacgtgcggtgttaactgtgatgaacattagatgaatgggctcactttacctccttcagcttggtaaactggtacagttgatggaccacgccatgctttattatctgggcaaagaactggctctcactgaaaggatatacgtgcaattagaatacatgcttatccttagttcagcttgacaacttacagtagaatatttgtcagggcatttgggaaattattgttcgatccaaacaatttgatggctctaatcagagtgtcgagcgtctctggctttcccagctccactcgcttgttcaccatcagcgtgatgcgatagataaggttttctattatgtcaatggtgttgcatgttgtattgcggaacggggctagtttcggtggtacatccgagctcagttcctcgagatcctctttgtcggacagcggatcatctatgggttcgctgccctcctcaattagtttcagtatatccagaacattcgaaggctgcgaacgattggcggctatgcgccgctctcttgtgtccaaattgctattatttgtgctgtcatcctcatcttcgtcgtcatcactgcacgccggagaatagttgtcgtcgtcatcattcgtcagcagatctgtgcacaccggtgacatgctgcgcgaactgcagggactggttgtgcgataagacctaggtgaactgctcggcgattcaaagtccgatcctaaggtctcgtgggtttttgagaacttgtgtgcaaaaagtgggtataattagcaagtggcttgtaaacatatgctagctgctatgctgctaaataaataccttgctcagcgtctctggcgttgtgggatccgtcagttttctttttttaccaccttgcagtctctcgtctcgtcgacgtttgtgatgctcatcatcgctggtcaggtaatcgtttagttcccgcaccaacatgggcattagtccttcatacagcatgagttccatgcttaagttatcatattggaagttgtaaagtatgtgaaatagctgttgggtatgaagaaagccattatatatagcagatgtcaagagggatttggtttccatctcaccgatgatcgctcgctctgcgagttggagtcccggatcatggccaccagcttgcgcagtgccccacatctccggatcttcgagcggctgcaggcatcggtggatagcgtcaagattatgttgatgcagtgccggctctcgctttcgctaagtggctttgccatgttcacagccatgagcatctcgcaggcagccacaatggcatccgcagtgctcagcatgtagaaggcgaagggatccttgcagaagttagagaggattttaagggcagaggcccgttggtcgccgtcctcctttacgaagcacacaatggaggcgagcgaggtattccaggaaatggactaacaagaaatgtttattatgtactacgttttggagaacttagaaaacagtctcacctcccaaactttcagtccaatttgctgcgcggatatcaggaccagacacttcagaatctcgagggccagctcaacggccgcttcattttccttgggcagcgcatagtcacagttccttgtggaattcttgagcatctggtggtcaaagatgtcactgcgaacaccctccaaattccgggctacctcctcgaaatacttctcacggtgctggttcctcttcaggccaatcagcgtggacatctcgatgtccggaacgggctccttggatgcctcttcgttcttcatcacggccagaaaaattcgcatcagctgctggaacccattggccatgaggaagtacttcaggaactggctgctggccagaaggaaacggcagacgcggaatgccatgatgcgggtctgcaccgcactggtggactcaatgatgtggcagatggccggtgcaatggccgcatagtgcactgtgagacactgggacgccttcttgctcttggcgatgtttccaagcatccggcaggcgcggcactggatcaggggattaggtatggtcttcagaatggtcaccagcgggtgaatcaccttgcattcaacagccttaaagtggaaagttttaaatttttttaaccgttgtggttcaaaataaagataaaaatgtaatctgataatcccacctcaatgcaggactgttcgtcggtgcagcagttccccagtatgctcagtaccacctccattatcttttcattcagcttggtgatcagtcgcacctggaagacgcaattaataatgatttaaaaatcgattcgaataacgatcctatgtgagcggcagtggctgtcaaaccaccatgagcgttgtgactcccaaacccaccatgatgtgaacgcccccagcagtgcgaaataaaacaatgccatttttatccttcaccagatcggtgcgcagcttcaccaggcatttgtaaatgactgttcgatccgtggaggtctttagcacttccagcatgctctccacttgctctggtgtccagaacattggtaattttcttaatttttaaacaaattgaaacaattcaacaaattctacagtgcgtctcaaacctctttgagagtgtgaccgtgcataagagcgtattttacggtattttacgttatttttcgaaaatccagcagcggtctgccttatttataaactgatgtttacgttttagctttggatgcgaattcgattctacaataataaatggaagcaggcctgttttttatgtagattatacaagttcccacaaaattacctccaagcttttaatttcaaattattttaatattttttaaaacccatttaataatttttcctatatttatttactttctttgtttaccgtaatcgtgacacgagggctgaagtgtcatcaccaaatcaggcgctatttggtgtttttcaactgccaacaacggtcttacagaattaaagacaaaaacgcaatcgactaaagtaattagttaataactagctgtctttgttgcgcgtaaacacggactttccccagaacgaagctaatttgcccaagtcgtgcatccaagcttttcacagatttggaaaaacctgtttcgcagtgcttgtgactcatcagttttcgcaggctcaaggagagaacttagccatggacgccactaacaatggagaatccgccgaccaggtgggcatcagggtgggcaatccggagcagcccaacgatcacacagatgccctgggctccgtgggatccggaggagcgggtagcagcggcctggtcgcaggatcctcgcatccttacggcagcggagccattgggcagctggccaacgggtacagctcaccctcgtccagctaccgtaagaatgtagccaaaatggtcaccgaccgccatgcagccgagtacaacatgcgccacaagaaccgcggaatggcactgatcttcaaccatgagcacttcgaggtgcccaccttgaagtctcgcgcgggaaccaatgtggactgcgagaatctgactcgggtgctcaagcagctggacttcgaagtgaccgtgtacaaggactgccgctacaaggacattttga

SEQ ID NO: 3650 - DNA, 3089 bp, DROSOPHILA
tttgagacgcactgtagaatttgttgaattgtttcaatttgtttaaaaattaagaaaattaccaatgttctggacaccagagcaagtggagagcatgctggaagtgctaaagacctccacggatcgaacagtcatttacaaatgcctggtgaagctgcgcaccgatctggtgaaggataaaaatggcattgttttatttcgcactgctgggggcgttcacatcatggtgcgactgatcaccaagctgaatgaaaagataatggaggtggtactgagcatactggggaactgctgcaccgacgaacagtcctgcattgaggctgttgaatgcaaggtgattcacccgctggtgaccattctgaagaccatacctaatcccctgatccagtgccgcgcctgccggatgcttggaaacatcgccaagagcaagaaggcgtcccagtgtctcacagtgcactatgcggccattgcaccggccatctgccacatcattgagtccaccagtgcggtgcagacccgcatcatggcattccgcgtctgccgtttccttctggccagcagccagttcctgaagtacttcctcatggccaatgggttccagcagctgatgcgaatttttctggccgtgatgaagaacgaagaggcatccaaggagcccgttccggacatcgagatgtccacgctgattggcctgaagaggaaccagcaccgtgagaagtatttcgaggaggtagcccggaatttggagggtgttcgcagtgacatctttgaccaccagatgctcaagaattccacaaggaactgtgactatgcgctgcccaaggaaaatgaagcggccgttgagctggccctcgagattctgaagtgtctggtcctgatatccgcgcagcaaattggactgaaagtttgggaggaggacggcgaccaacgggcctctgcccttaaaatcctctctaacttctgcaaggatcccttcgccttctacatgctgagcactgcggatgccattgtggctgcctgcgagatgctcatggctgtgaacatggcaaagccacttagcgaaagcgagagccggcactgcatcaacataatcttgacgctatccaccgatgcctgcagccgctcgaagatccggagatgtggggcactgcgcaagctggtggccatgatccgggactccaactcgcagagcgagcgatcatcgctatttcacatactttacaacttccaatatgataacttaagcatggaactcatgctgtatgaaggactaatgcccatgttggtgcgggaactaaacgattacctgaccagcgatgatgagcatcacaaacgtcgacgagacgagagactgcaaggtggtaaaaaaagaaaactgacggatcccacaacgccagagacgctgagcaagttctcaaaaacccacgagaccttaggatcggactttgaatcgccgagcagttcacctaggtcttatcgcacaaccagtccctgcagttcgcgcagcatgtcaccggtgtgcacagatctgctgacgaatgatgacgacgacaactattctccggcgtgcagtgatgacgacgaagatgaggatgacagcacaaataatagcaatttggacacaagagagcggcgcatagccgccaatcgttcgcagccttcgaatgttctggatatactgaaactaattgaggagggcagcgaacccatagatgatccgctgtccgacaaagaggatctcgaggaactgagctcggatgtaccaccgaaactagccccgttccgcaatacaacatgcaacaccattgacataatagaaaaccttatctatcgcatcacgctgatggtgaacaagcgagtggagctgggaaagccagagacgctcgacactctgattagagccatcaaattgtttggatcgaacaataatttcccaaatgccctgacaaatattctacttgagagccagttctttgcccagataataaagcatggcgtggtccatcaactgtaccagtttaccaagctgaaggagattcgcaaagacggcttcgccttcttggagacgttaaccaatgtgggagaatcgaattatggcaaggaggagctagtgcgtctcctgcgctgcgacgatgtgatatcccaacagagagccgccatttcggtggcctacatagttaaaagccatcgattgctctatcagttcctgtacgacggcaatgcgctgaatatgctattcgacatgatgctgcgcaagaagaccgaggaccactacgcagatgaggcggcggatgcggtgacatcgatggcgcgatataccctgggcatcgttatgccagaagccgaaccagcggagagtacagcaggaatctgcaaccaaattgcaaatgataccgcaccgctgcacgccaactgcgacatgcgattcctcgttggtcatggagcggattccacctccattgggtttaataagcagctgctctgcgacaccagcgaagtgttcaacaagatgctcaacagtgatttccgcgagggtcaccaaggcgagattcagctgccagattacactgccagtggactgcgctactttctgcatttaatcgtgtgccaggagcggcatctaaccgagccggattaccccgccctgctgcaggcctacgagatggcccgcgtgtacatcatgcccgatatggaggcggtattgcagcaaagactcatccagtacctggactcacacaactgcctgcgcctgctcgagtgggcgctgaagaactaccatgccgacctgacggaaactgccatcagcttttatctctgctccgcgctgcccgcgcaggaaaagcttcagctgttccgggcagcggaggactccacctatgccagcgagtggttccagctgctcaacgatgcggtgttcgagcgctgtcgcggctatgtcttctagacaccaccacccagttgcgttctgtgatcacattttggcgttttccattccctggattcagctcgttttatttgccacagcccttagccaagtattccaatgtgctacaatgtatatttaaaatgtatagactacggattaatct

SEQ ID NO: 3651 - protein, 959 aa, DROSOPHILA
MFWTPEQVESMLEVLKTSTDRTVIYKCLVKLRTDLVKDKNGIVLFRTAGGVHIMVRLITKLNEKIMEVVLSILGNCCTDEQSCIEAVECKVIHPLVTILKTIPNPLIQCRACRMLGNIAKSKKASQCLTVHYAAIAPAICHIIESTSAVQTRIMAFRVCRFLLASSQFLKYFLMANGFQQLMRIFLAVMKNEEASKEPVPDIEMSTLIGLKRNQHREKYFEEVARNLEGVRSDIFDHQMLKNSTRNCDYALPKENEAAVELALEILKCLVLISAQQIGLKVWEEDGDQRASALKILSNFCKDPFAFYMLSTADAIVAACEMLMAVNMAKPLSESESRHCINIILTLSTDACSRSKIRRCGALRKLVAMIRDSNSQSERSSLFHILYNFQYDNLSMELMLYEGLMPMLVRELNDYLTSDDEHHKRRRDERLQGGKKRKLTDPTTPETLSKFSKTHETLGSDFESPSSSPRSYRTTSPCSSRSMSPVCTDLLTNDDDDNYSPACSDDDEDEDDSTNNSNLDTRERRIAANRSQPSNVLDILKLIEEGSEPIDDPLSDKEDLEELSSDVPPKLAPFRNTTCNTIDIIENLIYRITLMVNKRVELGKPETLDTLIRAIKLFGSNNNFPNALTNILLESQFFAQIIKHGVVHQLYQFTKLKEIRKDGFAFLETLTNVGESNYGKEELVRLLRCDDVISQQRAAISVAYIVKSHRLLYQFLYDGNALNMLFDMMLRKKTEDHYADEAADAVTSMARYTLGIVMPEAEPAESTAGICNQIANDTAPLHANCDMRFLVGHGADSTSIGFNKQLLCDTSEVFNKMLNSDFREGHQGEIQLPDYTASGLRYFLHLIVCQERHLTEPDYPALLQAYEMARVYIMPDMEAVLQQRLIQYLDSHNCLRLLEWALKNYHADLTETAISFYLCSALPAQEKLQLFRAAEDSTYASEWFQLLNDAVFERCRGYVF

SEQ ID NO: 3652 - DNA, 3015 bp, DROSOPHILA
aactttatttgaatggagtccaaggaaaccccaaaaacaaacccaacagcaatcagcaataagcgtcagctaatctaaagatacaaaatggaaagtgcataattattaatttaagtgagagaagcaacagcaacataaccgttactagcaaacctgcaatatgcataatgcaacaatcgccttgcaacgctcaaaaatggataaccgaaccgtgcctcccagctggcgatgctgctgatgtcttgaagcataataccattttaatatatatttttaaatgagaatagcttagtcaacgaaaaacaagaacagaagcaagcaaagcattgaatgtaaaaacgtactaaacttaaatgataatttgtgaacttttgaacaccaaaatagtcgaaaagaaagtgtttataattataattgtttaacaaatatatattacgtaaaatagctaaatcctgttgtatttgtatgagaaatattcgttgcaaatggtgaaaattctcaatgtgattggtatcacaatcttaagaattttgttattgcctaaatgggcaaataaaaccaaatactccagctgaaattcaaaaattgcggccgatttcagtgcatcatgagtgcaacgatgcaccaaatggaaatcgtagatatgtatgtacatatatagatatatggtatcgatagcttttcatctggtatcagggttccattgacgtggagaacctttgcgatttgcaaggcattcccgcactacgtgagtttcctatcgatatcgaagaactcgcagatacgcagagtatttactttatacagctaatggagtggttaaatttctggaaaataaacccctttcatggaatttcacccacacccatgcttttccggcgccttgtgataagctcgcatggaggagttacttgctccgatatttctggagcccatccctagcggctggccataaaaccctgataatcttctggtcgactggctgaaccatccagtgaaccatccattggcccacgattagattgctaaagaaatggccagtgcacggaacctattgttgctatcctcgtcgcgtttgcacggccatggatacttggagcatgcgcgcggccagctggaggatctcttcaagaggtaggtgacttaccatttgagatatgtacattattattcttttacaacaaagtgaattctttcattggtaaattgaacaaaccctccgattccttgcagtgccaatgtgaagaccgtgctctttgtgccctacgctctgcgggatcacgacaagtacactgccaccgtgcgcgatgcactgcagccgtggggattcaatgtggagggactgcacacgaagccggatcgcgagcaggcattgcgggaggcacaggccatctttgtgggcggcggcaacacctttgtgctgctgcgttcgctctacgagatgaagttgctcgatccgattagggaactggtgctccagcgtggattgccttacgtgggcagcagtgcgggcacaaatgtggcaactcgatccattcacaccaccaacgacatgccggtggcctatccgccgagctttgaggcactcgccctcgttcccttcaacatcaatccgcactatctggatccggaggcgggtagtcggcacaagggcgagacgcgagacgagcggctggaggagttcgtcgcataccatggactgcccgtgctgggtcttcgcgagggcaccagtgtccgggttcagggcgagaaggccatcctcctgggcgatcgcaatgccaagctgttcaaggcgtaagtacacacttccaatcggacaaattgggtttcatggtttcttacattcaaataactttaatgttatttatacaatttaaatgtaatttattttcgtttatttttcagtgacggtggcaccgaggagctagcacccctagcggatctcaccttcctgctgcagaaataaccaagcaaaacgatcgaattaaagagaacattgatgtttattgtacatatgcacattcataatttgttttattctgcaataacaacaattcctacacgtaagcagtacacatacagtagttgtacactatgactaaatgtataaaaagtttggatagaggtataacccctgacgagtgtacatatatctaataaattttgtaataaattaatcggatttcccctcgtaaatcgtaatgataagaatttgactggcagacttcttattcgatgctaaaactgatgtgctggcaaaatgatcaaatggataacatggatacactaacaatggacatcggctaaatgaaactggcaagcacttaaacaatatatatatttttttttatttacaatgggctttttcattgccacaaaagccctgatagctagcaatacttttggattgttattttgtaggcaaagtttcgatagaattatggtttatgttttcaggcagccgatgctaagacttaagctctaacttttaaagaggaacacggtcaaagtaagcactccccgatttagaccagttttttaacagtaattcctttttgttttttgtttttttttttggcacaccgtctttgagagagcccatttatacagggattgtaacactttgaggcaaggcggcatctggttatttgtcgtacagccaaatcgttcgtttcacttagattagtttagttgtataacacttagcttaactagtcgtttaaataggagtcaatggtgcaatgctgcctgcgtaacttattaggaatcgttaatagagatatgtggcgtatgctaagtatttacatgcgaaaatcgaatgtctgttgaatggctcgaacaacaagtgtcccacatttgtcctacgagttttggcagctaaaactacgctacgttaataactaactaaccaactaactaattgctgtgtctaccatttttgagcattgaaagtttcactttaaagcaagcaacaacgggaatcgcctaggcccaaaacactaagttcggattgag

SEQ ID NO: 3653 - DNA, 805 bp, DROSOPHILA
catccattggcccacgattagattgctaaagaaatggccagtgcacggaacctattgttgctatcctcgtcgcgtttgcacggccatggatacttggagcatgcgcgcggccagctggaggatctcttcaagagtgccaatgtgaagaccgtgctctttgtgccctacgctctgcgggatcacgacaagtacactgccaccgtgcgcgatgcactgcagccgtggggattcaatgtggagggactgcacacgaagccggatcgcgagcaggcattgcgggaggcacaggccatctttgtgggcggcggcaacacctttgtgctgctgcgttcgctctacgagatgaagttgctcgatccgattagggaactggtgctccagcgtggattgccttacgtgggcagcagtgcgggcacaaatgtggcaactcgatccattcacaccaccaacgacatgccggtggcctatccgccgagctttgaggcactcgccctcgttcccttcaacatcaatccgcactatctggatccggaggcgggtagtcggcacaagggcgagacgcgagacgagcggctggaggagttcgtcgcataccatggactgcccgtgctgggtcttcgcgagggcaccagtgtccgggttcagggcgagaaggccatcctcctgggcgatcgcaatgccaagctgttcaaggctgacggtggcaccgaggagctagcacccctagcggatctcaccttcctgctgcagaaataaccaagcaaaacgatcgaattaaagagaacattgatgtttattgtacata

SEQ ID NO: 3654 - protein, 240 aa, DROSOPHILA
MASARNLLLLSSSRLHGHGYLEHARGQLEDLFKSANVKTVLFVPYALRDHDKYTATVRDALQPWGFNVEGLHTKPDREQALREAQAIFVGGGNTFVLLRSLYEMKLLDPIRELVLQRGLPYVGSSAGTNVATRSIHTTNDMPVAYPPSFEALALVPFNINPHYLDPEAGSRHKGETRDERLEEFVAYHGLPVLGLREGTSVRVQGEKAILLGDRNAKLFKADGGTEELAPLADLTFLLQK

SEQ ID NO: 3655 - DNA, 3008 bp, DROSOPHILA
ttcgattggtgcgagtgcgaatacgattttcacggactcttgaatacaaaaatcaaacgaatataggcccatgtgtatgatgcactgagaaattttgaattgaattcattagttaactgttgaaaagtttaactcagaaatttgaacttatattattttattatgaaataatagctgcttcttgggccaacatggcggatggccacataaggccacataaggaaataccaaaaaaaaataaatgtagcctaaattaccgataaaaagcggtaaaatctcgcaaccaaaaatcgacactgatgagctgccaatatgtgagtcctggcccgggcttaatttattatttcagctatttcctctgatttttcctaccctctttggtttttttttttccattttcccgcatggccattcttacacggccacttgaatggacggtaattgagggcattatctcagattggctgggagatttcgaccagggacattttgtccgcagccataaaataacgctgaacatcgtttgagcttgtccaaaaacaaacagatgccaagaggttaactaatggaatttcactgactagacaatactctactgggaaacttgtgcaaaaagttgatttagaagttgaatcttattatcttaaaaaattgtgccacatttgactgatttgaatagatatttttttataatttatatcttttagctaataactgaggaacgaagacctgcgaatttctcagaacagtgtatctaagagtagtgtagagtacttttctattggattattatgtgttcaggttatgcgctttggccaaaattgttgggcgtaacccactgaaattgtcttctccaattacacacacccgtcaccttttcgccattctgtgcttcacttttcacccacttgtcttccattaatatatgtatctccatttctggattttcttttgggctcaccccgaacaggtctgcgccatccagcacgtcgacgtttgcatgttcaacaacggcaaattcaagaatgtggtggccgattcggataatgtaacaccgccggtggatcgcacagtggccgctggagcctcgttgaacaccacggtgacgctccgtccgcaacgcggtcccaccaagaactggatcgccctggaggacactttgcagcggagcaccgagccggaggagatcaccggcgccattgctgcttcggccatccgctcgcctcactttgtgatgcagaacgcccagctgttgggcggttgcggccatccgttgggcagtccggccctggttactccacatccacacctctggcagccgggctcgcaaggtcagggtcagcctggtaatcccaactccggcggcggcaatgaggagcgcaacgtgttcgccatctatgtgtcctactatgtcaaggtgaagctcaccctgagcggcatgggtggcgagctgtccctgaagttgcccttcgtcctggtccatgtggatgagacacagcgtccggggtttgcctccgctacgctgggcgagctgcgtatggagatggagcgtctggccctacatgatgcacccgtgggcaagcgtaatggtcgacgccaggcacagcccacttccgcggagatcggagatggaccctccaccagtgcggccgccgccgctgcagccgctgctgcaaagtcagcctcccaatcctctggccagtcaggcgggcatctggacatgatcgagagcctggacgatgaattcaacatcacggttccggtgccaaggaacggctcccataagcggcgcttgcagcgcagcgagaccttggcccgcgatctggaggagcacgaggagcatggtccgatgcccgaggaagaggaccatatcgttcagatccatttggagcaggtgtcaccagacagggacgaaatgcagcaggaggagcagcgtgtgcaggaggagcaggtgagccacgcacccggagccgagaccggtgcagtccccaagtcatcgaatgtgtgattctgattgtggtcccagatgtttgccaaacgcaagaggaagccgtagtaccggattcccaaactcgtagcataggaatagtccaaagtccaattaccatttccgaggacgcgaaaatcgatcggacaatacagttttttttttcgttcttcaaccgatcaaccgatatatagttatttatattttggttacatttctagagcagtttcctgttcttatttaagactgttaaacagttttgtgctctagcaataccattcaaacgtccaaacactattaatttgtgacaaatattataacgtacgtctattgaattgcaggtttgaagttgtttaataaagacgctataattttttcgattcagcagcaaagtttaaaaataaaacttttcgacctaagctgcttcaaatgttttaaaacgtttttaaaagtataagcaccaactctcgtagttgcggccactgtaaattttaatggataaccattcagtttcggtttcagcagtcaaatgtccggagttagaagatagttaccgtacccattatgaagggtgggaattcgaaagaaggagtatataggtattaaaaagtagatggtttccaaaatcggagagaaagaaatccaaaaatgaattagatggcaacggcattccctaggaattagacaatgaattgaggtgaaatttttgcagtttgattaaaacggatgtgaacgagttgcgacgaaggagttgaaattgaggtagtcgtagatatagttaagatttattatttgatattagccatgcaatgcgttgaaattgatgatattttgcgtggattggcaggaatgtgtggctatgttataaaacggcatcaacagtattgaaattgaaaggcaagccaacccaaaagcaaaatcaaaacatatatatttacatagatcgtaagtgagtgtggttcgatatgcaattaagcattaatttacaaacaaaagtacacgaaaatgccaattgaaagcc

SEQ ID NO: 3656 - DNA, 1008 bp, DROSOPHILA
atgttcaacaacggcaaattcaagaatgtggtggccgattcggataatgtaacaccgccggtggatcgcacagtggccgctggagcctcgttgaacaccacggtgacgctccgtccgcaacgcggtcccaccaagaactggatcgccctggaggacactttgcagcggagcaccgagccggaggagatcaccggcgccattgctgcttcggccatccgctcgcctcactttgtgatgcagaacgcccagctgttgggcggttgcggccatccgttgggcagtccggccctggttactccacatccacacctctggcagccgggctcgcaaggtcagggtcagcctggtaatcccaactccggcggcggcaatgaggagcgcaacgtgttcgccatctatgtgtcctactatgtcaaggtgaagctcaccctgagcggcatgggtggcgagctgtccctgaagttgcccttcgtcctggtccatgtggatgagacacagcgtccggggtttgcctccgctacgctgggcgagctgcgtatggagatggagcgtctggccctacatgatgcacccgtgggcaagcgtaatggtcgacgccaggcacagcccacttccgcggagatcggagatggaccctccaccagtgcggccgccgccgctgcagccgctgctgcaaagtcagcctcccaatcctctggccagtcaggcgggcatctggacatgatcgagagcctggacgatgaattcaacatcacggttccggtgccaaggaacggctcccataagcggcgcttgcagcgcagcgagaccttggcccgcgatctggaggagcacgaggagcatggtccgatgcccgaggaagaggaccatatcgttcagatccatttggagcaggtgtcaccagacagggacgaaatgcagcaggaggagcagcgtgtgcaggaggagcaggtgagccacgcacccggagccgagaccggtgcagtccccaagtcatcgaatgtgtga

SEQ ID NO: 3657 - protein, 335 aa, DROSOPHILA
MFNNGKFKNVVADSDNVTPPVDRTVAAGASLNTTVTLRPQRGPTKNWIALEDTLQRSTEPEEITGAIAASAIRSPHFVMQNAQLLGGCGHPLGSPALVTPHPHLWQPGSQGQGQPGNPNSGGGNEERNVFAIYVSYYVKVKLTLSGMGGELSLKLPFVLVHVDETQRPGFASATLGELRMEMERLALHDAPVGKRNGRRQAQPTSAEIGDGPSTSAAAAAAAAAAKSASQSSGQSGGHLDMIESLDDEFNITVPVPRNGSHKRRLQRSETLARDLEEHEEHGPMPEEEDHIVQIHLEQVSPDRDEMQQEEQRVQEEQVSHAPGAETGAVPKSSNV

SEQ ID NO: 3658 - DNA, 3182 bp, DROSOPHILA
gaggattccccctagctcatccatttttagaatttattattatgttatagttgaaaaataatttaaataaattaaacatttgatttgtatttaaagctctttaagcgaggttttcaaatcatggccatattgtagctgctgacttggagaagcgtataggtaagcacctctacgaacatctccaggcgagcggcaagactcccggtggcgagtatctcattgggattgggcagctggaggctgttggagcgcaggtagttgagctgttccatattggcggctatggtcagaagcttctcctgctgctcggatgtaaaagcatctggcggagactcaccgccggttggcatgagcttttccagctgctgcgcaaatccatggagctgcgtcagcttctgcttgtatatggattctgtggtgtccagagcggctgcctcgtcgtagatcttggccagctttcgctggaaacccttaaaatcattgtacacgtccacggcactgcgctgctcctccagacgcgtcagactcagcgaaacgttggatgtgttgatgcccatggccaccgactcgtctgctcctcgcaggagcgttgagttggtacgttgtagctcccgcttcttgggcattttctgcaggttggccgggtactcttccaaggtcttgaagagctccgcatagtcggctaccgagctaagatccctcgggggcgtagtggctgctgcctcctcctccatcatctgctgcaggctgtcaaagaaggcccccggtttcatcaccgtcttggatacgcacacgtcctttaggtttctcacatgttgcgcgtactttctgtacaacttggatgaaatgctgctgaaatctacattagtttccatttttattgtttacgcttcacttctcctttgataacttcgtttgaatggcctgcgccgcatctatcggaaatcgataacgcaagctgtggcggtttaaatttgaaaacaaaagttctatacaaattatgatcgcttacggattacttgggtttttatttttaaaagcacaatttttagagtgcactacacgtatttcaagtcttcagtggttttaacgagatcttaatagggagtttataccatatgaaagtttggactaacatggctgtttgaattctgagtctcagaactacaaggtgcatctcatccatactcggactgaacggtgagcgaaaactgacccttgggaattgaattggcatggtaccagatgcgtgtgtccaccaacacagcatctccgggctccacatagaaggagaagggctgacactggtggtcacattcaggagcaggtgccagaaaccaggtcttgttgccacttaactgagcttgccacaacaggcggggaatgtaatcaagctataataattgaaagattagtcataatattcgttgatttcttggtttttacttacatgcatcacagccccttgctcgtagcccattaatatgaagtccgtgtgaggcatttcagcatcgaagggcaggaaatgcgggcggggatacagctttctgagctccgccaggacggccggctggcagacactccagcccacgaaccagggcactccttgagtaagatttgaacgctccgcggacatggaaaacacatgcttcagcgacttgagatcagagttgaagtgcagaaactggcaatctgagtccattgctcccgggacactttcgtacaattcttttatgaaggcaaagctgaggttcttttgtgctggccagtgagccaccgccctcttcacaatgatgggcattgaggagtacgcgtgcggtgcaaactcctccatggtgagattggccaagatcaggggagccctcacccctttacaaaactcgcagtcactaatgggcctggtggcctcccataccaagtagttgttgggcagaaagcaacgcactccgagcaggaacgagatggtctcataaaagaccggggtggccaccatgatgaagaacacgatgcccagcagccagagcagattcaaccggttcgggttgtggtccatgtcgcgcgttttgcggaatgcctcctccagctcctgtgtggacaccagaccagtccgcatcacattacgatgcagagcgtccagttgatcagctaagtccggacccaagcgctcccgaaccgcctgcattcggttgcccagcgtccgcgtgggacggctgatgaactggaccgttcagccctttattattttgcatttcttcagtacttattattcctcaccagaaacatttccaattgatagtccttcccctttgttttgcttccaaacagctgagaacgataggctcatggcgcgagctcttttgcctatcgactacagagttgtcagggcttcataatttaccaaatatttcgttttggtagtttagatatttacaacttaaaatgttaatagggctgtaaatgatgtgcgggtataagtattgctttcacttatattgtcaaaaatatttaagtaatttttaacatttatacactgaactaattttagtcacgcttagtattttttctggcttcagtcacaaactgtgcccatgcactcgccagccctgtcagccgttcttcgtatattttaacggttcgcccgcggtcacacttgtcattcacttttcgctctttgctcggtcgtagtatcggccagcagctaaaaatttggaaagatcgttcgggctgggattttctgctgattagtacaaagccaacgtgacaataactcaaaaatgtgtcttgaatagtgcgtgcatttacgttttcattcatcttttatcgttcatccgggctcggttttctaatcagcactcctccttctttggctgtcaacgtgaccccgaaagctgtccttctcgcacacactttcactttgcaacaacaacaggaacaacgaacaaataacccagcataaacaattgttgtgcaacacttattagcaaaacattagagcgcctataatgtcggcgcaggaaaaggttatacgcgttggatcgcgaaagagcgaggtaagtgtgttaaaggcgacgagaactaaaatatgtgcatactacatccgcttggaattcgaattggaagtgctgcatttgaatttcaatcacattttcgtggctctctctttctctcccgtctccccctcc

SEQ ID NO: 3659 - DNA, 1052 bp, DROSOPHILA
atgcaggcggttcgggagcgcttgggtccggacttagctgatcaactggacgctctgcatcgtaatgtgatgcggactggtctggtgtccacacaggagctggaggaggcattccgcaaaacgcgcgacatggaccacaacccgaaccggttgaatctgctctggctgctgggcatcgtgttcttcatcatggtggccaccccggtcttttatgagaccatctcgttcctgctcggagtgcgttgctttctgcccaacaactacttggtatgggaggccaccaggcccattagtgactgcgagttttgtaaaggggtgagggctcccctgatcttggccaatctcaccatggaggagtttgcaccgcacgcgtactcctcaatgcccatcatttgtcccgggagcaatggactcagattgccagtttctgcacttcaactctgatctcaagtcgctgaagcatgtgttttccatgtccgcggagcgttcaaatcttactcaaggagtgccctggttcgtgggctggagtgtctgccagccggccgtcctggcggagctcagaaagctgtatccccgcccgcatttcctgcccttcgatgctgaaatgcctcacacggacttcatattaatgggctacgagcaaggggctgtgatgcatcttgattacattccccgcctgttgtggcaagctcagttaagtggcaacaagacctggtttctggcacctgctcctgaatgtgaccaccagtgtcagcccttctccttctatgtggagcccggagatgctgtgttggtggacacacgcatctggtaccatgccaattcaattcccaagggtcagttttcgctcaccgttcagtccgagtatggatgagatgcaccttgtagttctgagactcagaattcaaacagccatgttagtccaaactttcatatggtataaactccctattaagatctcgttaaaaccactgaagacttgaaatacgtgtagtgcactctaaaaattgtgcttttaaaaataaaaacccaagtaatccgtaagcgatcat

SEQ ID NO: 3660 - protein, 147 aa, DROSOPHILA
MQAVRERLGPDLADQLDALHRNVMRTGLVSTQELEEAFRKTRDMDHNPNRLNLLWLLGIVFFIMVATPVFYETISFLLGVRCFLPNNYLVWEATRPISDCEFCKGVRAPLILANLTMEEFAPHAYSSMPIICPGSNGLRLPVSALQL

SEQ ID NO: 3661 - DNA, 2798 bp, DROSOPHILA
tatatttttttgaaaaggaatcgcctagttgctggtggcgttcgcctcacttttgctaaataaaaataataatctataattaaatattttaaaactacccccaatgtgcaccttcaggcgtttaccaacaccaacaaccaaaataagatgactccgccgcacaaaaagcatagattaagtgaagttaaagccaagattcagcaagttatatcgagtttggggcaactggagcaacagagctgtggagcaggtcgcgatttcgatgtgcaccgggcggaggagctgcagcggagcacggcaaccctgctggatgaacttgaccaagtaccgggccaacaagtagtcgacgaacaaaaacaaagaaaacgccggcgacgcttatatagacgaagccaacatcgggtgatacgtgcaaccgtcaaatctgaggctgcagaacagaagttctccatagaaccgccccgaaataccgcactggaacaagcgaagcacatatccctgcgaaaacaacgcgatgctgcctccattttggagacctttgatcttctggagaaactttgcgagtctcgtggaggagacagagccgccctttgccaaaaactgacccacatgcgtcttgtttggcgcagagtccaagaagagactcaagctggccatgtcaaggagtccaagaaggtggcttcacttgaatctcaatggaaggctgtgttcttcggccgatccttgccaactcccaaattaaataaggggaaatttcttgaaattcggtatgtctagggaaatgcattgtccggcgggagctcccttttaattgcatcgctttttccagctccacatgggattcttacataagctactgtggaagaggctcctctatacccagaggatgggtgctaccgccaacaaagcctacagctcagtggataggctatcgactatccttaacttaatatcatagaaacctttccaaagctcacactccttataaagaagcaagattatatagtaattattgtggaattttatttctttagaagaatcaatctgtattcagcttagacgagggcagacagttaaagtagccgtctattcgtagatccagtccttggcggccggggtccaggtgaccagctccttttcgttgaaccacagggcgatctccttctcggcagactcgacggcatcggagccgtggatgatgttgcgtccgacctgaatgcagaagtcaccgcggatggtgccgggcagcgagtcggcggggttggtggcgccgagcatctggcgaccggtcttgaccacattcagaccctcccacaccatgggcaccacggggccggagttcatgtagttcacgagtccggggaagaaggggcgggcggacagatcagcgtagtgcttctccagcagctccttggaggcctggttacaaaacggttcgttatcagttaattgcagttctgacctctaaacacatgtcattccgcgatgacgcctgcacccagcctttgaggttaggtccgatggcaaccccgcgtggggcaacccgtttccacgtatttatatctattgatttcttcctaattcaattatccgcttacccaggtgaacttcagggcgaccagcttgaagcccttctgctcgaagcgctcgatgatcttgccgacgagcccgcgctggacgccatcgggcttgaccatgatgaaagtcctctccttgttagccgccattgtcgccgagattacagaaaagaatgccaaaattgtgccgagcatcaggagcttcatgtgttcgccgttgcaaaaaaatcccgaatacgaaatgccggcaaggtgaattgtgggaaatcgtcaagtggtcacactgggcagccagccgcgttcttgagtttttgtttttgttgggcgatttaaaggataggaaaatacttgttatttaaattccaaagcggaaatttgagtgcattgctaaagtattcatatttttttcagtttataaccgctcaaatggggctgccatgtcgccttgtactttgaatttcagaatgtattctgaatgcatttcatcgaataatttaaagcaaaaataacgaaaactcaatagtattatttttaattactagacacattaaaacatttaaaaaaaaacaaagagttgcccacagttgatgataaaatgcccgtcaaactaggatagttactaggcactcattagcatcagcattcccaccagttgattcatccatccagcaggttaatcaaaaaccacagggaagtcacgttcaaatttctttttatgtctcgataagattaggtccatgtgatcacagaagtgacaaaacaatacaagtttacgactaatatatacacagctggtagatgcaaatgttcggcgaaaatcacttggtcgcgtctagtttggctaggccgtcggcatattggaactccggactgttctcgtactcgcacatgtccagggcgatgacgcagctctccttgaccacgcgcttgtcgtcctcggcgtagcggttcaagatctgaatgcagtcctctgtggcgatggcgccaagggcctcggcacactcgtgacgcaccatttcgttttccaggcgatcctccagattctcttgaaggaagggaatgctgcagggttcttgcagctggcccagtacgaaggccacctcgtggcggaagagggcggaagagtccttaagtccctcggcaatggccaagacactctcttcggtgcgcagattgcgcaggctgaacatggccctatatcgatcgaacaggctctgctgg

SEQ ID NO: 3662 - DNA, 619 bp, DROSOPHILA
gcaacggcgaacacatgaagctcctgatgctcggcacaattttggcattcttttctgtaatctcggcgacaatggcggctaacaaggagaggactttcatcatggtcaagcccgatggcgtccagcgcgggctcgtcggcaagatcatcgagcgcttcgagcagaagggcttcaagctggtcgccctgaagttcacctgggcctccaaggagctgctggagaagcactacgctgatctgtccgcccgccccttcttccccggactcgtgaactacatgaactccggccccgtggtgcccatggtgtgggagggtctgaatgtggtcaagaccggtcgccagatgctcggcgccaccaaccccgccgactcgctgcccggcaccatccgcggtgacttctgcattcaggtcggacgcaacatcatccacggctccgatgccgtcgagtctgccgagaaggagatcgccctgtggttcaacgaaaaggagctggtcacctggaccccggccgccaaggactggatctacgaatagacggctactttaactgtctgccctcgtctaagctgaatacagattgattcttctaaagaaataaaattccacaataattactatat

SEQ ID NO: 3663 - protein, 172 aa, DROSOPHILA
MKLLMLGTILAFFSVISATMAANKERTFIMVKPDGVQRGLVGKIIERFEQKGFKLVALKFTWASKELLEKHYADLSARPFFPGLVNYMNSGPVVPMVWEGLNVVKTGRQMLGATNPADSLPGTIRGDFCIQVGRNIIHGSDAVESAEKEIALWFNEKELVTWTPAAKDWIYE

SEQ ID NO: 3664 - DNA, 3725 bp, DROSOPHILA
aaaatgtatatatgtatacaaactaatattgaaggccttagcaagacttctaacacaccagaaaacaatgacgagaattgcataaacatgcaaaaattcgatgagcttcggttattatgtgtgcaatacttgctttttacaagttccggtcagaattatagtttgaggctatatgagaatacacagcgtacgcactttaacccttttcatatattctatagacgactatggtttttataaaaaaaatttaaacacaaatgtatgaaactctaaataattggattgttgtcctgttgttcatttgtgaaaattggtctatccactttcaattgatctttgcttgtaggcaataaccgctgacgaaacagttcgatggctattcaaaatcttgtaatgcctaagcttgaccatatcagaaagttcaattacaatcgaaactcaaaacatcgacaatagacctaattaacagaagtatttgaaattgatcacatatattattagattactataaaatctggattttgaacttaaatagactttaagataattaagatgttggataattgaaatatgtatattcttaaccaaatgtttgctttacttcactattaacaacaaagcacttaaaatgtatctaaaaacaaaacaaatattcaacgacacaactgctttggaaatgtatgctcacctagtgcaagcgggcattcgatataagcaacgtaatcgaaacaacttacagtactcttgttctagggttccataattggagcatagtgtgagcgaagtgtaatttaagctacatcaaattatttaatcggtaacagtgtgttatcgaattaaacgaaaatataatgaagtaggagtaatgtaaaatcgacaatatttcattgaagaatgggtgctacaatggtaaaaccgttggtaaaaaatggaaatattttggatgcactgccatcacaggtagtataatgacaaatttcaaggatatacaaacaaaataattttttttaaggcaactctacatgtagttatgttaggtttggattctgcgggaaaaacaacggctttatacagacttaagtttgatcaatacttaaacacagtgccaactattggatttaattgtgaaaaggtatgtgttttaaagattcagcttcattgggttcttaagcgaaatttaaattattaggtacaatgtacccttggcaaagcaaaaggagttcattttttggtttgggatgtcggaggacaagaaaaattgagaccactttggagaagttatacacggtattacatttcaaattaatttaattgatgttaaaggtttattaaatcacttttagttgcactgatggcattttgtttgttattgattctgttgatacagaaagaatggaagaagctaagatggaattaatgcgtaccgctaaatgtcctgataaccaggtaagaaataacgaacattttgtaattcatccctgcgtaaaagaacaaacctgcgatttgttctatattacatcagaataataacgtactgttaagttagtttagtttatcagattctctaaatgttagtgtgtcattcacgtcttatacacaatgtgatttaaatttaaaatcaaaacaacttatttatttattaacgtaaaaaaatgaaaggagtgttgttggacatttttagcttaataatattacaaaaaccaaaaaaacttccatatggttttcatcaaaagtcattatacacctcattttgttgacttcattaagtcggcttggcttggaagaaactaaagttaccaaataggattggtccacttccacccacttcttacatagagccgcttctaaatgtaatttgtcgcctatttccttccaccattaagttatgctccaatgtattccacaagtgttcattaaagccgtgttctttgggtcattgtcctgataaaagtaaaatgaaacaattccaaaacgatctgtgctctgcttcagatttatctttaggatgtaaatgtacattttgtgtaaattgtgtacattgtggtttcgcactttcctaacgcgtttcgttggtacatgcagtggcatccatcgtaatttcagcgttttatttctttacgtattgacatactatgttaatattaatataataataatataataatataatattaatatctaattaaaagtaaatgtgaaacttaaaccgataatttttgtttattttaaagggtgttcccgttctgatactagcaaataaacaggatctgcccaacgcttgtggtgcaatggaactggaaaaacttttaggactgaacgaactttacaacccggtgcctaatatatcaatgccctctagttccgactcttctcccacaattaatttaattggctgtagagtttcaaaccaaagtattacagataaatctttagaagagaaaaaagagagtcatctgcattcgtctatgattcacataaaacctgcacttgaaagtaaagaccacaattccacgttaagcggaggagccttgacagcttttatatatccgcaatctcacaacaattctgctgtactggatcaaaaaaacccacaagatgttaaaaatggttttcataacaaaaagatgaacaggtcttcatcaaattctgtgcaatttagggggtggtatatacagccaacctgtgctataactggtgagggtctccaagaaggtttggacgctctgtatgatatgattttaaaacgccgaaaaattaataagtcaaataaaagaaatctgtagcataaataatcgaacacagtttggaagtctatcagtgttttcaaatttactcattttagcacaattaaataaataaataaaaacacaaataattgacgttttattagaatataactaaactttttaaattcactggtcggtaactttacggtaatgcgtttaaagctaacataattaataacaagagttttcaataatgttgactagcctagatcaaattgattcgattaaaaccacattttaattttattaccaaaagcttaaaaacttttttagtttattatacattaaattgtcagagcttgcaatcttattcggcggttacgaaatacacaactatttgttgacttctatctccacgaattacacttacactcaaggtaaacagaaaaattaaatgcacccattccttgatcaacaggtttcgtatttttcgctttggattactgctgagcgctttacgttaagaagttcgttagatgctattttatgcgagtgccgcttgcacagcatcttactaaaagttttttttgtttttttaatgcatatacccttttgggtctttgggagctattaatgttgttgtttcgtaattccgtcgtgaattttgcgatgaattggtaaaatgtgatagggataactatttttttttaatgaaaaaataaattttaaatatgataaagtaagttttaaaattttaaaaagacgtacataatatggaagtaaaatgttagctaacacctattttgagaccgcgtgaataggtcaaccagttatttgtgggcttagcattttgtgccatcaacaaagggtcccctgtgtttgatttacgtgcaaaaggaaagtgacagatcagaccaaaagacccaaacactgaaccagaggtataaatatgcatgtgttcgatattaaaattggcttaattgtttgcaccaatagcaa

SEQ ID NO: 3665 - DNA, 507 bp, DROSOPHILA
attttttttaaggcaactctacatgtagttatgttaggtttggattctgcgggaaaaacaacggctttatacagacttaagtttgatcaatacttaaacacagtgccaactattggatttaattgtgaaaaggtatgtgtacaatgtacccttggcaaagcaaaaggagttcattttttggtttgggatgtcggaggacaagaaaaattgagaccactttggagaagttatacacgttgcactgatggcattttgtttgttattgattctgttgatacagaaagaatggaagaagctaagatggaattaatgcgtaccgctaaatgtcctgataaccagggtgttcccgttctgatactagcaaataaacaggatctgcccaacgcttgtggtgcaatggaactggaaaaacttttaggactgaacgaactttacaacccgggggtggtatatacagccaacctgtgctataactggtgagggtctccaagaaggtttggacgctct

SEQ ID NO: 3666 - protein, 149 aa, DROSOPHILA
MLGLDSAGKTTALYRLKFDQYLNTVPTIGFNCEKVCVQCTLGKAKGVHFLVWDVGGQEKLRPLWRSYTRCTDGILFVIDSVDTERMEEAKMELMRTAKCPDNQGVPVLILANKQDLPNACGAMELEKLLGLNELYNPGVVYTANLCYNW

SEQ ID NO: 3667 - DNA, 7461 bp, DROSOPHILA
ttggaaatgtcccgtgatccggacacgctcagcaaccgggtggtccacatgagcgtccaactcttctctaacgaaagtctggccctcaagatggtcaacgagctgtcgctgctgcacgtaatgattattagtctgaagctaatgatgtccaagatactcatacagaatacattgcatggtgagaattattttatatatccgactgtagctctttgaacatttccatttttcgttcagatcccaacaagaattttcatttcgtcatcgactgcacgcgtcaggtgatgaaggaccactgctactggccactagtctcggactttaacaacgtcctttcacacgaatcggtggccctggtctttctgcgggacgacaatctcatcgatatgtggttccagtttctccagatgctccagggcatgaatgtcaatgtgcgcgagacggcttctcatgtggaattcgagccaaatagctactatgcggcgttctcctgtgagcttgaggccagtgcctatcccatgtggtcgattatctcgcatctgcaggatggcacacatgcccatctggcaaagaagatcatcaactactgtgtgacgacgctgcacgagtggctagactctatttactttatggaggcgcgtctatctatggttggtattttcaatccgtttattgcagtttcaataaaatccttttatttatccgtgcaggaggagatgatgcaggcttcgttccactttcccctgcatcgttatctggctgcctttgtttgccaggcggtaactaaaatgggaatcagtctgaacgatgtgctgccctcacgcccctatctgctgcccctgctgatgatccatccacttcgcgtccaggtgagtcttcaatcctttatttcgcttattttcgctttaaatagtaagaaggtcctcggttctctggtttctcagattcacattcgtttttatttcttttgttattttcaatataatttgtttttatattcttgtcttgccggattctgcatctcctgcggttcgttctcctctgatctcacttagactatgcgacagttaaacgcaagtgtgtattgataggtagtgtacaactaaaaaaaagctatgacatatgtgcgggatggaaacagcaccgcttctctccgctttagaatctattctttggcacctgaacgtggggcatgaagtcgtaggtgatgatcttggggcccaggaagccgccgtagccgttgcggcccttgtagtaaatgccaatgccggctagtggtactggtggattcgagaccacgtcctggatgtccataaacggcactgtgctctgggcggcatccttgtccagtccagtgttagtgaagtcgatgtactgattgtggcgcgacagaggtatcgagtgtgctattgtccgcgtagacacgtcggcgttgctcagacgcagtttctccctgaaatcaaggggttagttatttagtttttgctatccgaaaatagaggacacacttacctgcgtgcgccgctgacatcggtattgtcgttggacttccaatagctattgtactccggccggatgagctgacccgtccggaaatcaaactcactgtagtaggcctccaaattcagatgtgtgcccaccacacggaatcgcacgccggtaacgacaaaggaattgtcatccgtatccacatcgtccagatcgatggtgcgtttctcgtagctcaacttatgataatcaacgccattcttcacatgacgatcaaagacgttgtacttttccacgggtttccattccagagtgctttgattgacaataccacgaggcaggagttcgccctcctggatttgcagatggaaaatgcgattttgctttacaaaacgcaaaccagtcacgactctgaagaataattagtaaatatgtggttgatatttcaaaatcaacagattcaactagaacttaccggttgcgcttgacatcggcgatcgtgtcccgcagattgaagaaacgatcagacttcagaccctcctcgtcgcacaggcagaagcagtagctgcagtgccagagaaggtaacgccaccagctgtccaccttggtggtgcccctggtgcacttaccccgctggccaaggacgcgtccgttttcgtactcgatgaactcatagcgccgcgtgctattctgtggcgacgggcacacccacatgtcggagtctacgaacctgcagttgtacagacgaccactacatttcggctgacgggaacagtagagatccttaaagcagccttcactgcgggtggactgataaaagtcacacgtctctcggcaagtttcctctttattcaaatccacctcgttttcaatgtagccttgaaggaggcgcgtgacctcgtcataggtgactccccgtacatgtttcgtcggatcacagcggtaaacgatacgatcagctcgtagcatcacatccttgagtatttttagtgtgcgttccgtcctcttctcatattcggaacgcatgatttccgcctcctgggtgtagttgcccttcccgtagacccgcaacatcatccacgagaattccatcatggtgtaggctttcagttcggtcagggctatatccgcatatagtgagtatataaactgctgggccgattgcatggtattgcaaatttgatcggtagacacctgtaagcaagaaatttgttcatattattgcgaaattcattaatatgatcaatattcagctgttttttccttctatccatctggcattctttaccaggtagtgttactcttgtttttagctctaattagcaagccatcacatctggctgttaaaatcttttccataccactattattattattatagaacggtaattacagatcgcgtgggggtgtaaaattagctattgcattttggaatcgtataaaaaatatgatatctaatgtttttacgagaatttaatttgaaaattactactttaaaatgtgatcagatattgcgaggtttttttcgctttcaataaggaacaagggatttcctgttttgattttgtgcatatgttttaaagtgcatatgatcacaacaatattgtacgtattgaaattttcatattgctgatgggtgggttaactaactatcatggctcggtagtagagggtctgagaaaccatcactcgctcgatttcctgcaggattcgtggcattgaggcggtgttatcgttgcgcaggattgctccggctagatttaaaacggcaagttcatccagttcgacgctgttgctctgcttgacaaaggtgtcctattcggataattaggagttaatatgttatgatctatctaaaaaacagcccgtataagagtcgaaataccttgtaggcatcgtaaagcttgctgatataaatgagatccctttccaatagcgaccattcgtagtgattgaggatcttgtagcgatgctcctcgaaggtgcgtctcatttggggtttcgcatcgaaatcgcgatgcgaatcgtatactttccttatctgtgtttccttattgttttgactattggccgttttggccagataattccacagggcgcgttccagggcgatgtattcggtgcgcagagcgtccacttccatttgtggggtgcttgggtgcatccatccctcggacgacgccgattttgtatttccacaaatcacaagcgtgacaagaacagcaacaacagcagctaataatccgaaaggcggcgccatatttactcgcccgataagatatgtatccagctagcgaatataaaatacggggatttccctgtccctgtattgtatccctgtatgtttccaatttgtctagccttgggttttctgcttcttctatttatacttcgtatttgaggttttacttctttgctgctaatgaaagggcaaggcaagaagaagagcaacagcagggtgcactgcttgctttccgcaacttcaacttcaacttccttcaattggaaacaaagaatccgagcctcgttttagaatgctcgtcctcgatacagctgagatttcacgattttttatgatttgcgatttactttaattcccgctcgcctctgctgggtgttgtggttctgagtgctgttcagctactgtaatttttcagtttctgctttaaagcgctccacgctcagcgattgtttgtttgtgtctgtgtgtgtgtgtaagtgttcgtgttgatgtgtgctcgttgaaaatacaatacgaaaaaaaattgctgactgaagctcttttttcatgcattgttgttggtcttttaacaaccagacgatatgagaagcgtaaacacacacacacacacaaaacacttgtgcttgtgtgagcagtaatcaggaattcagcaaatttcgtttgatttttcggtttcacacacagcaataataccctactcagttagcttaattattcaatcgactggagatcatattggcacttgcatacctagcaatcgataactagaaagttgtggccgcattgtttttgtttcggctgacgtctaattggtatggcaaacagctgagtgagtgcgttgtaagcactctcctttctctctttccgttttttcgtgacgcaatgcactcacaaagagatgcgctctctgctctctttttcgcagcatgggggcaaaactgctgcattgccctcaggcgtttgtttgtgtattttttgttttgtttaacttgtttcgcagtcttttgttgacacaagacctttgacctcacacaaatagtagacgcacacacccgcaagaaatgggagcatttgtgcgccttccatgtgagagagagtgcgtgcagaggccttaaccgttatttggcgacaaaagaaacggtgactaatacactgcaagactttcttttgccaaaaaaaaatgagaaaaaaagaacgacttaactgacgcgtcaaccggaaagtcgagtttacaatgcttaaaacctcgtgtctagacctatatcatatcccgggcgagcatcattcgtgaatcatccggttaacaggcatgcaggaagcaattcacaaattgacaccccaatcacaatccgtatttttacagtgaagcatgcctcagctcaaagcaccctacaatgtaatcaaagcaaatggttgtttacacttttccttttttctgactgtcttctgggttaatacgttttttggcttaaaaatttagcttcttttacagttatcccagtggatggagccggttgataaaatgtctttcaaaatgactcaagctaaaaatgctctttaagttcgatgatcccaaaattttcgcctgtaataagcgtcatatcacataaactatattacctcataggcagtggccagctgttggagtagattggtggacgttgtgttggaagatcgatcctcgttgccaagtagagtgatatgcagacgatccatcagatggtgcaccgaatgtgcattcggcgacactgtccactccgcaaacgttatcagcgtggacatctccaacttgtccttgtaagcctcgtacttctgcatctgctgatagcgcgatgagatcctattgatcgtgtccgagatatcattcatcttagccataattggagcgttgttgtgcatgaagctagtcaccgattcgatggccaaggcaacatattgagcgtgctgaagtgggtttttttgtgtgggttaggtatacagttgatatgtgccatggttgttatacccttgcagcatacaagcgattagatctattatctatggtgcaaacagctcaccaaattggcaatgcccactgcaagggtacacaaaagaagagctaaagagcggtcttagcttgccgctgactcacctgatcttcggtattgtctatttgcttgctgacttctttgaggcgctgcaacaccttcttctgtttctcgcgcatcagtgggaaatcaatgttggccgccaacggggaggattgtacaatgtcccaggccttgaggacgccggaggtgacctctttgaccacatgtatgatgtccaggacatcctcgatcagagcgtccgttagtgtgggctgttgcagggcgaccaacgtggccagaagcaggggaagtacccaatttataaatctcatcctgcagccggctgtgcgtgagtgctatttgggtttcgttttgtatatgaatgtttatttatttattgcagcgcgaaatttgacgatcgttggggatgttgtgctgacgatggtggggtgtcttttaaatattatgattaaatgcttgcacaaacaagcaaacacacagacagacagatagacacgggctggcacgcaactgcgcccgctgaaaatcaaaacgcaaatgggaggatagtcacaaaaacagagagtcgagttttgtctcgagctcgagcgtcgagtttcgacgacgttggcagattaatctgctgtgctgctctcgccgctcggagattgattaaaaaatcgtacagttgtgggtttcacttgtctcttttccttctttttccgccgcctgtagacaccctgtttcacacacagacagacacaaatatgcggagagacgggctctgtttctttgttttgcaccgttctttgtcggttgtcggggaagggggaggggcagatagacagcataggtcacagcgagtttcgataactttgtctgctcgcaagtcatcgatgtttcataactatcgcactcgctggtgtacggttacttaatttttttttatttttattaattttaaataaagattatgtgcgtgaaataattttttatatttaagagaatagaataaaatttgtatataaaattaaatttaaatgttaaatttatttttacttcgtttttagagttttttctacgagatcctggccggaaaatgggtgcgcaatggtctccaaatcaagggacaagcgatgacctatatccaggcgaacttctgcaactcgatggccgacatggacctgttcttcctgcaaatctgtgccaccaacctgccgcagtacttctttctgcagaacaccatcgagttgttcgacgtaggtcaatggctggagacagctcccttgaagcagcctcaaaaggcggagcaatcctcgatgctggagggattcctaaccttcttggccaccctggtgacgagtcgcactaatctgggaaacgatgaagccacccaatgcattattgagatcagtgccttgttggctaccgagaacaagacgcattcgcagctccttgaactaatgccggagcggtcgggcaatgtgcataccaaaaactttgagaccttccttaagaagctatcggtttacaaggctccgtcgagtgggagcgagaacctggagcagggtctcttcacgcccatcgacgaggtgtgggagaagcactacgatccgctgcacgtccttttgcgagcagttcatcgtcgagactttcaatcat

SEQ ID NO: 3668 - DNA, 2483 bp, DROSOPHILA
agcggcgagagcagcacagcagattaatctgccaacgtcgtcgaaactcgacgctcgagctcgagacaaaactcgactctctgtttttgtgactatcctcccatttgcgttttgattttcagcgggcgcagttgcgtgccagcccgtgtctatctgtctgtctgtgtgtttgcttgtttgtgcaagcatttaatcataatatttaaaagacaccccaccatcgtcagcacaacatccccaacgatcgtcaaatttcgcgctgcaataaataaataaacattcatatacaaaacgaaacccaaatagcactcacgcacagccggctgcaggatgagatttataaattgggtacttcccctgcttctggccacgttggtcgccctgcaacagcccacactaacggacgctctgatcgaggatgtcctggacatcatacatgtggtcaaagaggtcacctccggcgtcctcaaggcctgggacattgtacaatcctccccgttggcggccaacattgatttcccactgatgcgcgagaaacagaagaaggtgttgcagcgcctcaaagaagtcagcaagcaaatagacaataccgaagatcagcacgctcaatatgttgccttggccatcgaatcggtgactagcttcatgcacaacaacgctccaattatggctaagatgaatgatatctcggacacgatcaataggatctcatcgcgctatcagcagatgcagaagtacgaggcttacaaggacaagttggagatgtccacgctgataacgtttgcggagtggacagtgtcgccgaatgcacattcggtgcaccatctgatggatcgtctgcatatcactctacttggcaacgaggatcgatcttccaacacaacgtccaccaatctactccaacagctggccactgcctatgaggtgtctaccgatcaaatttgcaataccatgcaatcggcccagcagtttatatactcactatatgcggatatagccctgaccgaactgaaagcctacaccatgatggaattctcgtggatgatgttgcgggtctacgggaagggcaactacacccaggaggcggaaatcatgcgttccgaatatgagaagaggacggaacgcacactaaaaatactcaaggatgtgatgctacgagctgatcgtatcgtttaccgctgtgatccgacgaaacatgtacggggagtcacctatgacgaggtcacgcgcctccttcaaggctacattgaaaacgaggtggatttgaataaagaggaaacttgccgagagacgtgtgacttttatcagtccacccgcagtgaaggctgctttaaggatctctactgttcccgtcagccgaaatgtagtggtcgtctgtacaactgcaggttcgtagactccgacatgtgggtgtgcccgtcgccacagaatagcacgcggcgctatgagttcatcgagtacgaaaacggacgcgtccttggccagcggggtaagtgcaccaggggcaccaccaaggtggacagctggtggcgttaccttctctggcactgcagctactgcttctgcctgtgcgacgaggagggtctgaagtctgatcgtttcttcaatctgcgggacacgatcgccgatgtcaagcgcaaccgagtcgtgactggtttgcgttttgtaaagcaaaatcgcattttccatctgcaaatccaggagggcgaactcctgcctcgtggtattgtcaatcaaagcactctggaatggaaacccgtggaaaagtacaacgtctttgatcgtcatgtgaagaatggcgttgattatcataagttgagctacgagaaacgcaccatcgatctggacgatgtggatacggatgacaattcctttgtcgttaccggcgtgcgattccgtgtggtgggcacacatctgaatttggaggcctactacagtgagtttgatttccggacgggtcagctcatccggccggagtacaatagctattggaagtccaacgacaataccgatgtcagcggcgcacgcagggagaaactgcgtctgagcaacgccgacgtgtctacgcggacaatagcacactcgatacctctgtcgcgccacaatcagtacatcgacttcactaacactggactggacaaggatgccgcccagagcacagtgccgtttatggacatccaggacgtggtctcgaatccaccagtaccactagccggcattggcatttactacaagggccgcaacggctacggcggcttcctgggccccaagatcatcacctacgacttcatgccccacgttcaggtgccaaagaatagattctaaagcggagagaagcggtgctgtttccatcccgcacatatgtcatagcttttttttagttgtacactacctatcaatacacacttgcgtttaactgtcgcatagtctaagtgagatcagaggagaacgaaccgcaggagatgcagaatccggcaagacaa

SEQ ID NO: 3669 - protein, 664 aa, DROSOPHILA
MRFINWVLPLLLATLVALQQPTLTDALIEDVLDIIHVVKEVTSGVLKAWDIVQSSPLAANIDFPLMREKQKKVLQRLKEVSKQIDNTEDQHAQYVALAIESVTSFMHNNAPIMAKMNDISDTINRISSRYQQMQKYEAYKDKLEMSTLITFAEWTVSPNAHSVHHLMDRLHITLLGNEDRSSNTTSTNLLQQLATAYEVSTDQICNTMQSAQQFIYSLYADIALTELKAYTMMEFSWMMLRVYGKGNYTQEAEIMRSEYEKRTERTLKILKDVMLRADRIVYRCDPTKHVRGVTYDEVTRLLQGYIENEVDLNKEETCRETCDFYQSTRSEGCFKDLYCSRQPKCSGRLYNCRFVDSDMWVCPSPQNSTRRYEFIEYENGRVLGQRGKCTRGTTKVDSWWRYLLWHCSYCFCLCDEEGLKSDRFFNLRDTIADVKRNRVVTGLRFVKQNRIFHLQIQEGELLPRGIVNQSTLEWKPVEKYNVFDRHVKNGVDYHKLSYEKRTIDLDDVDTDDNSFVVTGVRFRVVGTHLNLEAYYSEFDFRTGQLIRPEYNSYWKSNDNTDVSGARREKLRLSNADVSTRTIAHSIPLSRHNQYIDFTNTGLDKDAAQSTVPFMDIQDVVSNPPVPLAGIGIYYKGRNGYGGFLGPKIITYDFMPHVQVPKNRF

SEQ ID NO: 3670 - DNA, 5070 bp, DROSOPHILA
catttacataaccgagccaatattgaagtggtttataatagattaataagattgtcccaaaatttctctattaaatgtcaagaggctgtgcaccagcatataaatgatttgacctatccaccttaattgtaatttttagataatagccttttttaagtgcttagattttttttcaattacataaaatttttttcccaatcggtataatattttcattatcatattattcatattgatattaatatctaagtagataaggtttaattattggcctgtactcttattattgttaaggttaaaataaaaaaaaattggatgtcattaagcgtgaaataaatgaaatgaaataaaattttgcggagtttattcttcatgtaattttagctaaagtgtgaactgtagatttgccgtgtttgttttacaggcttcttaattgacgtaaatatatgggatataatgtcatgagtcaagagattatcaaatattaaattttctgattaaaattaaacgaaagtccaaaaatacaaaaaaaaaaacaacttaccgtaggcaaaatagtaatactatttgtaacgttctgtgtcgaaatcatattacctaaaatagtttactttccactaatatgtacttggaccgcaccctaccaagaaaataataatttctactattggcgacagctgttatttgtgcgaatacaaacatgctcaaattaataaaagttacgcttacagtttgattttaatttttacgtttcattttattttttaataatctcgaatcttgattttgctgaatgctggatttactggccattacctttcctgcccattaaatcgttgttaaacattgaacattaatgagagtttcgtcgcagactatttcgtaggcttagacaagtaaataaaatgtaattgggaatgtgaaataggtggtaccttgattacaaataaaaaaggtacgatttcgaaagcattttaaaaataaacatttcagagtattgctgtaaaagttgtttttcgtactttttattgtttctatgtggtagtatttttttagccggttggcatacatttttctggggttgttgctggcagctttttgttacattttactgaatttttagttttactttgttcgatataaatattcatactcaaaaataagatacggttgtaaaattaaaaattgtaaaggattacatatgttattttgccgtaattgttttgatgtttttcttacttaaagattttgtttgcaatttgtttcattcgcttcgtatttttttttacaattattaaatttgacgcttttgtttacaacttttattcttaaaacatagagggtctcgcatcttaatttcgcttaatattgttctcttaatccttcgctttatatatatatatactttgctttaaagttaagattttaagtaagtttttaaataataatggattttttgttttcgtttgttgccggtattgttggttggtaggttgtttgttagtagagagagagagaaccggtacgctataaaactacgctcccattgccggattgttattggagaattgcgcccgccacccaagcagccacccacgtatcacccgctcacaagagcggaaaatggatacagtccgggttcctggcggtagaaccgtaatttctgtgatttgctttttttgtgttagtaagtatttaataagtagattactgagtttgctgctccgcgggcgattcccttaggcggccacttcgctagcctcggccccattctgaacctcatcctttgtgctggcctcatcaagcttagcctttttctccggcgtggcgacggcctcatctgccttggctgcagcctcatccaccttccgctttacagcctcaatggcgggagcatctgtaaggcgataataaaaattgaacaataagaacatgaacgtggaaaatttgtttggcattgatatcattgatatcatcatacctgttgagtcaccgttggtgacctcctcggagccattctcgacagcaggtagaacagcttcgctgctctcttttttggtgtcctccccatcggcagcggaatcctcttttttatcctcgtccttcttctcatccttatcggcggcaaaagaaacagtgggctcagacgccttttcaccatcgactgcgtcggtgggctcggtcgcgctgctgtcggcggctccgttctccttggctacgctctcctcttcggcgccaccgttttctgtgatgctcgccttctcagctgctacctcctcggcggcaactgcatctttcttcacagcatcaacttcctcagctgcgaccttctcgacaacaggggtctcactgtgggtgataatcagagacgaaagtcagtatgcacttataattttttccgaaggtggccgaactgaacttcgtatgcatagcattctactacatacaaaactctaaacagtaaatcaattaaaaattatcaaaaactaaaactattaattattaattaattaaatattaattgaatttaaaaaaaaaaaagaaaaatttcaatatagcgccggtaggtaacgtttatgttttcatcctccactttctattcataagagccccaggacgttcggaattaaaactaaaaaaaaagtgcattgttacatctgccggcgtttttcaaaaatgggatcaacaactcgtgcaagctgcgacgcaaaaggaagcgcgaaaaggtgagtgcgattaggcggcacgctctttttcatataaatggcatatattcatttgttatttcagtgctctctaccaacagatgagaacagggtagaaccaaaaacacgcttgcagacgtgcaaaatgaaaagcgagacccgtttaaactaaaacgaacaaagatagaaataaaaaccagttttaatgggattaatgacaatatagtcgtttctctcgcactcatctaccaacagatactcgccatctgaggtagatagaattctatagggcgaacaaaaagagagttgcaaagtagcaacgctaaacgacaaaaataacggtccaaacgatacaaacagtagcataacgtcatacaacctgcgtctttcaaagaaaaccggaacagccttaggcatgagttttgttttgttatgtattataagctgcaacatataataactacttaaaaaaaatatatacataagtgttcatcgatagggaaagagggagtatttttggtaatgccaatatagatatgcgtgaaaatttatactgttaatttcaagcttcgagctttaagctatcaaatgggtataaaaggcaagcctcgaaatttgatgtctggtgagaaacgcagcaaagcaacatacgaggtagcacagacagatgaaatgaaacagcacaagaaaagagcggcaacttgaatgctgcacacgcatacacacacacatgtctatagacttttgcgcatttggcctgtcgtccgcatacactcaacgcattactccgccgctacacacacacacacaaataattcatcgttgctgtttgccggccggagaaagagcgagaaggcaccatgacgccgcgccaaattaaacggcgtcggtttttgcgcgcacaccgttttgcctttggcgggaacgagacaactacattagtgccaacaagcggtttgcgtatatagacacagaattcaaaagaaaatttccaaatcttttcggcaaataacatagattttcattagcaaaattcgctacaagtccattgcttaaacaaaatccacaaacgtccgaaaacaaggcaagcaaagtactcacttcttttgctcagccacatcagccattttgaattactgttagatattacttttcaaacgcgaagcgagaaaacacgttgtaactgagggtttttggatcaccaagcacgccttaaatatcagcacaaagattttaaaagaacgaaattttatcaatatagtttcctctttagtagctttgctaagaaagtagcttggttgctggagattttgccgtacaattaagaacgtccacacagtcacaaagaaaaacgccgaatgagagagcggtgagcgtcggaccggcttttaaagcgccgccctgtagtgttggtagacgtcggtagtccgcttgcgatagttccgcctccggaaaacatatctttgtttgttatcgttatcacccgttctctatttaattcggagttagcttatgctgatagatttttacaattttattttaatatattaaagagatgaaatatagcagtgacaaatatttcaaaataacggtcccctaaaaagggctgccaccttttaactattatttagcggctacacaaatatagcaggtaaaatattcaaatgcattcctatccttgtttttctcattgacctgagtgatttttcgtgtaatacaccttcccaattctaagttttttttttgatccggtactcctaaaaattaaataaacaaacacacaaacatgtatgttcatatatatatatatacacatatcgtcatttttaaaaaattcaagctttttattaaattacatcaatcaatttccttgtaaattacacagtctacaagatcttaaaaataatatcttaaagatatgtcatatgtatgtaatcaaacacataaaaccgacggaaataatcctcacccctctgaaaacattttcaggtagtcagatatgcacgcataagtacgtacatacatacatatgtatagtggccttgtctgcgtcccttgatcggtataatagaaaaaagaattagagtgcgctaccaggcagctggtaaattttctgcttcactaaaattttacaatattttaggctattggcaaggaaaacaatacactaggactgagattccattgccgaagaacatagacgctattatacatacatataattacaagttttcaattttcataagtcaacatttaattttaggtctcatgctaaactccacttattgatctatattgattgacgatcaatcctcggtctcgagcttttttaatatggactttgggctgtaaaattttaatgggc

SEQ ID NO: 3671 - DNA, 1529 bp, DROSOPHILA
ctctcattcggcgtttttctttgtgactgtgtggacgttcttaattgtacggcaaaatctccagcaaccaagctactttcttagcaaagctactaaagaggaaactatattgataaaatttcgttcttttaaaatctttgtgctgatatttaaggcgtgcttggtgatccaaaaaccctcagttacaacgtgttttctcgcttcgcgtttgaaaagtaatatctaacagtaattcaaaatggctgatgtggctgagcaaaagaatgagacccctgttgtcgagaaggtcgcagctgaggaagttgatgctgtgaagaaagatgcagttgccgccgaggaggtagcagctgagaaggcgagcatcacagaaaacggtggcgccgaagaggagagcgtagccaaggagaacggagccgccgacagcagcgcgaccgagcccaccgacgcagtcgatggtgaaaaggcgtctgagcccactgtttcttttgccgccgataaggatgagaagaaggacgaggataaaaaagaggattccgctgccgatggggaggacaccaaaaaagagagcagcgaagctgttctacctgctgtcgagaatggctccgaggaggtcaccaacggtgactcaacagatgctcccgccattgaggctgtaaagcggaaggtggatgaggctgcagccaaggcagatgaggccgtcgccacgccggagaaaaaggctaagcttgatgaggccagcacaaaggatgaggttcagaatggggccgaggctagcgaagtggccgcctaagggaatcgcccgcggagcagcaaactcagtaatctacttattaaatacttactaacacaaaaaaagcaaatcacagaaattacggttctaccgccaggaacccggactgtatccattttccgctcttgtgagcgggtgatacgtgggtggctgcttgggtggcgggcgcaattctccaataacaatccggcaatgggagcgtagttttatagcgtaccggttctctctctctctactaacaaacaacctaccaaccaacaataccggcaacaaacgaaaacaaaaaatccattattatttaaaaacttacttaaaatcttaactttaaagcaaagtatatatatatataaagcgaaggattaagagaacaatattaagcgaaattaagatgcgagaccctctatgttttaagaataaaagttgtaaacaaaagcgtcaaatttaataattgtaaaaaaaaatacgaagcgaatgaaacaaattgcaaacaaaatctttaagtaagaaaaacatcaaaacaattacggcaaaataacatatgtaatcctttacaatttttaattttacaaccgtatcttatttttgagtatgaatatttatatcgaacaaagtaaaactaaaaattcagtaaaatgtaacaaaaagctgccagcaacaaccccagaaaaatgtatgccaaccggctaaaaaaatactaccacatagaaacaataaaaagtacgaaaaacaacttttacag

SEQ ID NO: 3672 - protein, 183 aa, DROSOPHILA
MADVAEQKNETPVVEKVAAEEVDAVKKDAVAAEEVAAEKASITENGGAEEESVAKENGAADSSATEPTDAVDGEKASEPTVSFAADKDEKKDEDKKEDSAADGEDTKKESSEAVLPAVENGSEEVTNGDSTDAPAIEAVKRKVDEAAAKADEAVATPEKKAKLDEASTKDEVQNGAEASEVAA

SEQ ID NO: 3673 - DNA, 5864 bp, DROSOPHILA
ctgaactaaatcaaatcaaatcgaatcgaattgaattgaacattaaatattgaatgcggccaatggccaattgccattagacaacttaccagtagtaccgcgtatttctttatgttcccgcacacacacctacatacgtacatataacaacttatgaatctcaatctgaatctggctatatatgcatatatacatatatatatatatgtatatggtcgatcgtaaagcgacgggaggcgattgtgaaggcgatctgaaatagatacggccgccagttttaacggtcgcccaaagtcgactgcaacttttaatggcaaataaaacaaatgccaagcgaaaaaatcggaattaaatggcaagaaatttatgaataaagcgcacaaagttggtaaatagtttggccacaaaattacttgccatccggcatttattaccgaattgctttttcacgatccttaaatagtaatgaacgcataaatgtcgccggctctgagtaattacaaacttgcactttttaattaccccatatcctatgtccagtattgaaacattcacatgatcaacagcggcacaaagttgctatacatattcatttcatagtccgtatcctatagatttttttgaatttcaaaaatatttcaaactaaacggattaaaaagcgttttgacaaaacgtttccaaagccccaaagcagacagttcattggcacactctcgctgggaattagcagcactcgtcgagtatggtttttaatttattataaataaataaaaatacaaatacagatacagatacgattatttagtttagtacgcacaacacagaactaggagaggtggccaaaaggactgtttggggaactacgcgtccgattttcaggagtcgagtattgagtttctcaaagttgcatattcaacaacatccatttgggagaaatcccagaaatccactcagccagttactcgagtcctgaaatagatgactgtatacggcggctatctaagccaactcagcggtggccaccggcggcgcagcaggagccgtgccaggatcagctgtgcccgctggctcggcctgctccgactgctccgactgctccttctgcaggacctcgagcaacttgtcagcctcggcggccttggcctgcagttcggccagcttgcgctgcttctcggcctcatccgccagccgcttggcgcgtcgctcctcctcgcgccgcagcagctcctccaggtgggtgcgcagcagactgtcgcccagacccagtttgtccatcagctgggtaatgtcacggctgtagcgaaggcgcgtattgtgcgccaactcctcggagcagtcctcgcgtccctgctggagccgctgcagcacggacatcttggcatcgatgaccacatagttggagctgggtataaagctgtcgctcttctcgttcagatactgcaccagtgttctcagcgaattcgaattgaccttggcattgatggcgccgctagcgaagtcctgcgacttcatcatctgcgcatgcgtggacttttgcttgcaaaccagacagttccagttgggatgcggcaatccggtaatctccggcaccaccagacccgtgcagttcgtatcgcggcagtagaggcccgagatgaaggcacctttctcctgcaaagcaaaaggattcattgttagaggtgggaggactagtacacaggatacgctcaatttcataactaaagtatctaagtatctaagtatctaaactatgcgatatgactctaaattgatggccaaattagctgatgatcgacagatctttatctctagtcaatcggtaattggttatcgccacacttgccagcccatcgatcacttttgcaaagtggcacagccccacattggggatatttgggcggtgaatcattggggccaaatgtctcggctaatgaaaagcgctttcacatttctgggattccgattgcgattgcgattccgtttccagctaaaaataatcccaaatcggattgaacaagtgatctcgccgtgtatctgcgagacatgagtatgctgcatacctatgtatgtatatatgattcgccagtttgacatatatatgtatatataattattaataatattaataaaagaaaaacttgtcgctacgtgtgcgttttaatattcgctcgtgcgatcgataaatattcatatctctacacacaggtttgttaaggatacataaaattctcaatccgattcgtttggccaatttgcttggtcgtaaattaagttggataattaatagttccgatacgcagactgcactatagacaggaaaatctcttcattttttgattcactatagtatacgaaactcaatattttgtgtttggaacaataaacttgtaatcgggataaagaacgaaacggatgccgaatgatgagcactcggatcgaaggaagccatataccactatatactatataaataaattccatttgcgggagttcgctgaaccatagttgagattatatgttttatagttataccaacacacgtgccacacactcaagggcaggcgattagcagcaacagtctgaatattttcaataaattagtgaactattatattggcaacaagtgatgatttaaggaaggatgtttccatagcaaacgcttaaatgcttgaatactaaactatttctagacatcatcttcgaaacgacttctactatagcctctttatggttatattaatctgattccaagggtttttcgtgtagttttcattatttggcctctgaattgccgcctgcctcgcattccttgcgaatgtcaaatggggaattacgatccgaatcgctctatatgtacatttgtggccatggccaagaaaatctgtttctatatgcatatgcgaacaaaaagagcaacaaaaggaacaacaaccgaataaaaaaaaatatccatcggataacatggcaaaaatgtgacagaatttcaaatgagcgtcgtgaacgtaagaaatcaaaatcaaatcaatatgaaaaagaaaaccaaatgccagcagataaaaaagatatagaaaacagcaggaattttgattttgataatgtcccccccccccttatttttattattattatttatttatttatttactttacttttttttgcaatttatgcaggaatttcgaaaaggctggcagcgaattaaaaagctttttggaatccatctatttatttgtgatttaattgaattgttttcggcccgttaaaaataaacaaaattgtttatggccatgctttgttattgtggccacttgccgccacttgttgcgcctggaaaatggaaaagcgctgaggaaaagccagggcagcgggtcggaaatcaatcgatggccaagaacaacacaaatccacaacttgtaataatagtggcacacaatcgatctggccgcgagtttttaattgttttcggatggattttgatgggcacaggaaatccgaaatgaaagcatttcgcacccgaaacaattgcggctaaaatcaaaaaaaaaaaaaaacctagcaaacttggaaaattgtcttctttgatggatcatcattccaaaaatgggcaatcgacgaatcgaaaaaaaaaattggaagcacgtacttcaaaccgcaaagaactataaagatgtttgattatttcttcggtcatttggttaaatagtttattcagctggcccgtcgatcatcaccaggggtttttctttcggatcgatgaatctcctccagaaatatacgcaaaataaaagtgccttttgaggtaattaccaaaagaatagaatcatttcagttttaaggctaaactgcggaacttcaatctaataaactagcaaggaatggaaataccattcactcgaaaaaggataatttaagtttgcttctttcagtggatcatatttagctatccgtggctactttatccttgtcaagtaattaaacatacatatttaaaatacaagctaacataaactcaccgtgggatcggagcagcgggagcatttgcaggtgaagctcttcttcatcttgagaaagagatggcgggcgatgttgccggtgaagagcttggtgtaggtggtggtcacctcgaatccctcgggtatatcgacagcggcgcgaacgatcatattattggtcttctcctcgaaggtgtagtaggcgttgggaatgcagtcgtgattgacgacgccaaagagtggatatagtgcccgatagttgaactcctgattgtcgttcgtccgatctgtggtcttgtcaaatccattggtccgcaggacggcgacggtgcgattcatgatctcgattagcttcttgtcggtggggaagttcttgaagcacttggccgcattgcgcacctcggtgcgatgattgttatccagattggcctgcaggcagtagattagatcccgctgctccttgctcagattgatggccctggcgacgcagagcaaccgaatgatcaccgaattggccacatccggctcattcggtccccacgacttgaacagatcgcagtcgctcttgtgctgcttctttttggcgcacagggagcacacgggcaatccgcatccctggcggcacatgaatctcgtgtccggcagcatcttcaggcacacactgcacgcattcagggagtcctcctcgtgagcggccagtccaatcagcagcggactgtcgcggaagatgatctcgccacgcttgagactccttgtggccaccactccgcgtccggcgatcttcgagacgccaatctcccaggccggatccttgtccttaaatggcgccaagtgcagatccaacagctccgaggtgcgtttcgggcagatcatgatgggatcaaggatcgctgctttgcgcagatcacacaaaaaatgtacagcggcacttgaacaaaaattaagtcactggtgggaatctctcgattcttgatttctgatcaccgatttttttatctccaacaatttaactctttagcttaatctcgagaatctcgccaccgatctgtggttaagtttctggtcttgaattctttcgggtgaacggattggttcgcctgcagcgtttatttcgcgactgccgtgagtaaactgtcgccgttttccagccttacatgatttttatgtgaaaagtcggcgaaaagctgaaaattcggcaagctgtcgacgatcgccagttcgccagaaacgaacgccatacgaagattcacgataatcggtggtggtcacgatgttcgccacacggcgatgcgattttccgatttcttgaacggtgttggcggatcggaaagatgaatattggattggaggggcaaagcgaaaagatggcagcgggattgggagcaggagcccagacaatcccatgtatcagagaaatcctggtgtccactcggatggattgatgaacagcgcattgttgctgtttgtctgttttgacaggaacacttggaaaaattatataggtacttaaaaaaaaattagtataatgcgtaaaaaccaattccataaattaaattccatatatttcagtttcattttaatttgaattatttattctataaaatgctataaattttcattccaatattgaaattcttcgaatatcttttgtatgaatgctgtcatgtttttcgcgcagtgcagttgaatgtacgaatgaaatggatggatggatgcttgtcgggcggcggatgtacagatatccgcacatccgaaacgagtgttcaaaattgtcggcacacacggatcggaatcggcatggatttgtgcatctctgacagcgctctggagttgcgccaagaatgccgccccatcagcggatgatgaacgatct

SEQ ID NO: 3674 - DNA, 1503 bp, DROSOPHILA
atgatctgcccgaaacgcacctcggagctgttggatctgcacttggcgccatttaaggacaaggatccggcctgggagattggcgtctcgaagatcgccggacgcggagtggtggccacaaggagtctcaagcgtggcgagatcatcttccgcgacagtccgctgctgattggactggccgctcacgaggaggactccctgaatgcgtgcagtgtgtgcctgaagatgctgccggacacgagattcatgtgccgccagggatgcggattgcccgtgtgctccctgtgcgccaaaaagaagcagcacaagagcgactgcgatctgttcaagtcgtggggaccgaatgagccggatgtggccaattcggtgatcattcggttgctctgcgtcgccagggccatcaatctgagcaaggagcagcgggatctaatctactgcctgcaggccaatctggataacaatcatcgcaccgaggtgcgcaatgcggccaagtgcttcaagaacttccccaccgacaagaagctaatcgagatcatgaatcgcaccgtcgccgtcctgcggaccaatggatttgacaagaccacagatcggacgaacgacaatcaggagttcaactatcgggcactatatccactctttggcgtcgtcaatcacgactgcattcccaacgcctactacaccttcgaggagaagaccaataatatgatcgttcgcgccgctgtcgatatacccgagggattcgaggtgaccaccacctacaccaagctcttcaccggcaacatcgcccgccatctctttctcaagatgaagaagagcttcacctgcaaatgctcccgctgctccgatcccacggagaaaggtgccttcatctcgggcctctactgccgcgatacgaactgcacgggtctggtggtgccggagattaccggattgccgcatcccaactggaactgtctggtttgcaagcaaaagtccacgcatgcgcagatgatgaagtcgcaggacttcgctagcggcgccatcaatgccaaggtcaattcgaattcgctgagaacactggtgcagtatctgaacgagaagagcgacagctttatacccagctccaactatgtggtcatcgatgccaagatgtccgtgctgcagcggctccagcagggacgcgaggactgctccgaggagttggcgcacaatacgcgccttcgctacagccgtgacattacccagctgatggacaaactgggtctgggcgacagtctgctgcgcacccacctggaggagctgctgcggcgcgaggaggagcgacgcgccaagcggctggcggatgaggccgagaagcagcgcaagctggccgaactgcaggccaaggccgccgaggctgacaagttgctcgaggtcctgcagaaggagcagtcggagcagtcggagcaggccgagccagcgggcacagctgatcctggcacggctcctgctgcgccgccggtggccaccgctgagttggcttag

SEQ ID NO: 3675 - protein, 500 aa, DROSOPHILA
MICPKRTSELLDLHLAPFKDKDPAWEIGVSKIAGRGVVATRSLKRGEIIFRDSPLLIGLAAHEEDSLNACSVCLKMLPDTRFMCRQGCGLPVCSLCAKKKQHKSDCDLFKSWGPNEPDVANSVIIRLLCVARAINLSKEQRDLIYCLQANLDNNHRTEVRNAAKCFKNFPTDKKLIEIMNRTVAVLRTNGFDKTTDRTNDNQEFNYRALYPLFGVVNHDCIPNAYYTFEEKTNNMIVRAAVDIPEGFEVTTTYTKLFTGNIARHLFLKMKKSFTCKCSRCSDPTEKGAFISGLYCRDTNCTGLVVPEITGLPHPNWNCLVCKQKSTHAQMMKSQDFASGAINAKVNSNSLRTLVQYLNEKSDSFIPSSNYVVIDAKMSVLQRLQQGREDCSEELAHNTRLRYSRDITQLMDKLGLGDSLLRTHLEELLRREEERRAKRLADEAEKQRKLAELQAKAAEADKLLEVLQKEQSEQSEQAEPAGTADPGTAPAAPPVATAELA

SEQ ID NO: 3676 - DNA, 2768 bp, DROSOPHILA
tatacatatacatatatatatatatattaatattgtgaaagtcaccaaggatatatatatagataccagataaccggggaccgtagatcatttttcggccatctatgtagagaatatggtcaagtggaaaacgatgtatatatattttctgaattgcatatcacgatattttacaagacacaagaatattagtaatcagaattttaattgtgctacattagtatcttctttatcttatcgtttaaattcaaatgctgtaaacttgtttgatatatttcgatatgctcattttgcgaagcttctgatgttcagacaatttgatattgatttgttttactagattatctttattaggttatcaaagaaatgaaaaaaaaaacacatttgttacattttccacctacgagtataatatatatgtatattggcctactttgtgcgctttagcctaacttgcttagttcattacattataccattgaaaactcttccaaaataaacaaatagcacaatccagacttataagcattacggtccctgaaatagaagtcctatattggttgcttttaaacgaactacctatgtacgctggacattggtgtatatgtttatttgtgaactgtatgtgaaactagcacaaaatcaaattttaattgagcttacaagaatataattatatatgtagttaactatttatatgtaacaatgtggcgcaacatcgctttggcttattgccaagtcaatgaaaaacgcagaacggcagctcctatgtgttttgtttaagaccggtcccggattggatgcttagttatgcgtagatgtatgcgaaacccatgtattttgaactgtacaaatggatttagccgtgtgcatagagtagatgaaaagtgtatttttgagaggtcaggctgccctatggccaccgaacgaatggacgaaataaagttgctacagttccacagtacatcagtggtctgtttttgttgttttactctgcttgttacaaggtggcccgcttgctgttgggcagagcatcgccctcgtcatcgctgcgatccgcacgtcgccgcttcttttggtgctcctcgaccagctccgaggtgcgaatcttgttgcccgtcatctgcagccattcgatgtactgaaattatgtgattaatataacactccgtgcccacttgactggtagtacagccacccacctgactgttggtgcgcactccagcctcgtgcagcttggcctcgatgttatccagtcgatgctccgccttggctgcctgtccgtcgctcttcgagatgtccaggagatgacgtaccctctggcgcagcgtttcgaagatgatgcggccgatgacatggttgcgatcgtagggcgtcagatagcgaccgaactcgtagaagtacgggtgcaggcgtcccagctcgatgtgcgtggtctccgcctcgcagacggccttatgcacattgcgatagatatctggcacggcgacggtgaagtaggcattgtttaccttcagctccttgatgtaccacaacggcagattgaccgtcctgccgggctccaggtcatccgattccgcgccggagtccaggaatcctgcaagcaactcaatattgtcggattactggccagaatgtgcgtgtccgtccaagccaatcacttacccatccgctgcagcttggtgttcacccgacattccaccttctcctgggtcacgaatatgtcctcgatggagtaatagttcggaaaatagttcattccgttcattgcgcggcccagctttatgattcgtttggtgtttactttaggtaaattcaatttcttaagtgcgcgacctatcgcctatcgatattagatgcattttgccggggtctatcgaggcagaaacagctgtttgcctggatgccgaggcactcgataggttttatgtactatatatatcgaagcatttatatgtattatatgtaaatagtttttccggaaaattactcttatttcagcgcgaattttaaattgcagcctgcacttgacatttttttatacataaaattactagtcagggtataattactcaaagttgtaaatgatgtggaacatgtgaactcagcttagtaatagtaattcgatacgattgcaattagatggttacttcttccgcaagttcttaggcttatctgcatctttcaaaaacaaataaaaataaaggtttcgttcccggcaatgactattttgacttcaatttcgaacaattgatcttaatctagccgtatgatcatcaagtcgtcgataaagtcgcccatattaaaaatcatcaatccacttgagatcaaaaatagcaaagccgcgtgcttcgagtttttcttgttggcgacgaggaacggacagatggtcgaaagagccatttcgatttagctatgtgtgtgcaaggattagagaaatgtgtgtgtagttaatatcagttaataacgaaatcatagggagcacacaacttgttcggtcgagatttgagttcacagtaagaagtttgaaggcacgagcgttgaagtgcgaaaaaggactttgacagttaactcccgcgttgctgagcactggctggcttcgttgcccatcggactatcgataaagtcgaactgtaaagccgccgccaccaaaaactttttcagccttccggcaaacggtcatactcagctagctgtccgacgagttttgttattggcggagaaaagattacgctggtttataaattctcagttaagccgatttctca

SEQ ID NO: 3677 - DNA, 639 bp, DROSOPHILA
atgaacggaatgaactattttccgaactattactccatcgaggacatattcgtgacccaggagaaggtggaatgtcgggtgaacaccaagctgcagcggatgggattcctggactccggcgcggaatcggatgacctggagcccggcaggacggtcaatctgccgttgtggtacatcaaggagctgaaggtaaacaatgcctacttcaccgtcgccgtgccagatatctatcgcaatgtgcataaggccgtctgcgaggcggagaccacgcacatcgagctgggacgcctgcacccgtacttctacgagttcggtcgctatctgacgccctacgatcgcaaccatgtcatcggccgcatcatcttcgaaacgctgcgccagagggtacgtcatctcctggacatctcgaagagcgacggacaggcagccaaggcggagcatcgactggataacatcgaggccaagctgcacgaggctggagtgcgcaccaacagtcagtacatcgaatggctgcagatgacgggcaacaagattcgcacctcggagctggtcgaggagcaccaaaagaagcggcgacgtgcggatcgcagcgatgacgagggcgatgctctgcccaacagcaagcgggccaccttgtaa

SEQ ID NO: 3678 - protein, 212 aa, DROSOPHILA
MNGMNYFPNYYSIEDIFVTQEKVECRVNTKLQRMGFLDSGAESDDLEPGRTVNLPLWYIKELKVNNAYFTVAVPDIYRNVHKAVCEAETTHIELGRLHPYFYEFGRYLTPYDRNHVIGRIIFETLRQRVRHLLDISKSDGQAAKAEHRLDNIEAKLHEAGVRTNSQYIEWLQMTGNKIRTSELVEEHQKKRRRADRSDDEGDALPNSKRATL

SEQ ID NO: 3679 - DNA, 13437 bp, DROSOPHILA
acactaagaagcacttaaattaacaaagtatcaaattaaaagttcacaaaagttcgaagtcagccggtcagcaattcagagtttctattattcagagttctgcaaacgtgaaaactcacttcaatactgaaagttcgcctccgtttttagtgaggttaacttgacagttgccccaacaccaatacaaatgcctacacggatccctggactatggctatcaaaattatagaattgccacctttttggttagtagaaaatattacaaaaaaaaaatattgaaattggaaaaaaaattcaacaaaatggacgttgcaacaacactttggcgcttgcagcaggcgcatcagcggcaacttaacgagtgggacaggattggtagacgcctcaagcggctgacgggcaagaggtccagcgacttgctcatccacgatccgctcctgcagccaccgttcgtcgcccatcctggccaacggatgagcggtggtggtcagcagacgccgatgccgttgccaatggccaggaagcagacaacgcagatcagacgcaatcatccgaataaatcggttaaattcaaagcatccaataataacaccttggatctacttgtcgtgggtcaacagctgcaaatgcatcgtccacctggacgacggcatgtgcagctccacagtcccatgtcctctcagccccgccagcatatcgaagagtatgtctatttctatccggtccactaccatgagacggaccactggccaccacacggccagccggaaccaaatcttgtggtggatgcacgatttgtggccgagctactggatgagctgctgctgcctgcaggcaatcgtatttgatttgtgcttcgttcaaataaaaaagaaacattgcgaaaaaaatttgaatttttcaacggtcttgttttttctcatacctttcgtaaaaacgaaatatgatttcatttcatattttaaaattaacaattgaacatacataaaaagagcaaaatctgtttgtactccctttttaaatttatttgtttgcatttacaaaaaaaatccgaccattaaacaaaagatttgttgcctaaaataatagagagactacacgagtgtgcggcaattttggggctaaattttgtgttgagggggattcattgcgaaggagtctcaatttcggtactacaatatcggttgcttcagtaaaaatatataactatatgtatatacaaagtttgtggacttcttgtgccttccattacaatgtgtgtggattggttaggtgaatgagagggatgggatgcaggattgtgggttaatcgtttcatacgctaagctaagcctaagtcttggttgctataaaacctataggttaacaattttccttgtcattgctatattttacttcgtttcgttggagatttgatgattgagtagttgcggttgctttcttggtgaagtggggggggcgggcggttaccttgtgccgttgggcgtctggcaagcgaaaggcacctcgtcctcggcttgttaatgcttcttgttgagtatatagccacgcttcgaatttgcattgtatttgtaattgttttgtttgtccatatatagctagtttttggtttcgttattcgggctacttctgttctctttgttctcctccttgtctttatccaccagctgctcagccgtagctccctgatcctgttgctcctgctggagttcctgctcctgaccggtttgtgtttttgtggcttcagtggctccgctgccagtctcatccttgtgcttcacaccccaatgccaattagacatatgtctagcctcttccttgccgcgcatgtccgacctgctgttactcggcggcgacgactgtgtggacttgtccgtcttgcgctccagcttcaggtcaagctccacgtccgagtccatttccgtttcggaaaaggataacgagttgccagcgcgcgacacctggatgcgacgccgatcctgtgcgaaataattatttagtaaaagtatacatagatagatattgcaatgttaccggatcacctaccgtattcagtgtggtcggctccgaaatgtagccatcacagtcttcgtcctcgctaaagagttccgcggtattcacggcgtatgtctccggcagacggcacacgatctgcgccagatcgatgaacgtgtactcgttgagggaggcatggttaacccgcttgggtggctctttgttgaaccactgattgaagcggcccaatcgaccagccttggccatgctctcaaagtagtttttgccaaacacatagcccacgtctcgaatttcgtcgaagctgccgaaggctagagtcttgtacttatcgatcggcggtcggatatactcgcagtagtcggagtttttgacctcctgcagaaaaaaatatgttaattgcgttttaagttcgatttcatggaataacgtatgtacctctagttggcgtacgcaggacacataggctagtcgggattggatgtccggcaagtcgggcaccttcacaggcgatgtgaagggattccatttcttgtagagcagccaccaaccgcttaggtcgtcgccatagttggtcaggtcagtgtcatcctgggatcccacatcgatggcgattatgtgagcagctccaagattatgcatcacatcggctaaatggtggccaaggaaataaaatggccagcatgcgggtggtgatttagttggtcgatgtgtaggatatgttgtgaatgcaatacaaatgttcaattagttgtgcttattggttttacggtattgaaaaactaatttaacaaattgcgcttacaatttagttttaatatattgtaatcatttttaattgaaaacaattttcaaaattgattaaattcacattgtaaacgcatttgattaatcttatcccgcagcatctcagtcctatggccaagtcaatcatttgtgatatctgcgtatatcgtaaatttttaattcgagagtagaatgtgtggataatttgattgaaactggattgggcattggaataagatgctgggagacgagcatcgcgaatttccaaaactggaacggacgcagggggcggcgcagagcgttggaatcaggatcgtgcatcgccaatatggatggtgtttcattttttttttttttacctggcacgttgttcgtgtagcagccatcgagcaggaggtggccgtcgcggtaatcacaaaatggtgggaagacgccggcaatcgacatgctggcgcggcagtaccgccacaggtggcctgtttttgtttttttatcacaggtcggacaaaacaacaacagcacaatattgtggatcgtattttttgtggatgacacggaaacacgtgggggattgcattggtttattcaattggtttgtgtgtgtgtgtgagagagacaggtcgcgtgtgtcaaagataaagatagagagagggagagagagaaagatacacacttttatccacgaaataatggttttttttagtgctaaagctacatatgaaattggtcttatttatacgcaaacaacaacaaaatggtcaaggcgaacaattggggaacaaataaactaataagcaactcaaaataccacaaaaaaaaactaaaataggtagaggataaaccaaagaaactttgtgcactcaattatagttgtgattcggtaattatgtataggtatgcgtgtgcgtgttcggtgtgtttacgtggaagggagtgagacagatggtgcaaacgaatgctctttaccgttagaaatgcaggccacgcaaactatcgattggcagcactggcattgccagcgcgaaaaactttcaaactctcaaacatttaaaacatcttgtagaacaagaacaacaaatataacatcatctcatggatttgccgggaaagagggaccaaaaacggaacggagcgaagcaaacggaatggaacgtgaggaacgtagaacgcaggcaagcatgatcgaacaagtggaatttccaacactctgcgcgcgcgctctgtgtgccgaaaaactcagctctagattggaagttgaatgtgataattttttgttggattaacgcactgggttaaatatttcgttttctttttttgtatttgtattgcattttcttttttgttaattctatttgctagttgctaagtgctaattacctggcagattattcacatagccgccatccagcaagaggtgcccatctttaggatcgcataacggcggcatgtagccactgagcgacatggaggagcgtacgtaacgccacagagatcctggtatttaaaatcaacggcagacacatgccagcaatgataagtcggtgggtgttttgtgtgtgtttgtgttttgggggaggagaagagaaaaataagaaagattgagagaaagttgctttgagctatcttttttttaatggaggagagaaaggggtatatggaatggagaatttttgggatgggtagcaccaatggattgggttttaatgggcgcagcgatgcggggtggcttaaaagaggagcaacgagtttagcctctagcaaagagcacaatagccaatttcgatttatggcacaagctctccaaacaacaacaacaacaacagcgacaacaatgagattttaatttggtttgttatgtttcaagttcaaacaaaacggcacattcgattggcagcataacgccgataactagtcgattccacagcagaaaataacattaagaaaagtgaaaatgcctctacaaaattgcgggccatggaatgaggctgtgcctatgtgtgtgtgtgtgtgtgtgtgtgcgcaagtgtgtgcgtgcctgtgtgggcgtctcattgtctgcgatttaatttttgggcacactcagttctaaggctaccaaaggatcaaaaggatcagggacaacaaaacggtacaataacacattgaaggggggataataaactacaaaaagcataaaaaaggaaaatacccaaagaaaaacttatagcataaagcaaaccaaaacggggatatacaatcaagagtacaatgtattaacagcagtttcaaacttttcaaattacacatttcaatttctttcaaaaatgtaacttaatttactcgcctaaataaaaattcagagtattcagagccgaatatcagtttttagtatgtacataagatttagctttaaaggtcatactagttaagtacattgcattcccattagccgatagcccaaataaaataaaaacgaatagcgactaagcgacagaaaatgacagagacagccatatacaaagcgagggagacagacagaaagaaagatcaaatcgggagctttttgactactaacttaccattggtgtgaatgcgatggcaactggcggttatgtcggtggtgagggtgaagtagggtatccacaggtcctcgatgctcacgtccccgaaagtgtcgtggatcgtcttgttgaactctcgtccggagaacatcgatgtgatcgggtaggtgaggtcaagtagttgtaggaaccatttcgtcattttctaaaagaatttacatatatacattaaacatatatatgtacatacgacgaatgtgtatgaaagtaaagtactaacctttgaccactcgcgcgccttctgcgttaccgtggtgatattacgctccgagcaccagagagctcccatcaaggcaccgatgctgacgccgcccaccatgtcaacaggtatgcccgcctcctggatggccttcagcataccaatgtgggcagctccacgcgctcctccgccgcccagcaccaggccaatcgagttgcccgtaagccagcgcgccaaacgcgagaagtcggaatgcatgtttggctcggacagcaggacgcgactatagagatcattctgaaaggtaacaaatagatcgatgattagcatagacattgcagccaaggctattggccaacttgtgagcacttcctcatttcttacttacaatgcgatattgacttttgcgcgtgaagatccgcttgacgcagagcacatggtggtgctttgttacccagggtcgggcatttagccaactaagcgtgttggccggcttggcattgctggcctccggatatagcaggacgagctccttttgcgttcgcatcgccagccggtcgatctcgcgttcgaactttccgaccaggtgtgatcgatcgccgaggcccacgatcaggataacgtcagcctgtcgcatgcagcgctgtgtccacgcgctcagcgaactgtcacactgatagagggtgatgatgtttcggtcctcctgctgcgccagccacgaggttagacgatactcgttggctgcctcaaagatgttggagcccagctgcttgcgcaccacatcggaggtcaaacggagaacgggtcctgagcgagaaacagaagagaaacgttacaattggcggttatatcggagattcagtgcagcaatgtgaaacgttaccggacttatccatcgtgttctgaataaatcttagcggaaaagaagtgtaaaagattctatatgctgaaatctcgctatgcctgggactttgtcctcttattaccttttcatagtttttatatttaaagtgaacatttaactatcatagaaccttgtatagctacagagacatatatatccctttcattcttcttaatcaatgacaaataataatgtatagatagtactattgtcccacagattggagcgctcactagctttatacgaacctatggcacagagcgagtggtagagctcgtaggtgaagggcgtcatcggcacctcgtcggtgatgggcaccagggccaccgtggagtacttgtgcgtgacgggattggcctcgacgggcgcgcccggcgccccgctgcccgagcgcgtctgcatcgagccgaggaagcggtggctaaggaagctaatcagcttggtcaccacgatggggtagcgcagcttgatggcattgaacaggccctcgggcagcttggccagctccgagtcgcgcacagccatcaccgtcgtggtgcgcgacgtttccgtgatcatttcaacgatgcccacaagatcccccttgccgtattcgccgacgatctcctttttgccaccaggatgcgtgataaccgaacgcattcgcccgctaagcacaatatatgtgctgtcgctgctctcgtcctgccgatagacagctctgcccgattccagaaagatccagtccaaggcatagtcacactgcctcaccagaggcgatagacggcgtactactccgttgcccagatccaaaacaatgcgtggtcgttgtcgcatgatcctgtcgaggaaataaagcaatcataaagcaatcattttacttcattatgtaaacgcccaaacttactggtaaatagctgctcgtcggatgaaggctattctggtgatgcttctcgatcgaatggtatacgcactggcctctcccgttagcatggccagtccaccaacgatttcgccgggatgcacaaagtgaatgagcatgtcgctcttatcctgcttggcccgcgtggcatcctgattgctctggtaaacagccaatgtgcccgtcatcacaaaccaaacgcaaacatcgtccgcattgccctccgtaatcagggtgacattcggctccagttcccttaactctacaaaaggctcaatgatgtgggaatcctcctcggacagacccaattccttgcgtaggctgtccaccgctgaggattgcaccaggcgcatgtctatcgaggttgtcacaccgggtgtctgtagacacgagtgcgaaccatcgggtgccatcagagttatggaactgcgacgcgtggataggttgcccaccgaatgctgctgctgctgctgatggaatagatctgcattgggcgcatcgccatgcacctcggtgaacagattggtagtgccgtgaaaactaccatccggatttggattcggatcggatagcgtgtgctcctcgcgcgagtgtcgcgatggcgaggatggtggtcgagttacggtcaccgagacacccgatgatcccgttcccgaaacagcggactgcatcagattcatctggctgatcaccatgggcggcccattgggcgcctggcgtgaggattgcgaggtctgcgagttaatcggtccactcattgtggatacgctcttgtagcgcatgtgattctgcaccagttcggcatttagaccgaggtagttgcgcaaagcggtgaacagtacgcgttgtagccggatcataatcacctggatgacgcgaatcattacgtccggattgtcctggaacacctcttcgaatgcctgccaaagcaaggaggaaaaaaataagaagtaagtgagtgttcaatgaacatttagtttagttagataaactacctgcatgggcagacgaatgaccaccgatttctcaatggctttggcggtgaccgtcttatagtagctgggattccccgacaggacatcaataaagctgagcagcgatgtcaccgactcgcccttcctgaccgtcttcaatgatagtgtgctgccatcggcattggagatgtacacattgatcatgcccgattgaacgatatagacgctatcgtccggatcggttatcttaaacaaatagtcgccggccatcagttccagcaattgggtgtgcttgcagagccgcaaaaagaccggcttctcgaaatgtccaaaaatgcgaatgctctggagcatatagagtgcatcgggcggaactctatcgctgccctcgattgtctcctccagatactcggctggcggctccacggtgcgcatctctagcggcatattatcccgcctcagctggagtatccttctcgcgaaacgcatgacagcacgacgcttgtagcccttaccgctgctgtacatttgaccgctcacgttcttcattttgcgcagcattcgacggccgtagaatagcatcttgtcacgcttccggaaacgcaggccacgcatatcgccggatgaattggttacggtgctaatggaacgggcaatctcgtcgcgcaaacgcaaacgtgccattcgtttgaagtataagaaccaggctatgaagagcaggctcatcattaccagggcgaaatacatgtacacctgcaaaggaatttgtataagatagcgcgcaattagttgattcctcagttcaaaggccttcattataatggctgtggagtttggtagaactctttgctgcaaccacgtgaaaactgtctgatttcctcggaagttgaaatcgatgtcatatcgagctggttccaaacttaacattcttaatagagctattaaaggctaatataaagaaaatctatatatatatataagaaaatgttttttttttttttttttgttattcttgatctaaaattgaactaaaagtgtttgaagtgtttgaaagtgtttttgaagtaaaatgaaagggtaatctaactatgatataatatgcttttgattctatatggtttttcacttttgctgaaatgcaaaacaaaaaaatgtgaattcttgtactaatgtgccaactcctttgctaaatcacgtttcttaattattaattaattggttaattagtttcccattcttcttcagcttatgacattgaaacgaaaggatataagggtttttgatgtcgtctccaatatgattttcatttcgtattttccacgtcgcccagttatttaggatgaattatttagcacgaagacacttggaatttcccaaaagcaagtgtcacgcccgtgtaatcaagtgcatcagctgtgttttgttgttattttccctaaatcttgttgttgcactcggcactttgacattgaaacggcgacgcaacgtcgctgcacatacatatgtatgtatgtatgtatgtatgtttgttttattgtttgttgctagcggttctgagtgagttgttcttgttcgatgcggttgttgttgttgcatttgctgtttttgttgtggcagtagtttctcgggcaatttgttgttgctgctacccatttgttattgtctgcagtttccgcatttgatactacacagcgcgaaaaatgtagcgttttctcgcacttcattaaacgttaattatagtggcgtagtttcgatttctttcgatagaaataaacatttttttttaatctataagttgcacattttctttctcactgtgcaccttactgtttgtcttttattacccccagcaattattgtttgtttacagtttatttttacaacaggtttgcaaaatgtacaagaaaaaatgccataaataccaattgactcagtcggtctaattggaagccgaagctgcgccacacacgcacttatccaattggatttgctttgatctaatcggacagcacacacatacacacactcgcataacaacacgataatgataaaattcgcgcagtcacaaggcggctaaattgatttggccccaaggggttaattgaattattgaaaactgatttcgtacgcaccccccgcccacgattgcacgtgcttctgattagcaatcggttatcatagttatcagctcgggtggtttagtttttctttttttttttttgcttgcttcggggtcgcctgggtgtcattatcaatactatggtcgtgtggtgttatcatgtggctactgtagtcagtggtttttgtttttcattcgttttgttttatgtaaggccacaaaacaatttcgatttgtggcgacaaatgaaaacacggaagtttccccttttctcttccggtttttctcttttcttatcatttggctgggttctaagagagattagagtcctgaaatccacacttgccttagcctgtatcgttctaaactttagctggggtctaaacttcaatccgctgatagggtttactagaactaagttatggtaaactagtcaggaacagcgactatttcgattcttctacctataaatctaagtacttaacctatgatgtctggccgacatttattcgtcaagctaacattttgtaaaaatttttttttagaaaaatttccataaagataatgggattacacattaaaaaatcgcatacaaaatacagtggaattttctaacaggtgtttgctctcaatactcaagtgggttttcttgaataatgtctgtttactttactttaactacttaggtctgctttatcgctcattctgtgatttttatcaggggacctaatctttatggatgttgtcacaaaaaaaagctatattcataataaaattcttgaattatataaaagaattgtgacgtgagtacgtaaatacttattaatcttatattatatgtagcctggacatgaacctaaaacagctgttatcctgctcaagtaagatccacatgctctcttttcgctcacgttctctctcccgcgcgttaagcacggacacaagcccgaacagctgtaatcctgcatcgcatttttttttaagctttccagctgcccttctaatcctcgcgtcctctcgctctcgcacatattgtcttccaactgactcactcatattgcaaacaaacagcaagccaaagtcaaagcaaataaaaagacaaagaaagggtgaagtgcacttaccgttgctgtgatctgcttggagacatattggcaccacgcgtccgagaatattgtgttgtagctgccgctggcgctggcgcgcagcatttccaggacatccattgcgctcccttacgcggccagttttccaatgactctgctacgctgtcctttctcccacgaaactattcgatttgctgtttagttgactcttaatgttgttgttgttctgcctattttggcttatgtatgttccgtttatttggtaaatacgcaagtgtatggatgggacggggtacagggtggagggggcaaagtaaaatcacagccctttgttgttgccaccgtcgcgttctctctctccctcgctcacctactccgtccctagcttgtttgaatatgtcgcgctctatcgcactcacatttacagacacccccgccccacgtttgtcatgccttttgtgcaataattgttataatgcacgcaccgtaccgcacaaacgcactcacagccacgcacagcggagagcacagtttcttttgatttagattataaatcttgttgtttttgctgttacgagaatcatcagaaccaaagcaattgttgtttttttttgtggtttcttgcggaaatctttcgttttggttatatattgttgttgttgctctctctctgttttattctatctctctctctgtcttgaaggcggaggcggggggtggtttgccgttggatgggggggcgtggcaacgtgtaacgaaaatgttcttaatttactgagccgaaataaacgcgcattttgctatgtaactacaaactaataaactgaaatgcactctagaattattgttattggtatcgattcgctttgatggtggattgaaaaacatcgatatgcccggaaatcgattgtttcacagctgtgtagagcagcccgctagagtgaccatacaaagtcgactttagaacggttatttcaaaataatgttaacctttcgaaaaatttaggtgtatgcaagccgaattatttgatttggaaaataatacttagggcgtccatatcagaaaaaacgtttagccaattttaaaatttgtgttaggcacgttatgtagtcaaatatatataaataaattattcttattatttataaatattataataatatttaataataataatataatatatattcttattcttataaattattattattttaatttttacaaaagtgatatgctgatatgcttataaatgtaagattcttgtttatttgactttttttttaaatttcattatcattatttcttgcttgacaaccctatgttaagtgcgacactgcgttgacaacagctaagaacatggctgtggggcgacaaacttagcagagcgcgcgctgctagagcttaaattgtatttgaaaacagtgcaggtgaatcgaaaatgtcttggcatgcagtcaaacattaatttgcgagcataattaactccgcttaagattgctggtagtcaaggagccgtgaagagcggagacggccgctggtaatattcagtgattaacaactgtaaaatctaaaatcagtattaatattcatgtgtgttgatttaaaggattttggtgaaatccggacccgaatcggagctgaggtccgaaactaacgtgcaacatccaataaaagcaagtgcagcttgggttattagagcataaagcatctccaccagagtctcggttgccagccaagcaaaacggccgagacgcgtctttcgggtggccagctgcagtctcggatgcagtttttggctgcagctgcaattaaatatgcaatgcacttaagt

SEQ ID NO: 3680 - DNA, 5591 bp, DROSOPHILA
agtgcatttcagtttattagtttgtagttacatagcaaaatgcgcgtttatttcggctcagtaaattaagaacattttcgttacacgttgccacgcccccccatccaacggcaaaccaccccccgcctccgccttcaagacagagagagagatagaataaaacagagagagagcaacaacaacaatatataaccaaaacgaaagatttccgcaagaaaccacaaaaaaaaacaacaattgctttggttctgatgattctcgtaacagcaaaaacaacaagatttataatctaaatcaaaagaaactgtgctctccgctgtgcgtggctgtgagtgcgtttgtgcggtacggtgcgtgcattataacaattattgcacaaaaggcatgacaaacgtggggcgggggtgtctgtaaatgtgagtgcgatagagcgcgacatattcaaacaagctagggacggagtaggtgagcgagggagagagagaacgcgacggtggcaacaacaaagggctgtgattttactttgccccctccaccctgtaccccgtcccatccatacacttgcgtatttaccaaataaacggaacatacataagccaaaataggcagaacaacaacaacattaagagtcaactaaacagcaaatcgaatagtttcgtgggagaaaggacagcgtagcagagtcattggaaaactggccgcgtaagggagcgcaatggatgtcctggaaatgctgcgcgccagcgccagcggcagctacaacacaatattctcggacgcgtggtgccaatatgtctccaagcagatcacagcaacggtgtacatgtatttcgccctggtaatgatgagcctgctcttcatagcctggttcttatacttcaaacgaatggcacgtttgcgtttgcgcgacgagattgcccgttccattagcaccgtaaccaattcatccggcgatatgcgtggcctgcgtttccggaagcgtgacaagatgctattctacggccgtcgaatgctgcgcaaaatgaagaacgtgagcggtcaaatgtacagcagcggtaagggctacaagcgtcgtgctgtcatgcgtttcgcgagaaggatactccagctgaggcgggataatatgccgctagagatgcgcaccgtggagccgccagccgagtatctggaggagacaatcgagggcagcgatagagttccgcccgatgcactctatatgctccagagcattcgcatttttggacatttcgagaagccggtctttttgcggctctgcaagcacacccaattgctggaactgatggccggcgactatttgtttaagataaccgatccggacgatagcgtctatatcgttcaatcgggcatgatcaatgtgtacatctccaatgccgatggcagcacactatcattgaagacggtcaggaagggcgagtcggtgacatcgctgctcagctttattgatgtcctgtcggggaatcccagctactataagacggtcaccgccaaagccattgagaaatcggtggtcattcgtctgcccatgcaggcattcgaagaggtgttccaggacaatccggacgtaatgattcgcgtcatccaggtgattatgatccggctacaacgcgtactgttcaccgctttgcgcaactacctcggtctaaatgccgaactggtgcagaatcacatgcgctacaagagcgtatccacaatgagtggaccgattaactcgcagacctcgcaatcctcacgccaggcgcccaatgggccgcccatggtgatcagccagatgaatctgatgcagtccgctgtttcgggaacgggatcatcgggtgtctcggtgaccgtaactcgaccaccatcctcgccatcgcgacactcgcgcgaggagcacacgctatccgatccgaatccaaatccggatggtagttttcacggcactaccaatctgttcaccgaggtgcatggcgatgcgcccaatgcagatctattccatcagcagcagcagcagcattcggtgggcaacctatccacgcgtcgcagttccataactctgatggcacccgatggttcgcactcgtgtctacagacacccggtgtgacaacctcgatagacatgcgcctggtgcaatcctcagcggtggacagcctacgcaaggaattgggtctgtccgaggaggattcccacatcattgagccttttgtagagttaagggaactggagccgaatgtcaccctgattacggagggcaatgcggacgatgtttgcgtttggtttgtgatgacgggcacattggctgtttaccagagcaatcaggatgccacgcgggccaagcaggataagagcgacatgctcattcactttgtgcatcccggcgaaatcgttggtggactggccatgctaacgggagaggccagtgcgtataccattcgatcgagaagcatcaccagaatagccttcatccgacgagcagctatttaccagatcatgcgacaacgaccacgcattgttttggatctgggcaacggagtagtacgccgtctatcgcctctggtgaggcagtgtgactatgccttggactggatctttctggaatcgggcagagctgtctatcggcaggacgagagcagcgacagcacatatattgtgcttagcgggcgaatgcgttcggttatcacgcatcctggtggcaaaaaggagatcgtcggcgaatacggcaagggggatcttgtgggcatcgttgaaatgatcacggaaacgtcgcgcaccacgacggtgatggctgtgcgcgactcggagctggccaagctgcccgagggcctgttcaatgccatcaagctgcgctaccccatcgtggtgaccaagctgattagcttccttagccaccgcttcctcggctcgatgcagacgcgctcgggcagcggggcgccgggcgcgcccgtcgaggccaatcccgtcacgcacaagtactccacggtggccctggtgcccatcaccgacgaggtgccgatgacgcccttcacctacgagctctaccactcgctctgtgccataggacccgttctccgtttgacctccgatgtggtgcgcaagcagctgggctccaacatctttgaggcagccaacgagtatcgtctaacctcgtggctggcgcagcaggaggaccgaaacatcatcaccctctatcagtgtgacagttcgctgagcgcgtggacacagcgctgcatgcgacaggctgacgttatcctgatcgtgggcctcggcgatcgatcacacctggtcggaaagttcgaacgcgagatcgaccggctggcgatgcgaacgcaaaaggagctcgtcctgctatatccggaggccagcaatgccaagccggccaacacgcttagttggctaaatgcccgaccctgggtaacaaagcaccaccatgtgctctgcgtcaagcggatcttcacgcgcaaaagtcaatatcgcattaatgatctctatagtcgcgtcctgctgtccgagccaaacatgcattccgacttctcgcgtttggcgcgctggcttacgggcaactcgattggcctggtgctgggcggcggaggagcgcgtggagctgcccacattggtatgctgaaggccatccaggaggcgggcatacctgttgacatggtgggcggcgtcagcatcggtgccttgatgggagctctctggtgctcggagcgtaatatcaccacggtaacgcagaaggcgcgcgagtggtcaaagaaaatgacgaaatggttcctacaactacttgacctcacctacccgatcacatcgatgttctccggacgagagttcaacaagacgatccacgacactttcggggacgtgagcatcgaggacctgtggataccctacttcaccctcaccaccgacataaccgccagttgccatcgcattcacaccaatggatctctgtggcgttacgtacgctcctccatgtcgctcagtggctacatgccgccgttatgcgatcctaaagatgggcacctcttgctggatggcggctatgtgaataatctgccagccgatgtgatgcataatcttggagctgctcacataatcgccatcgatgtgggatcccaggatgacactgacctgaccaactatggcgacgacctaagcggttggtggctgctctacaagaaatggaatcccttcacatcgcctgtgaaggtgcccgacttgccggacatccaatcccgactagcctatgtgtcctgcgtacgccaactagaggaggtcaaaaactccgactactgcgagtatatccgaccgccgatcgataagtacaagactctagccttcggcagcttcgacgaaattcgagacgtgggctatgtgtttggcaaaaactactttgagagcatggccaaggctggtcgattgggccgcttcaatcagtggttcaacaaagagccacccaagcgggttaaccatgcctccctcaacgagtacacgttcatcgatctggcgcagatcgtgtgccgtctgccggagacatacgccgtgaataccgcggaactctttagcgaggacgaagactgtgatggctacatttcggagccgaccacactgaatacggatcggcgtcgcatccaggtgtcgcgcgctggcaactcgttatccttttccgaaacggaaatggactcggacgtggagcttgacctgaagctggagcgcaagacggacaagtccacacagtcgtcgccgccgagtaacagcaggtcggacatgcgcggcaaggaagaggctagacatatgtctaattggcattggggtgtgaagcacaaggatgagactggcagcggagccactgaagccacaaaaacacaaaccggtcaggagcaggaactccagcaggagcaacaggatcagggagctacggctgagcagctggtggataaagacaaggaggagaacaaagagaacagaagtagcccgaataacgaaaccaaaaactagctatatatggacaaacaaaacaattacaaatacaatgcaaattcgaagcgtggctatatactcaacaagaagcattaacaagccgaggacgaggtgcctttcgcttgccagacgcccaacggcacaaggtaaccgcccgccccccccacttcaccaagaaagcaaccgcaactactcaatcatcaaatctccaacgaaacgaagtaaaatatagcaatgacaaggaaaattgttaacctataggttttatagcaaccaagacttaggcttagcttagcgtatgaaacgattaacccacaatcctgcatcccatccctctcattcacctaaccaatccacacacattgtaatggaaggcacaagaagtccacaaactttgtatatacatatagttatatatttttactgaagcaaccgatattgtagtaccgaaattgagactccttcgcaatgaatccccctcaacacaaaatttagccccaaaattgccgcacactcgtgtagtctctctattattttaggcaacaaatcttttgtttaatggtcggattttttttgtaaatgcaaacaaataaatttaaaaagggagtacaaacag

SEQ ID NO: 3681 - protein, 1389 aa, DROSOPHILA
MYFALVMMSLLFIAWFLYFKRMARLRLRDEIARSISTVTNSSGDMRGLRFRKRDKMLFYGRRMLRKMKNVSGQMYSSGKGYKRRAVMRFARRILQLRRDNMPLEMRTVEPPAEYLEETIEGSDRVPPDALYMLQSIRIFGHFEKPVFLRLCKHTQLLELMAGDYLFKITDPDDSVYIVQSGMINVYISNADGSTLSLKTVRKGESVTSLLSFIDVLSGNPSYYKTVTAKAIEKSVVIRLPMQAFEEVFQDNPDVMIRVIQVIMIRLQRVLFTALRNYLGLNAELVQNHMRYKSVSTMSGPINSQTSQSSRQAPNGPPMVISQMNLMQSAVSGTGSSGVSVTVTRPPSSPSRHSREEHTLSDPNPNPDGSFHGTTNLFTEVHGDAPNADLFHQQQQQHSVGNLSTRRSSITLMAPDGSHSCLQTPGVTTSIDMRLVQSSAVDSLRKELGLSEEDSHIIEPFVELRELEPNVTLITEGNADDVCVWFVMTGTLAVYQSNQDATRAKQDKSDMLIHFVHPGEIVGGLAMLTGEASAYTIRSRSITRIAFIRRAAIYQIMRQRPRIVLDLGNGVVRRLSPLVRQCDYALDWIFLESGRAVYRQDESSDSTYIVLSGRMRSVITHPGGKKEIVGEYGKGDLVGIVEMITETSRTTTVMAVRDSELAKLPEGLFNAIKLRYPIVVTKLISFLSHRFLGSMQTRSGSGAPGAPVEANPVTHKYSTVALVPITDEVPMTPFTYELYHSLCAIGPVLRLTSDVVRKQLGSNIFEAANEYRLTSWLAQQEDRNIITLYQCDSSLSAWTQRCMRQADVILIVGLGDRSHLVGKFEREIDRLAMRTQKELVLLYPEASNAKPANTLSWLNARPWVTKHHHVLCVKRIFTRKSQYRINDLYSRVLLSEPNMHSDFSRLARWLTGNSIGLVLGGGGARGAAHIGMLKAIQEAGIPVDMVGGVSIGALMGALWCSERNITTVTQKAREWSKKMTKWFLQLLDLTYPITSMFSGREFNKTIHDTFGDVSIEDLWIPYFTLTTDITASCHRIHTNGSLWRYVRSSMSLSGYMPPLCDPKDGHLLLDGGYVNNLPADVMHNLGAAHIIAIDVGSQDDTDLTNYGDDLSGWWLLYKKWNPFTSPVKVPDLPDIQSRLAYVSCVRQLEEVKNSDYCEYIRPPIDKYKTLAFGSFDEIRDVGYVFGKNYFESMAKAGRLGRFNQWFNKEPPKRVNHASLNEYTFIDLAQIVCRLPETYAVNTAELFSEDEDCDGYISEPTTLNTDRRRIQVSRAGNSLSFSETEMDSDVELDLKLERKTDKSTQSSPPSNSRSDMRGKEEARHMSNWHWGVKHKDETGSGATEATKTQTGQEQELQQEQQDQGATAEQLVDKDKEENKENRSSPNNETKN

SEQ ID NO: 3682 - DNA, 2670 bp, DROSOPHILA
ctgtgtgttttccgtgtcccatttcgcttttgtttacattttatatcaaaaacttttacgagctacaaaatatgctcagcctgagccaagagcaaacaaatgcgagggaaaatgggcgctttggagggcggtaaaataaataaaaataaaattgatagcatgttctttggggtcttgtcgtcttatacatgtatgttagggtacacgcacatttgcatatgtgtttgtgtttgattgtgcgtgtgtgtgggtgtgtctgcgtgtggctgtgcgtggtaagtggatatatggtcggaattattggcatcctacggtgtaccttttttatacccagcccagcaaccgctgatcccgtccaattgcaattatcgcttacgagggattgttaaagtggttcatcttatgactttacattttgaatttgttgattttcaacagcttcttgttttattcggtggggggtaagcgaaaaaaaatgcgccattaatattcttaaagaatgatggtcatatttaaatatttcaacaatgcagcgtgctttggtattcagtttaaagctccatctttaaactaagtcttcaatgcttttatgttatgagtacgatataagtaccaatttaaaatatatatcttaattaaattaaaaaacttccaatcaagcaactgttaaaacaacattgattgaagaagggaaagtttgaattgccctgattgctaatttattgtcaataaacttgattttgtattttcttttcttattttactgaagagcttagctcatttatgttgaaaatatatctgagaaggattcaatcaataaattggccaaacaacgaaaggcaatgaaagtaattcattctcttgatgaatacttaagatatttataaatatgattacattgtaggacttcatatttttcagtaagttaactgtaaatttattgaggtccaaatataattttacagctttttacaggccattccccacaaagcggatatgcagatatgaaaatggagtcgtaacaggtaatcgataatcaaagtccgttcagcatagtggcctatcgcaaataagggctgtcatgtcgtcgttgccagaataaaatatattcctcctctgcatgtcgaaaattgaaaatttgataatgcctagaaggccaggaaatcgatggcctcgcgagctgcacgccggtagtcgctctccaggaagggaatcttgcccagcaattgaccctggctactgcatatgtacagctcgtacagctgctcatcctccggagcgagatctgtgtccgacggaactgttgggttggttattgtggctgtgatctcgagccttttcttaaacgaattgctatggaatcttagtcgaaagctaccgatcacacgctttgagagcagtttcctcttaatcatagtcttcaaggattggggcatattcgtgactgtggcatcgcattcgaattctggatcttcattgaactttatgttgtaagatcttcgcacctgcgcgaccttcatcgaataccttcttcgcaccaactccttggaacgcaccatcgaggatgggaagaatttggtgaaataagcattaagtttcaaaactggcattttttttgtttttttaatcgaaatacaatgtctgatttgaatgctgggtatatagatgatgaatatatctatagatatccagagttgggccgacagtcgaaggaaaacggctggggcaaagcttgcttttcatcgtaggaaatccggaatacggttgagtggcggtagaaactgttgtttacattgcccatacgaccggttggcgtatgccaaaaagtaacccacagcaacatggggctaaatcaaaatcagaatcatccatcgcccgcagcgggcatcaaggtcttgaaaactgtagaaacccagggaaaaacatgaaaactttactcagccccagtgcaaagtttttttgggactgagtctcacacccctagcaaaaacaacccctcaatctgtcggtgtttgtttttttttttcctccgtttaccttcttcaaatgcaaaatctaataaaattttcacattttattttgctgtttttgactgcaagttttcggcggtaaattggtgcatggaaagaaattgccatataattcggataaaatgtataaaattcagaaaaaatattacacaaaaagactaaataccaaaattgtacatataattaagcctagattaaaacatgcttctgctcggatttgttcctatttttctgaccttcaaatattcgcaggtaaaaaacgactgcaatgacatatgaggactataaaagtgaaagttgttgagcacacatacacacacagagaggactgtaagtactggggaaatctgtgcaaattgtgggtgtacatgtgtgcagcgagccattttatgttaacaactttgttggcccaaagcgctccgtgtcgtcaatatgttcatcattaacaactcgtcagcagaatgatgatgatgatgatgttgattatgccgaagtgagtgccatatgttagcccccgaaaaactgagccacattttggtggcaacaaatggctgaaatcaaccaaaacagccggcaacatcaaacgttgaagtaggggcggcaaaacaaatcagttttttattcaatgtgcccccataaa

SEQ ID NO: 3683 - DNA, 670 bp, DROSOPHILA
atcatctatatacccagcattcaaatcagacattgtatttcgattaaaaaaacaaaaaaaatgccagttttgaaacttaatgcttatttcaccaaattcttcccatcctcgatggtgcgttccaaggagttggtgcgaagaaggtattcgatgaaggtcgcgcaggtgcgaagatcttacaacataaagttcaatgaagatccagaattcgaatgcgatgccacagtcacgaatatgccccaatccttgaagactatgattaagaggaaactgctctcaaagcgtgtgatcggtagctttcgactaagattccatagcaattcgtttaagaaaaggctcgagatcacagccacaataaccaacccaacagttccgtcggacacagatctcgctccggaggatgagcagctgtacgagctgtacatatgcagtagccagggtcaattgctgggcaagattcccttcctggagagcgactaccggcgtgcagctcgcgaggccatcgatttcctggccttctaggcattatcaaattttcaattttcgacatgcagaggaggaatatattttattctggcaacgacgacatgacagcccttatttgcgataggccactatgctgaacggactttgattatcgattacctgttacgactccattttcatatct

SEQ ID NO: 3684 - protein, 136 aa, DROSOPHILA
MVRSKELVRRRYSMKVAQVRRSYNIKFNEDPEFECDATVTNMPQSLKTMIKRKLLSKRVIGSFRLRFHSNSFKKRLEITATITNPTVPSDTDLAPEDEQLYELYICSSQGQLLGKIPFLESDYRRAAREAIDFLAF

SEQ ID NO: 3685 - DNA, 6535 bp, DROSOPHILA
tatatcagattcctgtagtatataattatatacttttcaaccataaaaagaaacattcgatgacacaaagtaatgagtaggtaaaatatcaatataaatatatgtacttttgttacaattttaaatttagaatgagccaaagaacggaaagtgaacttcttttgagttaaggtaagaaaaaaaaacatttcaactatttttgatttaaaaaatcttttaaaatattaatatactgataatttgtatgaatattgtatacaaaaaaatatatatatatgcgcatatatggcgaaatcaaaagtagagcatattgaaatcgtatcgcagttcgaaaactgttttgaaagagggcctaattataggcaatacctgtatctgatatatagatcatagattgatattatgttatagttatgttatatagatcatagattgatattatgttatagtcatttgagaatgattaagtaaagacgcgatgaatgccatggctaccgatacggattacgcatctacttgtagagcagcggcaggcggcagtgtggctccgtctcgctgggattgtcggaatacagggaaatggtcctggcactgagatcgaagatgccaacggcaatggtcttgaccacctcgtcgcagctgttgttctcccgccagacgcagtaaactccgccggacacgtcgcccagcatgtggcgcacatcctgctcgctcatcggcggattgtacgctccaaatgtttgcatcctggagatgctcgagctaatcatcagatcgttggcctgatcctgccgaatgcgatcgaatctgcaatgtcacagttcgcagattacacaactatttatcaaactttccatccactcactgattgacatggtagttgtgctcgcccagcggcacctccttgatattcaaatgagactcattcttgcggtccggcgatggtgccatctccacattgtagcacatttggcggggatccctgttgggcattgccaagaggctcggataagtgaaactgctcaatcagattataccacttaaaacgtacgccaggaaggtgaaattgatggaacaggcatccgctgcacccactcccgcatccttgagcacgcggaaggcatcgtccacgttgctggtggccaacagagcccgggtgatgaagtgtcgcgctggtggagtagaagattcaataaaaaatgttaactatttgttgttggatatacttacgtgtcttgccgctgcgcaagagctccgcactgatggtgttgatgctgaagaccaatccatgatgattatggctcatagtgtatccgggcagatggccagcgtagcagagggacatgaagtgctcctccttaacgttgtacttgccctgcggcttgtcactgatgatgtgtgccaccacgaagtagtagtgattcagggtctccgtcagtgcatcctccgtgtggcccaaaaggcgctattgagatataagatacgttatttaatgaccaattcaagattaaagccattccattcactcacgcaattcttttggttaacaatgatggtggagcagccggttggttggtttttgctacgtggttggtgcttcaatgcctgcggtagaatctcatccagatgcagcaaaaatagctgaaattatagaaaaaaaaaacaggagagattgccatatagtcgattcactcgataatcagaatccgtaaagcccgtagatttgatataataacaaacaatgttttataacggctcattagttaatttaaaccagagatcacttaaagttaatcaaacacttatatacacctggcttagtcaagccaagctgctaatgaggctaaactagtgcgatcgctaaagacaataataatatggctcgtaaattcgtctgttttaatgcgctcataatgcgactaatttgaattataaaaccacctcccctcaccttccatcaccacgattagcagtgccacctgaactgggggcgccatggtgatcagtcagtccaaccaagacgaaggcaacgcaccatgaccatagccatagaaatagacacatattctatgtagacttggccaaggtcgatttgcgatttttgcgtgcaattaattggcatcgaagttgcgagcgcagaaattataacacattatcgaggcggccatgcggtccataccagctccttaaccattcccatctctcatccataatcatcatcgagctacttgaccattgacaaatgataatctaatggatgactttcacttctcatttcccatacccattttccgccccaataccaattacgagtaccaatcccacgttgaatttcgattcaaattcaatgaagccattcaagggttcttcatcgtctttcgccggcttctgttgacggctttttctatttatgtgtgtgtgtgcgccttgaccagtgacaaattggcttacgaaaaaaggtaagcatggtcattaaagcctttgaatactcttttcttgcgaagagaagtttttatctaattttaaagatttctactttagataaatttcgatcattatagcctctccggaaaacggattaacttctggattatagacattaatctgagtgttatgcaaatagaaaggccagttggatggtcaagatcacttaggttttgaaatattttaaagaaaagctatagagtgcagtgatcccgtgtgaaagggtaaatggtaggtagatagatagtcgcctggcaaaaagaccggctgtctatcacatatcacatcattctcaagaccccagcaaacggaactagttcaatgtctgcgctctgcacggtcaccatatcgagttgtgcacagtgggccctgcctggcagcgacgcttagcgaattcacaaacgatcgattgtacaagcgagttaattagaagcgtcatcaaaggcgcaaaacctaattgcactgcacatcagcgagtgattagataagaggcgatcgaagtcatgaatatggaatagcatgcaccgtagccaattagcactgtactaagcggggcactgcactcacaaattgcatttaatgctgtcattggtggggcctacaatcggcaaatgcaactacaactgccaactgcaacttggcaacacgcaacacgaaacttatggtttttcggaatcggttgccacttgagcccataagcccatggaatggagcccgccgtaccgttagaaccctatagaacatggaacactcgaatccgaaaccgaatccgaatccaaatccactcccacgacgtcgggccttgttgtgcgattattatttattattgttcaattacaatattttagccagacttgtggcaattatgtgtattcgttttaatggccatttaattgtattgcattatattataatgctagaatgctaaaatgctaaaatgctagaatgcttatttgctaaaatcatgattagcggacgattgggcgctaattagctgactcaccttatggaattccacctccgcaccatcggccacgccctccagttcgcgcacatattgagggaagctgtccttcaccgaacccagggtctcgttgtagatctgccctgcgaatgggaatggaaaccgagtcgaatgtagatcacccaaacccgaaacaccaccaaccacatggatggcactccagaaccatttacggcgatactcactgccttttggcgactggtagagcggcaagtaggtctcgttgaggggcttcgataagatcagaaagttcttgatcatggacccaaatgtgcgaccctgcaattgacaatggtttttcaccatttatatatatatattataatacgtatcatttaaacgattaaatgctttcccatttggacacgatctcaaatcgattcgccaaatagctcgcggtgtttgtttaatgaaagacaacaaaaaggagaaacataatcgatcacgaccgatcgcagtgtaaacaaagccaccaactaaggcacaaaaaaaatatgaataattatacaaaattgtacaatatagtattcaaaacgccgcaaagtgtttggaacttgacatgggttaaccttttgggtgagttcccccgcatggacacggatgcgaacgcggctccatcaacgaataatggtcatttattaattgcaaaataattaaatatatatgaaaaagcactatttatccaaagtttggcacaagctgctgatgtttgtgggtgtaattatactttttaatttacttgtcacttcaaaattatattgaaattaatatttgcatttaaatcatttaagttcttgcacatttccatatttttatacagttcgcgaactttaataatatttaaaatgaagatatcgacactggttaattggttaattgttttgcaagtgtagccaatattcttggcccgattggcacgggaaaaagacagttggacaaagccacgagaatcacgaatctgcatttgtaaatagcgtctgggtccgggagttgtcaaacgaatcgaggtctccgggtggcccggccattaagattaagcccaaccgactttagtttattgcgaccgcaattcagattaaaatgtgggttatcatcaggtggagtccaatagatacatgcatatatagatagaagcttggtgccaaattcctatatacctcttgctcacttttgcacaccaaacatatatatcttcatcttaatctatagtaattgggttcagataaggctgctctctttatggttaatgcaactagttacccctttaattgttattaacatgtacttttgggtactttaagttctgtctgacagttggcccattttagagcttaacttgatatattttattatatattttattatacaatataaagcatcgtaacacaaaccattcaaaatccaattagatattttttaagaatatttatattaaacgtatagctcgttatcactattaggttacaaaaaaaagttagagctttaagtggcttttgccagatatatggttgctaatatggtaatatttttttctagtgaaaaacattaaacagttacccgttcttccccaaataaacttctaataataaacgcagagccattaaacatttagattgcgtgacaccagttgagttcttaaaggtcgtgtgagttttactacatacatatgtatgtacttacttaactaaacttaactaaaaagaacttaccatatcgaagccaacttcgtaatgggtgcccctggtgtagagcactggcaccgcctggcgacgtggcaggatctttccggaggacatcttggagatctgttgatctaaaatgggttcggggttcggcgatgggaacaactcttttttttttgttttaagcagtggaaagctctttgcactcggcgcaaaatagaaaaggtaatcaagaataagacgcgtctgttgatgataacaaagtgtgagttgtaaacaaacaaaaaaacaaaaaatagttagtattccaatcagaatgccagctgatttgttctagagcgcttgaaggcagaattcaaactgatttgttttgttttcgcgccgacgaaggcaggcgtcggcagagagcgctgctgcagcgtcggcggcggcggctgcgtcggcgtcggcgttatcgattaccgaccgttagttaacccactaatgaccgagatacacgctgtgtagtttgggttaagttcattagaggggctgatgcaattttgcagttataactatgacttcatactttgctttttagcaagtccagagatcagctgggaatatatattgtacatatatactaaattattttagaatcaagttcactgaccccaaacggttatttcggaagtttaggaacaaatgtaaattttgttttaacttcattttatagtgtaacataaaaaatcatcgcccaaaaccggctggggttaagggccgcttagaactttcagattccaaaaaccatagattattcagcctacttattagaagttgttgactgcgtcccaaaaaaatctagatattagaatgctttcggctggtaagtcaattagtccgtcgtctaataggctttgcggcttaatggaacgctttttgcctcattgtgttaccccttttctttgcgtatacgtaatatgagtgctggaaatatccggcataccccgatgctaccccctctttcgaccaacaaactgaccatgaatattttcgcttttgtttgccgaccatataaacacgttttcgattgtttcgccgttttcttttctttccatttattgcctttttaactgggttggattttgcattccccgattttctgcttaattttcacgccaaatgaaaagcgtgagaaccgcgaacatacataatattcattagcgaattatagattgggtttggttttcagttctaaattttcagacttcgcaaattaaatgcgaataaataaatatttaagcaatcaatccagatgccacttgcatattaattgtattgtttttcgttgtattttgtttgccat

SEQ ID NO: 3686 - DNA, 1395 bp, DROSOPHILA
caagcgctctagaacaaatcagctggcattctgattggaatactaactattttttgtttttttgtttgtttacaactcacactttgttatcatcaacagacgcgtcttattcttgattaccttttctattttgcgccgagtgcaaagagctttccactgcttaaaacaaaaaaaaaagagttgttcccatcgccgaaccccgaacccattttagatcaacagatctccaagatgtcctccggaaagatcctgccacgtcgccaggcggtgccagtgctctacaccaggggcacccattacgaagttggcttcgatatgggtcgcacatttgggtccatgatcaagaactttctgatcttatcgaagcccctcaacgagacctacttgccgctctaccagtcgccaaaaggcaggcagatctacaacgagaccctgggttcggtgaaggacagcttccctcaatatgtgcgcgaactggagggcgtggccgatggtgcggaggtggaattccataagctatttttgctgcatctggatgagattctaccgcaggcattgaagcaccaaccacgtagcaaaaaccaaccaaccggctgctccaccatcattgttaaccaaaagaattgccgccttttgggccacacggaggatgcactgacggagaccctgaatcactactacttcgtggtggcacacatcatcagtgacaagccgcagggcaagtacaacgttaaggaggagcacttcatgtccctctgctacgctggccatctgcccggatacactatgagccataatcatcatggattggtcttcagcatcaacaccatcagtgcggagctcttgcgcagcggcaagacaccgcgacacttcatcacccgggctctgttggccaccagcaacgtggacgatgccttccgcgtgctcaaggatgcgggagtgggtgcagcggatgcctgttccatcaatttcaccttcctggcggatccccgccaaatgtgctacaatgtggagatggcaccatcgccggaccgcaagaatgagtctcatttgaatatcaaggaggtgccgctgggcgagcacaactaccatgtcaatcaattcgatcgcattcggcaggatcaggccaacgatctgatgattagctcgagcatctccaggatgcaaacatttggagcgtacaatccgccgatgagcgagcaggatgtgcgccacatgctgggcgacgtgtccggcggagtttactgcgtctggcgggagaacaacagctgcgacgaggtggtcaagaccattgccgttggcatcttcgatctcagtgccaggaccatttccctgtattccgacaatcccagcgagacggagccacactgccgcctgccgctgctctacaagtag

SEQ ID NO: 3687 - protein, 387 aa, DROSOPHILA
MSSGKILPRRQAVPVLYTRGTHYEVGFDMGRTFGSMIKNFLILSKPLNETYLPLYQSPKGRQIYNETLGSVKDSFPQYVRELEGVADGAEVEFHKLFLLHLDEILPQALKHQPRSKNQPTGCSTIIVNQKNCRLLGHTEDALTETLNHYYFVVAHIISDKPQGKYNVKEEHFMSLCYAGHLPGYTMSHNHHGLVFSINTISAELLRSGKTPRHFITRALLATSNVDDAFRVLKDAGVGAADACSINFTFLADPRQMCYNVEMAPSPDRKNESHLNIKEVPLGEHNYHVNQFDRIRQDQANDLMISSSISRMQTFGAYNPPMSEQDVRHMLGDVSGGVYCVWRENNSCDEVVKTIAVGIFDLSARTISLYSDNPSETEPHCRLPLLYK

SEQ ID NO: 3688 - DNA, 11099 bp, DROSOPHILA
gttatcattgaattggttggctagccttaagggcagtcaacaacggagagacgttctcccaccatatctcccaatctaggagaagaggtctgcggcaaccgccctgcctcccagtgacagaggaaccccctgttacctgcaacctacgccggagaccgcggcgagggacctgcaccttatatttaattaatttatatattataggtttatttatcttcttggttggcttgtctcgtttatctgcatttgtaatattaattaattgaaaaaaaatactaacaaaaagaagaggttggcttggatatacatatgtataatataagggctatgcgtgcttgcacattaatctgaatcccctgcacgcatttacacacataaaacttgcatacaaatcgcgtataatacagtgtatgaaaaactgcgctcagtgttcgcagtaatacatttatctcgaaatcgcttgccaagctccacacacttaaaataataaacaaacgaaacgaaacgaaacgatacgatgtacgaacaaatatcaatcaaaaaaaaaaaaagaaggaaaatacaattacacaatttgaggaagaacttttagcgaagagtccagcaaaacgcgcacgcacacaaaaaaaatacacatatacatagaaagtacagcccttcttcgacatcttttcaagcttttttggggggtttagagtacggagaatacagagtaagttaaaaagaacactaaacaaaattgaactatgaaacaattgaaagcactttgccctgtgtatctgtgtgtgtgtgtgtgtctatctatctgtttctgtgtgtgtgggtgtctcatgtgtgtgtgggtttgtgtttggtgtgttagtgtgtgtgtgtgtgctttaggtatggatgtgtgcgtggcctggtgggagccgttggtctcagagttatacaatagttgagttgtcttctggggtattattcattattattatacattttttttctctctctcttttttgcttttcttctaatgggcaggcggtacggtaaaaaaggtaaaaagatacatttaacagatcacttcatgctgttgccagtcgtctttcttgttgttattgagcagttggttccgggggactgggagtcaagaactcaggtcctgtgtctatactttacacttctaaattgctttcatttctttttttagttgttgttttgttcggtttcggcagcgttctgagctaaatctcaacaatcagttcaaaaaaatggtcttttggttgacattgtggacgcatcatggaacacatcacaattacagacgggtttcaaatattcatgtctttaaaagataggaggattacacctgatgctcggtgctcggtcgatccatgtccatgttgtaaaataatcgtatttgatggcgattgcttctcagttcgcagtgcccccttgcgttcacgatactgctccgtcagggatcagaattcgtttggttgatttgttggttgattcatcgtcggtatagctgcagctccctcccacgtctcgcgatctctgtacctcctaccctgcgtctccggcaatcacctcctacatgtgtatcgtggccgccgtgtagcgggcctcgccacgcctccatgaccactggctgggacggaactgtgaagaaagtaacaatcagttgggtccacaaagcattacaaacgagagtgtacaactgaaatgtatcctatcatctcatattgcatcattgaaaatataaaaaagtatataaagcttaaacatttaaataaaaaacccaataatgattatagaacacgctttgcagaggcgcacaaacctgcttggactgcatgtaattgaaagaaatggaacagcattgagtatccactgatgggcaaaggataaatatggtcagacaatggactcacctggatgagcagctggccgctcttggtgtgcggattgcggtacgcgtagaagagccacagcgtcacggcgaacaccagacagatgggcaccatgaagccaaaggctacgcccacattcttgttgtccgcttccgccttcgatagctcggcattgccgacctttccgtccgcatggatatcactggagtgatccactcccggcttaatgtaagcggtggcatgtggtgccctcgtactcatcacgctgggctccgtgaccggcgtggatgagccgctggatgatgttgaggtatttgtcgcaccattggcactggcaccgctgttcgcagaaccattcttaccctggccggcagcattgttacccttatcgccgagggccgggcacaaactactggtatgaatggcggtagcctcacatcctgcaaacatataacaaagtaagattccataaaaggatggcagtccggcagagcttacccatttggagccactcgtgctttttgcggtcggtacccgtggagcagcgattcagcaccgagcaccataggcactgcaaatatgaaacattagctggtgaatcattagatggttacccggaatgtcaaagtactcaccgtaaacgtagtgttgtggttgatgcacgaattgcagtcattgtagccaaggcaggtgggctgtgccgccagcttgatgatggtgttgttggtgatctcgtgctgctggaacgtgacacggtggtactcatagattgtctttcggcgggcaactggcgaagtgaaaaacataccgattagctgcaacaatcacggcaacaaaagcgaatagtactcacagaatagttgcttgtcgataatgtaggcgtcggaaaggccgaccttgaccggatgctccttgtcctggatggagttgatgttcgtgggcaccagcatgtatgcgaaaacaatgtcgccactctggtacagggtcacgctgaacgtaaacttgccaaaatccggcttgtcctgcagcgtcacattctcccacacggcggtgaaggcggttcctggaaaaggcgaaacaatatttcactttttttctaagaccacaaattgttttatgttttcggcataagtggacgaacaaatttctaacataatttccacatatatattgcgaggatttaatacgtgttaagtgtatcgtagactttaaactttaaactttaaactcaccattgtcatgcaatcggacaaacgagtcgttggacatgctcgtgtcgaaattggccatcagcggggcaatgtactgggtggccgccagccaggagtggacatactcgccggtgtaaaggaatccgccggtggccaccgtgatgttgcgcacaaagtgtccgtagaaggggaaatcaaacttgagctccaccgtcatggccctgcgatgggacgacgaaagcatgatattttcgggcgtcgccttcagttcggtccacagtgaggccacctcgtccttgttctcatagagcacactgttgtagtattcgtggaagtcaacgctctccttcagcgatgcattcttcaccgctgcctcgatctcttcctcgggcacgtccactactttcgacacgtccacatcgatgaccgccggtgagggatccgtcatggttgcagcgacgacagaagatgccaccttcttgggattgcccgactggcccaatagtgtgggcttcttggtagccggcgccatttggctagtggtattggaatcgacggccggtgccacatcgtatgtcttgcgctgtccagtgccattgactccgacattgtgcacattgtaggacacactaccgcccgctgccttattgtccacggtggtgaccgtggtctctgcagccactcctccgccagctcctgccgctcctcctgcttccgcagtggcattggcagacactgcgcctcggtatgtggtgactgcgggcaacggtggcgatacgggcacggttcgtctttgacggtgcagtcgatccgttctcagtggcactactccgtatgcggcaatatttggcagatttgtgtccactatctcgtacgtatcctgatgcactggcgacgagaagagcaggggaaatatgttagctgttagcaaatgtgagaaatttcccaactaatgatgtgattcattccggagcaggaaaagccgaattgtaaggattcgactggcgattgtaatcgagcgatgttacgagcatgtcgaccaagtcgaatgcatatcctggccatgttgggccccacgggcaaccaggacattcgttgaggctacaaccgcatttcgtgctcatttgcttgtgttgtcaattaaccaagctgttacttgaagcccttctcgatattgattttctatttccatactcacatatgtatgcacatggcatttggtggtacacatgtatacatatatatgcatgtacgcctacgaataccacaataccgcatcaaatgccattgtcgacagcccaccactacccattgcaattacaacaattacagcatgcggttggcgtttttcgggttgggtggttggttgggaggtgcatgcatatatgcatagcgcacaaacaaacaatatcgattacaattgctccggccataactagctgttagccaaaactttcgaatgccagtgtgttggccatgattgattgatttataattgttttgcatcgctgttacatggaaaaccaagcaagatagctccaaattataggacatacgtaggcgataagacgattccagttcacatgtttaatagtaaaaggtgtgactgatttttgtttatagcgtagataccattctgttcagctgataatagtgtgggggccattgaacccatctaccagatgcatttgttggcccatttcaaaacatttcggagagactaacgcattactatacattactaaattcttttcggtcagcttcacacaatatgatgcgtttcgttggctatccagaaaattggtattggagcactttcgccagggaagcgtttcgacatcgctcacccgtgagactttcgattcgcatcgttagtcagcgcacttaccatgcttcgtaaagtgaaacatgtgttcaaaaaatgccaataaaaagttgctatttacagtgcgagaaacagtgggcacaaatttgagtggcaactgtaaaagcatttaagttcttgaaatgtgaaaaggacagctgacaaagtatggtaagcatccttttttttttggttgtcaagcaaaagtaaaatgaaatccattcaattaaatactttcataacaattattcactgcagatggggacaaagtgacgcagcacggcaagatgacatgcacatccattggaggcgtcacctgccacccgccaacacccactctctactggacagcacatccaccccccccccctcccccagagaaccccaccactagcccctcgtccacaggcagcgatcaacattcgcgtgacgccgatccaattgaacccagtgttaattgctgtaagtggcggtttgtagtctttccccagggtttctgttatggtcgttgaaataattggcgtaaatttatgccgcacttgattgaaaaccgattcgtttttcaatatatgtatatctatctgtatgtaggtatctcagcgaatggaacaatgccagttccgtattcccaactcaatttgctcagatcaattcgaatcaatgttgtaattaatgtcgtactgtaagattttagttcatttaattgcaaaagaaaaaagagtgtgtgtgtggtttttctcagtgtaaaatgccatgatatgcgacctttgagcataaacgtagaagaagtccacaagtggtccgcataatttgcacgatgccccactttcgggaaaaaatctttaattgtcgcttttttggttgccattgattttgcaaaacaaggtgtgaaggacgaatgaatcaatgaaagtcgatcatatatcgatgataccagtcaatttcaagttgcaaaatgccagatgtgataagaaggttagcaactttttttttggaatttatcacattttttaggggcattgcagtgcaagttagcaatttgcataagttttcatacgcatttccttaggtgattttctacttttataactgccccattgaaataattccctactgaatttcaatttatgcttgggcatcaaaataccttttgcttatcagctaaaaaattgtataatactttttattaacatcgtgtgttcgtggacttttgaaaaatggttttctatagctgctcgaatgaaggatgatcaattatttttcacccttttgatcctttgaaagaattgtttatattactcaattcgggtgtgcaacatacatatgtacatatgtttattttagcattcggctgaatttgcattgtggaatcgcttgacatggagcacgagaatttaaatacgtcagcaatagcgttctttcttctttcaataaatatatgtacgtacttgagcatgtatgtatgtgtgggtatgtatgtacatacatacatatattggctgaacttaattactaatacactgagatttttaaagtttgctgagaccatttaaatcgtatatttaaattttacaaactaattactcaatagatcttaactttgttgcttagattctatttcacattgttaaaatttttgtgcagttccttgttctagctttattaacctgtatgtatatatgtttgttacctgcatcactgattattttttatcagcgtttccctaaaaacccaacaatttgcgtcgcacgcttttacctgaacctgcccagttaattggcgggcggtataccacgtaactaaacatgactacactgagagaaagtgcatacatacatatgcacaggatcaagtcataatgcacgctgttaattgcatgtgcatagttagcattatgaattttatgccaaaaatatatgatttaccaatcattttgtattctttctgtttaggacagataaaataaaatacgacgtttgctaaatggaaaataaattggcttatactgtgcaaaatgattactccgacatttttagtgggcattgctttcttatcgcactaactaacttggtatatacccaaaaataaagtaatttgagtagctatttttgtatataacgtaaattaactgcgtttttaaagagcgaatgcggttctaatccaaagttcaatgtaaaagcatggtattttggttgcttgaataatacatttttctctctgtgtacccagcgccgtgcatttgtatccgctgtttgcgctggacagacgtgtccggagtgtcaagacattaacagttcttcggtcgccgttaggcggaaaagcttatcagccccatccattttaattttttttttttgtgtgttcttttttttttttgttgtattttgtgtcttggggcaaaaacgggggcaagccgcagctttttattcagagaagcgaacagcagggcagccagacgacaatgatgatgatgttgatctggtgctaatgatgttcccatggccaagagaaacattgacaaacgatgcatttgtcgaattgcgcagatcttgcggattcacaatgggtttcagttgttcagaggcccatgggtgggaagtatagaatgaaaggaaagatcttccaacttgaacttacatttcgaatagattcagcccattggagagcattcgaaacctgtttgcgaagctgagctgttatctggctataaagcagaacacattgactttgttaagcattttagcaccgaacgaaagataacctgttgtacctttttgtcatctgaggtctcgtagtttccttttcgtttcgaagaaatcacttagattgtaaaatatagtcatcaaagttgatgacctgacacttttttgacaccgcacttggagagtaaacaaaggaaatcagctagttaaccgagttgggaaaacacgtattgtgaactcggaaatgggaattgagtttggggtgaaaaataatgcattctacaaaaaataagttttcacgtttccaatgacgcaccatcattcatgagttagtaactctccattgcccaggttaatgcaatttaaaaactttcactgcttttcatgccggaaaagcagcgggcatggataattagataattcagagtggctgactggatggcaaactgtaaaacgggaggagtgataatcgaagcggacagaacggcttctgtgtgcccagagattggagcaatgagctaacgcccttgataagcgatggtgccagtagcggactgacgccagatgcaagtccaacccgagtgggttgcgaattataatttaaatttgtgatagagataagaccttggcaaatgtgctgttctcagaaagaaacttaacatttgtgggcaaatgcatttcaaaatgtttcaaccaagagaaatgtaaccgcacacaatctcttcgaattatatccagcttggaggattttgtagaagtgtatggcagatcaaagcggatatttcgcaaagagaactatgcagcttgtaaacaaataaaaaaaaaacgaattactttgtaaatacccaacatacatataaacagtacagcgtcgagtcatttttatttaggtactttgttttcctagagcaaatctagggggtatacactgcgagaaacaaaggtgcgccgtgtggattctagatttcgataacgataggcagcggcggccacgcagatagcggagtgcactttaactgatgtgtggatgagccgataaggagacaaagaaagcgaaactccgttcaaactgaatcaacaagacggaaatacgtgtagccgtgtgtgtgtgtgtgtgcaaagtgggcgcattcagtgggtggttggtattaaccgttacgtcagcacttttccgccgcaatttggttttcctattggcaaattgcgaaatgaaaactgaaaagtgccgttagccggtggcaacaaagttgccacctgtcgcagaaacgcgcgaaagcgaaagaacggtggcaaacgagttgccagcttgttgtttcgtcattgtttctgttttctacgttacaaattatttagctgctccagcgtttgcgtttcaattgcaaattgcgacaaaaacaatgagcttttgcgccccaatcagcgatttcaattgatatatgcaggttgttcgcctggtggcgatgtcgcagatgggaaattgttgcacgttaagtggagcatggcgcaaatgagcacgccgcgcacgaaacaaaactcgaaataatacaaagtctgaggtggcgggagttggtttccttttcttcttctttattttcaattttttttttttaagtgggcttgtttggccacaggacgttgcctattttcacacttaactgctctggcacacacacacacacacatggacacacgcacactcacttttcgttgttgtcaattaacgcattttgatgtgccagcacacgaaaaaacagtagaaaaaaaaagaagtatatacaacatggcagcggtaaatttcaccatacgaaaaagtaccaactaatatcccactacccccccttcgccaacaaaagtccactcgatgatgatttgtctttttattttctgtgaaccttgtgtacaaacaacagttcataaatatattgaatacaccttccaaaaaaaatacgaaaactacgcgccaagtgtgcatagcccgcccctgcaaatagatgggctgtcttttcctcaggtgtttgtttctctgtcttattggaattttcgtcttattcgaactgcgtagcgtacaagaaaataacaaccagatttacagccaacacacacacacacgcatacaagcaaaagcacattgacagagacacacacacacacgtacgcaaagagacaatcgcacacacacacacacaacaccaacaaggtggattaagacagagatgggtaaaacaaaagagatggagaaataagcaaataactgcgaagcacccattgtcgagttcacttacacacggccgacgcaagttccgatgcactgcaagtgatggccaaaaggatcgcaatttgcgcgcacgcactaccgacactcttcgccattgttcaaccgttatttcagccgttgcgagtgaaaagtaaagtacgaatgctgagcaactagagatggtacgccatgctaggcttaatcgataggtacgatgcggccagataaactgaaataatcgataaaatatcgcttatcgtttagaattcgatctattcgatagggtgtccaattttaaaaaatgttcgataaatacgtgtaaaatatattcagaaatgcagtcgagtacaaataaaaataaacaattcagcacatttacgcttgaaaatgttatgctaaatagcatacattcccttatcccgaccattgattatagttgtacacctcgttgggcgagcagagattcggatagttggagtttcgtcctgtagtgcattccgaggcagcggttcccgccctgtaaaccgggttattcaccacattggtgaccgcgtagttgcaagccagcagggtggcctgcacattgttggcgtccgtaaatcgagcaatcgcacaacccactcggttatttcgctcgttgaccatggtggtgaagtggccaattgctctggaaaggagttaatgggattaccaaactcgctacggcttggtggtgtacttacggtccaccgcgcatctgatagtcctccatgtcgccactggtcgcatcccgattctcatcgaaccaggcggcgatccgttggcgcaggaagaccgccacatccacacttcgggtgaagagaatgctcagattctggccggcatagcgatacgtgttcgtgttgcggcattcgtcgtgcgccatgcggcactgcagcgcattgtaggcggccagttgggccagtgtcgtgtcccaggacattgtggccatttggacggcactggggaagccactaactccaccgccagcgatcaggttgcggcgttcgttgtgcagctggagaatcagcgggatgtgggcatccacttggacaaactcgccgctgcaaccgctcacaaagcgctagaaaaagtcgacgaacaggattagacaggatagaacgtgagagcgttggaaacaggtacagttgaacc

SEQ ID NO: 3689 - DNA, 2510 bp, DROSOPHILA
ttgctcagcattcgtactttacttttcactcgcaacggctgaaataacggttgaacaatggcgaagagtgtcggtagtgcgtgcgcgcaaattgcgatccttttggccatcacttgcagtgcatcggaacttgcgtcggccgtgttgcatcaggatacgtacgagatagtggacacaaatctgccaaatattgccgcatacggagtagtgccactgagaacggatcgactgcaccgtcaaagacgaaccgtgcccgtatcgccaccgttgcccgcagtcaccacataccgaggcgcagtgtctgccaatgccactgcggaagcaggaggagcggcaggagctggcggaggagtggctgcagagaccacggtcaccaccgtggacaataaggcagcgggcggtagtgtgtcctacaatgtgcacaatgtcggagtcaatggcactggacagcgcaagacatacgatgtggcaccggccgtcgattccaataccactagccaaatggcgccggctaccaagaagcccacactattgggccagtcgggcaatcccaagaaggtggcatcttctgtcgtcgctgcaaccatgacggatccctcaccggcggtcatcgatgtggacgtgtcgaaagtagtggacgtgcccgaggaagagatcgaggcagcggtgaagaatgcatcgctgaaggagagcgttgacttccacgaatactacaacagtgtgctctatgagaacaaggacgaggtggcctcactgtggaccgaactgaaggcgacgcccgaaaatatcatgctttcgtcgtcccatcgcagggccatgacggtggagctcaagtttgatttccccttctacggacactttgtgcgcaacatcacggtggccaccggcggattcctttacaccggcgagtatgtccactcctggctggcggccacccagtacattgccccgctgatggccaatttcgacacgagcatgtccaacgactcgtttgtccgattgcatgacaatggaaccgccttcaccgccgtgtgggagaatgtgacgctgcaggacaagccggattttggcaagtttacgttcagcgtgaccctgtaccagagtggcgacattgttttcgcatacatgctggtgcccacgaacatcaactccatccaggacaaggagcatccggtcaaggtcggcctttccgacgcctacattatcgacaagcaactattctttgcccgccgaaagacaatctatgagtaccaccgtgtcacgttccagcagcacgagatcaccaacaacaccatcatcaagctggcggcacagcccacctgccttggctacaatgactgcaattcgtgcatcaaccacaacactacgtttacgtgcctatggtgctcggtgctgaatcgctgctccacgggtaccgaccgcaaaaagcacgagtggctccaaatgggatgtgaggctaccgccattcataccagtagtttgtgcccggccctcggcgataagggtaacaatgctgccggccagggtaagaatggttctgcgaacagcggtgccagtgccaatggtgcgacaaatacctcaacatcatccagcggctcatccacgccggtcacggagcccagcgtgatgagtacgagggcaccacatgccaccgcttacattaagccgggagtggatcactccagtgatatccatgcggacggaaaggtcggcaatgccgagctatcgaaggcggaagcggacaacaagaatgtgggcgtagcctttggcttcatggtgcccatctgtctggtgttcgccgtgacgctgtggctcttctacgcgtaccgcaatccgcacaccaagagcggccagctgctcatccagttccgtcccagccagtggtcatggaggcgtggcgaggcccgctacacggcggccacgatacacatgtaggaggtgattgccggagacgcagggtaggaggtacagagatcgcgagacgtgggagggagctgcagctataccgacgatgaatcaaccaacaaatcaaccaaacgaattctgatccctgacggagcagtatcgtgaacgcaagggggcactgcgaactgagaagcaatcgccatcaaatacgattattttacaacatggacatggatcgaccgagcaccgagcatcaggtgtaatcctcctatcttttaaagacatgaatatttgaaacccgtctgtaattgtgatgtgttccatgatgcgtccacaatgtcaaccaaaagaccatttttttgaactgattgttgagatttagctcagaacgctgccgaaaccgaacaaaacaacaactaaaaaaagaaatgaaagcaatttagaagtgtaaagtatagacacaggacctgagttcttgactcccagtcccccggaaccaactgctcaataacaacaagaaagacgactggcaacagcatgaagtgatctgttaaatgtatctttttaccttttttaccgtaccgcctgcccattagaagaaaagc

SEQ ID NO: 3690 - protein, 625 aa, DROSOPHILA
MAKSVGSACAQIAILLAITCSASELASAVLHQDTYEIVDTNLPNIAAYGVVPLRTDRLHRQRRTVPVSPPLPAVTTYRGAVSANATAEAGGAAGAGGGVAAETTVTTVDNKAAGGSVSYNVHNVGVNGTGQRKTYDVAPAVDSNTTSQMAPATKKPTLLGQSGNPKKVASSVVAATMTDPSPAVIDVDVSKVVDVPEEEIEAAVKNASLKESVDFHEYYNSVLYENKDEVASLWTELKATPENIMLSSSHRRAMTVELKFDFPFYGHFVRNITVATGGFLYTGEYVHSWLAATQYIAPLMANFDTSMSNDSFVRLHDNGTAFTAVWENVTLQDKPDFGKFTFSVTLYQSGDIVFAYMLVPTNINSIQDKEHPVKVGLSDAYIIDKQLFFARRKTIYEYHRVTFQQHEITNNTIIKLAAQPTCLGYNDCNSCINHNTTFTCLWCSVLNRCSTGTDRKKHEWLQMGCEATAIHTSSLCPALGDKGNNAAGQGKNGSANSGASANGATNTSTSSSGSSTPVTEPSVMSTRAPHATAYIKPGVDHSSDIHADGKVGNAELSKAEADNKNVGVAFGFMVPICLVFAVTLWLFYAYRNPHTKSGQLLIQFRPSQWSWRRGEARYTAATIHM

SEQ ID NO: 3691 - DNA, 2773 bp, DROSOPHILA
atggaggacgagttcggtttcgagatccccgactctgatgccgagaagctgcttaaacctgccgacattattaagtacgtcgccgacaaggaggatgtgtacgagtaaattgtaattgtaatgcaagccattgaacggattacacttaaatttaaatagaaaacaagtcaaatacaatttgatcaactgaataaaccaaacgttaaattaacttgtagtcagcaattgtacacgagggctataattaactgcggaatagcagctaataaattaactatccaaataaataaacgagtcatttagtactggcggttaaatttaaatttcgatagaaacgttggtctttcgattgttttagaaagccttgtgtattttagatacgcagcgacggtcacgttaatctgctagcattacaaacagaatattcgaaatgtcagacgctgtggacaaaatgttggcgggaatgggtaaatatatctttaaaccaccgacacgcgttctattccgtgcttccaatttcagcggccaatcggcagaccatgaaccgccagctggctaagatagacgagataatggagcggtcgaacaacacattgctccacatcgagtccaacagcaaggcattcagtcagaatgtggctttgtcggagacccagaagatgtacaacctcaggccggaggctgagatgaccctgtccaagatcctggagaacttcaagctgctcatgtctagcagtgaccagcgggaggagacatacagcgctctggagggctgcctggcctacaggcatcgcgtggagcaccttggcagctccgtgcgtaagctggtggcgctctacgacaccgtgggccagatgaagaactcacaggaagagcagtatgccagcgaggattccccctagctcatccatttttagaatttattattatgttatagttgaaaaataatttaaataaattaaacatttgatttgtatttaaagctctttaagcgaggttttcaaatcatggccatattgtagctgctgacttggagaagcgtataggtaagcacctctacgaacatctccaggcgagcggcaagactcccggtggcgagtatctcattgggattgggcagctggaggctgttggagcgcaggtagttgagctgttccatattggcggctatggtcagaagcttctcctgctgctcggatgtaaaagcatctggcggagactcaccgccggttggcatgagcttttccagctgctgcgcaaatccatggagctgcgtcagcttctgcttgtatatggattctgtggtgtccagagcggctgcctcgtcgtagatcttggccagctttcgctggaaacccttaaaatcattgtacacgtccacggcactgcgctgctcctccagacgcgtcagactcagcgaaacgttggatgtgttgatgcccatggccaccgactcgtctgctcctcgcaggagcgttgagttggtacgttgtagctcccgcttcttgggcattttctgcaggttggccgggtactcttccaaggtcttgaagagctccgcatagtcggctaccgagctaagatccctcgggggcgtagtggctgctgcctcctcctccatcatctgctgcaggctgtcaaagaaggcccccggtttcatcaccgtcttggatacgcacacgtcctttaggtttctcacatgttgcgcgtactttctgtacaacttggatgaaatgctgctgaaatctacattagtttccatttttattgtttacgcttcacttctcctttgataacttcgtttgaatggcctgcgccgcatctatcggaaatcgataacgcaagctgtggcggtttaaatttgaaaacaaaagttctatacaaattatgatcgcttacggattacttgggtttttatttttaaaagcacaatttttagagtgcactacacgtatttcaagtcttcagtggttttaacgagatcttaatagggagtttataccatatgaaagtttggactaacatggctgtttgaattctgagtctcagaactacaaggtgcatctcatccatactcggactgaacggtgagcgaaaactgacccttgggaattgaattggcatggtaccagatgcgtgtgtccaccaacacagcatctccgggctccacatagaaggagaagggctgacactggtggtcacattcaggagcaggtgccagaaaccaggtcttgttgccacttaactgagcttgccacaacaggcggggaatgtaatcaagctataataattgaaagattagtcataatattcgttgatttcttggtttttacttacatgcatcacagccccttgctcgtagcccattaatatgaagtccgtgtgaggcatttcagcatcgaagggcaggaaatgcgggcggggatacagctttctgagctccgccaggacggccggctggcagacactccagcccacgaaccagggcactccttgagtaagatttgaacgctccgcggacatggaaaacacatgcttcagcgacttgagatcagagttgaagtgcagaaactggcaatctgagtccattgctcccgggacactttcgtacaattcttttatgaaggcaaagctgaggttcttttgtgctggccagtgagccaccgccctcttcacaatgatgggcattgaggagtacgcgtgcggtgcaaactcctccatggtgagattggccaagatcaggggagccctcacccctttacaaaactcgcag

SEQ ID NO: 3692 - DNA, 773 bp, DROSOPHILA
aaacaataaaaatggaaactaatgtagatttcagcagcatttcatccaagttgtacagaaagtacgcgcaacatgtgagaaacctaaaggacgtgtgcgtatccaagacggtgatgaaaccgggggccttctttgacagcctgcagcagatgatggaggaggaggcagcagccactacgcccccgagggatcttagctcggtagccgactatgcggagctcttcaagaccttggaagagtacccggccaacctgcagaaaatgcccaagaagcgggagctacaacgtaccaactcaacgctcctgcgaggagcagacgagtcggtggccatgggcatcaacacatccaacgtttcgctgagtctgacgcgtctggaggagcagcgcagtgccgtggacgtgtacaatgattttaagggtttccagcgaaagctggccaagatctacgacgaggcagccgctctggacaccacagaatccatatacaagcagaagctgacgcagctccatggatttgcgcagcagctggaaaagctcatgccaaccggcggtgagtctccgccagatgcttttacatccgagcagcaggagaagcttctgaccatagccgccaatatggaacagctcaactacctgcgctccaacagcctccagctgcccaatcccaatgagatactcgccaccgggagtcttgccgctcgcctggagatgttcgtagaggtgcttacctatacgcttctccaagtcagcagctacaatatggccatgatttga

SEQ ID NO: 3693 - protein, 253 aa, DROSOPHILA
METNVDFSSISSKLYRKYAQHVRNLKDVCVSKTVMKPGAFFDSLQQMMEEEAAATTPPRDLSSVADYAELFKTLEEYPANLQKMPKKRELQRTNSTLLRGADESVAMGINTSNVSLSLTRLEEQRSAVDVYNDFKGFQRKLAKIYDEAAALDTTESIYKQKLTQLHGFAQQLEKLMPTGGESPPDAFTSEQQEKLLTIAANMEQLNYLRSNSLQLPNPNEILATGSLAARLEMFVEVLTYTLLQVSSYNMAMI

SEQ ID NO: 3694 - DNA, 5574 bp, DROSOPHILA
taaattgagataagaaattcggcatgggcatgtcagttctgtcgatggatggtcgcctttacagttagcgcattttttgttgtttacgtccatacatacggcagtctggtgtgatccagcacaatgggcacatgatgttttaactgaacaattatttgatccatgtccaaatagttggcaattgtagcattgagtaattttattctgcaatttcactttatactcccagcgtactttagtgtggttgacatacataaagtttttgcgcagttcctttactgtgatacttttgtttacgaaataaacaatgtacagtaataattcatgatcagacttagttttcttttccacaattttgacttcggtgcattgtaatcctaggttttgtagcatggatttgacagtttcaattggtagtttatccagcccggataaaatggctttgtatggcttgtttgatctagtatcgtacgtgtagaactcacagttatgttccttgagttggttacaagctgcattgaaccagtccatatttggtaaaaatattttaattccaattgagatggttttaataaagtaatcatcagttttaattttagccattagctcgtgtacaaattttgtattttgtttaattaatgttataggaggtggtttgattattatttcatcaagtgtgtccgtttcaataggtttatcatcattatcatcgtctaaagtttgtagtggacgaaaataatttgtaaattgcttggagccccgttcgttctggcgctccactagtggtttattccttttagtacgcattttttcaacggcagatgcttcagcatcgccaattgcatcacttgaacgtttgattgtagttttttgcgaatatcacaattaaagaagaaaacagaaaatatttaatgtacaccaaaatgttctcagagagaatagaagattttacatccgcgttcgacaagagctagtcgaagactgacataatatttaaagattcaaatatgcgcaaattgtgactttattactggaattaaggatcgtatacggatacaaagcaatacgggctgattatatagacaagtattattgcattaaatgcattttaatgcattaaaaggcgctttatacaaattgcatgtacacaaagagtcccatatttgttggaacagagggataatataaagggaactgtttatattgtggtagcctcggttgtcctgctgacattcatattttcattctcaaagggaccgggaaaattgtccagtttgtgggccacatcctccacacggcagcactgcaccattccaaaggcgggaaactcgtggagtctggagaagagggtgttcctcagccaggacacttggttgcacatcgaggggcacagattgcttaagtcactgcgatactgcaagatcgaaaggattgaatatttctgagcataacacattcaatggcatttacgcacgaagggcgagttgtgtccaatgatgacgaactcatcctgtccggtaccggacttttccacagcgtgaacatgggcccaaatgtgggcgggaatgggcaggaatttgccaccaatcagttcaatgttgagcgatcggcttccgttgcatgattgcccggcgaacgtcggcagcttcacggttccggaaacacccaaacgaatgtcgaagtggacaccgatggcatcacgcattgccttcgtccaatgcttccagttgccggaacgcagaacctccaaccagacggtggtcagcaagtcctcgtagacaaccaagtgtctactaaccatctcatcctggaccaaactgccaacctgaaaagtgtcctccgtgaacaactgcttctcctttgccaagtacgcatcaagttcactcttgctgctcgaattgatattatgttaattatgattttaatcaaagagccactcctctaatcacaggaatagcgcaacctccttattgcacctacctgatggtctcgaatagatttttttggtaactgataggagtatcaagtccgatatcgttaagttgtcccaattgggtctacacatgtatgtatatggaacaaaaaaaaaaaaaaaacaaaatacgtgaatatataacaatatataatattgctcaaaaagttaacacaacccacctctgggaaaatctggatattattgaaatttgtggtataaccaatatatttcaattgaaatgcggccaaatcatagcacaatgctgaatattttattaaaccaatgccatcgaattttcttccgacaactagagtcatgcccgtgcaatttggcaatttgttcatgctctcaaacaactgagggccgacctccagacaccgaacactaattacatcttttatgccatctttataggtaaaccgatgaatagggtcgcaggtcattgtaagtttagtcgctttgattgtagtcgagatctggttgttgtaatagctgaaagcaaatcatcagcaaatgcgagtagaagataatcaaacagtacttgtaatagtctatggaaaatccgctcgcgcagaaaaggtcaatggtctggtaattttcccgttctaattttcgcacggaatcgaacaataaacgctgggagccaaaattgctaataacaaccggagccggagaaccgatgctcagttcacacgttccccttgcatcctgggccataacggaagtaaccaaaatgcccaggatcacggcgttaatcgaaaacatcgcgacgaattcaaaagtcaaactgatcgccccattcggtggcgatcacttttttatagcccccagaaaggtgctgatgctgcagataaccttcttatcgcacgatttgtgattgctggcaggttgcgacccttttgcgattatttcagctgaggttcgagataaacaaaataataataaacaataataaacaataataatcaatccattgattactgtgcatatgtaaaaatatatataaatatagaaaaaggcactattgataacgattcgattacaatttcgatgaaataagaacacactattgtttgtttttttttttatgaatttttgtttattttttttattatttttttttttttttgcaaattttctctgttttctttagttttttgtttttttcctttttatttattttttgtctcatttcttatagttttttgcttttgtcggccatttcattaatactaagtgtacgcattaaaggtaaaatatgttttatgttttacgttttacttgttaattggtttccttcgcattttctgcttacacgctctcctccattaataataggcttactaagaattcttgtatttgtatatctagagaatgctaaaggggccaaaatgatgtcatgtatgttaatgtaatggtttctatatccaccctttctgccagcgaaaactagtttcccccttgattttctgcttcataatcgtaatagttaatattattattattaataatagtattattagttcctgcattacgtgccacacgtaacgttgctttaaagttattctgtttagcggtaggcgcttaaggctaagatcgtttgcttttacgtttcagaaaagtgattctttagtgagtttttttttttttttttttttttttgctatatggtacatactcctcgactcgactccacttgacccatcctatccagctatccagccatcctgctatcaggctatctttctatctttctatcttgctatactacgccttatcatcatcatcgtcttctagttaatgccctcgttaggtaacaacaaaaggtcaacaattatatgctagtatgccaaatgcatctgctagaacttgggcgattcgatcagattggacaaaatcaaatgcgtcttgttctgtcgtcgggtgatgttaaaatatatatatatatatatatatatgttggtgttatattcatatatgcaaatatagggatgtcgctatatatagaggttttactaaatatatgttcctgtttatatatatatattgactgaattaaaaacttcttttgtttgaatcgtttggttttcccaatttttattttcatacatttcacgtttatctcctcgtgcgaattattctcaattaaatgctaaaattaagtatagaaaaaaaatgtttctcatttttgtatatgtattactagatacaacatttttcgtatttaaatatatatatttttgtatatatatatatatatgttctttatatagaataagggttgttttgtgatctttttttctgttctttactcgctttcgaaaaaaaaaaactaatttacacaaacaaaacgaaatttgctgcgagtgtaagccggggaaagacacgaacctattgaccgcctctatatacaaagacaaacacgcatccctaatctcaaccacaccctgcagttccacaattcatcgctctttgaaaacaaattgagcggtgattcatcgatgaaaatggatcggtgaatgcaactgcagggcacacacaggctcacgcacagaataaatagaaatcagaaccccaaatatacataaaaaaaaaggtgcatgatacagttacagatttggttagattcgacacagatagttgctatcataaatcctactgctatttcaggatcagagtccccgatggaaagatgatctggaaggacccatggatctatatacaaggacacattgacaaggaggattggatgcatgcagatggtgggggtgaagatgtagacgaagaatacacatggtggaagacggcagagactccaaacatgtatcattaatttactgaattgtcactgcaatttgggggatagcatcctgcatcctggcacctacttgcgaaggcttctggtcattagaaagcaatttcggattacttttcattcttttttttttgttttcatttttttttttgtttaggcgcgtcattggcatatacaaaaatgtcgtggttgttgtgacttattaactacatttgtatccatattattggtttgtggttctgattctgcggatcgtgctggatttcttcccagtgtctgccggcgtgtttgggtgtaggtgtaggtgtgggtgtgtgtgtgtgcgtgtgtgggtgttccttttgcgtgtgtataaattacaggtgcatgggtgatgtgccgaattaaaatcgaaaaacaataagatttcattgaatttgctcatagcggtccgtaggatgatgatttgggaatggggatcggactacatttttaataacattttcttttggttaatcaaataaaataagaattcgtgtaccgacaatttggactgagacgttcccttgcggttggatttcttgaattgattttgtttcgattttctttagtttgttcttttttttttttttgttggggttttctccttttttgtttttaaattagttaacaactctaagcataggtgtgtgtgtgtgtgtgtgtgtgtatacaattatgaaaaaaaaaaataagtattatcaattaagtgtatacctacgaactaaacttgcctaggcaatcaataatattaaaaataataagc

SEQ ID NO: 3695 - DNA, 1491 bp, DROSOPHILA
cacctttttttttatgtatatttgggtttgacttttgaattcgtcgcgatgttttcgattaacgccgtgatcctgggcattttggttacttccgttatggcccaggatgcaaggggaacgtgtgaactgagcatcggttctccggctccggttgttattagcaattttggctcccagcgtttattgttcgattccgtgcgaaaattagaacgggaaaattaccagaccattgaccttttctgcgcgagcggattttccatagactattacaactattacaacaaccagatctcgactacaatcaaagcgactaaacttacaatgacctgcgaccctattcatcggtttacctataaagatggcataaaagatgtaattagtgttcggtgtctggaggtcggccctcagttgtttgagagcatgaacaaattgccaaattgcacgggcatgactctagttgtcggaagaaaattcgatggcattggtttaataaaatattcagcattgtgctatgatttggccgcatttcaattgaaatatattggttataccacaaatttcaataatatccagattttcccagagacccaattgggacaacttaacgatatcggacttgatactcctatcagttaccaaaaaaatctattcgagaccatcagcaagagtgaacttgatgcgtacttggcaaaggagaagcagttgttcacggaggacacttttcaggttggcagtttggtccaggatgagatggttagtagacacttggttgtctacgaggacttgctgaccaccgtctggttggaggttctgcgttccggcaactggaagcattggacgaaggcaatgcgtgatgccatcggtgtccacttcgacattcgtttgggtgtttccggaaccgtgaagctgccgacgttcgccgggcaatcatgcaacggaagccgatcgctcaacattgaactgattggtggcaaattcctgcccattcccgcccacatttgggcccatgttcacgctgtggaaaagtccggtaccggacaggatgagttcgtcatcattggacacaactcgcccttctatcgcagtgacttaagcaatctgtgcccctcgatgtgcaaccaagtgtcctggctgaggaacaccctcttctccagactccacgagtttcccgcctttggaatggtgcagtgctgccgtgtggaggatgtggcccacaaactggacaattttcccggtccctttgagaatgaaaatatgaatgtcagcaggacaaccgaggctaccacaatataaacagttccctttatattatccctctgttccaacaaatatgggactctttgtgtacatgcaatttgtataaagcgccttttaatgcattaaaatgcatttaatgcaataatacttgtctatataatcagcccgtattgctttgtatccgtatacgatccttaattccagtaataaagtcacaatttgcgcatatttgaa

SEQ ID NO: 3696 - protein, 414 aa, DROSOPHILA
MFSINAVILGILVTSVMAQDARGTCELSIGSPAPVVISNFGSQRLLFDSVRKLERENYQTIDLFCASGFSIDYYNYYNNQISTTIKATKLTMTCDPIHRFTYKDGIKDVISVRCLEVGPQLFESMNKLPNCTGMTLVVGRKFDGIGLIKYSALCYDLAAFQLKYIGYTTNFNNIQIFPETQLGQLNDIGLDTPISYQKNLFETISKSELDAYLAKEKQLFTEDTFQVGSLVQDEMVSRHLVVYEDLLTTVWLEVLRSGNWKHWTKAMRDAIGVHFDIRLGVSGTVKLPTFAGQSCNGSRSLNIELIGGKFLPIPAHIWAHVHAVEKSGTGQDEFVIIGHNSPFYRSDLSNLCPSMCNQVSWLRNTLFSRLHEFPAFGMVQCCRVEDVAHKLDNFPGPFENENMNVSRTTEATTI

SEQ ID NO: 3697 - DNA, 13359 bp, DROSOPHILA
tatatatatttatatatattcctcatacatatacgagtatgtatacagatttaaactaattcagtgcttttaaatttcttgttgcgccacaatgctgcgtgtattcggttagattttggttattcgatcattggtcatataactacagtaattgctttaatagtattttaaaagatgagtgttgaccgcacattcactttacactttattttctttgacttgtaggagtgaaatcttgtttgtatttgttaggttcattttatttattttgccattttttaaatttaattttatctttcttagcgtttttttcattgtcagtctttacgattcacggcttttgtgcatttgaattttccaattgtcttcttactgtatgaccaatacgaaattttatgtattttttcaaggcgaacgaacacaagcgctttgctgatcgaatgagcaggtgagtgactaggtgagtgcaaagatgaactggcaggtttcgacccgatagaagttaatgcacggttattataattttcgatgctactatacacatatgtatgtgtatataaaacaaggggtatatccaagaggggatttttactgatctaaagagaccgttttggagcgtttccaaagagatttaaaaagccccttttttttaggtttgttattcgtggtcgcccccgaggctccattgtctttgcgattggtatcctttcgcgtggtggatcctagaaaagtgtttggtatcaaaattaaagtcttttgaaaagttttttcaaatttatgttaacgctaccgattaactatcaagaacctgctaaggagagggagcttttaaattgcacacaagctttacctacgagtatctgctaaaaaattcatttaaatttaaaccaaaatttttaaatttaatctagcgttagggacgtcaagtaagcgtgacaatattttgaagcaaacaatttcatataaattattttacgcaatttgcttcattttcgtaacttcaatgatatgtgtacttctcagatatgcgttttaaactcttacccgattcaaattcatagacatgcttgctgttgctatcatccataagctgatcgcagtacgccttatgttttcgatctttgctgttttctagtaggtacaagaatatcgccttattatttaatctgctcacctcagacgtacttactttttttggttatcagcaaactagtaacacgccgtagagcctcgcggggtgatttattcaagaaggaaggtgtaagatttggtggcagtgttaaaggcttacgagattgtccggtgcccgacatgaccgtcggattgtcccacacccgcatggaagccattcgatctatgttctcggtggagacgggtcgcattccccgttgcttgggataccatcctcgagccggggccccggtcatgcgaagcatttcgttggaggccaaggcatgatttattgagcgctgacggcaaatttgggctgtaccatagttaccacctattgatagggtatgaaatataataacactgtgtaaaatgaaaacatttaaatttaaccgaaagtggtctgaagctgacggagctcaaagttggttaaatcagttttacacattttttaacgctaatggaacgcaaccgtatttttgggcggtaaatgaaaacctataatatgtgttacatattgctttaaacatcagacttcggattgattgaacgaattaagtttttataccatgcttatccaaaaaatctaaatattttataaaatggcaatgtttggcatttcaattaccaagataagtaataacattaaaaaaaaccggataccgttgattttttggtgagagcggtacctttaggcgttttgtggagtagagaaaaaaaaaagacaagcggtgatctgactttttgggggtttgttggcgttagaagagggagtgtggcaagcaaaataaaattttgtaataccggtagaaattagcaagacaaacagtaaaatgaaaatatatgaaaacattttcaaaaagtgtggttctggcatttttgggagttttatggattgtatagtgggcgtagcagaatgattaatctcaactttctagctgttatagttcctcagatctcaacgttcatacggacgaacatgtccaggttggctcggctattgatcctgatcaaaatatatatactttatatcgtcggaaacgcttccatttacctattatatacttttcaacaaatctaatataccctatttagtctacgagcaacgggtataaccagtatcaagagcagcatcaacatacaaaactttctgataccaactattttcacttggctttaaaagtaattaatatcgtgttacttggtacgaaagataatcaacaacaacataaagggaaagtaaattatttttatttatattattactttttatacctaatagagtagagtacaactatagttgtaaaataatagagtagaatagtacttttagttataatatcatttttattaaaaatcgcttccaattttcaaatgaaaattcgtttttttttggaaaggttttttgcgctgcatcacagcttaaaatatcttgggatgatattccggtttaatggctttaaatggttcaattatttccactaccactcctagaatattcagagaaaataggcttttgcggttaagtactattcccacactaaggtgaaactagggaagggaccaactgttgagttttggaaagggtagttgaagaaaagacgttttgcgtgttttggttaaaattggtattgggagggaattatagatcgatataggggtaattttactgctgattaaatttatgcttttagttttacacaaagtgtgtgtgacatttgtaaagcttataggtattaagtgtaagtgacgtccttaagtacaatttggtgtggcctaatgttctaatttgtaatttggcataattgttaagcattattcattaaaaaaaaatcgtaatattaattagaaatatgtactagaaagtttgaagatggcgcagaagaataaacatttcataacctcatataacaaaaggttaaaagaaaccttttaaaatgtttgtgagctatagaatgtcgccaattaaatatttctttactcttttaaagaattctttaatttgggctttagttattttaccatttatgagcatacttctaaaatgttccatattacttgcctccgatccccaaaattgaagcgcccatgttgatgctgttcgatgtgctcgatctgggcgctgtgcgggagccactgaccacaggcaggggctcattttggcgtcgatatggggtacgtggtatgtcacagctgccggtacattgttattattctaggtcttatttaacttctatgtaactactcaccctctggcaaaaattggcgtttcaggaagactacatgaggtttgcaggcgatgctcttcgcgcggcgactgctttaggctgcgcttggtgccatagttaatataacgacgatggtaggacccagatccacctgccattccgtcgaaatgtggagggggcagtggagcaatcggtcccagaccagtgggtgtggttatcccactgccaccgctgctataatgaccaaatagctttggcgatttcttgcggtattgcgagtcgatactccaggatttcattgtattagccgaatgacctccagtcactcgatgtggggggaccgtaggtggtccgccgttgccctctaagaagctggccgattggtgggaaggcgctggaggcggtggcagctcgtcggtaaagtgacgcacagaggcgatattgtcccgactgcggcgagtgtggctgttgctactgtgcaccgccgtaccagaggcggtggcatgcacctccactacggtagtgccccgattcgcgggaggggcattcggcactacagggagctctagctgctttcgcggctccaccggtgacggtggaagaggggcattgtagtcaaataaatccgggttggaattcggcggcgatggtggcagtgggcccaaactgggcatctgtgacagcagcatctccttggcgctttcagacttgtgaacgccatgtcgaaattctagcacccgctttgcatgctgctcggcagctgtcgttgcggcaccagtaagcccacctcctttcctctcagccggttggccgataattggaaggtctccacgcaacaaagcactgatgttatgctctatttgcatcagtggagcacacccatagcttaaatctgaaagttcttcgtcctcctccagagttggggccaaatctgtatgcggagtggtggcattggaagctcgctgatctgcattgaaaaaagttttgtaccgcattatttcaaaaatttgtgaagataaagtgtgcaatttcgatagaatttaaatttgatattatttgtgaaaacaacaaattagtggattttattttactcaccgttaccgttgtaaccatacaactcgtagctgccgattccgttcagacgagcctcttcgaactcttcgctgctggatgtgttgtccggcatggactcggcactcaggcgcttttctgttagcatcgccgtcttactcttcacaggcttgcaatagccaagttgttctggtgcctcgatatcaagagataagatcgctcggtgtgcgacgaccatctccaatccccggcgtgtatgctccacattagcctcacactccttgtacacgaagtttatgtcaggtgaagctggtggcagcggtggtggtaggggtgtggcatcgctttgctcgctatcgcttgtgtagaactcattactgatcgccccggctccaactttggtctctggcccgactccctcggccaacgaggaacgtggtggctttggtatacaaaatacatctgtgacacgaggcggttttttggctgtggagcgacggataataaaagtccctttgcccagcatgcttctttcgttgtacatgaaactgtcgtctaaattgttgcttttctgttgatataaatgttaaaattcaaaattaatgaacattgttgtaaactgataggaactcgtatttaaatcaagatagaacgttatagtcgagatcttcgaatatcagatacccgctgcaccactagaggggcggcgatttgcaagtaggaaagcgaatgtttttcttagattggccacgaacttacatcaagggcttacatcatttgtgaaattgtgaactctaattgagaactaatgaagcacaataaaatcaatacatttttaaaagtgttagtcatgacagaagagagtataaaagaaagaaaagagtatatcttgaagcaagcatttactaattaggcgcaattatatattcatgcctattacaaacattcgtcgttcatatgggcaggctaaaagacggacgtgcgtgggtagatcgactgcaatgcaattgaaatgcagtcttcaattcctgaagacacttattttgcaaacattttataacgcgctttaacaggggatacgtttttttttgcctaatcacaagtaccttaacgatgttaaaaactattaacgatcgcacctgcaacatacaaaagtcgtgatatcaacttttgtgaaaattattttttataccgttttagatgcagacgtatttttgaagccactggatttcttcttgctgtttctaaagtgaatctcccaggcgactccgttctgtttaacgggtgtaagttcagtagagatggttgactcctccagcgaatcttccgaatattcgtcatccctggcagcagcttttgatttcgccacattgacgtgagacgcagcaggcgaagcctccccggacgaagagtttgagccgctggatagtggatttagcatgtggcacacttccttgtgcttttcgacagagctgagtagtcgcttgcagcgagctccctcccccacggctgtcttagaagagggacctgggtatatcgtcactggatgttcgttgacgaatggttccggcagcttcgccaaattaccacgcagaacagcgttatgaacagcgctaatgtcgatgcccagtgcgttgcgacccccgttgcagctgcctggatgccggatggctgacaatccacttgatgaattggcagcagaaactccacccaaattcgaagccctgacaccacagcacggtaaactagagtagtttgagcttacggcaggagttgagctagatcctctagcctttggctggaataatggtagaaaaaggttttgcggttagttaattggtgtcccattcgctgcgttgcaagcagtggagcttccttaaactcaccagcgttgtctgaatgagaggcgatgtagtttcctgtccgtgtacaacctcagataatttagttagattctcagccgtaccatccacttcgttgaagcttccctctggcacagtgtctgtgctgggtgtttggggcacatcttcggaatcctttttggacatgctgttatgttaaagttaagggttttttagaaaacggacgaagagtacttaaataatcataataataatattttttgaaaagaaatatttggtgtcacagactagggattttttgcattaaaataggcacaacagattttattgacaaattttaacaggatcaaagcattacaaaattcgtatgacaaatcacagcaatcttcctgatatacatgcttaatttccgagatctcagcgacggacaggccgacatacatggccagattatgattaatgattaatgatcctagttataaaacaaaaaataacgctatagtcgatttcgccgactatcaaatagaagtgagaacgaaaaatttaattttatttaaattgaagaatataatgagaaaaatgggcgttgcattttttggcggcttgtgagcgtggtaacatgtgtcaacaacaatggcgtctattttttcgaaatctgtatgctgtatgacgttctagttctagcttttatagttcctgagatctcgacgttcatacggacagacagggccagatcaaatccgactattaatcctgatcaggaatatatatatatgtatatattggaaaagcttctttctacctgttatatatgtactttttatcgaatctagtatacccgtttatcgataatttaattaattaattaataatcatcactatgatgattctgagctgtccgaagtcatgtccgttttattttacttcagcacagatcttagatataaacgatacatttttccgtggcacacttgaaaattttaaataaatggcattgtatggtaattattgttattataatattaactattaactatgttgcatgtgtttttatgttggcactaatgaactagtctgttacttacttcttgcgacttaggctcatgtagccatcgtcctcggactgattctcgccactattgcagttcaaggccactggtttcgttgctgcctcctcaaattcggaaataatctcgtcgaggacttttattggttcgggtatgtcatccaaggaaatgggttccaacgactgcagttgattatcgctgcatagaaatagttatttaatttcacgcttataacggctttattgtttatttttgactgacttgtgggcccctagggtaaatatagacaatgttttaaacctaatgctgtgcagctatcacaagaaaaagcatgctagtactagctgcgtagctctaatagttcacaaaatctggcagatgcacggacatacggacttggaaattcaccaggttctgacgcctctggcggtaagcttttaggttactgaggttaaaagcaacaacattaagccttatcaatttaattttattgactcggattacttcataaactagctcacttcattgataaagttttgaaatcataattgctcatcaaggtcgtataaaatttgtttcacatacttttgtctttttgagtcagcttcaacagcggcatctacggctacctccgctcccgcctccaattccagggaatggaatgcgcgatgagattctgccattgtgtcataggattgccctgcctccagctgaaacgtccgctcagtctcgacgttggtcgaatcgcgtgctttaggcgattcatgtgccgctgccattatgggatgttcattaaaccatcggcggtagagctcgtcggcagtggtttctttgttgatgtcggatattttgataactacaatttcccagtcagcgacgctgctttatcggcggcagttttaatgttcatgtatgcaatgagtgaaagtgattggaggttttgctcgaccttcctcgcagttttatttctaggtccttaaattcgtcatcttaaggttttcctgcaaggattaaacaggttctaggattattttttgccgctataacttgccgcttgttaatttaaatatgtccatgtaagggttaagtggttatggaaatatgcttgcacataatctgcctaggttgatttacgattagcataaaatgtataattttaacagaaaggttttcgagatcacgtagtaccaaaaaccaatctacatatgtacagctgtgttcagaaaaatagcagtgctttggacttgagagtttaagataaaaaattcctatgatttacagttttaatgggaaattttttttataatatcattaagtatttaatttcaaacaatttaacaaatggttcacttttatttcttcaatagtttcgaaaatatagaataaaacaacataataggcagaaattctggtgttcaatgaaatagcagtgctatgaaaaaatagtaacaaaattaaacttgacttagaacgaacttagtttttctttttaatatgttaattcgggcctaatacttggttggatagcctttgttagccagcacagccttacacccacgcggcatggagtccaccaggtcctggcaacgtttgggaggaatttttgcccatgcatcctgcacaacttgccaaatctgagccttagacgtcggggacttcttcgacacatattgtttaatgtccccctacaggttttcaatcgggtttaaatcggaagatggtgcttgccacggcattgcatctattctattttgggtgaacctattcttagccgatttgcatctgcgtttcggatcattatcctcttggaatgtccattttaagggcatattatattcagaatattacagtaagacatcactaagtatatttacatatgcgttttggtctataataccataaatcatatgttatggactcataccattgtaaaaaaaaccaagcccataccaggattttaggtccaccgtgattgaaagtcttcagtgggtgttttgggtggtactcggtgtttggaggtcgtcagatatactgtagtgaaccagttccaccaaaaagcactatttttgacccgatcagtccaaaggatattacgccatttgcagactggccagtttcggtaggttttagcgaaggtgaaccttgcctgaataagccttgggctaagtgggggaacctttcgtggactcctcgcactgaaattttgattcagtagtcgtctccgaatagtaacgtcactgattcccaagttcagctcagattttatgtccctagaggatgcaaaaggataggcgttgctctaacgaactatgcgtcgatcctctatatctgtggttttttgtttggtaccacgggtttcgggcttccattcatatttaatggcattggataccattttggaaaacattcaagggttttttgaatgtccctttatgtttttccttcctttcttagcttatgaatttacattattttctgctgggagcagtgctgtcctctatccactaaaataataattttttttattttttttttaaatttattgcccttttaaatatataaattaacttatccaaactcactttttagaaaataatgatcatttcaaaccaggcactgctattcctatgaacagcctaaaacttgcgattttgctcaagaatgcaaataaaagaaggataacatgaaaaactaaccggattttcttttttttccttatctacacattccatttaacaaaaataagtggaataaaaagtcgattccgaaaagggacatggaaaaatacctttgtattacttagtttccttcgcactgctatttttctgaacacagctgtacatatcttagtccgacaaatacatgtatgtataaaaataaaatttttttacgcccaatctagttttaaattcagaattgtactactatattattttgcaattttaacactagacgtacagctgtgttcataaaaatagcagagcttgggatcattttttttataatttcattaggtatttaattttaaacaattcaacaatgtttcacttttatttcattaatagtttcgaaatatatattaaaacaacataataggcagaaattctaaaaaaatagtaacaaagttcaacttgacttataacgaacttagtttttctttttaatgtgttaattagggtctaatacttggttggatagcatctgccagccaccaaaggctttcacctacgcggcttggagtgcaccaggtcctggcaacttttttaccatgcatcctgcacaacttggcaaagctgagccttaaacgtcggggagttcattgacacatattgtttaaagtacccccacaggttttcgatcgggtttaaatcggaagatggtgctggccacggccttatctttattctattttggtcgaaccaattcttagccgatttgcatcattatcctgttggaatgtccattttaagggcatattccattcagtttatgacagtaagacatcactaagtaaatttgcatatgctttttggtctataataccaaaaatcatatgttttggactaataccattgtaaagaaaatcaaacccataccagtattttaggtccaccataattgaaagtgttggcttggtgttttgggtggtactccgtgtttggaggtcgtctgatatactgtagtgaaccagttccaccaaatagcacaatttttgacccatcagtccaaaggatcttacaccatttggagactggccagtataggtgggttttagcgaactttaacctttccttattatgccttgggctaagtaggagaacctttcgtggactcctagcacttaaattttgattcagtagtcgtctccgaattgtaacttcgatgattccaaagtgctgctcagactttatgtccccagaggatgcaaaaggattgaacttgcttgaacttatattgataattttgggactttaagttggacaaagccagaatctgctattctcatgaacagcctaaaagttgtgaatttgctaaagaatgtaaataaaataaagataacatgaaaaactaacgggatttccttttttcctatctacacattccattttacaaaaataagtggaataaaaagtcgattccaaaaagggacatggaaaaattcctttgtatttcttagcactgctatttcacatatgaatgtgtgaatatataagtacattgtcattgtatgccacacatttaaacatttttcatcctttcacaaaaatccttatggcatttacaccaaaaaaggtaaacacacgcgcaactccgggcaattaaaaactgttcaccgttcaccgtttttatgcattgatttttcgcggagaacgattttgagaatgaagtgctgcgaggagaacgagacaacatctactcgggagagaagagtgtagaagctcactattcgcactctgcctcatcttcattcatattttctatacactttggggtctaggcgaagagtttgggtcccccccagtcaggcgctctcacaaagcattctcgtcaacctccacccacacacacacaccttgtacggctggctacatgtatacatacatatgtatgtacatgtaaaaacacgtttgttcgtctttggtcaattgaaaaccatttgcaacagcaactgagcttgcctcaaaaatcatactcgaccaatttgcgtcaatagtgtataatgggaaaaaccctaatatgggaaaaattcatttccggtgttatcagttaatgtctaacgcttacagtaactgttacatccatatacgcacaaaatcgagggccacattgtctagcagtaaaacttactgctgttggctttcatcttctcactccttttcgttctcaatgaagtttctgcagtctggcatcgattttttcaaatgcagacacatgcactaactgccgacaaggcgaaccgactttttcgactgcctggagttgttcggaagcttctgctgtcggctcacaaaatggtcaaacagaagtctttcgaagcgaaaagctgctaataatagaaaactcaaagcgaagagggcagggggtccacgaatggcagacgccgcggcgacacttaaagcacggtaccatcggctttgaacggttatgtccgagaatattctaatttcgcaatgggcttttatctcaaacacacatgaaaatgcccatgccagagaccagagaacctacttatcaccgactttccgacaacacgaaagcaaacttttgtttatgacagagaaacgttcacaaatctagggatatcagaaatgtaccaaaatattttatcgatatctttcgacacgcgcagcataaatcgtcgttgactgtttacaaagaagtgtttctttcaacaagagtttctatcagcaaaaatggagcaaataaatagatagatcagtgcagaaataaacttaaaacctaaatttctagtacttgacattctgaaaatttgttggtcatgtcggatatcgagttaatattcattttacttaaacggcgatattgcttagcaaggacttcaacccacaccggcgcggtaggaacggctgactgcattattttcacaaatggacgaccagactaagtaataaaaactaaaatatgcgtctaactttattcacgtattccagtgtatatgggtatcgtcaccgacaaatcgctttaatgtatggcaaggacacaagagagcgcataatttgtaaatttttcgcaaacaaaattaaaccaaaatcaattctcgtgtcagtcacatagcggcgctctgatttatgtaaagataagtattaaatcatttacttgatttattcttgatttaatgttatacaattcataatcatcaaaatttttattgtttttatttgttttaaaacattgaccaaaggcgatgtttcaagtgccttgccgaataaagatgttaaa

SEQ ID NO: 3698 - DNA, 3509 bp, DROSOPHILA
tcggttcgccttgtcggcagttagtgcatgtgtctgcatttgaaaaaatcgatgccagactgcagaaacttcattgagaacgaaaaggagtgagaagatgaaagccaacagcagtaagttttactgctagacaatgtggccctcgattttgtgcgtatatggatgtaacagttactgaaaaccttaagatgacgaatttaaggacctagaaataaaactgcgaggaaggtcgagcaaaacctccaatcactttcactcattgcatacatgaacattaaaactgccgccgataaagcagcgtcgctgactgggaaattgtagttatcaaaatatccgacatcaacaaagaaaccactgccgacgagctctaccgccgatggtttaatgaacatcccataatggcagcggcacatgaatcgcctaaagcacgcgattcgaccaacgtcgagactgagcggacgtttcagctggaggcagggcaatcctatgacacaatggcagaatctcatcgcgcattccattccctggaattggaggcgggagcggaggtagccgtagatgccgctgttgaagctgactcaaaaagacaaaacgataatcaactgcagtcgttggaacccatttccttggatgacatacccgaaccaataaaagtcctcgacgagattatttccgaatttgaggaggcagcaacgaaaccagtggccttgaactgcaatagtggcgagaatcagtccgaggacgatggctacatgagcctaagtcgcaagaacatgtccaaaaaggattccgaagatgtgccccaaacacccagcacagacactgtgccagagggaagcttcaacgaagtggatggtacggctgagaatctaactaaattatctgaggttgtacacggacaggaaactacatcgcctctcattcagacaacgctgccaaaggctagaggatctagctcaactcctgccgtaagctcaaactactctagtttaccgtgctgtggtgtcagggcttcgaatttgggtggagtttctgctgccaattcatcaagtggattgtcagccatccggcatccaggcagctgcaacgggggtcgcaacgcactgggcatcgacattagcgctgttcataacgctgttctgcgtggtaatttggcgaagctgccggaaccattcgtcaacgaacatccagtgacgatatacccaggtccctcttctaagacagccgtgggggagggagctcgctgcaagcgactactcagctctgtcgaaaagcacaaggaagtgtgccacatgctaaatccactatccagcggctcaaactcttcgtccggggaggcttcgcctgctgcgtctcacgtcaatgtggcgaaatcaaaagctgctgccagggatgacgaatattcggaagattcgctggaggagtcaaccatctctactgaacttacacccgttaaacagaacggagtcgcctgggagattcactttagaaacagcaagaagaaatccagtggcttcaaaaatacgtctgcatctaaaacgaaaagcaacaatttagacgacagtttcatgtacaacgaaagaagcatgctgggcaaagggacttttattatccgtcgctccacagccaaaaaaccgcctcgtgtcacagatgtattttgtataccaaagccaccacgttcctcgttggccgagggagtcgggccagagaccaaagttggagccggggcgatcagtaatgagttctacacaagcgatagcgagcaaagcgatgccacacccctaccaccaccgctgccaccagcttcacctgacataaacttcgtgtacaaggagtgtgaggctaatgtggagcatacacgccggggattggagatggtcgtcgcacaccgagcgatcttatctcttgatatcgaggcaccagaacaacttggctattgcaagcctgtgaagagtaagacggcgatgctaacagaaaagcgcctgagtgccgagtccatgccggacaacacatccagcagcgaagagttcgaagaggctcgtctgaacggaatcggcagctacgagttgtatggttacaacggtaacgatcagcgagcttccaatgccaccactccgcatacagatttggccccaactctggaggaggacgaagaactttcagatttaagctatgggtgtgctccactgatgcaaatagagcataacatcagtgctttgttgcgtggagaccttccaattatcggccaaccggctgagaggaaaggaggtgggcttactggtgccgcaacgacagctgccgagcagcatgcaaagcgggtgctagaatttcgacatggcgttcacaagtctgaaagcgccaaggagatgctgctgtcacagatgcccagtttgggcccactgccaccatcgccgccgaattccaacccggatttatttgactacaatgcccctcttccaccgtcaccggtggagccgcgaaagcagctagagctccctgtagtgccgaatgcccctcccgcgaatcggggcactaccgtagtggaggtgcatgccaccgcctctggtacggcggtgcacagtagcaacagccacactcgccgcagtcgggacaatatcgcctctgtgcgtcactttaccgacgagctgccaccgcctccagcgccttcccaccaatcggccagcttcttagagggcaacggcggaccacctacggtccccccacatcgagtgactggaggtcattcggctaatacaatgaaatcctggagtatcgactcgcaataccgcaagaaatcgccaaagctatttggtcattatagcagcggtggcagtgggataaccacacccactggtctgggaccgattgctccactgccccctccacatttcgacggaatggcaggtggatctgggtcctaccatcgtcgttatattaactatggcaccaagcgcagcctaaagcagtcgccgcgcgaagagcatcgcctgcaaacctcatgtagtcttcctgaaacgccaatttttgccagaggtgttattatatttcataccctatcaataggtggtaactatggtacagcccaaatttgccgtcagcgctcaataaatcatgccttggcctccaacgaaatgcttcgcatgaccggggccccggctcgaggatggtatcccaagcaacggggaatgcgacccgtctccaccgagaacatagatcgaatggcttccatgcgggtgtgggacaatccgacggtcatgtcgggcaccggacaatctcgtaagcctttaacactgccaccaaatcttacaccttccttcttgaataaatcaccccgcgaggctctacggcgtgttactagtttgctgataaccaaaaaaaaaaacagcaaagatcgaaaacataaggcgtactgcgatcagcttatggatgatagcaacagcaagcatgtctatgaatttgaatcgggtaagagtttaaaacgcatatctgagaagtacacatatcattga

SEQ ID NO: 3699 - protein, 1036 aa, DROSOPHILA
MAAAHESPKARDSTNVETERTFQLEAGQSYDTMAESHRAFHSLELEAGAEVAVDAAVEADSKRQNDNQLQSLEPISLDDIPEPIKVLDEIISEFEEAATKPVALNCNSGENQSEDDGYMSLSRKNMSKKDSEDVPQTPSTDTVPEGSFNEVDGTAENLTKLSEVVHGQETTSPLIQTTLPKARGSSSTPAVSSNYSSLPCCGVRASNLGGVSAANSSSGLSAIRHPGSCNGGRNALGIDISAVHNAVLRGNLAKLPEPFVNEHPVTIYPGPSSKTAVGEGARCKRLLSSVEKHKEVCHMLNPLSSGSNSSSGEASPAASHVNVAKSKAAARDDEYSEDSLEESTISTELTPVKQNGVAWEIHFRNSKKKSSGFKNTSASKTKSNNLDDSFMYNERSMLGKGTFIIRRSTAKKPPRVTDVFCIPKPPRSSLAEGVGPETKVGAGAISNEFYTSDSEQSDATPLPPPLPPASPDINFVYKECEANVEHTRRGLEMVVAHRAILSLDIEAPEQLGYCKPVKSKTAMLTEKRLSAESMPDNTSSSEEFEEARLNGIGSYELYGYNGNDQRASNATTPHTDLAPTLEEDEELSDLSYGCAPLMQIEHNISALLRGDLPIIGQPAERKGGGLTGAATTAAEQHAKRVLEFRHGVHKSESAKEMLLSQMPSLGPLPPSPPNSNPDLFDYNAPLPPSPVEPRKQLELPVVPNAPPANRGTTVVEVHATASGTAVHSSNSHTRRSRDNIASVRHFTDELPPPPAPSHQSASFLEGNGGPPTVPPHRVTGGHSANTMKSWSIDSQYRKKSPKLFGHYSSGGSGITTPTGLGPIAPLPPPHFDGMAGGSGSYHRRYINYGTKRSLKQSPREEHRLQTSCSLPETPIFARGVIIFHTLSIGGNYGTAQICRQRSINHALASNEMLRMTGAPARGWYPKQRGMRPVSTENIDRMASMRVWDNPTVMSGTGQSRKPLTLPPNLTPSFLNKSPREALRRVTSLLITKKKNSKDRKHKAYCDQLMDDSNSKHVYEFESGKSLKRISEKYTYH

SEQ ID NO: 3700 - DNA, 5055 bp, DROSOPHILA
gtggtgcccaggatcgcccaccagctgcataatatagtcaccgattccggttgctgcagctgtcccgatctctccctgcaggtgggctgccatggtatcatgctgtcgtatctcactttcccatccttgattcttggcagattcagaacttttcactgcaactcctgcatcagccgatacgaatcgattgcctcggcctgaccatcctggattgcagtcttctaactcgggtgggtgtggtgtactctcgctcttcgagtaatggtttcacacataaccactgtcctttcagatggcctgttccgtgggcacctacatgatctatagcatccagtttataccaaagttcagcaatacctatatgtaggacatccttaaaagtggaaaatgattaggtcaacataatgctgaggaacatatgcttttgaagttgtccttaaaaactttagagattcaccaactagcatttctccatgtggtttttaatctctacaagttgcacccacagtttaaatcagattgaatcttgggtttacatattaaagctttgttatattcataaaattataggtaattacataagtgtatttatttatatgtatatgtatatcttaaaccaaggatagggcctgggtgtcacaagcgttcagtattccgttaagcggattcattatttatttacaagggttccttggctggcgactggacgggcactggaggaggtggtggaggagcagttggtgcccaccaaacgttgtgccgacgttgccctatacaagtttatatgctgagattatcccctccatggccatcgcgtttgcttttgattttcttattgatttctcttaagatgcgctgaacataaaacaaatatattaaagtaatggtaaagtactagctcagaatttgagtcattatatccaagactccggggactatagactacggactaatgcagggaatattggtgatgcagatcaattggcttccattatggggcctaatcgtactcatggcttgattcccgctttgcaatcaggttctcgcgctcatcatcgttgccctcgatgatggtgattccgcccaagccgcttccgtggtttcggtttagctgcttcacacggtgcaccgtctccgtgagaccagattcggtaagcacctccacctcgtcgtcatcctcgtcttcgtccggcacggtgaagtatggatgcgaggatactggacggaacttgtagccagtcagcacgaagaacacgtatgtggccatctcacggaacatctcgtctagccaggcgtattggaacaccaccgtcatctgcagcagatcgacgatgatccgcgtgaagtagatatagcacacgatcatgatgtagaactgacggaacagcttcaacttgcgcaaattgatcgccgccttgccatctgtcgcagaggcctcatgtagatgtcggatggaccatacgattggaaagagaatggcgccgcagcacagcagatccacgaagaagaagatgttgtgccaggtacggaactcggcgtcgctctgatcagactcgtccgtaatgatctgggccacgttggccagaacctgagggcgaaaaaaagtgaatatgagttacattgtttactgtttttggtatttagagataaacaaacaaaacgttcttcgaacttcgccttttatgagccattaatcgtaaacacaaccagcaaagctttagattataggaattacgctatttactctttggacaaacaagtcttaattcaccgtgaacgtgacgaaatcagtcatgagtgcctcgcaacaaaactaactttcaataaaatatttttattgctgatgactaattagaactattccacggtctgtgcgttttcggttttaacttataacaaataaaaatttacctgcagtggaattacgatcatgaaaatcttcttgtccttgtcagagagaatgtgcttaataaaagtccagccggtgccaatcaaaacgatggtgatgaagagcacggcgcccttcagcaggtgggcaatgtagtaaaggatggcccaggtctccacatgctcgccccgcttttcgatgaagtgatagttgatcgaatggaacatcagcgagagggacttgaggaacaccagcacggccatcaaataatggattttgtacacagtgtgcctgccacagagaagagacaattatgatttttgcaattgccagccaaaccactttaactcacttgctcttcttcaaaatgaaaacccaaaagaggccggagagaaagaagagcaggctcatcatgaagtacaaggctggcaggggcatttctccagccgacaaatagttgccattgttgttctcctcgatgtccacctaagtaaaggtcaggcccattagataagatccaagtggaatagttgctggtactcacattgaaggacattatttttgaggtgtgataattgggacaggcgtggaagtaaaggttgtacaagccctcatcactgggcgtggccaccatcatagagaagttgaagctgtagtagtgtacattgttgatggtctccctgaccagcggcatggtcgaatccttgcaaaggttttcttgcgattgcttaaaggagtcgggtccatatgaatcttcttcggaatcgccttcgtgggggaaagggtttccgggagctgcgtccgtatcggtggcttcatttttcttgtcaacttcagtatcatctagggacggagcagctgctgggctatttacggccagtggtggggctgcgacttttggctcttctacggatacttgctttgctggggtttcctcctttttcgaaggggtttcatccttttcagcgggggcttcctcctgcttctgttcactcttaacggcttcctccactttaggggcggcatttggtgggggaggcagttcctgcttgtcagaaatattctgattggcagccacttctggcttgggaacagactcctctttgacagcatcaacattttgggcaggagcatctaccttgggtgcaccttcatctttgggcagctcaattttgcctgcaaccgcagcaggcgaggaagactttaaatccgtcggttcttgctccaagggatcctccatggactcatctggcccctcggcggagaaatcttgggcagcgcgggtctggcgaaacagaaccgaatcgctgaccttggccatgtgtgagtgccgcttggttctggacgggatttggttgtagatgtgcatattgtgccattcgggggagcacttaacacgaactctgcaggaaaagaagtaccaaatgagatggatctgctcaaaaaaacaagagaagctacatacttaagctccttgaggtccagcacgaagaagagaatgggtccgctgatctgggatttaggtgattcctcgagaatgcatttgttttgatgcgagtccaaatagggattaagctggtcaatagtggtcttatccagcgacagacccatctgcaaggaagaaagcggatcagatgagaaagtggtgaatgccatagccggcttaacctaccaaatctgtagactgctcattgtcaaaagtcaatttgctgagctgcacatccaaatggccattagtgtagaatccaaaggtgctgagtgcgatgtactggcgacggtcattctgcgggtaacatggtcaactatgagtcagttactccaggctggcaagggtgcctccaacttaccctcacttccagatggtgcttccgcccaaggacctcaagtggggcccagagaagcgccgtcagtgccgccagcaccactattgatttaacatccccgccgggagcccacatctttccgtattttccccaaattttccgcttctattcttcggcgacgtttcgtggcacttttgccccgcgattccgggcggaacgttccggcgcagagttccgcgctagctgcgatccaagatgcggcaatcgatttgccgcgaccgccgtcacagttcctattattcacacctcaccttgataaaaaccccaaagaattttacttttttgctgggggaaaaaaggtgatctatcgaagtctatcgttcttcgatatcagcatgtgttatttgaccggacctatcgatttaaaaataccacacgagtgggggggttcgcagtgttgccactacagccgttttgccgttaagtcttagtccaagaacagcggcaagcgggaattcaaattttagaacacatttctagcagtttaaaatcaaactaaattagccattttagatcttgaaaatatcagatgtaattaatactttagtcgattgcgatattgtttatttgaaaacgttgcaaacaagttatgaaacagaaaacgattatatatttaacacatagttttcacttgttaattaggtgcgacaagaaacaatgtttgtttgttcggccatgttggcctcctcactccatgtagccactgtgggagtcagaggcaccgagattcctccttgcgtacagtccatgacgcggcttaaatttgccatcgcccagagtgatcctggccgggagcttcttgcccctgaatgtggctgtttcgaaggatggcggtggcgataccttcgctggcttctcctccgcctccagcacagggatgtgccatgcctgcttcgtggtgctggttgcagtgggtggagctgttgaggaattgcctccggaccccgacgaatcattcaccggacgcacctgggttatttccagagcgttctgcttcttcttgtagtagagcacctccatgccgagagtcatcatggcaaggacaaggccgaagagggtggctatgaagacgccgcccaaactctccagggtgatgccttcctggtcctccgacagcgggcagttaggcagattcgattggttccagtacttggccttcagctcctcaaagaaacgatccttctgcagctccaaaatggcgtagctcagttcgtcgcccagatgactgccctgctgaacggccacggcatatggctgctcggcgaacacctcgcccacctcggt

SEQ ID NO: 3701 - DNA, 2426 bp, DROSOPHILA
aaaaaagtaaaattctttggggtttttatcaaggtgaggtgtgaataataggaactgtgacggcggtcgcggcaaatcgattgccgcatcttggatcgcagctagcgcggaactctgcgccggaacgttccgcccggaatcgcggggcaaaagtgccacgaaacgtcgccgaagaatagaagcggaaaatttggggaaaatacggaaagatgtgggctcccggcggggatgttaaatcaatagtggtgctggcggcactgacggcgcttctctgggccccacttgaggtccttgggcggaagcaccatctggaagtgaggaatgaccgtcgccagtacatcgcactcagcacctttggattctacactaatggccatttggatgtgcagctcagcaaattgacttttgacaatgagcagtctacagatttgatgggtctgtcgctggataagaccactattgaccagcttaatccctatttggactcgcatcaaaacaaatgcattctcgaggaatcacctaaatcccagatcagcggacccattctcttcttcgtgctggacctcaaggagcttaaagttcgtgttaagtgctcccccgaatggcacaatatgcacatctacaaccaaatcccgtccagaaccaagcggcactcacacatggccaaggtcagcgattcggttctgtttcgccagacccgcgctgcccaagatttctccgccgaggggccagatgagtccatggaggatcccttggagcaagaaccgacggatttaaagtcttcctcgcctgctgcggttgcaggcaaaattgagctgcccaaagatgaaggtgcacccaaggtagatgctcctgcccaaaatgttgatgctgtcaaagaggagtctgttcccaagccagaagtggctgccaatcagaatatttctgacaagcaggaactgcctcccccaccaaatgccgcccctaaagtggaggaagccgttaagagtgaacagaagcaggaggaagcccccgctgaaaaggatgaaaccccttcgaaaaaggaggaaaccccagcaaagcaagtatccgtagaagagccaaaagtcgcagccccaccactggccgtaaatagcccagcagctgctccgtccctagatgatactgaagttgacaagaaaaatgaagccaccgatacggacgcagctcccggaaaccctttcccccacgaaggcgattccgaagaagattcatatggacccgactcctttaagcaatcgcaagaaaacctttgcaaggattcgaccatgccgctggtcagggagaccatcaacaatgtacactactacagcttcaacttctctatgatggtggccacgcccagtgatgagggcttgtacaacctttacttccacgcctgtcccaattatcacacctcaaaaataatgtccttcaatgtggacatcgaggagaacaacaatggcaactatttgtcggctggagaaatgcccctgccagccttgtacttcatgatgagcctgctcttctttctctccggcctcttttgggttttcattttgaagaagagcaagcacactgtgtacaaaatccattatttgatggccgtgctggtgttcctcaagtccctctcgctgatgttccattcgatcaactatcacttcatcgaaaagcggggcgagcatgtggagacctgggccatcctttactacattgcccacctgctgaagggcgccgtgctcttcatcaccatcgttttgattggcaccggctggacttttattaagcacattctctctgacaaggacaagaagattttcatgatcgtaattccactgcaggttctggccaacgtggcccagatcattacggacgagtctgatcagagcgacgccgagttccgtacctggcacaacatcttcttcttcgtggatctgctgtgctgcggcgccattctctttccaatcgtatggtccatccgacatctacatgaggcctctgcgacagatggcaaggcggcgatcaatttgcgcaagttgaagctgttccgtcagttctacatcatgatcgtgtgctatatctacttcacgcggatcatcgtcgatctgctgcagatgacggtggtgttccaatacgcctggctagacgagatgttccgtgagatggccacatacgtgttcttcgtgctgactggctacaagttccgtccagtatcctcgcatccatacttcaccgtgccggacgaagacgaggatgacgacgaggtggaggtgcttaccgaatctggtctcacggagacggtgcaccgtgtgaagcagctaaaccgaaaccacggaagcggcttgggcggaatcaccatcatcgagggcaacgatgatgagcgcgagaacctgattgcaaagcgggaatcaagccatgagtacgattag

SEQ ID NO: 3702 - protein, 738 aa, DROSOPHILA
MWAPGGDVKSIVVLAALTALLWAPLEVLGRKHHLEVRNDRRQYIALSTFGFYTNGHLDVQLSKLTFDNEQSTDLMGLSLDKTTIDQLNPYLDSHQNKCILEESPKSQISGPILFFVLDLKELKVRVKCSPEWHNMHIYNQIPSRTKRHSHMAKVSDSVLFRQTRAAQDFSAEGPDESMEDPLEQEPTDLKSSSPAAVAGKIELPKDEGAPKVDAPAQNVDAVKEESVPKPEVAANQNISDKQELPPPPNAAPKVEEAVKSEQKQEEAPAEKDETPSKKEETPAKQVSVEEPKVAAPPLAVNSPAAAPSLDDTEVDKKNEATDTDAAPGNPFPHEGDSEEDSYGPDSFKQSQENLCKDSTMPLVRETINNVHYYSFNFSMMVATPSDEGLYNLYFHACPNYHTSKIMSFNVDIEENNNGNYLSAGEMPLPALYFMMSLLFFLSGLFWVFILKKSKHTVYKIHYLMAVLVFLKSLSLMFHSINYHFIEKRGEHVETWAILYYIAHLLKGAVLFITIVLIGTGWTFIKHILSDKDKKIFMIVIPLQVLANVAQIITDESDQSDAEFRTWHNIFFFVDLLCCGAILFPIVWSIRHLHEASATDGKAAINLRKLKLFRQFYIMIVCYIYFTRIIVDLLQMTVVFQYAWLDEMFREMATYVFFVLTGYKFRPVSSHPYFTVPDEDEDDDEVEVLTESGLTETVHRVKQLNRNHGSGLGGITIIEGNDDERENLIAKRESSHEYD

SEQ ID NO: 3703 - DNA, 6688 bp, DROSOPHILA
agtctctcccattgcgtgtttattatatttggagcagctgtaaaactgactgtctaaaatgaaatttaattttgtgcgtccaagagtttctctctgtgccattcatttggccgctccacaacaaagtgctgctgttttagccatcttctggggctttgacttattataaattagcatcttttgttatcaaaacagctaactggccgcgcaactcgtccaaagagcaaaacaagttgacgaatatcgttagctggtttttgttttcggtctaggcgtgttgtttgcattcccagtaatttgctcaacaacatgactaatcttctacagccgatggcggattgctaggggttcatttgtccccagatgtttgccactcagcgactatcgcgtagtatagaattgcaatcgcaaatagtcaggtttcccggagttcggtcttggccgattcgcttgttacttttttttccatctgcagtatttattgggcagttgttgtctggtagctcatatatcagtttcagcaggaatgtaagcgatctttgccgattcccatatgattcgcagttgtgtcaggatccctgcgcccctccttggcggctaattcaattctgaacacagcattttgaattggaggcaattggggagagtcatcgggtcaatgggggaacgaactctttccttctcgacttcggaaatgtactgaaatcattgtttatgcggttccggtttcggattataaaaaactttgccgcataaaacatttatgctggaaaatggggggtgtgtttcggtagggaaattgcctcgaatctttttcacttgctgtcttaattggtgcatgcgactgcatttaaaatggtgctggttcggttattaagtttaataatagaagtgaccttgtcgtacattttcaattagctggtgccataaaatatgatgggagtatcgaaggggtggggttggtcaaccgaccgacaggcgaactgaatacctaatgccaatgttgacgcgatttcaatctgaaaatattgttcattcggcgcccgtccacggcgtttcctctattgtgtcttcccatctttggctaagtttgggaatgcattgtggttgctcatctaaagcacagaaggtgcaggtcgtttattgaaacgctaaatacaattgttcggacttagaaatttgaagaattccctctatcaaagcctctcaattatgcaaaaccttgtcgctatctcttgtcttatagaacttccttaaacaacccttaaacaacttttatgtattccctttgacaccatgcccaattgatcactgcaataactatctctttcagagattggagttcgaccgggagggtctaactaagctgaaaaaagcggtcaaggctatccacaactcaggaaacagtgagtacatcctctgagatatgataccatttatgttacttccttccaaataatctttgctttcgcttttatcttttagcccatgtggacaatgagatgtttatggtgcgagctctggagcgactgggcggcaaggttattgagcaggatgagccggacatcggcgccgcgttccttaagttcagcgttgtcaccaaggagcttagcgcgctgatgaagaccctggtaggcatgacgatttcgcaaccattacagggtcatctaaaagataatttgtttacccacaaaaacagatgcaaaacatcaacaacattgtgatgtttccggtggactcaatgctgaagagcgagctgcggggcgtgaagggggacatgaagcggccattcgacaaggcggccaaggactacgaggcaaagttcatcaagattgagaaggagaagaaagcccaggccaaagaggcgggtatggtgcgcacagagatcgacgccgctgtggtggccgaagaaatggagaaggagcgtcgactctaccaactgcagacctgcgagtatttgctgaagtacaaagacattaagaccaagacgggaatcgagctgttgcagcaccttattgagtattatcacgcgttaagcaagtgagtacctcaacatagttatgctgtccacagattagaagtaacatctatcgcctctgcagctactttaaggacggcctacagacgatcgagcacttcggcacatacatcggcgacctcagcgagaagctgcatgagatcaagcagaagcaagacgaggatcgtcgcagtttgctggatctgcgaacagttctgcgcagcactccagattttgagcgagttgacaatgtgccatcgtcggagagccgaagtgggggagctggttactccctccaccagttgcaaggtgacaaacaccacggcgtcacccggcaaggccaccttctcaagaagagcgagggcaaggtgcgtcgcgtttggcagaaacgacgatgccgggtcaccagcgatggttttcttgacatcttccatgccgacgagtcgaagccgccaacacgcgtaaatctgctcacctgccagatcaaaccggtgccggatgacaagcgcgggtttgatcttatcagctgtaagtgaagcactataggagttgtaaagagatggttctttcatcacttatactaatatgatcattgtgctttttccttttgcagacaatcgtccgtatcactttcaggcggaggatgaaggcgatcagaaggcatggatggccgtcctggtgaactgcaaggagaaggcacttaccaaggccttccagcacgccaatccgcagatgagtccaagtctggtggagctgcaaaagactgtgatccgatatgtacagctactgccgggcaacgatcgatgctgtgactgtggatcgcgtaacgatgtgacctggatcagtttaaactttggcattctagtgtgcattcagtgctctggggttcatcgcgatctgggcgtccaccactcgcgcatccagagtcttacgctagacaacctgacgacggctaatctgcttattgctcgtgccatgggcaacagcacgctgaacgacattatggaggcgaagctgggaaggggcaagcttcagcacgagagcagcatgtatgtgttattggcatggtagcgattatctccaagtgcttagttgtaatatgtttttgcagggaagagcgttacgattttatccgcgccaagtatgttgccaagcgctatgtcatgcgcacgtgctcggatgacaacgacttacggtgcgacttagagcaggctgtggtcaacgccgacatgagtcagttgctccaggtgtgggcggaaggagcggatctcacttgctgtctgcccagctctgatgccggagagacggccctccatctggccgtgctgcgcgagatgggatctacgctgcacatagtcgactttctcatccaaaatatgccgcctaaaggtcttaacaaagctaccaatccggccggtctgttggatgtgacgggaaagaatacggcgttgcatttgtgcgctctgcacgatcggagggagtgcatgaagctgctgctccgctctggagccgactatgagctcaagaactcacagaacaaaacagctctggatattgccaaagaaatgggacacaatagctgcagggagcttgtaagtgtcataacatggattcactcgaatcaatattaatcagcattcgttatcctgcagattgaatgtgccattaagcgggagaagagcgccttcgaccacatcaacactgactggaatctgccaaacgaggacggttccacggatttcagcgacgatgaaacagtcatcgatgagcgcgtaggtggcacattccgactagctaagttctatgctgatcccttttcggtttacttgcagaaatcccgttcgcgtccccccagttttgctggcggggactcacctgttctgcgctctcgttcctctacttgcgactccatacagtccagttctagtccaatcgccaattgtccgagtcggcaattcactctaccctccggtctgccgagctatacgcattctgcagggacttcgcccaaacagcacataagcgtgggacagtatctgggcagtgctaccaatgttggaggcaatggacccgggaatggtggttcaagtcccagttccgcctccagccagagcgttcgcgcggcgcgaaacagcttgaatatgcaaagcgatctgggcgggcatgtgacaggtgctcggaaatcaacatctacggccaacatgaattctctgaagaagcgtacagccccagcaccaccccccgggacattgggcagcgcttcgtccagctctttttacggaactttgcctcatcctccaaggcattcgcaaaacttcgatgccagcgacattcgagccattaaccacaagaaccagtcgctggacgtggcttatggcacgttgccgcaccttcggagcgtagaaagcagtcccaggggcggaggaggatatgggtatggagtgtcccaggatccaggaggatctggaaacgggagcaacaacagtctaatgcctgccatgacaaccttcggccacaagcgttcacccagcggtgagtcattgaacaggaatattcatttagcgggcgccaagcttgttctgccgcccaccggtgagttgcccacgctgaagcatgtggacaaatcggcgttaaccaggccaaagattcctccaccaggaccgccatcaggtgagtgtcataacagtcacataaattgcagtgtttttaatattaatctgctcgacagagcgcgaaatatcaaacggacagtcgaacgagagcatcagttccatggacgagggaccagtggcgcctccccgtaaggtaagtcccaaaagaacgttgagtgggttatgaaaaggtcctgtagatcaacacccaaacctttctttgtatttgatctaatccgcactcggaaaacaatttgcagcgcaagcaacacatcactcaattgagatgccagtccagcgaggagacggtaaatggcaagcaccaccgctcatttgcactttcatacaatttttgacaagcaaactatgcaatttaatagttgttcttgctgttgcagttgtcgtttctctaataagtgtctcgctttgtgcatctctcaaaagctctaaccccttacgcccatacctacaaattatatcgaatctataattttccatgttcaattgttgttgccatttatgccattgtaattttctccttgctaatgttttcgctttgaaatctttcagctggttaatcagtcggccaattttcccgactacgagtcctggcatacggatatggacagctctggtggcggtctagatcactcagccgagtcgaatgtgtcctcgagcgacaacgatcgccttaactcatcgccggacaatccgtcgaaaaccggtggggcaggtctgggcggaaagttccactatgtaagggatttaatttactatccttgatttttattgattttacttgatttttatcaccattttcagaatggtcagcgtcggtgccgagctctctacgattgcgtggcggacaacgatgatgagctggagttcaaggaaggcgagattttgatcgtgctgaacgagcgcaccgacgacgagaactggatggagggcattattgagggacagccgacgaggaagggcatgtttcccgtcagtttcgtgcatatgctgcctgattaatcaatcccctgtttgtgctgagtgatagtgtgtggctgcgcgtgattgtatatagatatatatagatgtgtgtatgcgtcttttaaactctaatgatatataaaacaagtttttatttattacgactattttatcacaaagcgtttgactattaatttgcctaagactaaacatgtaaacgtctcaagtaagttactcttagcttagaagccaactactcatttacacttgtatttcaatcaaagcctttaagtagcgatcttgctgtgcatttcccgttggcttccttcataaggttagcgctttaataactgaatatgtcctgcaaatgctgtaattcgtaccataactagatctaactttaacttagcctaaaacgctgtgcgcaaaagttactcaatgtcagaagaattgtcgggagataagcttatgtattgtatgcttgtactttatgctgccataaacagatactaacgatatccacacgggccccgacctggtcgaactctaaagtattctaaatctgttgttaatggtttgacgaagagtttataaaacaacgttaaaagaaatatcaatttagccaaacccaagcccaaactatccctgttgcggacaaaagtataaagaaatacgagcatattctgcaaaaagaagagcaaaagccctttgtacctagaagttgttaccaattaagtacccaatatgtataaaagtatctaaaaattacaaactgcaagatatcaattgacgagatttgcttatcacatatgattaatttgaaaattcaaagtgtatataatcatttttttaagacactgcacacctttttcttcttactcattttgtatacacgtttcagtatttatttagcaaaaccttaaagcatattgatattatatgtaagtcaaataaacggaagaacataacgcttattacatatatacacatatataaggttgtgttttaccaaaaacaataagcggtcggatttattgtg

SEQ ID NO: 3704 - DNA, 3830 bp, DROSOPHILA
atgttgacgcgatttcaatctgaaaatattgttcattcggcgcccgtccacggcgtttcctctattcagagattggagttcgaccgggagggtctaactaagctgaaaaaagcggtcaaggctatccacaactcaggaaacacccatgtggacaatgagatgtttatggtgcgagctctggagcgactgggcggcaaggttattgagcaggatgagccggacatcggcgccgcgttccttaagttcagcgttgtcaccaaggagcttagcgcgctgatgaagaccctgatgcaaaacatcaacaacattgtgatgtttccggtggactcaatgctgaagagcgagctgcggggcgtgaagggggacatgaagcggccattcgacaaggcggccaaggactacgaggcaaagttcatcaagattgagaaggagaagaaagcccaggccaaagaggcgggtatggtgcgcacagagatcgacgccgctgtggtggccgaagaaatggagaaggagcgtcgactctaccaactgcagacctgcgagtatttgctgaagtacaaagacattaagaccaagacgggaatcgagctgttgcagcaccttattgagtattatcacgcgttaagcaactactttaaggacggcctacagacgatcgagcacttcggcacatacatcggcgacctcagcgagaagctgcatgagatcaagcagaagcaagacgaggatcgtcgcagtttgctggatctgcgaacagttctgcgcagcactccagattttgagcgagttgacaatgtgccatcgtcggagagccgaagtgggggagctggttactccctccaccagttgcaaggtgacaaacaccacggcgtcacccggcaaggccaccttctcaagaagagcgagggcaaggtgcgtcgcgtttggcagaaacgacgatgccgggtcaccagcgatggttttcttgacatcttccatgccgacgagtcgaagccgccaacacgcgtaaatctgctcacctgccagatcaaaccggtgccggatgacaagcgcgggtttgatcttatcagctacaatcgtccgtatcactttcaggcggaggatgaaggcgatcagaaggcatggatggccgtcctggtgaactgcaaggagaaggcacttaccaaggccttccagcacgccaatccgcagatgagtccaagtctggtggagctgcaaaagactgtgatccgatatgtacagctactgccgggcaacgatcgatgctgtgactgtggatcgcgtaacgatgtgacctggatcagtttaaactttggcattctagtgtgcattcagtgctctggggttcatcgcgatctgggcgtccaccactcgcgcatccagagtcttacgctagacaacctgacgacggctaatctgcttattgctcgtgccatgggcaacagcacgctgaacgacattatggaggcgaagctgggaaggggcaagcttcagcacgagagcagcatgtatgtggaagagcgttacgattttatccgcgccaagtatgttgccaagcgctatgtcatgcgcacgtgctcggatgacaacgacttacggtgcgacttagagcaggctgtggtcaacgccgacatgagtcagttgctccaggtgtgggcggaaggagcggatctcacttgctgtctgcccagctctgatgccggagagacggccctccatctggccgtgctgcgcgagatgggatctacgctgcacatagtcgactttctcatccaaaatatgccgcctaaaggtcttaacaaagctaccaatccggccggtctgttggatgtgacgggaaagaatacggcgttgcatttgtgcgctctgcacgatcggagggagtgcatgaagctgctgctccgctctggagccgactatgagctcaagaactcacagaacaaaacagctctggatattgccaaagaaatgggacacaatagctgcagggagcttattgaatgtgccattaagcgggagaagagcgccttcgaccacatcaacactgactggaatctgccaaacgaggacggttccacggatttcagcgacgatgaaacagtcatcgatgagcgcaaatcccgttcgcgtccccccagttttgctggcggggactcacctgttctgcgctctcgttcctctacttgcgactccatacagtccagttctagtccaatcgccaattgtccgagtcggcaattcactctaccctccggtctgccgagctatacgcattctgcagggacttcgcccaaacagcacataagcgtgggacagtatctgggcagtgctaccaatgttggaggcaatggacccgggaatggtggttcaagtcccagttccgcctccagccagagcgttcgcgcggcgcgaaacagcttgaatatgcaaagcgatctgggcgggcatgtgacaggtgctcggaaatcaacatctacggccaacatgaattctctgaagaagcgtacagccccagcaccaccccccgggacattgggcagcgcttcgtccagctctttttacggaactttgcctcatcctccaaggcattcgcaaaacttcgatgccagcgacattcgagccattaaccacaagaaccagtcgctggacgtggcttatggcacgttgccgcaccttcggagcgtagaaagcagtcccaggggcggaggaggatatgggtatggagtgtcccaggatccaggaggatctggaaacgggagcaacaacagtctaatgcctgccatgacaaccttcggccacaagcgttcacccagcggtgagtcattgaacaggaatattcatttagcgggcgccaagcttgttctgccgcccaccggtgagttgcccacgctgaagcatgtggacaaatcggcgttaaccaggccaaagattcctccaccaggaccgccatcagagcgcgaaatatcaaacggacagtcgaacgagagcatcagttccatggacgagggaccagtggcgcctccccgtaaggtaagtcccaaaagaacgttgagtgggttatgaaaaggtcctgtagatcaacacccaaacctttctttgtatttgatctaatccgcactcggaaaacaatttgcagcgcaagcaacacatcactcaattgagatgccagtccagcgaggagacggtaaatggcaagcaccaccgctcatttgcactttcatacaatttttgacaagcaaactatgcaatttaatagttgttcttgctgttgcagttgtcgtttctctaataagtgtctcgctttgtgcatctctcaaaagctctaaccccttacgcccatacctacaaattatatcgaatctataattttccatgttcaattgttgttgccatttatgccattgtaattttctccttgctaatgttttcgctttgaaatctttcagctggttaatcagtcggccaattttcccgactacgagtcctggcatacggatatggacagctctggtggcggtctagatcactcagccgagtcgaatgtgtcctcgagcgacaacgatcgccttaactcatcgccggacaatccgtcgaaaaccggtggggcaggtctgggcggaaagttccactataatggtcagcgtcggtgccgagctctctacgattgcgtggcggacaacgatgatgagctggagttcaaggaaggcgagattttgatcgtgctgaacgagcgcaccgacgacgagaactggatggagggcattattgagggacagccgacgaggaagggcatgtttcccgtcagtttcgtgcatatgctgcctgattaa

SEQ ID NO: 3705 - protein, 1020 aa, DROSOPHILA
MLTRFQSENIVHSAPVHGVSSIQRLEFDREGLTKLKKAVKAIHNSGNTHVDNEMFMVRALERLGGKVIEQDEPDIGAAFLKFSVVTKELSALMKTLMQNINNIVMFPVDSMLKSELRGVKGDMKRPFDKAAKDYEAKFIKIEKEKKAQAKEAGMVRTEIDAAVVAEEMEKERRLYQLQTCEYLLKYKDIKTKTGIELLQHLIEYYHALSNYFKDGLQTIEHFGTYIGDLSEKLHEIKQKQDEDRRSLLDLRTVLRSTPDFERVDNVPSSESRSGGAGYSLHQLQGDKHHGVTRQGHLLKKSEGKVRRVWQKRRCRVTSDGFLDIFHADESKPPTRVNLLTCQIKPVPDDKRGFDLISYNRPYHFQAEDEGDQKAWMAVLVNCKEKALTKAFQHANPQMSPSLVELQKTVIRYVQLLPGNDRCCDCGSRNDVTWISLNFGILVCIQCSGVHRDLGVHHSRIQSLTLDNLTTANLLIARAMGNSTLNDIMEAKLGRGKLQHESSMYVEERYDFIRAKYVAKRYVMRTCSDDNDLRCDLEQAVVNADMSQLLQVWAEGADLTCCLPSSDAGETALHLAVLREMGSTLHIVDFLIQNMPPKGLNKATNPAGLLDVTGKNTALHLCALHDRRECMKLLLRSGADYELKNSQNKTALDIAKEMGHNSCRELIECAIKREKSAFDHINTDWNLPNEDGSTDFSDDETVIDERKSRSRPPSFAGGDSPVLRSRSSTCDSIQSSSSPIANCPSRQFTLPSGLPSYTHSAGTSPKQHISVGQYLGSATNVGGNGPGNGGSSPSSASSQSVRAARNSLNMQSDLGGHVTGARKSTSTANMNSLKKRTAPAPPPGTLGSASSSSFYGTLPHPPRHSQNFDASDIRAINHKNQSLDVAYGTLPHLRSVESSPRGGGGYGYGVSQDPGGSGNGSNNSLMPAMTTFGHKRSPSGESLNRNIHLAGAKLVLPPTGELPTLKHVDKSALTRPKIPPPGPPSEREISNGQSNESISSMDEGPVAPPRKVSPKRTLSGL

SEQ ID NO: 3706 - DNA, 2936 bp, DROSOPHILA
ttcgatcacacattgcggcggtctaagcaacggatcgctgatagagattcccgggcatccaaaggatggcatcagggtgctcatttccaagcgcaatccagcacgaaaattgagtgatcctgagcacgccggaatgctgctggtagtctcttacgcttgggatggaaacgccctgccgggtaatgaattctggatggtaagtacatagattgacagtgccctcctagccacaaatgttgatattaagtggtgaaacaatatatttatattctgtggtttggccaactgtgtgttctagttttccactaatgccctttatattaaataataagaacattatcaatttaatgagggcatgcattatcagcttagtaagtgtttataattgtgttaagtgcaattataaagataattcaatttagtgatcattaaaccaatggaaagtaacttgacattaaagtagttgtagttcttcctttgatcttaacattttcttctttctaatttcacatattataaacttcattcgttttagaaaatgctgcagtccacaggtgactcctcgacggcctgctccacgttggtggccgagctgcacaatccgtacataaacacgaaattctgcaatggaggcaacctgcacatcgcctcaccggagcacggggtgctccacatagccgaatatgccaagcgggtgattcggagcgagagtgacgccttatgagatacgtgaatctgcctgttatctaatcttatctaatcgtagctactgttttattccacacttgctgtaggtcaattccatgaccttttgacagacgcatgacaattccaaaaaaaaagggaaaaaaaaggattttatattgtaatcgattttataaaacgaccattttaaaccaaaaccaaccaattgattgaattgaaccaaccaattgaagctttaaaaagccatgaaaatgcctcgaaaacgagagaaatatgtaatagaattaagtattttggttaaaccatctttatgtttgtaagcagtgtaaatacatgtgtataaatgcagagcagttccttatgccaaactatatgtgatgtgataattatagcgtgtagcccaatttggagacccaacccaaaccctcgacagtggtcgtcttcggcttgtactcgcaaccgatccatccatcatagccgaattcctggagagccttgaacacaaatccgtagtccagctcaccggaaacatccggctcgtggcgatgcggcacctgggcgatctgaaagtgtccaatcagcgccttgtactcctcgagcgtcttggaaacgttgccgtgcaaatgctgcaggtgatacagatcggccagcaattgaatgttgtccgcagccacatcggccagaattccagcggctttggagtatgaattcatgtagtagccaggcacggcgtacttgttaattggctctatcacgccgatcattttactggctctaaggctatcggcggcgatctttagattggcggtatacgtcttcgtgtagtcactctcctggccgcccttgaagagtccagcggttagatgaatcttgccacagttaacctgtcgggcgaaatcaatggtggcatccaattggctacggaacagcttttccgagccgggcacactggtggagccgaaacgcagctgatcgtcgctcttgtcgaaggccagattcaccagactgaccaccacacccgtctcctttacggcggacaccacgtcgctcgtctcgccttcgggataggggatctctaccgcacggaatccgttctggtgggccagacgaattcgctccgcgatcgacgtcgctctttccgtgaacaaaaagttcagattcgctgcaaacttgagtgccatcttccgttcactaatctccgcctgcgttcacgcttggcaaacaactgggggggaacgatgcgattacccgttttttatattatatctaccgacttttgatactgccaatgtcatatggagcaggagcttttccgaccaaagctttgcgtgatatatgtacatacatacgtaggttttaagttatttagctggcatcagaaccattatttagaattagtatattatttaatttagttcgtcgttagttaaataaaatactagttctaacactcgtagcgttaatatttttaatattattattattatttagtattattatttaatataaaacctgtgtgaaaagcattgactccacctagcggacattaagggaaccattaaataagacgcatgttttgggtcaacattttaattttcaatttccaaaccatgaaatacaaaagcagtggagaaaatgtgaatttggtttaaagagttcaaaactgttaattttgaaaagcaggcagccttcgtcttcacatccttactccttcgaggctaccgtgtgctttgactagttcttttgagagttttgagttgacaatgagcttggccaggaattaaaaaccgacgacgtcacgatatcagtggtctctttggagcaccatgtgaatgtcctggctatcctcgtactggctatcctcgtcttcgctatccttgccgtggctatcctcgtactggcaaccctggtcacggctatccttgtactggctatccatgccgtggctatcctcgtactggctaccctggtcacggcaatccttgtactggctatccttgccgtggctatcctcgtactggctatcctggtcacggctatccttgtactggctatccatgccggggctatcctcgtactggctatcctggtcacggctatcctcgtactggctatccatgccgtggctatcctcgtactggctaccctggtcacggcaatccttgtactggctatccttgccgtggctatcctcgtactggctatcctggtcacggcaatccttgtactgg

SEQ ID NO: 3707 - DNA, 936 bp, DROSOPHILA
ccccagttgtttgccaagcgtgaacgcaggcggagattagtgaacggaagatggcactcaagtttgcagcgaatctgaactttttgttcacggaaagagcgacgtcgatcgcggagcgaattcgtctggcccaccagaacggattccgtgcggtagagatcccctatcccgaaggcgagacgagcgacgtggtgtccgccgtaaaggagacgggtgtggtggtcagtctggtgaatctggccttcgacaagagcgacgatcagctgcgtttcggctccaccagtgtgcccggctcggaaaagctgttccgtagccaattggatgccaccattgatttcgcccgacaggttaactgtggcaagattcatctaaccgctggactcttcaagggcggccaggagagtgactacacgaagacgtataccgccaatctaaagatcgccgccgatagccttagagccagtaaaatgatcggcgtgatagagccaattaacaagtacgccgtgcctggctactacatgaattcatactccaaagccgctggaattctggccgatgtggctgcggacaacattcaattgctggccgatctgtatcacctgcagcatttgcacggcaacgtttccaagacgctcgaggagtacaaggcgctgattggacactttcagatcgcccaggtgccgcatcgccacgagccggatgtttccggtgagctggactacggatttgtgttcaaggctctccaggaattcggctatgatggatggatcggttgcgagtacaagccgaagacgaccactgtcgagggtttgggttgggtctccaaattgggctacacgctataattatcacatcacatatagtttggcataaggaactgctctgcatttatacacatgtatttacactgcttacaaacataaagatggtttaacc

SEQ ID NO: 3708 - protein, 264 aa, DROSOPHILA
MALKFAANLNFLFTERATSIAERIRLAHQNGFRAVEIPYPEGETSDVVSAVKETGVVVSLVNLAFDKSDDQLRFGSTSVPGSEKLFRSQLDATIDFARQVNCGKIHLTAGLFKGGQESDYTKTYTANLKIAADSLRASKMIGVIEPINKYAVPGYYMNSYSKAAGILADVAADNIQLLADLYHLQHLHGNVSKTLEEYKALIGHFQIAQVPHRHEPDVSGELDYGFVFKALQEFGYDGWIGCEYKPKTTTVEGLGWVSKLGYTL

SEQ ID NO: 3709 - DNA, 6035 bp, DROSOPHILA
ttgtctagcagtaaaacttactgctgttggctttcatcttctcactccttttcgttctcaatgaagtttctgcagtctggcatcgattttttcaaatgcagacacatgcactaactgccgacaaggcgaaccgactttttcgactgcctggagttgttcggaagcttctgctgtcggctcacaaaatggtcaaacagaagtctttcgaagcgaaaagctgctaataatagaaaactcaaagcgaagagggcagggggtccacgaatggcagacgccgcggcgacacttaaagcacggtaccatcggctttgaacggttatgtccgagaatattctaatttcgcaatgggcttttatctcaaacacacatgaaaatgcccatgccagagaccagagaacctacttatcaccgactttccgacaacacgaaagcaaacttttgtttatgacagagaaacgttcacaaatctagggatatcagaaatgtaccaaaatattttatcgatatctttcgacacgcgcagcataaatcgtcgttgactgtttacaaagaagtgtttctttcaacaagagtttctatcagcaaaaatggagcaaataaatagatagatcagtgcagaaataaacttaaaacctaaatttctagtacttgacattctgaaaatttgttggtcatgtcggatatcgagttaatattcattttacttaaacggcgatattgcttagcaaggacttcaacccacaccggcgcggtaggaacggctgactgcattattttcacaaatggacgaccagactaagtaataaaaactaaaatatgcgtctaactttattcacgtattccagtgtatatgggtatcgtcaccgacaaatcgctttaatgtatggcaaggacacaagagagcgcataatttgtaaatttttcgcaaacaaaattaaaccaaaatcaattctcgtgtcagtcacatagcggcgctctgatttatgtaaagataagtattaaatcatttacttgatttattcttgatttaatgttatacaattcataatcatcaaaatttttattgtttttatttgttttaaaacattgaccaaaggcgatgtttcaagtgccttgccgaataaagatgttaaattcggtcactccatatttttctatgcttttccgctcagccagctgcacttggatgttgtgggggatcgggtggtggtgctttacaacttgtccaagtactgggatagatcgggcaatccttccttaagacccttgcgcttacgagtatcctggacgatggcatagggcttgcttgagggctcgctcggatcgccaggcaacacctgccaatgatcgaagacacattgagggaaggcctgtcctccggtattagagcgcagatcggcggtaaaaccgaatgactcgttgacgggcaggtatgccttcacaacgaacatgggagtgcccacaacctggttttcctcgaatacatggccacgtcgcctgttgagcacaccgtatattcctcctacagcaacctcggggcactggatctcgcacaggtaaacaggctccatcaggcgcggcttggcggttatagcggcagcgtacagacaacgacgagtggttggaatgatctggccaccaccacgatggatggcatcagcgtgaagtgtcacatcgtagatgttgaagcggacaccgcgcaagttttcgtcggctaaaataccctcctttgaggcccattggaatccagcgacaacagagtccttgatttcgttaaggtactgcacggacttggtacagtcgaggatgaaattcggaccggttccgtcggggccgaagcaccagatcttacgggcctcagtcacatcgtagtcgtacttctcagacaaataacgggcacgagccttgaactcatccttggcactcacatcgccgttatcaatgtcctcgggaagaccgtctggcataggtagggctttcatcagcagacggttgtgcttgttgggcgacttggacagacacatctggtcggactcctccgacacagtctcacggtaggagacgacgggatcagacttcttcagtgggatacaagcgtggtcttcctctagatccttaaggcagatctccaaatgcagctcaccggcaccagcaatgatatgctcgccggactcttcgatgatacactgcaccataggatcggacttagccaaacgcttcaagccctccaccagcttaggcaagtccgcggggttctttggctcaacagccacgcgcaccacaggggacacggagaacttcatgacctaaaaacgaaaaaattttaaaagtcaataataaatttgtatgctgcttaaaaaaagaagaaaatgaaaaacgctgcaaaccttcatgttgtgggcgtccttgaaggtggtaatcgtaccggtcttaaccaagaactgatcaacaccgaccagaccgcaaatgttgccagagggcacatcctcgatggcctcgacgtaacgacccatcatgagaattgtgcgctgaatagccttctcatataagtcctccttcttgccgggagtgtagttggggcccatgattcggcacttttgcccggtggccaccttaccggcgaacacacgaccgaaagcatagaagcgacccttgtcagaggtcggtaccatcttagaaatgtacatcattagaggaccatcaggatcgcaagacttaacggcgatagcggcctcatcgtcatggggaccttcgtacagcatctccatgcggtacttctgggcaaccactggcgacggcaaatgaatagcaatcatctgaagtaaagcctcgccggctggcagccaggtgcgcatcacagtcttcagcagagctttgccatctttgtccttgtcttcatgcttcagagtcacaccgattttctcgagcaaggtacctatctcctccttcttgtaattcataatggcatcgaacaccttgtagatggggtccaggatgtacatgcagaacgagcgtttgttgtcagcctctttctgtttctgccatttcttggtcttggcgttaaagaagttttcaccccacaatctgtgaagaagttgaacgattaattgtgccttcagatatttcttattaactacttatcacttaatgaaatgcttaatgaccagttcaaatcgcttatttaaaaaaataattaatattatttttctggaaattttgtataatacaaaatgattcatttcagccaataaatttgttgcaaatttgatttataaattttaagtcttagatatcaaaaatgacgtccgaatatatcgatttgtataatatgaggccaaacaacaattgatttcagatatatgaagaaattatgtgaacaataaaagatttctgtatacaatttaaaaataattagtgtaaggtaactgccttaacatgactcgtttgaacattaggaaagcggtcccgagtcagcgtttaaacagcatccgaaagtttattcttcttctatttaaggtccacttgtggcgccgtcagcacgagagactctaaaaggactttccttgcggagatgtctttcaagaagccgcccgctaagcgccacacgttttgtggtagaagtttgaaaacatttacaaacaaacttgagacatgactcaccggttcattagcttgacaacatcaatcttgaatttctcggagtacatctcagagaactgcttgagggtgaacgcccagccgtgaagcccagaaccgaagcccactgatcccttagagggatccacgcgaacctcacccatcggtcctccgtcatcgttataggtggcaatgataacgtttacgttctcgacgatgcgctggaaggtctggtacagctcctcggcatctagttgcagctcaagcagagcgcggtccattttgttcatgaataggatgggcttaatacgctcagcgatggcctgacgcagcacggtttcggtctggacacaaactccggagacgcagtctacaacaacgagtgcaccgtcggttacacgaagggcggcggtcacctccgaggagaagtcaacgtgaccgggcgagtcgatcaagttgatcaggaaacccttgcactccttctcgcgctgatcggggtgggtaatgaacaccagatccttttcctccacctcaaagtacatggaaatggcactgcaataatgaaaggcggattaaaaaagccgtgggtgctggaacatgactggtcttacgtcgacttgatggtaatgcagcgctcctgctcgtccttgcgggtgtcagtgaaacgagtctcaccagccttggctccggcaatgataccagccttcgacacaagggaatcggtcagagtggacttgccgtggtctacgtgggcaatcacagacatgttgcggatgttccgcttcttgtccatgaggccacggatctcgtcgacggtgaagttgacctgtaaaataaataaggcatcgttatgtacatattataacgagtttccactcgatctatacacagtgctgatttaaaaatggcgtccatacacacactaagtcttcacagtcgtgcaaaggtctttgaggttagataagaactaaaaaccacaaatcactcactcgcgagtatgggcatcgataaatatagcaatatacatctattccttgggtatttcacaacaagcaccaaacaggatcacattctagccaaatttcaatagaaaattgcatacgtcattcctagtctttgtcttgcatttcaccataatgcacacacacacaacaagcaaacgtgaaaatatgtggacacatcatttcaccaagtaatggttgagacatctgcactttttgcactgggcattaaagatattaatgcaggtcgcctctaggccttttctgtagatatggggctattatttctgactttgggcacctaccattttggatgtatggagattttctcgcggaccaaaaaaacactacgcctttcaacggcgtttcgacaggaaagagcgaggcgctgcagcgaccatagagctgggacaattcttgatattttcgatagtcggaaccagtagttgatcgatagtagttcacgtgacagattcatcagatagttattttgcatgtttactttatagtttttaaacttttattttacagaatgacgttttcgtaattttccacgtaattttccgcgtcgaaatcgtggttgtttatatagccataaataaatattgctaagcactattattaatttacatacatccgcttaaatttcttctaaattatttttcttaaaaataatctaatctatatatatatatttctttatcgcttaaactatcttatgaaaaataaactttaagtgaaagctagttatattctcatttgctcatagatgccgagcctttaaagttaacgacttatgatagtttcgatcaaacggcatttcgaaattctacgcacgcagtaatatttaaagtatagcaagcgagaacgctatcgtcgatttttacgactattagatacccattacatagctaatgcgattctctaggaaaatatttaaaaattttgttggcgttgcggtaggaattaaaaaaaggtttgaattgtgggcttgaaaacttattgaggtttgtaggtgtaagagtgggtcacgccacggcatatcgacagaaatttggcagacaaataataaaacgaaaaaaatcaagagatccgaaagtcaaattttccgacaagaagtttcaaaatttgtaaaaaatgcggtggaaggtcatggcgtaagtgtttttggtattcattatacccgctactcgtagagtataaggatatcgtttgttcgttgaatggtatgtaacaggcagaaggaagcgtttccaaccatattgctcaggatcaatagccgagtcgatctagccatgtccatgtgtccgcctatccgtatgaacgttgagatctcaggagctataaaaactagaaggctgagatgcccactctaacgccctaaaaccgcaccattaa

SEQ ID NO: 3710 - DNA, 2839 bp, DROSOPHILA
gtcgctgcagcgcctcgctctttcctgtcgaaacgccgttgaaaggcgtagtgtttttttggtccgcgagaaaatctccatacatccaaaatggtcaacttcaccgtcgacgagatccgtggcctcatggacaagaagcggaacatccgcaacatgtctgtgattgcccacgtagaccacggcaagtccactctgaccgattcccttgtgtcgaaggctggtatcattgccggagccaaggctggtgagactcgtttcactgacacccgcaaggacgagcaggagcgctgcattaccatcaagtcgactgccatttccatgtactttgaggtggaggaaaaggatctggtgttcattacccaccccgatcagcgcgagaaggagtgcaagggtttcctgatcaacttgatcgactcgcccggtcacgttgacttctcctcggaggtgaccgccgcccttcgtgtaaccgacggtgcactcgttgttgtagactgcgtctccggagtttgtgtccagaccgaaaccgtgctgcgtcaggccatcgctgagcgtattaagcccatcctattcatgaacaaaatggaccgcgctctgcttgagctgcaactagatgccgaggagctgtaccagaccttccagcgcatcgtcgagaacgtaaacgttatcattgccacctataacgatgacggaggaccgatgggtgaggttcgcgtggatccctctaagggatcagtgggcttcggttctgggcttcacggctgggcgttcaccctcaagcagttctctgagatgtactccgagaaattcaagattgatgttgtcaagctaatgaaccgattgtggggtgaaaacttctttaacgccaagaccaagaaatggcagaaacagaaagaggctgacaacaaacgctcgttctgcatgtacatcctggaccccatctacaaggtgttcgatgccattatgaattacaagaaggaggagataggtaccttgctcgagaaaatcggtgtgactctgaagcatgaagacaaggacaaagatggcaaagctctgctgaagactgtgatgcgcacctggctgccagccggcgaggctttacttcagatgattgctattcatttgccgtcgccagtggttgcccagaagtaccgcatggagatgctgtacgaaggtccccatgacgatgaggccgctatcgccgttaagtcttgcgatcctgatggtcctctaatgatgtacatttctaagatggtaccgacctctgacaagggtcgcttctatgctttcggtcgtgtgttcgccggtaaggtggccaccgggcaaaagtgccgaatcatgggccccaactacactcccggcaagaaggaggacttatatgagaaggctattcagcgcacaattctcatgatgggtcgttacgtcgaggccatcgaggatgtgccctctggcaacatttgcggtctggtcggtgttgatcagttcttggttaagaccggtacgattaccaccttcaaggacgcccacaacatgaaggtcatgaagttctccgtgtcccctgtggtgcgcgtggctgttgagccaaagaaccccgcggacttgcctaagctggtggagggcttgaagcgtttggctaagtccgatcctatggtgcagtgtatcatcgaagagtccggcgagcatatcattgctggtgccggtgagctgcatttggagatctgccttaaggatctagaggaagaccacgcttgtatcccactgaagaagtctgatcccgtcgtctcctaccgtgagactgtgtcggaggagtccgaccagatgtgtctgtccaagtcgcccaacaagcacaaccgtctgctgatgaaagccctacctatgccagacggtcttcccgaggacattgataacggcgatgtgagtgccaaggatgagttcaaggctcgtgcccgttatttgtctgagaagtacgactacgatgtgactgaggcccgtaagatctggtgcttcggccccgacggaaccggtccgaatttcatcctcgactgtaccaagtccgtgcagtaccttaacgaaatcaaggactctgttgtcgctggattccaatgggcctcaaaggagggtattttagccgacgaaaacttgcgcggtgtccgcttcaacatctacgatgtgacacttcacgctgatgccatccatcgtggtggtggccagatcattccaaccactcgtcgttgtctgtacgctgccgctataaccgccaagccgcgcctgatggagcctgtttacctgtgcgagatccagtgccccgaggttgctgtaggaggaatatacggtgtgctcaacaggcgacgtggccatgtattcgaggaaaaccaggttgtgggcactcccatgttcgttgtgaaggcatacctgcccgtcaacgagtcattcggttttaccgccgatctgcgctctaataccggaggacaggccttccctcaatgtgtcttcgatcattggcaggtgttgcctggcgatccgagcgagccctcaagcaagccctatgccatcgtccaggatactcgtaagcgcaagggtcttaaggaaggattgcccgatctatcccagtacttggacaagttgtaaagcaccaccacccgatcccccacaacatccaagtgcagctggctgagcggaaaagcatagaaaaatatggagtgaccgaatttaacatctttattcggcaaggcacttgaaacatcgcctttggtcaatgttttaaaacaaataaaaacaataaaaattttgatgattatgaattgtataacattaaatcaagaataaatcaagtaaatgattt

SEQ ID NO: 3711 - protein, 832 aa, DROSOPHILA
MDKKRNIRNMSVIAHVDHGKSTLTDSLVSKAGIIAGAKAGETRFTDTRKDEQERCITIKSTAISMYFEVEEKDLVFITHPDQREKECKGFLINLIDSPGHVDFSSEVTAALRVTDGALVVVDCVSGVCVQTETVLRQAIAERIKPILFMNKMDRALLELQLDAEELYQTFQRIVENVNVIIATYNDDGGPMGEVRVDPSKGSVGFGSGLHGWAFTLKQFSEMYSEKFKIDVVKLMNRLWGENFFNAKTKKWQKQKEADNKRSFCMYILDPIYKVFDAIMNYKKEEIGTLLEKIGVTLKHEDKDKDGKALLKTVMRTWLPAGEALLQMIAIHLPSPVVAQKYRMEMLYEGPHDDEAAIAVKSCDPDGPLMMYISKMVPTSDKGRFYAFGRVFAGKVATGQKCRIMGPNYTPGKKEDLYEKAIQRTILMMGRYVEAIEDVPSGNICGLVGVDQFLVKTGTITTFKDAHNMKVMKFSVSPVVRVAVEPKNPADLPKLVEGLKRLAKSDPMVQCIIEESGEHIIAGAGELHLEICLKDLEEDHACIPLKKSDPVVSYRETVSEESDQMCLSKSPNKHNRLLMKALPMPDGLPEDIDNGDVSAKDEFKARARYLSEKYDYDVTEARKIWCFGPDGTGPNFILDCTKSVQYLNEIKDSVVAGFQWASKEGILADENLRGVRFNIYDVTLHADAIHRGGGQIIPTTRRCLYAAAITAKPRLMEPVYLCEIQCPEVAVGGIYGVLNRRRGHVFEENQVVGTPMFVVKAYLPVNESFGFTADLRSNTGGQAFPQCVFDHWQVLPGDPSEPSSKPYAIVQDTRKRKGLKEGLPDLSQYLDKL

SEQ ID NO: 3712 - DNA, 4016 bp, DROSOPHILA
ttaagctggtcaatagtggtcttatccagcgacagacccatctgcaaggaagaaagcggatcagatgagaaagtggtgaatgccatagccggcttaacctaccaaatctgtagactgctcattgtcaaaagtcaatttgctgagctgcacatccaaatggccattagtgtagaatccaaaggtgctgagtgcgatgtactggcgacggtcattctgcgggtaacatggtcaactatgagtcagttactccaggctggcaagggtgcctccaacttaccctcacttccagatggtgcttccgcccaaggacctcaagtggggcccagagaagcgccgtcagtgccgccagcaccactattgatttaacatccccgccgggagcccacatctttccgtattttccccaaattttccgcttctattcttcggcgacgtttcgtggcacttttgccccgcgattccgggcggaacgttccggcgcagagttccgcgctagctgcgatccaagatgcggcaatcgatttgccgcgaccgccgtcacagttcctattattcacacctcaccttgataaaaaccccaaagaattttacttttttgctgggggaaaaaaggtgatctatcgaagtctatcgttcttcgatatcagcatgtgttatttgaccggacctatcgatttaaaaataccacacgagtgggggggttcgcagtgttgccactacagccgttttgccgttaagtcttagtccaagaacagcggcaagcgggaattcaaattttagaacacatttctagcagtttaaaatcaaactaaattagccattttagatcttgaaaatatcagatgtaattaatactttagtcgattgcgatattgtttatttgaaaacgttgcaaacaagttatgaaacagaaaacgattatatatttaacacatagttttcacttgttaattaggtgcgacaagaaacaatgtttgtttgttcggccatgttggcctcctcactccatgtagccactgtgggagtcagaggcaccgagattcctccttgcgtacagtccatgacgcggcttaaatttgccatcgcccagagtgatcctggccgggagcttcttgcccctgaatgtggctgtttcgaaggatggcggtggcgataccttcgctggcttctcctccgcctccagcacagggatgtgccatgcctgcttcgtggtgctggttgcagtgggtggagctgttgaggaattgcctccggaccccgacgaatcattcaccggacgcacctgggttatttccagagcgttctgcttcttcttgtagtagagcacctccatgccgagagtcatcatggcaaggacaaggccgaagagggtggctatgaagacgccgcccaaactctccagggtgatgccttcctggtcctccgacagcgggcagttaggcagattcgattggttccagtacttggccttcagctcctcaaagaaacgatccttctgcagctccaaaatggcgtagctcagttcgtcgcccagatgactgccctgctgaacggccacggcatatggctgctcggcgaacacctcgcccacctcggtgagattacaattccgcgtgatctcgtacttgatctccgccgaatcgtgaatgaaggcatagtcggcattctcgtgtgcatcaacattggcgaatccctccttggcatccgccaccggctgagagctattgatggccagcagtatatggccatactgctccttgatcggatagtcccagatgcggaacttcttgaaatccttgctagcgttaagggccagctccttccacatccggtacagcgtgtcctcggcgaacttcatgttcacaaagtattgatgcgtatcggagtccttcacaacggtgtagtttatcctcgactgtcgagcaagttgctccagcgattggaccggcgtctgcatacgctccacggtgaggaaagcggccagattggccgtgaatgtggccagcatgagtacgacgaatagccaataggcggccaccagcatccgtccggaaatggccttgggtgcttctcctccgccctgtggcgtgaacgacgtaagggcgaaccagaagctctcccgcagcgtgaactctcggcaggcatacggatatgcctgccgattgttccgcgagctatacggcgagtacttgtccatgaaccagatcatgatggccgtaccgaccaaagcggccactatgctcagccagacctccagtcggagcacggtcatgaacttgaacagcgatgtgcggcgcaccggcttccggatcgctatcgatatgcccgtttgctcgtagtatggcggcaagaagtcgatcacctcctcccgttccgaatacatcttcagtgcggcaatggcgaagtccgtctcgccacggaccagatcacccaccacgccatcccactcgcccagctcgtttagctcgcccatgtgtcccacctcgggggccacgatctcgaactcgaagttcagcttttgcgaaagcctgatgatgaagtcgatgcaatagccctcccaaatgggcaaaccactgcgatcccgtatcagctcaccggtgccttcctctcggcgcagatagctccaaggaatgctctcggcggtgccgatgcgaaagaatcgacgtgccggactgatcgtctcgttcaggagccgcatctcgcccaccgacgaccaggcggccagatccgtcttcgcctcgtgttcggaactatagtatcccgccgatatgttcaccgcaaaggtgaggcccggcactgggctttggaattgatcctggatgtgtggcaaaggcggggcgtaagcgagaaagttgctccagtgcaccatgtccagccagttgtagtcgtccttctccaacggatcactcacctccgacgacgaggcggtggcattgcagtcctggtagatggccaacggataacctggactcacctgggcggcgtttatcaggctgcgcagaacattcagcagcatggcacgttgcatctggcggggattagaagttagggaatccaaatatgatatatgattcaatgtgagaccactctcaacacaccgtaaatccacttccgcagtaaagatccggcattggcatcgatcggcagatcgcacgaggattcaatgtgaaccgggtgcacagttccgcctggcgcctgtacttaaatacccgatcccgagtgtccaagaatacgaaatgccactccagcggccgctgaaagaggtccgccttttgaacctgtcaattgaagaaaaacatttttacattctatcattcctttttgcaggaattatattccttgaagaggatttttatcacaacttccctaaaaatggtcatatagatgtaagaataacagttttgagcagctaattaccactgctaactatccctataactttttgacgggttttgggaaattaattttttggtaaatttttgcattttttgtaaggggtaacatcatcaaaatttgcaaaaaattgacaaaaaatagaatgtccgttttttaactcaatttgattggaaatttaattacgagctcaacgaggtatgacattctatattcagacaattattttttaagttgtggcaaaaaaaccgcttatttgatgaccgaaattcagaaaaaccgattttgccaaaaagttgatatttacaaacggaattttcgtcataacatggctaaaaatgctcatatagatgtaaaaataactgttttgagcagctaattaccaatactaaccatccatatcattttttgacggactttgtaaaattaatttttggccaaattttcgcatttattgtaaggggtaacatcatcaaaatttgcaaaaaattgacaaaaaatagaatgtcattttttgaactcaatttgattggaaatttaattacgagctcaacaaggtataacacttaatatttggatcattttatctaatgttttggtcaagaaaagtgctcttctaagac

SEQ ID NO: 3713 - DNA, 2016 bp, DROSOPHILA
atgctgctgaatgttctgcgcagcctgataaacgccgcccaggtgagtccaggttatccgttggccatctaccaggactgcaatgccaccgcctcgtcgtcggaggtgagtgatccgttggagaaggacgactacaactggctggacatggtgcactggagcaactttctcgcttacgccccgcctttgccacacatccaggatcaattccaaagcccagtgccgggcctcacctttgcggtgaacatatcggcgggatactatagttccgaacacgaggcgaagacggatctggccgcctggtcgtcggtgggcgagatgcggctcctgaacgagacgatcagtccggcacgtcgattctttcgcatcggcaccgccgagagcattccttggagctatctgcgccgagaggaaggcaccggtgagctgatacgggatcgcagtggtttgcccatttgggagggctattgcatcgacttcatcatcaggctttcgcaaaagctgaacttcgagttcgagatcgtggcccccgaggtgggacacatgggcgagctaaacgagctgggcgagtgggatggcgtggtgggtgatctggtccgtggcgagacggacttcgccattgccgcactgaagatgtattcggaacgggaggaggtgatcgacttcttgccgccatactacgagcaaacgggcatatcgatagcgatccggaagccggtgcgccgcacatcgctgttcaagttcatgaccgtgctccgactggaggtctggctgagcatagtggccgctttggtcggtacggccatcatgatctggttcatggacaagtactcgccgtatagctcgcggaacaatcggcaggcatatccgtatgcctgccgagagttcacgctgcgggagagcttctggttcgcccttacgtcgttcacgccacagggcggaggagaagcacccaaggccatttccggacggatgctggtggccgcctattggctattcgtcgtactcatgctggccacattcacggccaatctggccgctttcctcaccgtggagcgtatgcagacgccggtccaatcgctggagcaacttgctcgacagtcgaggataaactacaccgttgtgaaggactccgatacgcatcaatactttgtgaacatgaagttcgccgaggacacgctgtaccggatgtggaaggagctggcccttaacgctagcaaggatttcaagaagttccgcatctgggactatccgatcaaggagcagtatggccatatactgctggccatcaatagctctcagccggtggcggatgccaaggagggattcgccaatgttgatgcacacgagaatgccgactatgccttcattcacgattcggcggagatcaagtacgagatcacgcggaattgtaatctcaccgaggtgggcgaggtgttcgccgagcagccatatgccgtggccgttcagcagggcagtcatctgggcgacgaactgagctacgccattttggagctgcagaaggatcgtttctttgaggagctgaaggccaagtactggaaccaatcgaatctgcctaactgcccgctgtcggaggaccaggaaggcatcaccctggagagtttgggcggcgtcttcatagccaccctcttcggccttgtccttgccatgatgactctcggcatggaggtgctctactacaagaagaagcagaacgctctggaaataacccaggtgcgtccggtgaatgattcgtcggggtccggaggcaattcctcaacagctccacccactgcaaccagcaccacgaagcaggcatggcacatccctgtgctggaggcggaggagaagccagcgaaggtatcgccaccgccatccttcgaaacagccacattcaggggcaagaagctcccggccaggatcactctgggcgatggcaaatttaagccgcgtcatggactgtacgcaaggaggaatctcggtgcctctgactcccacagtggctacatggagtga

SEQ ID NO: 3714 - protein, 671 aa, DROSOPHILA
MLLNVLRSLINAAQVSPGYPLAIYQDCNATASSSEVSDPLEKDDYNWLDMVHWSNFLAYAPPLPHIQDQFQSPVPGLTFAVNISAGYYSSEHEAKTDLAAWSSVGEMRLLNETISPARRFFRIGTAESIPWSYLRREEGTGELIRDRSGLPIWEGYCIDFIIRLSQKLNFEFEIVAPEVGHMGELNELGEWDGVVGDLVRGETDFAIAALKMYSEREEVIDFLPPYYEQTGISIAIRKPVRRTSLFKFMTVLRLEVWLSIVAALVGTAIMIWFMDKYSPYSSRNNRQAYPYACREFTLRESFWFALTSFTPQGGGEAPKAISGRMLVAAYWLFVVLMLATFTANLAAFLTVERMQTPVQSLEQLARQSRINYTVVKDSDTHQYFVNMKFAEDTLYRMWKELALNASKDFKKFRIWDYPIKEQYGHILLAINSSQPVADAKEGFANVDAHENADYAFIHDSAEIKYEITRNCNLTEVGEVFAEQPYAVAVQQGSHLGDELSYAILELQKDRFFEELKAKYWNQSNLPNCPLSEDQEGITLESLGGVFIATLFGLVLAMMTLGMEVLYYKKKQNALEITQVRPVNDSSGSGGNSSTAPPTATSTTKQAWHIPVLEAEEKPAKVSPPPSFETATFRGKKLPARITLGDGKFKPRHGLYARRNLGASDSHSGYME

SEQ ID NO: 3715 - DNA, 2963 bp, DROSOPHILA
cttctccagcagctccttggaggcctggttacaaaacggttcgttatcagttaattgcagttctgacctctaaacacatgtcattccgcgatgacgcctgcacccagcctttgaggttaggtccgatggcaaccccgcgtggggcaacccgtttccacgtatttatatctattgatttcttcctaattcaattatccgcttacccaggtgaacttcagggcgaccagcttgaagcccttctgctcgaagcgctcgatgatcttgccgacgagcccgcgctggacgccatcgggcttgaccatgatgaaagtcctctccttgttagccgccattgtcgccgagattacagaaaagaatgccaaaattgtgccgagcatcaggagcttcatgtgttcgccgttgcaaaaaaatcccgaatacgaaatgccggcaaggtgaattgtgggaaatcgtcaagtggtcacactgggcagccagccgcgttcttgagtttttgtttttgttgggcgatttaaaggataggaaaatacttgttatttaaattccaaagcggaaatttgagtgcattgctaaagtattcatatttttttcagtttataaccgctcaaatggggctgccatgtcgccttgtactttgaatttcagaatgtattctgaatgcatttcatcgaataatttaaagcaaaaataacgaaaactcaatagtattatttttaattactagacacattaaaacatttaaaaaaaaacaaagagttgcccacagttgatgataaaatgcccgtcaaactaggatagttactaggcactcattagcatcagcattcccaccagttgattcatccatccagcaggttaatcaaaaaccacagggaagtcacgttcaaatttctttttatgtctcgataagattaggtccatgtgatcacagaagtgacaaaacaatacaagtttacgactaatatatacacagctggtagatgcaaatgttcggcgaaaatcacttggtcgcgtctagtttggctaggccgtcggcatattggaactccggactgttctcgtactcgcacatgtccagggcgatgacgcagctctccttgaccacgcgcttgtcgtcctcggcgtagcggttcaagatctgaatgcagtcctctgtggcgatggcgccaagggcctcggcacactcgtgacgcaccatttcgttttccaggcgatcctccagattctcttgaaggaagggaatgctgcagggttcttgcagctggcccagtacgaaggccacctcgtggcggaagagggcggaagagtccttaagtccctcggcaatggccaagacactctcttcggtgcgcagattgcgcaggctgaacatggccctatatcgatcgaacaggctctgctgggcatccagatagatggccttcagctcggtgacgctcttgtcgcccgcagttggcggtgagggatcaacggaggcgtaagggttgctgtcatctaccttttggccactctgcagccagcggacgcggtccagagcaatggcacatgtttcggccacctccactaccggatcttgtttgtactcctccagaattggcagcacatctggatgaccaatggcgcccatggcctccgcagcctcgtggcgcaccatcggctcctgggtggtgtcctttagcaccttggtgaggatgtctaacgcctgtgcgtcctgcatctgacccaagcagtaggccagctcatgtttgagaagggccgaatcatcgtcaaaggctttgctgatcgcctcgatggccgctcctccgccgatgttcttcagcgtgaagagggctcgaaagcgctctttcagtgggcgttccttgttgttcagaacgcctccaatggcctcgatttgctgctgcgaaaccatttgtatgcggtgtggacttataaataaaaaactgcaacgggccgcgtgtggtgtcgcaatgtggccatacactcagtacttggtaataccaaaactacaagtaatcgatatgacgtggctatcgatggactatgagtcgatgaaacggcgctgccaacgcgtttagagtacaaattgtgcagcactagcaagaagcagtttagttacgtttactccgtagaagcgcgatacaaaaaagtcaataaaagggtgaaaagcgaacgttctagacacagaaagtattcaaaaatactgactcagtcctggcgcagcatcggtgaccaaaagagcggctcttcacggtgaaaagtttccgcaaaatcggcatttctgaaagttgcgcgttcacggtatgcgaagcgtggcgtgtgtgtcgagttgagttacctgtaattgtgtgcgcctgcgagagtggaagtggagtaaacctcgccaccgttttgaagttttggaaagatatagggataaccgcccagcgtttattttaaacaatgtcggaggcaactgtggcccaaaagccggaggcggtggaagatgtgaatgcgtcgacgggggacgagaagcagactcccgtaagtagccgcacatacacatatttagcgacaattaacatagcacggcgataacgcacaccaacacgggctccgctttgctttgcccgaattatctgcggtatttttccaaaataactgtgtgtgtatatgggcactcggatgtggtgcattttcaccatttccctttgtgcgctgtgtccgtttctatttacgtttcttttttcaacggctaccctcgtgtgcgcgcgctttttgctttttcctgtccactttccaactcccccttcccccgcctgctgaggaagccagcagcatgtgtgcgtgtgtgtatacgtgtgtagctactcgccgaagaagaagagaagaggagatgacgagagaagcagggcaatcggcgattccctttcaggctcacgttttgccgctgccgccgcgtctcgtttgtttttatttttgcttgt

SEQ ID NO: 3716 - DNA, 963 bp, DROSOPHILA
acaccacacgcggcccgttgcagttttttatttataagtccacaccgcatacaaatggtttcgcagcagcaaatcgaggccattggaggcgttctgaacaacaaggaacgcccactgaaagagcgctttcgagccctcttcacgctgaagaacatcggcggaggagcggccatcgaggcgatcagcaaagcctttgacgatgattcggcccttctcaaacatgagctggcctactgcttgggtcagatgcaggacgcacaggcgttagacatcctcaccaaggtgctaaaggacaccacccaggagccgatggtgcgccacgaggctgcggaggccatgggcgccattggtcatccagatgtgctgccaattctggaggagtacaaacaagatccggtagtggaggtggccgaaacatgtgccattgctctggaccgcgtccgctggctgcagagtggccaaaaggtagatgacagcaacccttacgcctccgttgatccctcaccgccaactgcgggcgacaagagcgtcaccgagctgaaggccatctatctggatgcccagcagagcctgttcgatcgatatagggccatgttcagcctgcgcaatctgcgcaccgaagagagtgtcttggccattgccgagggacttaaggactcttccgccctcttccgccacgaggtggccttcgtactgggccagctgcaagaaccctgcagcattcccttccttcaagagaatctggaggatcgcctggaaaacgaaatggtgcgtcacgagtgtgccgaggcccttggcgccatcgccacagaggactgcattcagatcttgaaccgctacgccgaggacgacaagcgcgtggtcaaggagagctgcgtcatcgccctggacatgtgcgagtacgagaacagtccggagttccaatatgccgacggcctagccaaactagacgcgaccaagtga

SEQ ID NO: 3717 - protein, 302 aa, DROSOPHILA
MVSQQQIEAIGGVLNNKERPLKERFRALFTLKNIGGGAAIEAISKAFDDDSALLKHELAYCLGQMQDAQALDILTKVLKDTTQEPMVRHEAAEAMGAIGHPDVLPILEEYKQDPVVEVAETCAIALDRVRWLQSGQKVDDSNPYASVDPSPPTAGDKSVTELKAIYLDAQQSLFDRYRAMFSLRNLRTEESVLAIAEGLKDSSALFRHEVAFVLGQLQEPCSIPFLQENLEDRLENEMVRHECAEALGAIATEDCIQILNRYAEDDKRVVKESCVIALDMCEYENSPEFQYADGLAKLDATK

SEQ ID NO: 3718 - DNA, 6796 bp, DROSOPHILA
atccacttaagccgtaaccaaaacccagacactaggcaggcacatacatagccacgtagcacataagaattctttttcatatgtatgcacaaaagcataagcaagaagcgctctcgcgcagatcaagtaaacaacccactaaccaagtacatttaagattttctcacaccatttgtttcagtcttaagctgatattcaatcaataaaaacgcaaagcgaattcattcgaagtttttattcatttcggttcaaatacggatcatttattcgactcaaaagcaaaaattattttactatatgtattctcgatccacatgacgcgacgcggcgcaacgaaatgtcgacggagaacaaaactcagagctgcatttgtattacacatttcgttgacattttttttttttcaagaaaaacgagaaatatctttaaacaaagtgtactgtatatttttggagatttattattaagatcttatatatttaaatgtaataaaaacaatgtctttgtacgaagaagatgggtgttttgcgtatgatttttatttttttaattgtgtcattcatgttcaaatgtaatgagtacaactttgatcttgccttcgtaggaccagcaagaccaggcagaactacttacacgcaatcttacataagtactatatttttatagtgaaatttatagttcacttcccaaaacagtggtttaagtcgatttagtatgatccagcaattaacccatttatttattatgtttacatgtttttcttttctgttcattacaagctgtcaatttgtaagcagcgtcgcttgattgcatcgttcacagcttgggacaaagtaatgtactgaatgtcgttcaaagatattgttgagagtgtgtttaaatgtggtgttcggaggtgatgcttctcgagaagactcagtcttggcattctctgctactgggagggcttatatatgagctaacttatggcacctaggaataactagtgcgttaaacgttcttacttgtttttcaactgtggccgtttgaggaaggtaaccatggtgctgttgaacatgttcaccttaacaaacgtaacaaatgttgttggtgccacatcgcgcagtatcatcagcaagcgcttggcgggcagaaaggtaacgcattccgtgtggtccgtttcaatgcaacggtcatcgggagcacaataattaaggtcatcgtccagcggaattcccggtacagggcgctccacggggatcacatccttcttacttcccctgtacagctcacccgttgcactcaacagctgggtaaccaatcctaggcggaacacgcgaagctgcgaggcattctcgcgaacggcccgcattacggaatagatcacgttggccgaattttgaagacactttgggacgagcaacaggtgcgtaacagtggtgcacattccaatcaacgaagttagaaggtcatccacctcgacgttcaccagctccagttgctgtaccgaacaagcagcggctacaccacacataatgtggtacagcggaaaagtggtattgatcatgtgcttgttctccaagcggagcctgcgtagagacgttaaaaagggcagcacttgctggccaaattcctcggtatccatgccctggcatgaagacaacactagcaccttcaggttaactagtttcttcaagaagcggaagtcctgcgagcctatataattcactccacgtatattcaactcagttagatgcaccaggtcgcccagagagtctagtgattccactttgcttctgtggtccgtcattaagatttgaagcacgcgaatcttagaccattgtcgtgccaaatttaaaaaattaaaagttggactgtagcagattgcccttagctccagcagttggggcaattcacgaaagaccttaaagaggaactggtcatctactggacaagtgcgaagaacacgcaatgctttcaggacgctaatgtcgagtgtagcgagaatatccggaggattcggcaatatcacgcccagcatgtccagttcgcgtgtgcaattatttgcgagttcacggataaatcgcggccagttgctgatatgggtatcgcgtagcatgactgtgcgccatacactcttatcctgactgatcatggcccatgttttgcaaacctgcgccatatttacacgatcctatatgggatgggatgggattacgaacttcaattttacgatgacctagacattttaccttcatcgtcatgattttcataacggccatcactatctggcatccgatgtgacaatcgcccaggctctgcaccaaactggagctacatttgtcctttgagatctttttaaggccagccaaattctgccggtttggaatcctgataagttgaggaaaaacatataaataactgtgcgtttcgtaggttttttgcgttggtcttggaactaaaccgactcacactttcagattgcaaccaatcggatcggctatgatggctatagccttgcgccctccaattacaacaacctcttgttcctttataacggtctgcttattcacgttttctaactgctttttctccgcctgttgaacggatatttcattttccaaagtgacttctatcatgctgaagtcactgtcatcgtcatcatcataatgatcctcatttcctccagtctttttcatccatttcttattggcatatcccttctcatagatacacttctgaaagaggatattataagccagtgaatctccaatagcatttcgtaaattaccttgcacaacttaggtccagacggatgaacagaagccgcgcagcgcacacaaggctttgacttatcaggggctgcctttgcgtgagctctggacatgaaaataccgagtatatagagattgatatgtgtatatatatacaatatatctacctgcgcctgcgaatgttggtattaccaatcggtgaaccgcacgagctgctgttggtgtagtctgcccgagaattccccttaaccgccctggtcgaggtccagccctcactcggtggacttgcccctttgggcaccttgggcttcgacactcgctttccagtgaccgttaaggcaggcgtctggggcattacgttggacgggttggccaacccagccttgcctttcaccaccgccccttgcttcgccaccgttttgcacttcacaaccgccacatgttccatctccgccacctttgggaccgggctaccattgctgcgaggcctgggattttcggagctgggtataaagagatctcgctctacgccagtttgctttaggcgttcgaaaataactttcaaagaggtttcggtggatgtttctttcattatgttcgtctcatcggtcagaggcgtatggctactgaagcgcactgaacgacgcgaatgctccggaggcgaatgggtggacatagaacgttttacgatgcgagcgtccttaagtgatttgtgcaaggtatgatcagcttccgcctgcttcttggtggtatcctcttttttatcttcaacctatgggggaagatacaagagggagagaagatcaatggttagtaaatctgtgaaatttccgactcttagcataagattttttaagggtctccacctggttgtataagtctgatggttgcatgttggttggtgttgtactggacttggatgttgttgcaataccagttgcatttggacttttttttgcgttcaaagggcttttaatggctgcatccaattccccctgggaggcgtcgagtggcgacgtcattatcggcgttgttagagacggctgctgctgctgctcctcagacttattagtgatatgagccggctttgttgtacctgccgctgtctcctcttgtggttccactctcggaaaaacctttaggccactccatggcagtacacctggcttggccgtcgactattgccgtagtgtgcatgttgtgtattgtttggttgagatttgagataagcacagatacgatttcgtgttgagaaatacaataatatagaacaaacaaaacgatgtccgcacaacatagacctctgtataccagttaccaagtttgattggaaaaatagtcaaaaaacagtttatggggatctaataaccttaagttctttcgatttatgcaaatttccgtcccaagattatttacaatatttttatgtttacataagtttactttacaggtaaaagtaatttgagtataagttttaaaataaacttatactcaaattatattgattaattatgtgtatttgtgaataaataccgaccgaaagggatattcaaattagcccatttgtggattgaacatgagtatacagaggtatgttctataagcttgaacagacagcagcaggccagctcgtgtcctggacagcatcgccatcccctctactcaccagcggttctttatccgagttgctttcgatgttggatatgggtgttagctttgggaattctccagtccatcccattagacctaaatcgcacggttcaagatcgtcacgatgcgtgctgggctcacgatgacgttcacgttgacggccacggcgtctgcggcgttcaaattgactcttgtcatttaatgtctttgaagtcttaatcatagtacctaagtgggtttagatgagatgtgttattatgctacagatgctggttatttatttatgcttacttttttttccctgctcagtgttcgagtctttaaagctagagccatcccggtgagtcgaaagatccacgtttgtggaattggcatttaacaccagcaagtcgccctcaataatgttttgtcccacgccggcactctgttcaccaatggaaccttgttcatctatagcaccgcctgtgctactttgattggcgccggaactaggtcctgcagctgtagatgattcgaatgcggaatcaacgttaccgttaccaccggtatgcgacgatgaattggtagcgctgctagagttgccagctaagggctgcttgtcacacggctttgacggcccaaaattgtcatcgggcacatccatgtcgctctggaatcgatgtgcaaaaaaataagctaagtttctagatatatgttgtatatgttctcataaaacattaatagtgatcacttatggaaccgataggcaaacaattcaatggaatttcgtctgtcaaaaatattgaccctgaagacctgggttgtcactttttccacaaccgacgttttattgtcaagtcatttaatttaaaaagtatgcgatgtaaattctaatcagagttagccctttttaatacaatactttacaataaacgaattctgccggttaatctgcacacaactcacacacacacacacacacatgtaaatttatgcgagtgtcagggttgcgcggcttcgcggtttgttttctttacgtttctgctttgatcgccacaattgttgatcgagaggaaacctgacgcacacatacgaaaaaactgaatagcgggttcttgcactttcgccggcacaaagtacacagtttttctcgtttaagttaaatttactatcactctttcggaccgtttcgctttgttactgtgttttcagcctatgctttgccgcttcttcggcgtatcgcgaacttgcgttgcaagtaagtgtgtgtgtggatgcgacgcttattaaatctgcaccggattgttcagctaaccgtgtcaaaatcatgtagaactcaacaattttgttttaatttttgagcttacctttgtaaaagaaataaaaagttcacttgaaaagacactgaacacgacaacttctttcggaaatataaaacgaacctacaagcgtacttaacttgtcgacttccactcacacaattattcggttagatggaaaatctcgacaacgattattcaatactatcgaatgagttgtaggattttctaacacatgtaaataccaaattttagcatatgatatgttttaaaacttaccggcatatacattcactgagatcacagattttattcaaacgaatgtcttaacatatatttatatatatatttatatttatctcaacacttaaatactaaaagacacgtttatcgaaattgccatttttggagacacctaacgggttttccatcgcacagtttcgttccatgtgctgtcatcgatagtccaacaacaaaatatcgcgtgcaatcatccctggcgacacaactggttgtacatatgtatatagcgacattacacacctacatatatacacctacatattgccagctctgcacgtgaaatccgagggcggctgttgtaatctgtgatcaaatcaagtgagtccaagcgctaaatgcaagtactataggccatacaatagcatctctttatccctatgtgttcacagacatgtccaaggccaagggtaagaagaaggagcgctttgatgacgacgaggagcagctggagaaagtgcaggagaagaagccaccgacaagcaagaagggtggtaagaagggaaagcgaggaggtggcggcggcgactccagcgacgaggatgtcacgaccaggaatcgggacaacgaggatctggagagcatagcctcatcgaatcagagcaaacagcagactgccggcaaaaagcaggccaagaagggtaaaaagggcaagaggaataatgactggagcgacgaggatgagaagccagagaagagtttgcctgccaacgacttggacgatgaagatgacgacgaggcgcctctggcatccaagccagctgctaaaaagccacagcccagcaaaaagaacaa

SEQ ID NO: 3719 - DNA, 3200 bp, DROSOPHILA
tcgtgttcagtgtcttttcaagtgaactttttatttcttttacaaagagcgacatggatgtgcccgatgacaattttgggccgtcaaagccgtgtgacaagcagcccttagctggcaactctagcagcgctaccaattcatcgtcgcataccggtggtaacggtaacgttgattccgcattcgaatcatctacagctgcaggacctagttccggcgccaatcaaagtagcacaggcggtgctatagatgaacaaggttccattggtgaacagagtgccggcgtgggacaaaacattattgagggcgacttgctggtgttaaatgccaattccacaaacgtggatctttcgactcaccgggatggctctagctttaaagactcgaacactgagcagggaaaaaaaagtactatgattaagacttcaaagacattaaatgacaagagtcaatttgaacgccgcagacgccgtggccgtcaacgtgaacgtcatcgtgagcccagcacgcatcgtgacgatcttgaaccgtgcgatttaggtctaatgggatggactggagaattcccaaagctaacacccatatccaacatcgaaagcaactcggataaagaaccgctgtcgacggccaagccaggtgtactgccatggagtggcctaaaggtttttccgagagtggaaccacaagaggagacagcggcaggtacaacaaagccggctcatatcactaataagtctgaggagcagcagcagcagccgtctctaacaacgccgataatgacgtcgccactcgacgcctcccagggggaattggatgcagccattaaaagccctttgaacgcaaaaaaaagtccaaatgcaactggtattgcaacaacatccaagtccagtacaacaccaaccaacatgcaaccatcagacttatacaaccaggttgaagataaaaaagaggataccaccaagaagcaggcggaagctgatcataccttgcacaaatcacttaaggacgctcgcatcgtaaaacgttctatgtccacccattcgcctccggagcattcgcgtcgttcagtgcgcttcagtagccatacgcctctgaccgatgagacgaacataatgaaagaaacatccaccgaaacctctttgaaagttattttcgaacgcctaaagcaaactggcgtagagcgagatctctttatacccagctccgaaaatcccaggcctcgcagcaatggtagcccggtcccaaaggtggcggagatggaacatgtggcggttgtgaagtgcaaaacggtggcgaagcaaggggcggtggtgaaaggcaaggctgggttggccaacccgtccaacgtaatgccccagacgcctgccttaacggtcactggaaagcgagtgtcgaagcccaaggtgcccaaaggggcaagtccaccgagtgagggctggacctcgaccagggcggttaaggggaattctcgggcagactacaccaacagcagctcgtgcggttcaccgattggtaataccaacattcgcaggcgcagagctcacgcaaaggcagcccctgataagtcaaagccttgtgtgcgctgcgcggcttctgttcatccgtctggacctaagttgtgcaagaagtgtatctatgagaagggatatgccaataagaaatggatgaaaaagactggaggaaatgaggatcattatgatgatgacgatgacagtgacttcagcatgatagaagtcactttggaaaatgaaatatccgttcaacaggcggagaaaaagcagttagaaaacgtgaataagcagaccgttataaaggaacaagaggttgttgtaattggagggcgcaaggctatagccatcatagccgatccgattggttgcaatctgaaagtgattccaaaccggcagaatttggctggccttaaaaagatctcaaaggacaaatgtagctccagtttggtgcagagcctgggcgattgtcacatcggatgccagatagtgatggccgttatgaaaatcatgacgatgaaggatcgtgtaaatatggcgcaggtttgcaaaacatgggccatgatcagtcaggataagagtgtatggcgcacagtcatgctacgcgatacccatatcagcaactggccgcgatttatccgtgaactcgcaaataattgcacacgcgaactggacatgctgggcgtgatattgccgaatcctccggatattctcgctacactcgacattagcgtcctgaaagcattgcgtgttcttcgcacttgtccagtagatgaccagttcctctttaaggtctttcgtgaattgccccaactgctggagctaagggcaatctgctacagtccaacttttaattttttaaatttggcacgacaatggtctaagattcgcgtgcttcaaatcttaatgacggaccacagaagcaaagtggaatcactagactctctgggcgacctggtgcatctaactgagttgaatatacgtggagtgaattatataggctcgcaggacttccgcttcttgaagaaactagttaacctgaaggtgctagtgttgtcttcatgccagggcatggataccgaggaatttggccagcaagtgctgccctttttaacgtctctacgcaggctccgcttggagaacaagcacatgatcaataccacttttccgctgtaccacattatgtgtggtgtagccgctgcttgttcggtacagcaactggagctggtgaacgtcgaggtggatgaccttctaacttcgttgattggaatgtgcaccactgttacgcacctgttgctcgtcccaaagtgtcttcaaaattcggccaacgtgatctattccgtaatgcgggccgttcgcgagaatgcctcgcagcttcgcgtgttccgcctaggattggttacccagctgttgagtgcaacgggtgagctgtacaggggaagtaagaaggatgtgatccccgtggagcgccctgtaccgggaattccgctggacgatgaccttaattattgtgctcccgatgaccgttgcattgaaacggaccacacggaatgcgttacctttctgcccgccaagcgcttgctgatgatactgcgcgatgtggcaccaacaacatttgttacgtttgttaaggtgaacatgttcaacagcaccatggttaccttcctcaaacggccacagttgaaaaacaagtaa

SEQ ID NO: 3720 - protein, 1048 aa, DROSOPHILA
MDVPDDNFGPSKPCDKQPLAGNSSSATNSSSHTGGNGNVDSAFESSTAAGPSSGANQSSTGGAIDEQGSIGEQSAGVGQNIIEGDLLVLNANSTNVDLSTHRDGSSFKDSNTEQGKKSTMIKTSKTLNDKSQFERRRRRGRQRERHREPSTHRDDLEPCDLGLMGWTGEFPKLTPISNIESNSDKEPLSTAKPGVLPWSGLKVFPRVEPQEETAAGTTKPAHITNKSEEQQQQPSLTTPIMTSPLDASQGELDAAIKSPLNAKKSPNATGIATTSKSSTTPTNMQPSDLYNQVEDKKEDTTKKQAEADHTLHKSLKDARIVKRSMSTHSPPEHSRRSVRFSSHTPLTDETNIMKETSTETSLKVIFERLKQTGVERDLFIPSSENPRPRSNGSPVPKVAEMEHVAVVKCKTVAKQGAVVKGKAGLANPSNVMPQTPALTVTGKRVSKPKVPKGASPPSEGWTSTRAVKGNSRADYTNSSSCGSPIGNTNIRRRRAHAKAAPDKSKPCVRCAASVHPSGPKLCKKCIYEKGYANKKWMKKTGGNEDHYDDDDDSDFSMIEVTLENEISVQQAEKKQLENVNKQTVIKEQEVVVIGGRKAIAIIADPIGCNLKVIPNRQNLAGLKKISKDKCSSSLVQSLGDCHIGCQIVMAVMKIMTMKDRVNMAQVCKTWAMISQDKSVWRTVMLRDTHISNWPRFIRELANNCTRELDMLGVILPNPPDILATLDISVLKALRVLRTCPVDDQFLFKVFRELPQLLELRAICYSPTFNFLNLARQWSKIRVLQILMTDHRSKVESLDSLGDLVHLTELNIRGVNYIGSQDFRFLKKLVNLKVLVLSSCQGMDTEEFGQQVLPFLTSLRRLRLENKHMINTTFPLYHIMCGVAAACSVQQLELVNVEVDDLLTSLIGMCTTVTHLLLVPKCLQNSANVIYSVMRAVRENASQLRVFRLGLVTQLLSATGELYRGSKKDVIPVERPVPGIPLDDDLNYCAPDDRCIETDHTECVTFLPAKRLLMILRDVAPTTFVTFVKVNMFNSTMVTFLKRPQLKNK

SEQ ID NO: 3721 - DNA, 11114 bp, DROSOPHILA
gccacaactactatgtattatgtataatactattttttaccttttatttgtctaaaatcttcttttgttccttacagcacttattgttttaaattattttctattttgcggaaacgaaaaattatattgtttatgtatatacaaatttttgttgttagtattgccaatatcaaaactaacttatttaatattattaataaatttcatagaatgcaaatatgagtatatattgctgttttgcaatgaaaattgcattaaaattgcgagtgcgaggcagatatgccaaaccaaaaaagtagctgtttaggttatttaggcgttactgttatcgacatgttaacttccaaatgaataatttaaacttttccggggatcgattttggttctgatgctgaatggaatatagtaactagaaaaactgaatcctggaataaacgatatctttccttctcattattctcaaagttctcggttgctttattgacattggagacaaaatcaacggaagtattttaggatatgtaaatgttaactttatatattttcagtcattttttttgctgttccaaattggtacaacaatacaagaatgaaggaagccatccctaaaagtgtactcacactacaatttgcaggatacttttaaaaggaacttttgtccaatcttttttaattaaaaacaattttaaagggcccacgtattttatttccaccgttccataattgttactaagcatgtgacgctatctttacgcacatagccacacataaaattttgattggaaaagtttgagacattactaagtaagttacttttctatttgaaaattaatccaaacctacgaaacctgccttttacaactaataactctatatatatatatatctattatttttgaaaccatcgaaagccatcgtaaaatgttattgattatatggacgattaatgccaaaatgtacgtgtttgtatatgcgtataaaaaagtatggttatttttttcagtttattgacgtttaatgtaactgaaatggcaaagaacgcttacagcaatccatacctcacacatactaactgtgcacctaggtatggctatgtacatacttttactgaaaacaacaagctttaagctcttgtgcagttcggtcatagccttagattctttcacttgcctggcagtatccttcggggactgtctattctaacagtacaaatcgtttataaacattgccgtcaagtagtcattcatagtttattttcctgacgtataaaattttctaacaaaaagttgtgcaagtagtagtagctataagtgtttttttttttattaatctttaggaaaactataatgattcacgaaatcaaactgtgtatcgtacttcagtaaaaatccaaacctagcaatctaatatacatacatgcatatacatatttatgtatatataaaaataatgtatgcttatacattcaacgaatatgttttctaaaatttaattatcgctggagtattattcacagtaaacattgaaatgtgaacaaagggtttgaaatgttatgtataaattaaaacctacctacgctcgtaagttttactgccagtaaaacatccgtttattaatagccgagtcaatttgcccatgtccgtctgaaagtatgaacgtcgagatctcaggaaatataaaagctaaagggttcagcatatagattctagagacgcatgttgccacgccctaaaaacgctcaaaggaccaacatttttgaaaaatttttgtaaattttgtcattaatttattattcttgtcaaataacttttaacctctaacgccctaaggctgccaaaccggtcacgaccacactttttaacatttttaattgttttctcattttattccacaatatctccagaaaattgattaattttccgtccgcatgtacactagctgagaaacgggtatctgatattcggggaagtcgactatagcattctctttagttaaattgttacatttgggtaatacaatttagattgagatttgtcccgtggttttcgtattgcaaacataaagcataagacaaatcacatatgtatgtatgtacgtacatatttataggtacaggttgtaggtacaatttgcctgtataaaaagattcgatgaatttaataaaaagccgatctgtccccggagttctttaatatctgacaaacatttctgcgatatgttattcaatacttacaagtttgctattaaacagtttatctctgaaagacatagagctgtttgccgtcagctgctacagttgtcgagtatcaattatttcttagtgcccgacatttttaatgttttattcatgtacattgaaacatttgtaatgtttcatttatgtacctttaggttatcaactaccaaattagttgtaaatcaaaaaaacttaaaataataacaagaaaagctttaaaattttaaactaagcccactctgttctcgacagctaaaaacatttagggaagaagataaataaaaaaacaactaactcactacccattactatctacattcatacatctatatagcttaaagtgcaaagtctgttaaatgcgtctatcatatcaggtcatcggtcagtaacaataattggatcatccattagcaattcccttctgaattgccgtaagactcgatcaatttcgaattaaattatatacaaaatatttaatatggatttccaagtgactttaaatcttacattttattccgcgataaagaatatatgtagttttttattattattttttttatttagttttttattgtacaatttgaggaaatttttctgggaaactgtacttttaccataaagcagttctgttaccctccgaaataatatcaagagagaatgctatagtcaagttccccgaccatcagatacccgttacttagctagtgtgaatgcgaacgcggaatataatcatttttctgtgatatcgatacatatgggggaaaaaagtgagagaaaaattaaaaaattgttcagaagtgtaaatatatacttaagatggtcggaaacgcttccttctgccttttacatacttttcaataaatctagtatacccttttactctttgagtaacggttttaacatagctggaagatagaactttcaaaaataaaagaagataaaacacctactatcaaatcaaagatcctttggaaggtcgtcttttcataatttttgtcttttttagcctattacaaaaaatctaacttataaacaacgctttattctgggaaggtggcagaccttaacagccaagtccaaaaaggtgtgtggtaaggctaaaaatacatatcactagcaaattctttttgaaatccccctatttccctgctggtttttgttgcacatatacctaagaaggtattattttgtgtatgtgttattttattgttatattcttctttgaaattaaaacaagatagaacgctatagtcgacttctccggttatcagctagcccaagtaagaccgaaaattttcaacatttttaattagtatcggtagaaattgggaaagaaaattaatgttaatccaaaaaaattaacttatttttcaaaagtgtgggcggtttttgaaggttgtatggcgttagagtggacttgttaaaacgctttttggcaaatcgatagaaatatacaagactaataaaattatgaaaaaatatccaacaatttttcaaaagcttgggcgtggaaacgcttccatacatacttattaatacgtggactgccgtctgcagtggtattgtctagagagtatgaatttttatggaacgatctcttgtttacagtcaatagaacgataacgtagtttcaaagtcctcttccgctaacttatcattattcttcgtactgtacttggcagtgttggtttgagttaatcagtaaattatcaaaggtgctttattttacatgttccgacttattcaaagacattatatcaaatttattggcttttctttctttttgtagagttatttccgttttaggtattttcatttgctcttatccttcgataagaactagtattatgtccatttgctaaaactttcttggctattgtaagtgtgtttttttttttttttgtccggcacgggtggattaaacatcttcctgcatttgcaaatcttaaatgcgaggtgtcaataaactccaatttttattatattcttagttgtgttaatcaaactcgcttaaatgtatgtaacacttcttgagtggcatcaacagccgattcggtctagccatgtttataattttggggtattcatgtatgcatatcctgcaacctatagccaatgagtgctttaagatcaaatgacctcagatttcagtcaacattgagggtttttaggcaatacctttctatataaatacataatagcttagttgtatgtaatgatattcttttcttttctgggggattatatattatgtaatgttcaaatttttttcttacgttgttaattctttcacaagtaactattactcagtttagctactttactctacaggcggagatgtaggacgtattgcgaaggaatataagccgtacgcagccgcttagtactttgtagggtaaatatatatttcaaaacatttctttattaattatttctgtcaataattaatttatattcttcattcctttgggttggtacaaggtgccttatgcttaactgtattattaatctaatccgtttcaaccgtttagattaaaaagtctattacgtgtcattaagattttttttaaaagttcaccttgctgttttaagctatgtacagggatacgaatttgtttttttgttataattgtttataatattaaatttttaatttataaaagaaatgtaaatttccagtcttgctatgagcactaatttagatatccgtacgggccaaaaagagtggttcttatcaaaggtttttggaacttatcaatttctacttgtttccattaagaaaattaatttaaaggcctgattaactagtttaatataagagcgcgtcgaatacggactttatttctgtggcctctaaaataattaaagttattttatcgttttaaatttagcggaagaaaatacggcttatgtttttttttttactatctagtgccatttcttaccattttgtttgaaaaaaagtattcataatttttttaacaagatcatggcaacctgttttattttgtttaagttgtagctcatattcttctactaaatacgctcattacttctcaatttctatacatatgcaaaaacaaaatggcagactatgccacaagtttgaaaaatttaatttaatatattatttataattttcagtccgatttttcataaactgttttgtgcaacgataaatccaaacgtcaaagaactattatactgtcaacaatgagtgttttatcaaaatatgttgaccggattgcagaaaagtgtgaacataatgggtttacaaaacacgcttttagctatgctctagtaactagtgctatcctagcacttaccattaaagttactatcccttacgtaaaaaacgtaaatactacgtctagtgtaaggacccaaaaaggaaaaaccaatggccaactttcaccatcgacaagagatagctcagaagaggatttcaagcttgcagaggccgaaaagttattggttgcacagcagcttaaaaaaaaagctacaaataatttagttgagcctggtctaaataaggagtttttaaaacatttgcaaatgttggccaaaataatgattcctcaggccttctgctatgaaacaggattactaagcgttcatactttttgcttgatttctcgaacatttcttagtatttatgttgccgcattggagggagctcttgttaaatttatagttcgaaaggatattaagcaatttgcccttgtattgcttaaatggtttggaattgctatccctgctactttcgttaattctatgatacggtttctcgaaagtaaactgtctctggcgtttcggtaaataacaaattttactactaagacaatataaaaattacatttttgatttagaactcggcttgtgcgtcactcatatcggctctattttaaaaaccaaaattactacagagtatcaaatttggacggacgcattgaaaacgcggatcataggtaagttattgattcaaaatttaaaaaatatttaataaggtcatctttcttgtagacttacggaagatatttctgtgttcgcaaattctgtagctcatttgtatagtagcctgactaaaccatgcttcgatctgatgcttattggcttggcactaatgagatcgtctaaaaaaatgaaagctaacattataactggttaattcaattattcttttatttggaatgcgtttctaactattttattccgacatttaggaccagcattatcaatcggggttattgcccttacagcccatatattaagaattgtttcaccgaagttcggacagctggtatcggaagaagcaaatagatatgggtatttaagacatatacactcccgcataataacaaatgcggaagaaattgctttttacggaggtcataaggtgagtttaaatttctctagaccctgaaacaaagtttaaaatgttatttttttcaataattcaacatatttataagccacctatcgggataagaattatttggtaacacttgattgaaacttttcttaatgttttcatcaagaaatgtagtcaatgaagttagatatgcgcgcgtaatttaactttagcatttttaaacttatgtacccgaaatggatgaggtattgtacgaaatattaaaaatattatattataaataatattaaaacgaaacattaaaaatcaaaggaataaaattaaaaggggtactttaattttgtacataaagtaagtgagatatctaccctttcaataatagcaagacaatacaaaaaatacaagagagctttgcggcgttagagtgggcgtggcaacaagtgttttagcaaatcgataaaaatttacaggactaataaaattatgaaaacatttagaaaaatggttcaaagatgtaggcgttgcagtttagtgcggtttaagggcgttagagtggacgtgccaaaaactatttgcaaatcgtggcaacgtgggtcaacaaacttgcgatacgtctttgtctctagaatctgtatgctgaatctcaaccttctagcttttatagttcctgtgaattcgacgttcatatggacagactgacatgatcgactcggctattgatcctgaccaaaaatatatatattctttatatggtcgggcacgctttcttctgcctcttacatactatttaacgaatctggtaatggcatcggcagatccgggcgcttaatggacgtgacatagttctgaaacaaaaggcgttactaaatctgcaacatctagctctgatatgtccgctatcatacaggcaggattgtccaatggccggatcgattggcaagtgaaccatatacaagtgacacctttaggggtcgaatttttcttagtatgctctcttactgtactagtaaaatttataaatgtttttcaacaagtttcactttgaactatttagttattttagctattaacgtttagccttgaaagaaaacactgcaattgggatttctgggtggcgcatacatacataccaaaaattcacaagtatacatatgttaatcattatttttaaattttttaggtggaaatgcagcagctaaggcaggcatacaaccgcctggtaaatcaaatgactacaatttttaaccaaaagctttggtttataatgcttgaacaattttttatgaaatacgtttggtcgggtactggaatgattatggtatcacttccaattttgaccggcagtgacgtaggacttggaaccgttcccaacacggccatatcggaatcccgagttagcgaacgcactcaatatctaactactgctagaaatttactaatttccgcagcagacgcgattgagcgattaatgtcttcttacaaggaaatcgtgtcgcttgctggctacacatttagagtggctggtatgatggatgtctttgaggaaactgctttgggagtttattgcaagacaagtgtaatggaatccaatcagtcgaacggtattattgagtttcgtaatggaaaaccaatagcaaagggtcgcataatctattcagatgatccgaaaaatatgtcaattagccttcgtgcagtgccagtggtcacacctaactgtgatatagttgtaccaaaacttacattgtgcatagagcctggtgtgcacttgttaataactgggccaaatggatgtggaaaatcgagcttgtttagaatactaagtggactttggcctatatacgcaggggagttgcacataccaaggcctgtgaaagacgttccatgtatgttttacattccccaacgtccatatatgtcaatcggcagcctgtgtgatcaaattatataccctgacacgagggaagatatgaaacgcaagcatataactgaaaacgagctaagatccattttgaaaatggtcagccttgagcacatcgctcaacggtaaattatatttagctaattttaaggaataaggaatgtcaatttccattcttattttcagggatagctttgacgttgttcgtgattggaaggatatattatccggaggtgaaaaacaacgtatggcgatagcccgtttgttttatcataggtatgaatgaagttttttcttgcatatattcgtttttggtaatgtgaaagggtagactggattcgttattgtatgttacagaaaaggaattgttttcaacctataactactaccgagttactactaaccgagttgacatggccggttctgtttttataaacgtagggatctcagaaactatagcacctaaaaaaataatattaatccagtatattttgccgaccgccatttttaacaacgatatagtagcccgtttatagcaatatcttacaagtctctcttttattttgaataccattaaattagcccaataagaccactaatatctcttaaaatatagttatacccgttaggtaaagtaaaggggtatactagattcgttgaaaagtatgtaacaggctgaaggattatcgactatataaagtcgatctagccatgtccgtctgtccgtgtgaacgtcgagatctcagaaactataaaagctagaagtttgttgacccatgtgcctcgcccactctaatgctcgcaaaccgcacaaaactgccgcgcccacattttttaaccattttccgtaattttttcataattttattgtattagtcattttttattattatattatcatattagtcttgtaaatttctatagatttgcaaaacaaacattttaccacgcccactcaaacgccgtaaagccgacgaaccggtcacgcccacactttgaaacaatttttaaatattttctcattttattccccaatatctatcgttatcccagaaaaatgatatttcacgtttgcattcacactagctgaataacgggtatctgatagtcggggaactcgactataccattctctcttgtttttatactgagttgttaatcaaacattcccgaaagttctctactagagctttatcaattttgaatagaacaatactttaagaaagaattgtagggaaagtaagttaacttcatgcttggttataagatatattgaccgctggacatcactcaattcttcctgttagaccgcgctatgcccttcttgatgaatgcaccagtgcagtatctatagatgttgaaagctcgatttatgaaattgctaaaggaatgggaattactttgttaaccataacacacaggcctactttgtggtaagatgatttaagaaaaggttcaccaaacttattaaaattcgtaccattttaggaaatatcacacacatattttggagtttgacggtcttggaaactggcagtttagaaaaatgaattcagatgaagaacaaaaaggacaatttctatcgtagtacaaagttgtttcggggaaccgaagcttttatacccgtgcagttttgacataaacttacttatcaagattgtgtacacaacagtaatagaatacagtcttccgatttataagcaaattccacaaatcgtcaggtttttaaaatcttatataaatattataattatataattattatatataatttaaactccttttattttatttttacaattttttttaaacataactaaaaatatgattttatgcataggtgtgagcaatattaaaaaaccttaaaattttaatttgaatatttaagtctgcgttttatatgtcaatatccatcgcaaaggtataaaaaatggattgtgccacatcgccttttaaattaatatttgaccaagaattgcaactttattttaaattgtagtaaattgaaataaaaggtacacttaaataaaattgctagtgtcgatgcgttttaatttttgctaaagtcaaacgacttaaagtggtaggataataatttgggtatacatggcaggtcccatatgcttatcccataaagttatcgttggtgacaactagcactgccaagagtgttccgcatagagagaacctaaaaacacaccctgcaccattttcgactatatactataaatttatgatcagaatcaaaaggggagttgacataagaataatgtaataaaaacggccatacacattggtcttgcactttgcagacacttttttcgtgaaggccaaattgctctcactcctctcgcgtaaaattaagagagtaaaaacaaagacactagaataacaagatgcgtaacgccatacgattttttggcacacgattttttcgccgtggctctagaggtggctctaggctctctcgaatttttgttagagagcgagagagcgaagagcgctacagcgaacagctcttttcaacgcacaaagtgatagcagacatctatatgtgtgcacacgtattcacatgcattgtaaatttg

SEQ ID NO: 3722 - DNA, 2410 bp, DROSOPHILA
cagtttattgacgtttaatgtaactgaaatggcaaagaacgcttacagcaatccatacctcacacatactaactgtgcacctaggcggagatgtaggacgtattgcgaaggaatataagccgtacgcagccgcttagtactttgtaggtccgatttttcataaactgttttgtgcaacgataaatccaaacgtcaaagaactattatactgtcaacaatgagtgttttatcaaaatatgttgaccggattgcagaaaagtgtgaacataatgggtttacaaaacacgcttttagctatgctctagtaactagtgctatcctagcacttaccattaaagttactatcccttacgtaaaaaacgtaaatactacgtctagtgtaaggacccaaaaaggaaaaaccaatggccaactttcaccatcgacaagagatagctcagaagaggatttcaagcttgcagaggccgaaaagttattggttgcacagcagcttaaaaaaaaagctacaaataatttagttgagcctggtctaaataaggagtttttaaaacatttgcaaatgttggccaaaataatgattcctcaggccttctgctatgaaacaggattactaagcgttcatactttttgcttgatttctcgaacatttcttagtatttatgttgccgcattggagggagctcttgttaaatttatagttcgaaaggatattaagcaatttgcccttgtattgcttaaatggtttggaattgctatccctgctactttcgttaattctatgatacggtttctcgaaagtaaactgtctctggcgtttcgaactcggcttgtgcgtcactcatatcggctctattttaaaaaccaaaattactacagagtatcaaatttggacggacgcattgaaaacgcggatcatagacttacggaagatatttctgtgttcgcaaattctgtagctcatttgtatagtagcctgactaaaccatgcttcgatctgatgcttattggcttggcactaatgagatcgtctaaaaaaatgaaagctaacattataactggaccagcattatcaatcggggttattgcccttacagcccatatattaagaattgtttcaccgaagttcggacagctggtatcggaagaagcaaatagatatgggtatttaagacatatacactcccgcataataacaaatgcggaagaaattgctttttacggaggtcataaggtggaaatgcagcagctaaggcaggcatacaaccgcctggtaaatcaaatgactacaatttttaaccaaaagctttggtttataatgcttgaacaattttttatgaaatacgtttggtcgggtactggaatgattatggtatcacttccaattttgaccggcagtgacgtaggacttggaaccgttcccaacacggccatatcggaatcccgagttagcgaacgcactcaatatctaactactgctagaaatttactaatttccgcagcagacgcgattgagcgattaatgtcttcttacaaggaaatcgtgtcgcttgctggctacacatttagagtggctggtatgatggatgtctttgaggaaactgctttgggagtttattgcaagacaagtgtaatggaatccaatcagtcgaacggtattattgagtttcgtaatggaaaaccaatagcaaagggtcgcataatctattcagatgatccgaaaaatatgtcaattagccttcgtgcagtgccagtggtcacacctaactgtgatatagttgtaccaaaacttacattgtgcatagagcctggtgtgcacttgttaataactgggccaaatggatgtggaaaatcgagcttgtttagaatactaagtggactttggcctatatacgcaggggagttgcacataccaaggcctgtgaaagacgttccatgtatgttttacattccccaacgtccatatatgtcaatcggcagcctgtgtgatcaaattatataccctgacacgagggaagatatgaaacgcaagcatataactgaaaacgagctaagatccattttgaaaatggtcagccttgagcacatcgctcaacgggatagctttgacgttgttcgtgattggaaggatatattatccggaggtgaaaaacaacgtatggcgatagcccgtttgttttatcatagaccgcgctatgcccttcttgatgaatgcaccagtgcagtatctatagatgttgaaagctcgatttatgaaattgctaaaggaatgggaattactttgttaaccataacacacaggcctactttgtggaaatatcacacacatattttggagtttgacggtcttggaaactggcagtttagaaaaatgaattcagatgaagaacaaaaaggacaatttctatcgtag

SEQ ID NO: 3723 - protein, 730 aa, DROSOPHILA
MSVLSKYVDRIAEKCEHNGFTKHAFSYALVTSAILALTIKVTIPYVKNVNTTSSVRTQKGKTNGQLSPSTRDSSEEDFKLAEAEKLLVAQQLKKKATNNLVEPGLNKEFLKHLQMLAKIMIPQAFCYETGLLSVHTFCLISRTFLSIYVAALEGALVKFIVRKDIKQFALVLLKWFGIAIPATFVNSMIRFLESKLSLAFRTRLVRHSYRLYFKNQNYYRVSNLDGRIENADHRLTEDISVFANSVAHLYSSLTKPCFDLMLIGLALMRSSKKMKANIITGPALSIGVIALTAHILRIVSPKFGQLVSEEANRYGYLRHIHSRIITNAEEIAFYGGHKVEMQQLRQAYNRLVNQMTTIFNQKLWFIMLEQFFMKYVWSGTGMIMVSLPILTGSDVGLGTVPNTAISESRVSERTQYLTTARNLLISAADAIERLMSSYKEIVSLAGYTFRVAGMMDVFEETALGVYCKTSVMESNQSNGIIEFRNGKPIAKGRIIYSDDPKNMSISLRAVPVVTPNCDIVVPKLTLCIEPGVHLLITGPNGCGKSSLFRILSGLWPIYAGELHIPRPVKDVPCMFYIPQRPYMSIGSLCDQIIYPDTREDMKRKHITENELRSILKMVSLEHIAQRDSFDVVRDWKDILSGGEKQRMAIARLFYHRPRYALLDECTSAVSIDVESSIYEIAKGMGITLLTITHRPTLWKYHTHILEFDGLGNWQFRKMNSDEEQKGQFLS

SEQ ID NO: 3724 - DNA, 3782 bp, DROSOPHILA
aatctcccacttcgcatgccaaataacttgtaatcttgtctagcccttaagaccttaagaaagtgcattataaaccgactcgaatgatgggccttccttttgtatgtggcaccacgaccaattgatttgaggtgatttgtttaattgaaaggcgtccacgtcagctcttggagcatcaatggccacgtcactggaacgaaaccccatccgcacacacatgcggtcacttgaccccctcccccttgccccgagccacagatacgccgcctttgcctgtgtaacatatgtataaacataaatgattttcgctgtagcccgatttatttccagctgcgagaacattccaaagagagtgtgagtgcaccggaaaaaacaataggaatcttgaatgcctacgattgccacttatctggacttgatactacattttacatctaactattattaacaagatcattttagagtttagttgcaacatgttcaataaaatgcttttattctatttacttctatatatttatattttattttcatgctaaccataaatacttctttctcggtgtagaaccagaagtgaggagctccgggaatcggttattttgtttcaagctgatttagattattttcggttctcgactttcgccgagataagcaaaataattcgttcttcggcgttgataagtctgtctccgttgtgggtacagtgagcactcgagcgagggccaatgtcggccattgacgaatggagtttgataaacaatcaagaatatttgaatgcgtgagctatgtaagtaagtatatgtgctggtgctgcgaagatcttggagaagaaaagagcactcagatatcttttcgatgagtgattcgacttagctaaaactagttttacgctctttcccactcatagttccctaatatgcgcagatcgttttctagtattcactacatatgatatgtcagaagaatataagaaacatatcacaataaataaaccaaaactccttttattatgctttattgatttccattgaaatagacacatttatataattatcttggcttcgttcatgttttttgtttttcttttgtttcttgaatatctgtcgtttaaaatacaaagtattcaaagttgctcagtttgatgcctttaattcagtacatagtatacgaaggacttttcatcttatacatacatgtatatatattgatagttcctggatctagcaaaagtttaaaaagttgttactcgcccgcgccgtcgcttcgatatccaacaacatctaaatacaagtatgtaataatgtaagtgtaattgcaatggaacgtttactttactgactcaatatcctgatcccttccgcaggaccttcgatcaacatctatgcgacatctatgctttatgctcattatgcggctattctcgtacttgtctcacattttttttaggtttttcgtttgtttttttttttttgttttgttttgtttttggttttacctcagttttacaacattaattttaattacaaaagttattaaataatacaaaatacagttagagtttacagttctccatttcgtctagaaacatctcgcttttaacttttagttgaaattaatgcacgaataaacagaataattggattatgaattacagaacactcgaaacaaactcagaactcggaaacgaaacaaaagcaagagttgggttgggttgggttgggggaatccccccctagcagcggaaattagtggcaaaattgtaacaaagaaactacggatgagccatttagcctggccacgcttaggttacataatggttttatagttaataatattacgtttaagcagagtccgtcggtggaacaccaccgaccaactgtctaactcttttagagcagggcgcacttgcgcttggacttgggctgcagcacggggcacaaaaccgaccggatggcctcgtcgaaaacggttttcagacccttctgcgtcagggccgagcactccagatacttgaccgctccgatttccttggccatggccaggccctgcggataggtgatgggcgccagtttcttgtccctcagcttttcgattgtgttcttgtcgtcgcgcaaatccagcttggtgcccaccaggatgatgggcgtgctggggcagtggtggcgcacctccggataccacttggcccgcacgttctcgaacgatgccggattcaccagcgagaagcagatgaggaagacatcggtctggggataagacagtggcctcagtcggtcgtagtcctcctgcccggccgtatcccacaggcccaggttgatgggcttggcgtccaccatcacgttggccgagtagttgtcgaacacggtgggtatgtactcgccgggaaaggcattggtcgtgtagctgatcagcaggcaggtctttcccacggctccgtcgcccacgacgacgcacttgatcgcctgcatggttcgatttcctcgactttctggactggagtgctatgtgcctagagattggagattgaagattgcagatttctgattgcgggggtgcttcttcttcaggcgtttttggttctttttggggcggcggcggaggactgttgcttgcgtgggtccttttgcggggttatctctggaagcgcgactccttttccagtgccttgtggtcctcggggcgactgatgatcgcgccttacgttctgggcctctttaactcgcgttttgtgcgttaatttccctaattttctcaacaaaaaaagtaaattttctgtgtactgcagtgtgaccgcggctggactgttcaaatttaccatgggaaagctgtaaaatactaaaacaaattaaaactgcattgaaatggtcaccctaagatttgtaaattatttcaaggcttcgtccttaaagcaaacataaaacccttaagtttcgcatttacttataattaaatccgaattacaaaatatataatttcattgtcttcctgtttatgtcagtgatttgaagtgagaacaagctgtttttagtagggctgggccccagaagtgcagcttctgggctttggctgcacctggtcacacttctggcagcaaataatacaatttcgaaaattagaatttatttgctgctcaatagccaagtcaataacacctgttccttgcccatccagaatgtctgacgtgttcatcgtgtccgccgcccgcacgcccattggtaaaaccaagataaatcggctgcaccatacacgataaccacattctaattggaaactttctcttcgtgtttgtccaatctgaaaaatcaacaggtagcttcaatggaacgctttctaaactgaaggcctccgacctgggcagcgtggtcatccaggaggtactccggcgggcgaatgtggagggccaggaggtcaacgaagtcatcttgggccaggtgggacccatatcataactgtttctcctcctatcttaccgatctatttgttatgtaaatatctttgttaggctctaagcgccggtcagggtcagaatccagcacgtcaggcttcactcaaggcgggtctgcccattcaggtgccagcctacggcataaacatgctatgtggttccggcttaaagtgagtttgtcccgtacaattccgtacatttacaatggtttttaccatttccagaactgtagcgctgggttaccaggccatccgctcgggagacgcacagattgttgtggcaggaggtcaggagagcatgtccctggctccacacgtcatgcatctgcggcagggcg

SEQ ID NO: 3725 - DNA, 1782 bp, DROSOPHILA
cagtacacagaaaatttactttttttgttgagaaaattagggaaattaacgcacaaaacgcgagttaaagaggcccagaacgtaaggcgcgatcatcagtcgccccgaggaccacaaggcactggaaaaggagtcgcgcttccagagataaccccgcaaaaggacccacgcaagcaacagtcctccgccgccgccccaaaaagaaccaaaaacgcctgaagaagaagcacccccgcaatcagaaatctgcaatcttcaatctccaatctctaggcacatagcactccagtccagaaagtcgaggaaatcgaaccatgcaggcgatcaagtgcgtcgtcgtgggcgacggagccgtgggaaagacctgcctgctgatcagctacacgaccaatgcctttcccggcgagtacatacccaccgtgttcgacaactactcggccaacgtgatggtggacgccaagcccatcaacctgggcctgtgggatacggccgggcaggaggactacgaccgactgaggccactgtcttatccccagaccgatgtcttcctcatctgcttctcgctggtgaatccggcatcgttcgagaacgtgcgggccaagtggtatccggaggtgcgccaccactgccccagcacgcccatcatcctggtgggcaccaagctggatttgcgcgacgacaagaacacaatcgaaaagctgagggacaagaaactggcgcccatcacctatccgcagggcctggccatggccaaggaaatcggagcggtcaagtatctggagtgctcggccctgacgcagaagggtctgaaaaccgttttcgacgaggccatccggtcggttttgtgccccgtgctgcagcccaagtccaagcgcaagtgcgccctgctctaaaagagttagacagttggtcggtggtgttccaccgacggactctgcttaaacgtaatattattaactataaaaccattatgtaacctaagcgtggccaggctaaatggctcatccgtagtttctttgttacaattttgccactaatttccgctgctagggggggattcccccaacccaacccaacccaactcttgcttttgtttcgtttccgagttctgagtttgtttcgagtgttctgtaattcataatccaattattctgtttattcgtgcattaatttcaactaaaagttaaaagcgagatgtttctagacgaaatggagaactgtaaactctaactgtattttgtattatttaataacttttgtaattaaaattaatgttgtaaaactgaggtaaaaccaaaaacaaaacaaaacaaaaaaaaaaaaacaaacgaaaaacctaaaaaaaatgtgagacaagtacgagaatagccgcataatgagcataaagcatagatgtcgcatagatgttgatcgaaggtcctgcggaagggatcaggatattgagtcagtaaagtaaacgttccattgcaattacacttacattattacatacttgtatttagatgttgttggatatcgaagcgacggcgcgggcgagtaacaactttttaaacttttgctagatccaggaactatcaatatatatacatgtatgtataagatgaaaagtccttcgtatactatgtactgaattaaaggcatcaaactgagcaactttgaatactttgtattttaaacgacagatattcaagaaacaaaagaaaaacaaaaaacatgaacgaagccaagataattatataaatgtgtctatttcaatggaaatcaataaagcataataaaagg

SEQ ID NO: 3726 - protein, 192 aa, DROSOPHILA
MQAIKCVVVGDGAVGKTCLLISYTTNAFPGEYIPTVFDNYSANVMVDAKPINLGLWDTAGQEDYDRLRPLSYPQTDVFLICFSLVNPASFENVRAKWYPEVRHHCPSTPIILVGTKLDLRDDKNTIEKLRDKKLAPITYPQGLAMAKEIGAVKYLECSALTQKGLKTVFDEAIRSVLCPVLQPKSKRKCALL

SEQ ID NO: 3727 - DNA, 2840 bp, DROSOPHILA
cgttctaaggcgaaaaaatggacgactacttgaaggcaacctacaagagcaacgggaaattcacactcctcaagatgatcatcaatggtcagatgaacccagactcctcgttggttgactttgtgcaagatggtgatctcaacaaaagcctggggcacttctgcaacgaagtactggaggacaacgatgagatcttcgttaaagccttccaggccgaagagctcggaaacgatttagacatcaagatctgctcagaacaagcgagctactgcgacgaatcgccggtccaggaggagtatgactttgatggcaaagaggaactgtagtttgtcccagtgaaagcttagttaattaacgaatttccttgatcgccgccagtggaggtctttgtactgatatttcgaacgaaaattatgtttagctaatgtaaagaaaaccatgccaagtgttacaaattatgtacgacaataaattccatgtgcaatgtatttttattaatttattaacgagtgttctatgtcattttgggattactcatccttgctgtaaagcaaacattaataacgatacgattttattggattactcggattacttacggatcattggttacattacgaagcatctgatggcgaataactaggaacggagccccaaagcccacgactcccgcaattaggtaaaatagtgtgaaacgcattggactatccaagccaaagggtaagttctgtgagggaaattgtaagttcttagaatggttagctgcgtgttgaccttggattaactaccgccccaggagagccgcctggatatccactcccataacgcatcagcggcccgctaaacttgccaatgggtttacgaagtgtgggccacatgagtaaattttaatccgtttgttgagacgggaataagaaattatttgattgcttgcgagtgagaagttactcccagatttctagcgaacgaatgaaagttactggcttttcgaaaaatttcctgacatatatctttataggcaagcctacttaagggaacccttaaaacttcaccattactagaaatattccttccagttggcaactttgcgtgtacatcggtttctgacgtcgttctaccaagtccatgttatttgcgagcacagtttccatagtttagccacaagatattgatactaaaagctttaaaaataagcgtggatgcatttacaagtgccaataccaaacaaactgttgttccacataagccgtcttgccagcttttaaagaaaacatccaccaatcggttctacggtcacgggtaactttatttcgtttccactttttacttaaatttaagctgtaacacactgtaatggcctgccggccaactcagcagataacgctacatctgaaaagtgaatatttatattaaaatgcaaaccgaatataaccaataaactaaccttacatttgttgttgctgtcgccaggggagccccttacttcttgagcagttggtgcctgacgatcaggaagggcgatccgaagcccaagacacagccgatggtgaacagggcggtgatgcggtacttgttcgtcagcccgaagggaagattctgcatgagaatgaggtgttttccggtgttagaattgattttcctcccaatcctatgcgagtcgtgcaaattatgtaacccgcaatgggcccatttttagggactcacctctccgggaactccaccatgtccgctaaagcgaaccatcgactgggaaaagttgcgtgcaatcacactgctgcggcccaacatctcgcaatttgacttatttgataataattccaggaaaataaagttcgcagtgggtgcgcagaatagagatgacaaatggtcgatagctgccgtgcagctctgctgattacgttacgttaacgttaatgcggtttctgttaactttgcctttggcttcacaaaaaatacattttatttaaaaaaaataaatttgtaaaatgtaatataagaatttcctaggtatcgcttgactaacatttatacggcttaaatacttcgtaagtatttcgtttttatttatttaatatttttataagtactggtgaaaaacgtagtcattccttcattgctggtacttactagttcatttattaggtgcaacgtaggtacttcaaatacaccacttgggcacccggtgcactacataactattttcaaacctcaaaccaaatcccaatccatttaaatgtaaatttttaaattcttaactgcttttaaaaactattaaattttattcgtttctctcgagtgatgtgtcctttttctaaatgactgccatccgtaatgtcccgtacacagcatgctaaatataattagtaaaaatttgtttcattttcctcttaaattttagaaatattttccctttatataaaataaatatatataacagtgccgtgtttttattttaacgtaaataaaatttgaatgttatctatttatatatttatttgaaatcatttaaaattaataataataaaaagaattttacgttaatttgcttccaactacgcccacgcgaattgttgttaatttataataacgagcgagtttgacacggtattaggggtattcgattttatctattcaggggcttaacagacactaagcgctctgttatcttgtcaaaaactatcggcaactagggccatcgctggccccatcaaacacgccgagcgctcatctctattgcgtttcgaatatttcatttatacgcacgggtacggtagactcgatccaaacagacaaacgttcaaaattattgcacaaaattataagtaaacaccccgcgtcca

SEQ ID NO: 3728 - DNA, 677 bp, DROSOPHILA
cactgcgaactttattttcctggaattattatcaaataagtcaaattgcgagatgttgggccgcagcagtgtgattgcacgcaacttttcccagtcgatggttcgctttagcggacatggtggagttcccggagagaatcttcccttcgggctgacgaacaagtaccgcatcaccgccctgttcaccatcggctgtgtcttgggcttcggatcgcccttcctgatcgtcaggcaccaactgctcaagaagtaaggggctcccctggcgacagcaacaacaaatgtaagatgtagcgttatctgctgagttggccggcaggccattacagtgtgttacagcttaaatttaagtaaaaagtggaaacgaaataaagttacccgtgaccgtagaaccgattggtggatgttttctttaaaagctggcaagacggcttatgtggaacaacagtttgtttggtattggcacttgtaaatgcatccacgcttatttttaaagcttttagtatcaatatcttgtggctaaactatggaaactgtgctcgcaaataacatggacttggtagaacgacgtcagaaaccgatgtacacgcaaagttgccaactggaaggaatatttctagtaatggtgaagttttaagggttcccttaagtaggcttgcctataaagatatatgtca

SEQ ID NO: 3729 - protein, 51 aa, DROSOPHILA
MVRFSGHGGVPGENLPFGLTNKYRITALFTIGCVLGFGSPFLIVRHQLLKK

SEQ ID NO: 3730 - DNA, 2931 bp, DROSOPHILA
actgagcaatcgaggggcgaaacatttgtttgataatgataatggccatgttgaaggctcaccaaagatgcaacggagtgcaactccggcgaaattgagtcattttcacgcggaattattgacacatgcagcggcatgcggcgggcttgaaattgaataattttcgaaattaaatggcgattgcaagtgccataaccatttgaatgacgcgcctaaatggcttccactgcaagtggactgcattcatcgataggtgtggaacgtaatttcaatttaaaatttgataaatagaagcttttactaactaaactgcttttgtggttttgctaacaattcgagaagatgattttacgtattttgttcattaaatgggaaataatagtccaaaaattaattctcataccacgttaaacttgtttttttattccacatcgatttgggaattttatttctaaataaaaaaaaaaagtgatacagttcgttagcattggtaattagctgtacatagcagttattttcttagctatattatcatttttagggaagtaattatgaaaacacccaacgatacaaaaaaaactatattttgccaaaatgagtttttttttgattttctgtccgttttttccgcctagcttaacaaataatggatagaacacagaatggcatacctcgctggattcgttacaaaatttgccatcgaatggcattcaagcctaaaaatgttcgatttttgaaatttttcgaaaattttaatgatacaaaaaatgagaaaaattttcaaaaaatttaaattgcctaaaaccgcgaaaatgtaatatggctcgttacattggcttatacgcggcacaaaacagtaattattttagctgtgcgtatattttttgccaaattatgacgaaaaacccctatttttcgataaccaaattggcgccaaaaagctttcgagctgccagtgctgccacatccgcttggattgcggcttttcttggcgcttatgcggtggccacacttttgttattaacatttctgttcaacaaaaacattaataaacattagtaaaagtgcaattgttagtgcaataaagacagttcatatacagaaacgtagtcgagagcagctggtgacctccaccggtgacatagtagcctgtgcaatttaactaataagattaggatttacttagtatcttttttttttaaatttaacgcttccgatgtcggattcgctgatcatttgcgtttccgactactggcggcgatgtcattaccacaatcgtcaaaatcgtgaagccggcgacgcctggccagaagccaaaccgctgcggaggctgtgcatcgatgtggacgccatcaatggtaattactatcttcgcgagttcctgcaccagcacgtgcttgcccagagccttatgcacaatcatggtgtccagctggtctggctgcaattcgaggaaccggagaagcacaccattgactacaaattcgccgacatgctggcacacacgctgtgggagcgcatcgaggtggagcacctcatgtcctggctgtccacactgggcggcggattctccgcccttggcgagcagttcgagcgatgtgtaagtaatccatccatccttcctacatggtttatcccacccattaacccactttcaggcgaaaacggctggcaagatttcgctgcagcagttaaagattggcatgcgactcggtgatcccttcctgcagacgcgctgcaagctctactacagcatttcgctaatccagcgtggtcaactacggatggcgaagcatttgatccgacagcagtataagtttgcgagtagaaacatcgagaaggatgtgcgcctgatgcggatgtgtctgggcatttggcggcgacttagctacgagtacgagcagcgaagactgcggaaaggtggcaactaagttggacttggaaccgcagattatttcgatcaaaaaactaaaaattgtaaattgcattaggtggtcacgattcgagcgtcgatcgtgttttttttcctcttttgttaagcaaaagtcaaatatagttttcaatttatttatttaatatgtaattgtatatacgtaaaaaatgcatttacattattcatttatttctcgttcgtatttgtatatatatatatattttcaactgcccgctactaaaaatcaaacgtaatccatggaagggagaactgagatatttcttttacctaagcgctaaacaaaaaattattgttgtacagaaattgacaaagacttgtgggacgacttggacgcggatatattgcttgtgcatgtgcacatcctccttgaggatcgggggggatggatctcgaaaacgaacaaaataatgtacaaaaaaactgaaagccggtaactcgaactcatttggatgctgctcgaagattgctgctcgtaaagctttatatatattgtattttaatatatgtttttttatatgtgtgtgtgtgtgttgggtgtgtgttgggtgtgtgtgtgtgtgttgggtgtgtgtgtgtgtgttgggtgtgtgttaggtgtgttgggtgtgtcttgatggcaacctggacctactgtgctagcgtacccatgggatcccaggcaggcagtacgatcggatccatgtcgaacacgcgcaacacatcctcgggcacgtacttcttgtcgacgaccacctcgaatccaaactccctaaaccaatcggcgttcatcaccagatagcccttctcgccgcgatcctcaccccacgagttctccacacgcaatttctgggccacgccgctcttctgcaattcaaattgtttcaaatggttaacaaacgtatagcaggctgaattagtgctactcacatccacggatacggcggtgaaaaccatggcatgggtcatggccgattcaccgtagatcaggcggtctgcct

SEQ ID NO: 3731 - DNA, 873 bp, DROSOPHILA
cggtggccacacttttgttattaacatttctgttcaacaaaaacattaataaacattagtaaaagtgcaattgttagtgcaataaagacagttcatatacagaaacgtagtcgagagcagctggtgacctccaccggtgacatagtagcctgtgcaatttaactaataagattaggatttacttagtatcttttttttttaaatttaacgcttccgatgtcggattcgctgatcatttgcgtttccgactactggcggcgatgtcattaccacaatcgtcaaaatcgtgaagccggcgacgcctggccagaagccaaaccgctgcggaggctgtgcatcgatgtggacgccatcaatggtaattactatcttcgcgagttcctgcaccagcacgtgcttgcccagagccttatgcacaatcatggtgtccagctggtctggctgcaattcgaggaaccggagaagcacaccattgactacaaattcgccgacatgctggcacacacgctgtgggagcgcatcgaggtggagcacctcatgtcctggctgtccacactgggcggcggattctccgcccttggcgagcagttcgagcgatgtgcgaaaacggctggcaagatttcgctgcagcagttaaagattggcatgcgactcggtgatcccttcctgcagacgcgctgcaagctctactacagcatttcgctaatccagcgtggtcaactacggatggcgaagcatttgatccgacagcagtataagtttgcgagtagaaacatcgagaaggatgtgcgcctgatgcggatgtgtctgggcatttggcggcgacttagctacgagtacgagcagcgaagactgcggaaaggtggcaactaa

SEQ ID NO: 3732 - protein, 218 aa, DROSOPHILA
MSDSLIICVSDYWRRCHYHNRQNREAGDAWPEAKPLRRLCIDVDAINGNYYLREFLHQHVLAQSLMHNHGVQLVWLQFEEPEKHTIDYKFADMLAHTLWERIEVEHLMSWLSTLGGGFSALGEQFERCAKTAGKISLQQLKIGMRLGDPFLQTRCKLYYSISLIQRGQLRMAKHLIRQQYKFASRNIEKDVRLMRMCLGIWRRLSYEYEQRRLRKGGN

SEQ ID NO: 3733 - DNA, 3404 bp, DROSOPHILA
ctcaaatattttctaaggtctctactatttaagatatcacgatgttgtccagaaaaaaagtatttagaaagggttcgcctcgccgtgtgcgtatttccaaaaagttcccagcatcttgcccagaaaccctctgccatccaacgatctcttgacttggcttgattaagctactaagaccaaaacttttggtaactactcgataagctcaatcgatgccatttacaatgatatacattatgactgaattagttaagagaattgcattgaactgacaactgaacaaaccattaattaaccaattgaaaaccaactattcctcgccctgaagacattcgtttcatatatttatggactttaagactgagtttattgtatcttaaaaattattaacccatgaccaaaaaaaaaacaaaaaaattggaacattgtacgattcccaaaccaaaaaccaaacacttattatgcctaaatgttttaactgatattaatgtttgtatcttaccattaagcttgtgtgccgtcacattgaatcgcccgatattttatgattgtatacttaataagattataattcctaactgcatatcacgtggtcttcaccgatcgacgaagacacgattacgaactgtgggcagtgtgactgctaaaataagacatgattttataatgaacttttcatatacaatgtttacattttaaataaaacgcagatatcttttaatttttaaaaatacgtgtgtatagtttattattaggcgcaagagactttgtactatgattattgagtcgaactgcgttaacaaatacttttgaaatttgattctgataccaggagattgcaatatgactgtggagtgattcatttacatattaaaaagctaacaccgttgaaaatttaagaaaaatgcaccagtcgcgaaatttatgatcatccactgttggctgtagtgtgtgtgtgtgtgtgtgcaagactgtggagatgcattcccatggagcggttgcattgaatcattctttcaatacgagcagccaatggccacggtgaggaagtcctcgaacccaatggtgatggttccattctgctgggtgtcgcgctgcctgaaggcctccgtgaaacgctgcacctgcacgcagagcactatgaactgatccacggacacctctttgtggccctgggggtcgctcttcttcaccaggaagtttatgaattcgggcgagaatcgaaagcccatctgggtgaaggctgccaacaagtttggtaattagtgtaaaaggccataaaggaattggagattcagttgttgtgttagcttaccttgggtcagctcctgttcctcgatatgtccagaggagtcctgatcgtaggtcttgaagacttgctgcaacagtgatacaatgagtcagactacttagtttcgatataagaaataccttaccagccattggttgatgtagttgtagagcttctcgaactcatagatatcgatggtaccactggcgtcgttgtcgaacatgcctgttgagtaaattaaaaaaggcgataaaaatacaacataaatcgcagggtaaacaaacggaaaagtgtctggcgctccaggtgatctaaacaaatatgcatgtaccctaaattggggcaataaatacagtgaaacatttatagccgaaagtataactaaattgatactgactgtctgttaggggagtactgacgtcacagtttccggaaggggaatcgaaggaattttaaagtatttcataactgaagcttacttagctatcatcagctcacaggatgatctaaatatatgtgcccatgtgcccttcattggttcttggcatacagcgggtgtgctaggctacgcatagaagattcaaatcgacaacctgttcttgtgttcttgtgttactatattgcctaccaaactagtttagcttatgatcgtcttttagagggtctactgtatagtatacagtgtatacacgtttgttagtgttcacctactgacgtcacagttcctgtagaggaaactttgggatcttttttgggcagggcttaagcttacttatcatcagcttgcaggcattatccgagaagtgatcgccacgcccattcaccagggccgcctgcaactcggaagcgtttatctttccagatcggtcgcggtccaccatggagaaccattgctgtgcctgcggagacacctgggcattctgcggcggaaatgctcctggcggcggggcatagccaccaccgggctgggcatacgggttatagccttgtccctgtggataaacggtagtaagtacatttaatccactttcttaagcataaacacactcacataagacattttgtcacgagcctagttcgattctaattggaacttgagggacaaaacaattttaatgaaactacagatgacaagaagggcgttcaccaacactggtttgggcaagcgataacaatgtgacatatcgatagcattgctagacttattgcttggctatactcccatccctatcgccggtataaacaactaacaaaagcagcaaaacattaagcaaaaatgtcgaacttcgtgaacttggacatcttctccaactaccaaaagtacatagacaatgaacaggaagtcagggaggtgagttgacggttaatatcctaaaaaccaccatcttaaaccattgtttttagaacatccgcattgtggtgcgcgaaatcgagcatttgtcaaaggaagcgcagattaaactgcagattattcatagcgatttgagccagagtaagttctgtacaatttggtagcttgtatgttttgttctaatatgacattatacttgaacaatagttagtgccgcctgcggcttagcccgcaaacaggttgagctgtgtgcccaaaagtaccagaaattggccgaactggtgccagctgggcagtactacaggtgagtcagatggtgaaatccgtggtgtctattgtgggtgtcgaatgctccgccttctccagatactccgatcactggaccttcattacgcagcgtttgatcttcatcattgccttggttatttacctggaggcgggcttcttggtcacccgcgaaacagtggccgaaatgctgggatgtaagctagatttggaaggctctctggatacgaaataatagttaattactccacagtgaagatcagccagtctgagggcttccatctggatgtggaggactatctactgggcatactgcagttggcgtcggagctctcccgattcgctaccaattccgtcaccatgggcgactacgagcgtcccctgaatatctcccattttattggtgacctgaacacgggcttccgtctgctgaacctgaagaacgatggcttgcgaaagcgcttcgatgccttaaag

SEQ ID NO: 3734 - DNA, 669 bp, DROSOPHILA
aaattgttttgtccctcaagttccaattagaatcgaactaggctcgtgacaaaatgtcttatggacaaggctataacccgtatgcccagcccggtggtggctatgccccgccgccaggagcatttccgccgcagaatgcccaggtgtctccgcaggcacagcaatggttctccatggtggaccgcgaccgatctggaaagataaacgcttccgagttgcaggcggccctggtgaatgggcgtggcgatcacttctcggataatgcctgcaagctgatgataagcatgttcgacaacgacgccagtggtaccatcgatatctatgagttcgagaagctctacaactacatcaaccaatggctgcaagtcttcaagacctacgatcaggactcctctggacatatcgaggaacaggagctgacccaagccttcacccagatgggctttcgattctcgcccgaattcataaacttcctggtgaagaagagcgacccccagggccacaaagaggtgtccgtggatcagttcatagtgctctgcgtgcaggtgcagcgtttcacggaggccttcaggcagcgcgacacccagcagaatggaaccatcaccattgggttcgaggacttcctcaccgtggccattggctgctcgtattgaaagaatgattcaatgc

SEQ ID NO: 3735 - protein, 199 aa, DROSOPHILA
MSYGQGYNPYAQPGGGYAPPPGAFPPQNAQVSPQAQQWFSMVDRDRSGKINASELQAALVNGRGDHFSDNACKLMISMFDNDASGTIDIYEFEKLYNYINQWLQVFKTYDQDSSGHIEEQELTQAFTQMGFRFSPEFINFLVKKSDPQGHKEVSVDQFIVLCVQVQRFTEAFRQRDTQQNGTITIGFEDFLTVAIGCSY

SEQ ID NO: 3736 - DNA, 7162 bp, DROSOPHILA
attcttctgggattctcatgtgaatgttgtgtgagcaggtggtgctgctccgtcttagcttacagcgaaaaaaaataaatactttaataataacgatccttggtgcacatagtaattaaattcacttcaaaactgtctccttaaaaaaaaacttagagatgccaacaaatggttctagatgtagtatgtaaacgataacaacttcaatggagctggaatcaggtgccgtgcagatgtgagagtatcgactcgatgtcctcgaactccacgatgtggttctcgctctgcagctccttctgctgcgcagagttctccggtgtctcctcgccgccaattccgctgctgctgttcgctgctatcggagctgaattgctgcatgaattaaagaacggtattattattatgataagcatacaaaaaataaaatgcatatgttcaccacttacatggtggccacctccagatcttcctcatcttgcggcccactcctggatgggggcttctccaccagcggcgtagacgtggccgaaggctgttcgccagcagcagcaacttccgctcccgttccacttcctccacttacacttgcacttccccctgttgccgctgtcccgccactattgccggtcaggcggcgtatccgcttcttgggtatattgcgaatggcgctggccaccggttggcccagacagagcacctgggcactggctatgcgcagcgtatgcagctgttcgtcatcggtcatcaagcgcatctgatagcttttgaaatagctcgatggctgacgtatcatcggattgctggactttggtccgttgtccgcatatgtgaaattataggtaaaacgctcctggctgctgctcaggcacatgtcctgctcgaagtcgctgtcatcgggctccgaatcgcatttcgatggcggtggatcctgtttaggttcttgtattgtttgctgaatttgcggcttttgctttggagatttttgggtggattccgcctccgctacaatgggcagtgccggagcatcggttgtggaggagggtacccttgcctcgacacgtttcttggccggtttcttggtatttgccttgatttgggtcttcgtctttgctccttcagtggatttggagagatcttccggagcaggagctagttttgcaaagacaatatattagtttcaatacccattcgattggatcttaactacttacttttattttcgactaggcgcgaggatcgtcgcatacagagattggctggctccccgttctgtacctttttcgggcgtccacgttttccaggggcaggctgtgccgcaatttcaaccgctgctcgatttacctttggtttgattacaatcggtaatgattcctgttttttcgcagatagattgagggccatgagcagagcgggatccaatttgccggctggcggatctgctggcgcatctgtggcggcaccgactggcggaccagtagcctctgtggacttaacattcggatttggttctatttgctttttagctgcttttgttttcagtggttcgatgtgctttcgattttttggcgatttttgactgcttggattggccagtttggcattttcacgcattgcagtgagcttcttgttggcagtctttctcccttgacctttgatcggttggggttgctccttaaacttggccactacacgttggcgtttttcattcagctgctggcgttggtgttcctgacggcttgtagaggccgttggaagagcgacggatgaaggatcgtccgcctctggcggaggcggtggaggcggcggaggagcagctggcggtgttagaggaagcggcggaggcggaacaggagcagccaccggtttaggaggtgtaggttttgtttgctgttctccactggtatccgtctcctgggcctgctctttgcttggtgtcagccaattccggataggatagcggacctccccgtcctggctaactaactgacctggctgactgtcgatagcaagcatgggcagaactgcatcctcagaaccggctgccttcagccactcttcgtcttccgtgctgctaatgttcgataagttatctatgtttagtagcatctcctttttcttgctgcacttttcgtcggcattctcgccatttgcctcttcccctctgctttccccctttccgctgtgagaacttgacgaggatgaggaactcgatgatgaactactggaggagcttgagctcgaactggatgaggacgatgaactggttgccgaggagctagaattactagatccttcaataattgcctcgggcaggccaggcaaaagtttatagtgcggaagctgctgctgatcggagggaaatgagccagctgtagcggactccgcactgtccaccgcctcactgccaaaggatcgaacgcgtcgaaggacggtgggctccaaggacaggacaacgggttgcttcacagcatctggtgtcttttctaaaaccgtttcattcttttcaccatcgttttcagtttccttcagatgttcatccattggcttctctggtcttttcggtgttttcttattgtcctcagcatgtttgtcctccggatgaaggcttttctttgaacactccatttctattagctcttgattcttctgttgcgaaagctcatcctctgcctcaacctttttcttcttgggcgttgaccgaaccttgggttgtttcttatcctgcggatcaccccactgttgtattgcgcactgcgcattcgcatcggtgtgttccgcttcatccggacgataataggaactgcctgaagagtactcagtcttggcagcactgcctatcggagtaccgggcatctgtccaaaaggtgtcaagcgaaatccaggtgtgatggcactcaactggggcgtatccataatacttttggtatccgaaccaaagagaaagctgctactgggcaacttgccatatggcgtgtccagaggtggaatggccattcctggcgtgggtgggatgatagcggctacaccaacaccagcttcctttgatgtggtgtcatcttctacggctccgcttgctcctgctccaatgggagatgctttaaacggagtgtccagaagcatggccatgttgggtcgcgacagttctgccgctaaggccttcgcttgctcctgatcctttgcatatatgcatccttgttcacttttcttcttctgatccttttcctcgatctccgcttgggtttcgtctatggtttcttctatggtttcgtctatgatttcttcttttgcctcaaacaccttctttttcttcaggagctttggtttctgaggagtgataatcttgatgttgatcttctcagtggaatccccaacactgcgctgcggtttctttgccagattcatgggctccgccttcgctttgaccattggagcctttcgtgctctcgacgaagctgaagtgggtgtatctttcttctttggacgcctcgagcggccggaggcctttacctcctcgcgcttggagttaatctcacgcagccgattttcaaggtcagaattggagccatgcaactggcgctgccaggcggccatatcgttatctacaactgcgtctcctctggcggcggagcctacatctggctttccttcaatcttctgctgctcctggagattctctttgctggcctcggcgctgtcatcgtgagcggtcgacgatgcgctgcaggcagagttatttttgggcataattttcttttgatccttatccgtcttggtttccgattccgcctgggagatgattcgcttgcaggccttgaccgctgcttgtcgcttctgttttcttttgggcgtggccaccaacggaggaaccggagctgctgacggagcggcagctggaggatgggccctgatcaccgtctgattgctgcactcctccatggcgaagagtggtggcactcctccaaggccctcgtttgagctcaggtcgcaggcggcctggatgatctccacatggttgataattggcttctcttgggctttggccagcaaaccaggtcgcctagtggacagcggcgtattggaatgcaggacgccaccaggaggaaccttaggggaaaaagttaatgttcgtacatgcgaagttctctttcggggagtggataagctacgaaaggcctttacgttaattattcccgacgtcgagggtgtcactctctccatgacttgtctagatgaatccagggatgcgggtggaaactttcgctgctcctcctctagttgatctatcggttgctcttttgccgccgttccctggcccgccttgttgtccactttggctgcatcttttatcaactggactggaggctccacgcttgggggaggtggttgtttctgggcgctgctaatgataatggaattggggggcagctgattggcagacagagtaatcggctccggcagcgatatctcaatgtgcgagtcatcaatgttggcaaaggcatccggcccaagttgctgggctacccactcgttgttcaccaggaatggaagatgcgacagcagtccaccgttcgagaggtacatgggaaacgtcagctgcccggtggtggcgtccacacaaacctgaccagcagctgtcgcctccacctcgctgagcattgacgctggatcggcaaaatttatattgaggccttcgcttgtaaagctgatattggacgtatccaaaccagcaaccattttttggacactctcgttggagttcagtacgataagcttggagatggagaaattgggatctgcattggttcctgcggtggctgcaacggcggtgcgaataataagcggtgtttgcggcggcacgggatccacggcctgttctgtcggcagcacatctccatcagcagcgggaacaatagcagccccagcagcatcagaggcaggcgacacaccagggtcctcctcatttgccaatggttcatccccgatcaccacctcctgtatgatgcgatcgaacgagggatccttctcggtggcctccagtatgttcttcactagaccatccaacatggcgtcacagcttaccgacggattgttaacagtcaccgtctgcagcgctacgttaatattctttaccagcgtctcctggaagtcctgattcttaattatcgcgcaggccagttcctgaaatcaatgtaaatcgaaagagtgttttttgtttagaatacataatagatgcactattggttaattaagcagatatgcattaagcatgtctatggacttacaggcatgctttgcggcgtgagcagaagtggattggactcggtatgaccttggcgcggcgtggaattgttgcgcggaccaggaccattcgccggaagtaagtcatcctcctccaagtcctcggtggccgttgtgctctcgccatcctcttcgtccagttccgcctcgcagtcatcctggctgcctaggaaactctgcctgaccttgtcgcggttaacgctgcagtagaagtgtggcggcagcagacgcggtcgcttgctaaacgaaggcgaagaaatgctgttcacgggagaatgggtgcgcctggggaaaaggggtaagagagcaatgagaattccgatgtgcttgtgtcaaggaaaaatctataattacaagcgccttctcttgcgatgcgactgtgatatggtgggctcgcctggggtgctgctttcattggtacagctactcctctcgccggcggctatcagttcgctgacccgttcggacagcttcatctgctgcagctgcatacgcatatccagcggcagcttctgcacggcaccggccactgaaaagagagattttcggtcagccgcaaaaaaaaagaaacgcaaggagcgtgctaatttacccaagcttgtgatcttgacatgctcgcagattatctcctccagacccccgtgaaggaagttgtgcgtctgcaggccctgtttaagggccaggaactcgtggcgcaggtgaggcgatgtgcgacacagagtgtgtgcggccctttttagattctggttgactaggtagcctacaaaatggaagagcataaatattgcgagctagaaaagcgtccagggaaaacctacccaggaccaagcgagccacgtccgaatgcaggacaatcgactccatggctggactttccgactcagctaagcgtcaccatccactcgcttttcgccttgcctttcttttttttttcgcttgcaagactttaggtttatcgaacgcacttgtaatgccttattattgactgttgcaggtttaatcactcaatagttagtcggaattgaatcagcgctttaattcgagagagaataaaccattttctcgcctattcgccgactattttcgttttgttgttgccgattctagcggcgcactgtacaacacacataggttagcatagcatctgtgttttttttgccgcccgccaaaacaacgcagtagggttgccacagcgccgaactatcgatatagtcccgttgtttgcgcttggctgccaagccttattaggagcgtgggaaataatggtaataattaaagcaaagaaatacgtctctttcgcttaaaacaaattatagcagtttttattgctttgatggtcttgcttcaattcgtttttatgtgtacgttacagtacttagaatccgatattcgttaaactatcgatatgggaatgctgcaaatacctggcatcccagcaattcataactagacggcgttgccaaatagatcagaacgcaaaaaccaagtgcaatattttattcgagtgacttagattactggttaactggcactcaatggctgccaagagtatcgagaaggagaagggcgagggtcaggagcccgcgacatcagcggagaaacccgatccagccgcacccactgaaccagctgaggaaaattccaaagaaccggcgccggaagacgcatcgccggataaaaaggatggtggacgcaaaaggaagaggcatttgttcaattcgattcgcggtcaaatggaattctacttcggtgacgccaacttgagcaaggatcgcttccttcggcgctacgtagagcaggatccatgtgagtagctaaggttggctcaccagccaacataacactgatcatgttattcttttac

SEQ ID NO: 3737 - DNA, 5433 bp, DROSOPHILA
atggagtcgattgtcctgcattcggacgtggctcgcttggtcctgggctacctagtcaaccagaatctaaaaagggccgcacacactctgtgtcgcacatcgcctcacctgcgccacgagttcctggcccttaaacagggcctgcagacgcacaacttccttcacgggggtctggaggagataatctgcgagcatgtcaagatcacaagcttggtggccggtgccgtgcagaagctgccgctggatatgcgtatgcagctgcagcagatgaagctgtccgaacgggtcagcgaactgatagccgccggcgagaggagtagctgtaccaatgaaagcagcaccccaggcgagcccaccatatcacagtcgcatcgcaagagaaggcgcttgcgcacccattctcccgtgaacagcatttcttcgccttcgtttagcaagcgaccgcgtctgctgccgccacacttctactgcagcgttaaccgcgacaaggtcaggcagagtttcctaggcagccaggatgactgcgaggcggaactggacgaagaggatggcgagagcacaacggccaccgaggacttggaggaggatgacttacttccggcgaatggtcctggtccgcgcaacaattccacgccgcgccaaggtcataccgagtccaatccacttctgctcacgccgcaaagcatgcctgaactggcctgcgcgataattaagaatcaggacttccaggagacgctggtaaagaatattaacgtagcgctgcagacggtgactgttaacaatccgtcggtaagctgtgacgccatgttggatggtctagtgaagaacatactggaggccaccgagaaggatccctcgttcgatcgcatcatacaggaggtggtgatcggggatgaaccattggcaaatgaggaggaccctggtgtgtcgcctgcctctgatgctgctggggctgctattgttcccgctgctgatggagatgtgctgccgacagaacaggccgtggatcccgtgccgccgcaaacaccgcttattattcgcaccgccgttgcagccaccgcaggaaccaatgcagatcccaatttctccatctccaagcttatcgtactgaactccaacgagagtgtccaaaaaatggttgctggtttggatacgtccaatatcagctttacaagcgaaggcctcaatataaattttgccgatccagcgtcaatgctcagcgaggtggaggcgacagctgctggtcaggtttgtgtggacgccaccaccgggcagctgacgtttcccatgtacctctcgaacggtggactgctgtcgcatcttccattcctggtgaacaacgagtgggtagcccagcaacttgggccggatgcctttgccaacattgatgactcgcacattgagatatcgctgccggagccgattactctgtctgccaatcagctgccccccaattccattatcattagcagcgcccagaaacaaccacctcccccaagcgtggagcctccagtccagttgataaaagatgcagccaaagtggacaacaaggcgggccagggaacggcggcaaaagagcaaccgatagatcaactagaggaggagcagcgaaagtttccacccgcatccctggattcatctagacaagtcatggagagagtgacaccctcgacgtcgggaataattaacgtaaaggcctttcgtagcttatccactccccgaaagagaacttcgcatgtacgaacattaactttttcccctaaggttcctcctggtggcgtcctgcattccaatacgccgctgtccactaggcgacctggtttgctggccaaagcccaagagaagccaattatcaaccatgtggagatcatccaggccgcctgcgacctgagctcaaacgagggccttggaggagtgccaccactcttcgccatggaggagtgcagcaatcagacggtgatcagggcccatcctccagctgccgctccgtcagcagctccggttcctccgttggtggccacgcccaaaagaaaacagaagcgacaagcagcggtcaaggcctgcaagcgaatcatctcccaggcggaatcggaaaccaagacggataaggatcaaaagaaaattatgcccaaaaataactctgcctgcagcgcatcgtcgaccgctcacgatgacagcgccgaggccagcaaagagaatctccaggagcagcagaagattgaaggaaagccagatgtaggctccgccgccagaggagacgcagttgtagataacgatatggccgcctggcagcgccagttgcatggctccaattctgaccttgaaaatcggctgcgtgagattaactccaagcgcgaggaggtaaaggcctccggccgctcgaggcgtccaaagaagaaagatacacccacttcagcttcgtcgagagcacgaaaggctccaatggtcaaagcgaaggcggagcccatgaatctggcaaagaaaccgcagcgcagtgttggggattccactgagaagatcaacatcaagattatcactcctcagaaaccaaagctcctgaagaaaaagaaggtgtttgaggcaaaagaagaaatcatagacgaaaccatagaagaaaccatagacgaaacccaagcggagatcgaggaaaaggatcagaagaagaaaagtgaacaaggatgcatatatgcaaaggatcaggagcaagcgaaggccttagcggcagaactgtcgcgacccaacatggccatgcttctggacactccgtttaaagcatctcccattggagcaggagcaagcggagccgtagaagatgacaccacatcaaaggaagctggtgttggtgtagccgctatcatcccacccacgccaggaatggccattccacctctggacacgccatatggcaagttgcccagtagcagctttctctttggttcggataccaaaagtattatggatacgccccagttgagtgccatcacacctggatttcgcttgacaccttttggacagatgcccggtactccgataggcagtgctgccaagactgagtactcttcaggcagttcctattatcgtccggatgaagcggaacacaccgatgcgaatgcgcagtgcgcaatacaacagtggggtgatccgcaggataagaaacaacccaaggttcggtcaacgcccaagaagaaaaaggttgaggcagaggatgagctttcgcaacagaagaatcaagagctaatagaaatggagtgttcaaagaaaagccttcatccggaggacaaacatgctgaggacaataagaaaacaccgaaaagaccagagaagccaatggatgaacatctgaaggaaactgaaaacgatggtgaaaagaatgaaacggttttagaaaagacaccagatgctgtgaagcaacccgttgtcctgtccttggagcccaccgtccttcgacgcgttcgatcctttggcagtgaggcggtggacagtgcggagtccgctacagctggctcatttccctccgatcagcagcagcttccgcactataaacttttgcctggcctgcccgaggcaattattgaaggatctagtaattctagctcctcggcaaccagttcatcgtcctcatccagttcgagctcaagctcctccagtagttcatcatcgagttcctcatcctcgtcaagttctcacagcggaaagggggaaagcagaggggaagaggcaaatggcgagaatgccgacgaaaagtgcagcaagaaaaaggagatgctactaaacatagataacttatcgaacattagcagcacggaagacgaagagtggctgaaggcagccggttctgaggatgcagttctgcccatgcttgctatcgacagtcagccaggtcagttagttagccaggacggggaggtccgctatcctatccggaattggctgacaccaagcaaagagcaggcccaggagacggataccagtggagaacagcaaacaaaacctacacctcctaaaccggcggacgatccttcatccgtcgctcttccaacggcctctacaagccgtcaggaacaccaacgccagcagctgaatgaaaaacgccaacgtgtagtggccaagtttaaggagcaaccccaaccgatcaaaggtcaagggagaaagactgccaacaagaagctcactgcaatgcgtgaaaatgccaaactggccaatccaagcagtcaaaaatcgccaaaaaatcgaaagcacatcgaaccactgaaaacaaaagcagctaaaaagcaaatagaaccaaatccgaatgttaagtccacagaggctactggtccgccagtcggtgccgccacagatgcgccagcagatccgccagccggcaaattggatcccgctctgctcatggccctcaatctatctgcgaaaaaacaggaatcattaccgattgtaatcaaaccaaaggtaaatcgagcagcggttgaaattgcggcacagcctgcccctggaaaacgtggacgcccgaaaaaggtacagaacggggagccagccaatctctgtatgcgacgatcctcgcgcctagtcgaaaataaaactcctgctccggaagatctctccaaatccactgaaggagcaaagacgaagacccaaatcaaggcaaataccaagaaaccggccaagaaacgtgtcgaggcaagggtaccctcctccacaaccgatgctccggcactgcccattgtagcggaggcggaatccacccaaaaatctccaaagcaaaagccgcaaattcagcaaacaatacaagaacctaaacaggatccaccgccatcgaaatgcgattcggagcccgatgacagcgacttcgagcaggacatgtgcctgagcagcagccaggagcgttttacctataatttcacatatgcggacaacggaccaaagtccagcaatccgatgatacgtcagccatcgagctatttcaaaagctatcagatgcgcttgatgaccgatgacgaacagctgcatacgctgcgcatagccagtgcccaggtgctctgtctgggccaaccggtggccagcgccattcgcaatatacccaagaagcggatacgccgcctgaccggcaatagtggcgggacagcggcaacagggggaagtgcaagtgtaagtggaggaagtggaacgggagcggaagttgctgctgctggcgaacagccttcggccacgtctacgccgctggtggagaagcccccatccaggagtgggccgcaagatgaggaagatctggaggtggccaccatcaattcagctccgatagcagcgaacagcagcagcggaattggcggcgaggagacaccggagaactctgcgcagcagaaggagctgcagagcgagaaccacatcgtggagttcgaggacatcgagtcgatactctcacatctgcacggcacctga

SEQ ID NO: 3738 - protein, 1810 aa, DROSOPHILA
MESIVLHSDVARLVLGYLVNQNLKRAAHTLCRTSPHLRHEFLALKQGLQTHNFLHGGLEEIICEHVKITSLVAGAVQKLPLDMRMQLQQMKLSERVSELIAAGERSSCTNESSTPGEPTISQSHRKRRRLRTHSPVNSISSPSFSKRPRLLPPHFYCSVNRDKVRQSFLGSQDDCEAELDEEDGESTTATEDLEEDDLLPANGPGPRNNSTPRQGHTESNPLLLTPQSMPELACAIIKNQDFQETLVKNINVALQTVTVNNPSVSCDAMLDGLVKNILEATEKDPSFDRIIQEVVIGDEPLANEEDPGVSPASDAAGAAIVPAADGDVLPTEQAVDPVPPQTPLIIRTAVAATAGTNADPNFSISKLIVLNSNESVQKMVAGLDTSNISFTSEGLNINFADPASMLSEVEATAAGQVCVDATTGQLTFPMYLSNGGLLSHLPFLVNNEWVAQQLGPDAFANIDDSHIEISLPEPITLSANQLPPNSIIISSAQKQPPPPSVEPPVQLIKDAAKVDNKAGQGTAAKEQPIDQLEEEQRKFPPASLDSSRQVMERVTPSTSGIINVKAFRSLSTPRKRTSHVRTLTFSPKVPPGGVLHSNTPLSTRRPGLLAKAQEKPIINHVEIIQAACDLSSNEGLGGVPPLFAMEECSNQTVIRAHPPAAAPSAAPVPPLVATPKRKQKRQAAVKACKRIISQAESETKTDKDQKKIMPKNNSACSASSTAHDDSAEASKENLQEQQKIEGKPDVGSAARGDAVVDNDMAAWQRQLHGSNSDLENRLREINSKREEVKASGRSRRPKKKDTPTSASSRARKAPMVKAKAEPMNLAKKPQRSVGDSTEKINIKIITPQKPKLLKKKKVFEAKEEIIDETIEETIDETQAEIEEKDQKKKSEQGCIYAKDQEQAKALAAELSRPNMAMLLDTPFKASPIGAGASGAVEDDTTSKEAGVGVAAIIPPTPGMAIPPLDTPYGKLPSSSFLFGSDTKSIMDTPQLSAITPGFRLTPFGQMPGTPIGSAAKTEYSSGSSYYRPDEAEHTDANAQCAIQQWGDPQDKKQPKVRSTPKKKKVEAEDELSQQKNQELIEMECSKKSLHPEDKHAEDNKKTPKRPEKPMDEHLKETENDGEKNETVLEKTPDAVKQPVVLSLEPTVLRRVRSFGSEAVDSAESATAGSFPSDQQQLPHYKLLPGLPEAIIEGSSNSSSSATSSSSSSSSSSSSSSSSSSSSSSSSSSHSGKGESRGEEANGENADEKCSKKKEMLLNIDNLSNISSTEDEEWLKAAGSEDAVLPMLAIDSQPGQLVSQDGEVRYPIRNWLTPSKEQAQETDTSGEQQTKPTPPKPADDPSSVALPTASTSRQEHQRQQLNEKRQRVVAKFKEQPQPIKGQGRKTANKKLTAMRENAKLANPSSQKSPKNRKHIEPLKTKAAKKQIEPNPNVKSTEATGPPVGAATDAPADPPAGKLDPALLMALNLSAKKQESLPIVIKPKVNRAAVEIAAQPAPGKRGRPKKVQNGEPANLCMRRSSRLVENKTPAPEDLSKSTEGAKTKTQIKANTKKPAKKRVEARVPSSTTDAPALPIVAEAESTQKSPKQKPQIQQTIQEPKQDPPPSKCDSEPDDSDFEQDMCLSSSQERFTYNFTYADNGPKSSNPMIRQPSSYFKSYQMRLMTDDEQLHTLRIASAQVLCLGQPVASAIRNIPKKRIRRLTGNSGGTAATGGSASVSGGSGTGAEVAAAGEQPSATSTPLVEKPPSRSGPQDEEDLEVATINSAPIAANSSSGIGGEETPENSAQQKELQSENHIVEFEDIESILSHLHGT

SEQ ID NO: 3739 - DNA, 3398 bp, DROSOPHILA
tgaaggaccagagttacggaaggactacgaacgcacaacaacgtttaccttaagcagcgagctctgaactgtagaatacatcatagcaacataagcaatcgtggcactcaaacgcaacacaccagactcaaaacgatttttagttaatgtaaacccgtaagcaatattaattctaacacttgctccgtccagaacgccttttttaagcaacactagtatttaatttacctaggacataagttttgcccaattgagcaacgcaattgagcagttcagtgaactttaatgactttcggctttaattataaacaattcgactggccgcttactggatccgcacacgatccgtaaggcaagcaactttagaacttttcatttctctttgtgattttgttaaacctttttatatagacctttgttttttattttttgttgtacatagctatattttgtttaatactcaaagtccgtagtataattttgttcatttccttggcaacaagttggaatcaaatgtattggctaattgtgcaatcttcaaaacgtgttggtggcttcggaggaacgcgacaacgctgttctgcggccccacgaaatgttgtaaacttaattaactactaaggccacttaactaggatctaggtgtagtcataaggcattggatcaatgttccagcgtacaacaaaacggacttccagtgaagagacaactgatatttatacggaatcccaatctggtattatgtattatgatttttacagtttacttaacgcaacaaatacgacttaagacttgtgcgctcaatgactagaaattatagttgcgattttaggataactattcatggaaaaaccacaaacgagtttttaataaagaaaattttactgattaattatttttaaaagcgtttgaaacatatttcattaattctgataaaatcacaaatcgatacacttaaaaacccccacagccaatcacaataattgaataatgaacgtgtacatattttattccttaaagttttattcgattggtgtagcttcatccgtttactgattatttgctcttcggtaccagaaacgtgcccgaaagtcgtcggagcaggtgaggaaagcaggaccattgggcgaatgcgtaatatagcggacaggtccgttgtgtccaagcgagttaagggtcaggcggcagccgttacgggagttccacgagcaaagcgaagtggtggcctcgtcggggaaaagcacgtaatcctctgtgtggttgaatacagcctctgtctggtgctcctgcttgccggtggttccagcgcccgtgtacgtctgaatgggacgactggtacacagctcccacagataaaccagtgaatccataccggaagataggaggtactaaaatgaataagttaaaatcttgcacagccactacccatagtgtcccattacctttccattccgcgtaaactccagtgagcatattgccgctccgccatgcgcctcggcaatggtgttgatgcaccgcccgctgatcccatcccatattttgatgtcaccatcatagctgcctgtggcgtagagtttccccgtgggcgaatatttcacgcaagtaactccagccttgtgctgctgcgagggaatggcactcacgaagcattgggtggtggccacatcgtagacccgcaagacgttatgttccgttccgatggctacgtagtcaccagtaggatgaaaagacaggcacagcaccggctcgcagtcggtgaacaccttgtgggccttctttaccgaaggcttggcaatgtcaaacaacttaacagtgccatcgcgcgaggcggaggccaggatgtgctccttgggatggaactccaggtaagacacttcatcagtgtgatcatagagcgtgcgaatcactggatggccttgttgttccctgcccggctcgatatcttcgggcgcagacttcgccagcatccgctccacgtccagaatcttgatgctggcatccacgctcccggtggccaccagggaaccatcgcaactgaaggcgccggcgcgacaggcctgcttgtgcgaggtcacatacgcggtttcgtaggaatgtggttccggggccaaggccgaagcctccggctcgaattccaagtctatgccgggcagcacatcatccgagttggttttgtccttgtcgctcagcgtctgcatccctgcaatcattacgtgcagcaggcgttcactgggagcgcactggtccgccttcaccagcatggacagctccatggcgaacttctccaggccgtcgtacatcagctggctgatcatcagtcggtagagtatctcccggttcttcactaggttactggggtccaaaatctcatcacgcatggtggcttaatttatattttgtttcctacggatataaacaaaatcttgtagataacgccgtgccgttatcgttatcgaaaacatttatcttgccggtatgtcatctctagctatgcggtattgaaatactgaaatcagggtttcggtattttacggtccacggtcactcctaacagctgcaacacgtgcggttttaaaattgttttggtcccctcaattgattttaaacattgtttgattcattaattaaacctctcaacaatgaagatccgcaagaatcatgctcgcaagcgttatcgctacaatgtaaaccgcaagacgatgaataaaacccggagttccaccggaaaaattaaggagtaagttggatcttggtgcacttacagccaatagagtcaacaagtttacgaaaaccttctgttatgatcttaccagtcccaggatgaaaaagatgtggatggaggaccagcgtgtgggcaccaacttcagtgaaatggggttggccaaggacgtcaacaaggccattgcgattcccagctacaagaaggaccgcctcctagcggcccgagttgtgaatgggtttctggaggaggagctggacgaggatgagcggcgtgtattgggcctcaagaaaccagtcgtagaggagggtccaaaacgtggacacgtagtccaggaactagaacaactggctagcgagcgagccgacccagagttcaggtaaaatattgattctgcaatggaaaactgtcaaaatacaggttttgtatttgcacagattacccaagggcgtggtcaaggaactgtcctactttcttaacaaacataagtttaactacaaggcgatggttgccgatcggaaaaactttggccagtggacgtggcggcagttccgcttgaagattcgcagatttatgtcgattccggagcagtttaacgtttacctggagcagaagaagttgcccgtgggcgtgaaaccggactgggaggaatacgagtcggacagtgaatggaaataat

SEQ ID NO: 3740 - DNA, 1344 bp, DROSOPHILA
aaaatataaattaagccaccatgcgtgatgagattttggaccccagtaacctagtgaagaaccgggagatactctaccgactgatgatcagccagctgatgtacgacggcctggagaagttcgccatggagctgtccatgctggtgaaggcggaccagtgcgctcccagtgaacgcctgctgcacgtaatgattgcagggatgcagacgctgagcgacaaggacaaaaccaactcggatgatgtgctgcccggcatagacttggaattcgagccggaggcttcggccttggccccggaaccacattcctacgaaaccgcgtatgtgacctcgcacaagcaggcctgtcgcgccggcgccttcagttgcgatggttccctggtggccaccgggagcgtggatgccagcatcaagattctggacgtggagcggatgctggcgaagtctgcgcccgaagatatcgagccgggcagggaacaacaaggccatccagtgattcgcacgctctatgatcacactgatgaagtgtcttacctggagttccatcccaaggagcacatcctggcctccgcctcgcgcgatggcactgttaagttgtttgacattgccaagccttcggtaaagaaggcccacaaggtgttcaccgactgcgagccggtgctgtgcctgtcttttcatcctactggtgactacgtagccatcggaacggaacataacgtcttgcgggtctacgatgtggccaccacccaatgcttcgtgagtgccattccctcgcagcagcacaaggctggagttacttgcgtgaaatattcgcccacggggaaactctacgccacaggcagctatgatggtgacatcaaaatatgggatgggatcagcgggcggtgcatcaacaccattgccgaggcgcatggcggagcggcaatatgctcactggagtttacgcggaatggaaagtacctcctatcttccggtatggattcactggtttatctgtgggagctgtgtaccagtcgtcccattcagacgtacacgggcgctggaaccaccggcaagcaggagcaccagacagaggctgtattcaaccacacagaggattacgtgcttttccccgacgaggccaccacttcgctttgctcgtggaactcccgtaacggctgccgcctgacccttaactcgcttggacacaacggacctgtccgctatattacgcattcgcccaatggtcctgctttcctcacctgctccgacgactttcgggcacgtttctggtaccgaagagcaaataatcagtaaacggatgaagctacaccaatcgaataaaactttaaggaataaaatatgt

SEQ ID NO: 3741 - protein, 424 aa, DROSOPHILA
MRDEILDPSNLVKNREILYRLMISQLMYDGLEKFAMELSMLVKADQCAPSERLLHVMIAGMQTLSDKDKTNSDDVLPGIDLEFEPEASALAPEPHSYETAYVTSHKQACRAGAFSCDGSLVATGSVDASIKILDVERMLAKSAPEDIEPGREQQGHPVIRTLYDHTDEVSYLEFHPKEHILASASRDGTVKLFDIAKPSVKKAHKVFTDCEPVLCLSFHPTGDYVAIGTEHNVLRVYDVATTQCFVSAIPSQQHKAGVTCVKYSPTGKLYATGSYDGDIKIWDGISGRCINTIAEAHGGAAICSLEFTRNGKYLLSSGMDSLVYLWELCTSRPIQTYTGAGTTGKQEHQTEAVFNHTEDYVLFPDEATTSLCSWNSRNGCRLTLNSLGHNGPVRYITHSPNGPAFLTCSDDFRARFWYRRANNQ

SEQ ID NO: 3742 - DNA, 8654 bp, DROSOPHILA
atactgctgcaaactatattgtgtgcttatcttcactcaaacggcattaatataccaattccattgaaattggctagctggttgtacctggtatacgcctttgcatctatattgctgagcaaagaatcaagactggatttgcgtctcgcccagattggctttaatttgggatctctctacgcaacactatgtacgtcctatgaggctgtgttcgttcaattgctgactatagagctgaatatctcgttgagggctcaaagtgcgcgggcagagagatcagttctccgtctggccttcaccctgctattgtacaccttcttttcgctctttggatccggaaacatagcgtcaatcagctcctttgatccgaacatcgctcgctgctacctcagtcattttgctccctttgtaatcatgggtctggtgctactgaaactactcgttcctgtggtgcttatcatgtcggtgatctatgccaacagcgagtttgtacgccagcacgaggagcagatcttcatctgtctgctgctcatttgcgatgtaatgggcctgaacttcctattcctggtacggaaccagggctcctggctggacatcggtacgtccatatcacacttcgttatcatggaggtaaccacgctggtgatgctcgtgatcttctataccgcaaagcagctgctgcgagtgattccttgggaggaaatagacttcaaaatgttgccgctgcgtttaatccactgggatgtgatcagcgccaaacatcactagtcctataaccgatttgacaaacattcgagctaagcttaaacatttatgttcgataatatttacaacactaattaagaattagtaacatacacatgtaaattatagaatctaatgctaggaatgtgtctgcgtgtaggtgagggtcagggtggatcgatttcatggacatccaaatctgaacttataaggaagacaaatacttatttgaaaacaagacaattttttactgattctgtactgtactgacgcatttaagaatgtattagaaacaccagtattgttactattttaaacatgaatatattaagaaatttaaaacacttttgatagttaaaaataaattgtaaactaatcatattaaagaaccctaatagatctttaaaaaaatcaaagacagaaattatatttcttaaaaaaaaatgtatcaagtgtatctttttgggattactccaaaaaatcgacccacccaattgtggatggtgttgtgtaggatgtgtattcgtgtggttttgtgtgtgtcatggcacgacgacatctaatgagttgtagaagcagcagcacggctatagaaacgtttatcccgattaatctttcagatatcgctccaccggattcacaccttgaaactttggactggcggtctcatctgaaatgtatcttggattagcattagggctaagtgattttaaaaacggagaacccacttgactgtgccggcttggccgtggtggcactttcccgcggagttgcttgcaggcaattgagccactcggccagcgagatctttttgtcaccattgacgtcgcagtagcgcggcatcttcttgccgcatctgcgcaagtggctgttgaatagaatagagttcataggccattaagaatgggatgtggtgtgatggctcacctggcactggtaaccagatcgcgaaagttcttccactctcgacgatcccacgacttattcttgttcttgtccagataaacaaagctcagagtggcgattcgctcatcgtctgttttccacatgctagaattcgaactgcaatatatatagagcatatattcttttaaatgtactaatctaatctgctgataatactcctagtacattatataattattattctaagaagatctaaaaaaagttgaatatatataatgactaagcttgctaaactgaatatgtgagctcttaaagtgatgatcaatcctacccggtggtgctgctgggcagaagagaggtgttgaggtaagcctttagctctttgaggaactgcgtcttgcgcggctcggtgcatcccttcatgggtcgcacggccacgctctcgtcacactgaggccgcttgttcttcaccgatgtgcccgggatgctctttcccgtgtcctcgttgacgcaccagcagtacgaagtggacgtggaggagtagcactgaatgcgctgatagcgaccatccggaaggcactgcggcacaaataggacgctctttccaccgtgctatgggattggagtaacatacagaggtttcctttgcgaatgatatttgatgacttacgccttgctcctccagcgtgaccgactgatccatccagcagttggagtcattttccaagtcctggctcgccgtctctggctttgagttgagcactaaaatatttttgataattaacaaatattttaatacagaacacagaaattaaatgagtgtaaattatgattaatcggataattttagcatgacaacttggtgattaaatattagttgataaagaatatattctacttcttatatcgtgatttagtttatgccaatgcactttgaatttggttagtagcacaattctacgtactatataatgatgggatatgcgttcgtgaactgggcagatctgctccttgcgagtcgtcctcttcacctccgtagcccgttgcactgtcctcgtagttgtcctcgtgctcctcactgccactcgcatcctcggaatatgagtgtggattaactccagtgccaatggtattggtgtgacctcggtggtggccattgacgttggtgttgtggatgctgtagtgggtggagtgtggtggtgcggtggctgcactgctcgccagaagatttacgacagcactacctggatttagatgacacacagatgtgagatgaattaaggacaaatggctcatgaatggatcttcaatgtttttttttatgattttgagactcacatgaactataattaattaagtatatttaatgaaatgcagctaattggaaggcaattaattatcaatgaattaataattctaaagattttgatactgcaaattaaagttcatgagatgctgctacaatatcctgtgttacataatccaacttgtactcacggttgtgaaactccttggtaaagcagacgctccattccaaccaattgagattggcatccttggttacatcacagtatttaccaaaggtccgtccacaacgacgaggtttaacgttctaattgaaatcattgttagcagaacacagttttccagagtaaaaactatagttacttacccgcctgagtaccttcttcagctcccgaatctcctgacgatcgagcaacttgttgccattcgtgtccagcttggagaactgccactccaggatgtgggaatccgagagagatggctggcggaaaaagctctgagcctcgttccggaacatcctcatcaggttggtgttgaattgcgaccgatcggacttgctgcaagtccggtgggctgttgatcctgcctccgaactgcctttggacgcagatgtatccggattgtagccaatctgatgcgatgccaggcggcgtcggtcacgtcgattggccctgcagcgcagctttccctttcgccggaattgcttgttatcatccgcgatgggcctgccctgactgtcgctgcaccagcatccgttgttcccgtagcactgcatagccgcaaagttgccatccttcctgcatcggggcacaaagtatccgggatctcgctcctgctgacgacgggcaaatttcaccgcctccaggcaggctaaaatgatagtacatattgtatgataatagtatattgtatagaatttgtcataaatgtcacaactagattaactaactaatcaaagaactacgtggcatagaagactataaaaggtctgaagacctttaactatgtaagaaatttaatgaattttatgatcaccgcaagtgtttgaactaaagagataaccaatcgaaaacatattatttaaagacacgagcaattaaaagtccgtaaagcattttagtgctatatctcccgacttatgtacaagtaatgtatgtgatacattgacacttaccattgcaggagccgctgtacttgaggctcacctggtggccaccgcactgcgcccgcagcagatgacacctggtgggataggtttggccatcggtgccgcagacgggaccctcgttatcatcgcactctccctgtttggcggcgcaggcggggagcttcatctgcgggtagagatcgagaggagaagtggtggaggtggtggtgtcagtgcaagtctcaactgtatggtagctccagggagtgggtgagttacccgtaccgctcccccttgggcaaatacgcgtaaaatgatttactgcacttatggccaagtctgcgagtcgccaagcgtctgggcctttgccgctgactggaatacgaatgtggccaatggtcgacaggggcggccgcctaaggggggtggctgtggtgtgcagaaggggaagggggctttttgggggtggcctacctgttagccggctaatgtgaaaaatcaaagttgtcaggcccataactcgaaagccccgaaatccgcaccaaaattatggctgcctgctgctctcgaccaacttggctgctgagtgcgcaaattcttgtttagcccacaaaatcacattcgagtatacgcaaatatctgtatctatatatctttctacacacatacacagatggggcggccaagtactttgggatttgccagtgcagcgccttttgtcgccaatttgctccggccgacccacggatatatgtatatgtatgtacatatttgtcgtgtcactcggacattaattagatttcgctgttattgaaaagtgaaatgcggcaagccatctaaatgtcccataactgaaacatgtttgggataagatatgagcatactacttgaggtgctaatggtagttaaagtgtgtgagttgtatacttctctatcatttctgtatcattttgaatactttcaatgaataaagcccaaaaacccatacatccaacgggaatcaaatgaacaagaagggattatggctatcaacattttataatccggcttagtaaattaaatgcgtttatgtggacacccaaaatgaaaccccgaatgcaccccgaagatactaaacaccagaagctcgacaagaaatgttatacaattatgagaagcacaaatattacctgtcccagtgttatcttgttgccccaacatacatatatgtaggtatacaaataatgtagaatgtctgtaaacaattcgaattcttttttgtgagcaacgaagcacgcgctgcttggaaatcggagtgcgcaggtgattttcgactcccgactgggcacagacagatatcggacaaaagtatgtacataggtacatatgtacatatatgtataaccagagcatacatatgtacataggtatattgctgcaataggcagatcggatggctgttctcagaagtggagagtgtggcatctggttaaaagttgaacatgaataccccattagctaattatcaatttcggatattggcgagcaaatgcctataaagcttgttaagttccatacaatacttgttgtacatgcaaaagtgtgttaaatgtttataatttatatgttattataaaaatcccctcgaatttcacgtttgcaatgcccctgctatggggaatgtctgattgggaatgcaaatgacacttttgctggtgattatctaagtttttgaaatagggcgttatcccgaaaacgtgcctggattgaaaattcccacttggagcaccctgttgcctcccgcccccctcacattgtctcaccctcttagccacaaattataaacagagacagctcaaggattgttaccaagataacgacaaaattattgactgacagttctcacgctcgaagaacgaggcggcgaagaggaggctgcaatgggcggagaagaatcagaagaacaagctccacactttaaatacttcttcacactttgtcatcatcaggcagcttagtgacattggcaaaatgactaaaaaaggtatttaaatgagaatgagaaaggattgctagccttttaggtcgaatctggaatacgctttagtagtagcacgaaagatacgactgcatataaatgcctgaaatgcgaattcttcagttctattatgcctgttttatgtcaaataggaataagaacgaaatcggtaacttctcttcttaaatcaaatgcgaattcctacgctttgtggacacaaccaattgtaagcgaaattttgatttaattttaaagggtatagaaataaagaggagcaagcgcgcaggaaagaatcgcttttgacttgtgatcattttgtgttctcctttttgcagctcctcgcgctctttttcttttttctgcaggaataagaaacacgttcgttcgtcggtcagatgaaacaaaaacaaaaatcaaggtgtgggattgaagacaggccaaggaggaggcgatcagaagaggagacaagagaagaaacaaaaaaaaaggaggagagagaagaagaagaaggagccggcgactctcttttcggagtttggcagacagcgcggcggcgaacaagctggagaaagacagggagaagaagaacgagcgcagcttctttgttggctgacttttggtacctttgatacctggaatattggagtgttttctcgggatttacgaagtaatcgcttgtagccttggcagaaagtttggcaggctccgcttacaagcacttgtacaaattgtacaaaagactaaatgcaacttcaaatgattgccgtcatcatcatataacttcatatatgaattggattactagatacatctacctatgtatgtaaaaagttctgagaggtaagaacttctagagaggaatatgttcgccggctgaataatctgaataatgatattaatttaacaccttctattcaaaatgtaatattgtaacttaaatatgagtaactgtataaattcagcaaacattttactgcacatgattaacccaattcactttggtttgttcggggaatattttgttaacaatttttcgaaagtaaacttaccaactgatcgtcactttttccagtcgcaatgaaaaccgccagccaagtgacgaacaaaacacatctcgccaacatttcacttagcagttcgaattcgtcaattaactgttactgtgcttcggaggatgggggattggtttgatacgcgtgtttattgcatcaagtacgattctctcattataatcaaagtttttcgtttatttcaccatctttttcgcaaagtcgcaattagattttcttcctagaacttttactttgccgctctccgatttatttatttaccgattaccgtggtctatttatagtgagagaggtgtgtgcgtgtgcattaaggtgttgtggatcttctgtttatataatgcgtcttaatgtgtgcgatttttggttcgtttcgattggaaaaccgtccgaaaatgttcaggaagcgaggagcgaggagcacggatcacaacgaatctgcagagcgcacttcaatagtcaaccgatcgcagccgagttccacacacgactggccatttgccttggagtggagtggcccaaaacgcaagagagaggccccaggtgagagtgggcgaagaatcggattcggaatcggaatcggaatcgagctgagagatcggcggagagagcgagggacatcgccgccgccagagtgtctggcgtgtcgcttccaatatcttatctttgccacactccgacttgtggaggctggacggacagcacagtggagcctctctcagttaaaccataggtcaacggtaccgaacgaagatattgtgactgtaattccaaacgtgtgcttgaacgactaattaactatcactaccccattattagtacactaaaactaaaccagcattaaaacagcattttatgtatgaatttataacttagggatgttctactgtagcagcataaaaacgatcacattcacacaccagcagacagagagcagcacttgtgtatgcgtgtgaaatttatctttccttgtgcatctcaagaggttgcctcaccaacaaaagcaacaaaaaacctctaaaacaaagcggccaacagttgcaccagctgctcagccagcgggggaggggccaggggcaaggggcgcagggacgtcggggtaggggcaggcggtcaggggaaaacgtgagccgtcgagggccccgctcctgtgatttatagagccgctggccaaggagttcgcctggagaggattttaggtggatggaggaggcggaggcggagacgaagtggagttgccggtctccgtcttcgattcggtgtgaaacctgccagacagtctgacggcggcgataactgccccctcttgcccactacttgatataccccaacaccccgaacacccccgttcctgccgtcactttgttttcggctgtgccacactccgttttgtggtcttcttcgatgatcgagcatgcactggggaaaatatacctgtacttgtaaatagtaccttcgtccagaagta

SEQ ID NO: 3743 - DNA, 2605 bp, DROSOPHILA
atcggttgactattgaagtgcgctctgcagattcgttgtgatccgtgctcctcgctcctcgcttcctgaacattttcggacggttttccaatcgaaacgaaccaaaaatcgcacacattaagacgcattatataaacagaagatccacaacaccttaatgcacacgcacacacctctctcactataaatagaccacggtaatcggtaaataaataaatcggagagcggcaaagtaaaagttctaggaagaaaatctaattgcgactttgcgaaaaagatggtgaaataaacgaaaaactttgattataatgagagaatcgtacttgatgcaataaacacgcgtatcaaaccaatcccccatcctccgaagcacagtaacagttaattgacgaattcgaactgctaagtgaaatgttggcgagatgtgttttgttcgtcacttggctggcggttttcattgcgactggaaaaagtgacgatcagttgatgaagctccccgcctgcgccgccaaacagggagagtgcgatgataacgagggtcccgtctgcggcaccgatggccaaacctatcccaccaggtgtcatctgctgcgggcgcagtgcggtggccaccaggtgagcctcaagtacagcggctcctgcaatgcctgcctggaggcggtgaaatttgcccgtcgtcagcaggagcgagatcccggatactttgtgccccgatgcaggaaggatggcaactttgcggctatgcagtgctacgggaacaacggatgctggtgcagcgacagtcagggcaggcccatcgcggatgataacaagcaattccggcgaaagggaaagctgcgctgcagggccaatcgacgtgaccgacgccgcctggcatcgcatcagattggctacaatccggatacatctgcgtccaaaggcagttcggaggcaggatcaacagcccaccggacttgcagcaagtccgatcggtcgcaattcaacaccaacctgatgaggatgttccggaacgaggctcagagctttttccgccagccatctctctcggattcccacatcctggagtggcagttctccaagctggacacgaatggcaacaagttgctcgatcgtcaggagattcgggagctgaagaaggtactcaggcggaacgttaaacctcgtcgttgtggacggacctttggtaaatactgtgatgtaaccaaggatgccaatctcaattggttggaatggagcgtctgctttaccaaggagtttcacaaccgtagtgctgtcgtaaatcttctggcgagcagtgcagccaccgcaccaccacactccacccactacagcatccacaacaccaacgtcaatggccaccaccgaggtcacaccaataccattggcactggagttaatccacactcatattccgaggatgcgagtggcagtgaggagcacgaggacaactacgaggacagtgcaacgggctacggaggtgaagaggacgactcgcaaggagcagatctgcccagttcacgaacgcatatcccatcattatatatgctcaactcaaagccagagacggcgagccaggacttggaaaatgactccaactgctggatggatcagtcggtcacgctggaggagcaaggccacggtggaaagagcgtcctatttgtgccgcagtgccttccggatggtcgctatcagcgcattcagtgctactcctccacgtccacttcgtactgctggtgcgtcaacgaggacacgggaaagagcatcccgggcacatcggtgaagaacaagcggcctcagtgtgacgagagcgtggccgtgcgacccatgaagggatgcaccgagccgcgcaagacgcagttcctcaaagagctaaaggcttacctcaacacctctcttctgcccagcagcaccaccggttcgaattctagcatgtggaaaacagacgatgagcgaatcgccactctgagctttgtttatctggacaagaacaagaataagtcgtgggatcgtcgagagtggaagaactttcgcgatctggttaccagtgccagccacttgcgcagatgcggcaagaagatgccgcgctactgcgacgtcaatggtgacaaaaagatctcgctggccgagtggctcaattgcctgcaagcaactccgcgggaaagtgccaccacggccaagccggcacagtcaaatgagaccgccagtccaaagtttcaaggtgtgaatccggtggagcgatatctgaaagattaatcgggataaacgtttctatagccgtgctgctgcttctacaactcattagatgtcgtcgtgccatgacacacacaaaaccacacgaatacacatcctacacaacaccatccacaattgggtgggtcgattttttggagtaatcccaaaaagatacacttgatacatttttttttaagaaatataatttctgtctttgatttttttaaagatctattagggttctttaatatgattagtttacaatttatttttaactatcaaaagtgttttaaatttcttaatatattcatgtttaaaatagtaacaatactggtgtttctaatacattcttaaatgcgtcagtacagtacag

SEQ ID NO: 3744 - protein, 613 aa, DROSOPHILA
MLARCVLFVTWLAVFIATGKSDDQLMKLPACAAKQGECDDNEGPVCGTDGQTYPTRCHLLRAQCGGHQVSLKYSGSCNACLEAVKFARRQQERDPGYFVPRCRKDGNFAAMQCYGNNGCWCSDSQGRPIADDNKQFRRKGKLRCRANRRDRRRLASHQIGYNPDTSASKGSSEAGSTAHRTCSKSDRSQFNTNLMRMFRNEAQSFFRQPSLSDSHILEWQFSKLDTNGNKLLDRQEIRELKKVLRRNVKPRRCGRTFGKYCDVTKDANLNWLEWSVCFTKEFHNRSAVVNLLASSAATAPPHSTHYSIHNTNVNGHHRGHTNTIGTGVNPHSYSEDASGSEEHEDNYEDSATGYGGEEDDSQGADLPSSRTHIPSLYMLNSKPETASQDLENDSNCWMDQSVTLEEQGHGGKSVLFVPQCLPDGRYQRIQCYSSTSTSYCWCVNEDTGKSIPGTSVKNKRPQCDESVAVRPMKGCTEPRKTQFLKELKAYLNTSLLPSSTTGSNSSMWKTDDERIATLSFVYLDKNKNKSWDRREWKNFRDLVTSASHLRRCGKKMPRYCDVNGDKKISLAEWLNCLQATPRESATTAKPAQSNETASPKFQGVNPVERYLKD

SEQ ID NO: 3745 - DNA, 3791 bp, DROSOPHILA
aacctgcttcactgtcgctcgagtcactcgaactgctatcactcgaactcgacgacgatgaatcgctggaactggaactcgacgacacgggattcgccggctgcactgcctcgaccttgctcgaagcggactcatctgcgggaagtaattaatattacggaataagtatcgttgaattgaatgaataagtacaaaagatagcaactggtaacaacaaataagtgataaattccaaggtatattccatggtcattgcatgttcaccgtgtcgcaaccgtgtgtacatacctttcttggcggttttcttgcttgcccccagttggccggtgacgtcctgcaggcgcttctccagttcctgctttttctcggccatctgctcgtccttcgacttgccagaaggctttttatcttccgctctccatggcgcctaatggcgaggcggccagaatggcctgagcggccacagcggccgccacatgctgagcctgggcgttggcagccacctgtgttagcaccgccacctgttgaccgtagtcgatggcgccgctgcccatgccaccaccactggctggccctccgccgccgcctccactgctgccctgactattggagccaggtccgccgctgccaacaatgccgccgacgctgctattgctgttgctgctggcggcgccgccactgccaacaccactattgctattgctgccagcattaagcagcgctggtccgccgccaccgccgccgccgccactgttgctgttggcggtgccaccaccgccactgtttggtccaccggcgctggctggtccactgcctccgccgccgccactgccaccgctgcccgcgctgcctggtccattgctgttggccgaattgctgctgttgttcccattgccagactgaccgccaccgctgccggaacgttcacgttcccgctcgcgatccctgtcacggtcgcgatcgccagtgattgcctgttggctggtcgaaccggcaccgccactactgctgccgccagaaggattcgaggcactggaggccaacgccgctgctgcagcagctcctaatgtcactgccgccgctgctgttgctgctgcaatggctgctgcctgggccacagcggccgaagtcaacgaggatgaagacgacttgtggtgctttcgctgttgctccttctcagcggcctccttttggttcttcttctccttctctgccgcctccagcagcttgagacggtcgcgttctttggctttgttgcggaactgctggaacgagtccatggccggttttgccttgctgctgctcgagctgctcgacgtgtgcgattggggtgagttcgctgatgctagggaggaccaggagctggcgttcttcaggttctgttcgttggccttgaatgtctgcaccaatttggcctgcgctgatgcaacagcagcagccgccgccgcatttggatgaagcttcatgtccgagggcgactgctgcggcggcaacaccttctgatgctgctgcaattgctgcttgtctggcggactgggcatcatcgattcgatgggtttgggtatgatcagcaacttgttagccgcctgatggtgctgctgttggtgttgctgctgttggagatgttgttgctgctgctgttgttgttgctgctgctgcagctgctgctgggttagttgctgctgctgctgctgttggtggtgttgctgctgatgttgctgctgttgctggtgcgtctgctgttgctgctgctgatggtgttgctgctgcaattgcatctgctgcatctgctgctgctgaagcgagggctccagatcgaggaatgatgcagctgtcatatttaaaccatcgaatccagccatgccgaaatcggccacattgaagccattgttgtgcgcctgctgctgttgctgctgtggatgcttctgctggtaggccgccgccatgtccaggttgaagttcagcagatgattgccattcatgccgccgacattctcagctcctttgcttagcagctcagtcacatagtccatatgttgctgctgctgttgttgctgctgctgctgctgctgttgttgttgttgatggccaaatggttgctgttgctgctgctgctgctgctgctggggtccggcgggctgcattaggtgttgctgcatcaagaaattgtccgtcagccccgatttgcccgtagaaccggcgctgaactccagcgaggccagcgactgctctacgggatcatcaaattgtggtatctgtttgaggcctgaggccagcgaggccagtgaggcattgaccatcgcatccccatgcgatccgcccagtggattagcgttgttattgctgccaccgttattgttaatgccgccgccagcagtgccggtgctgtttataccggacgtcagggcagcagcaagtgccgcatgatgctcgccaagatcaccgccgcccaggccggacggcttgtgcagattgctggctatgcgaatgccgccgctcgattgactggtggccaccgttgctgtccctccggcgaaactgtgcggcggcagggcggcattgatgggaccaccaggctgcactttgcttagatcatttggtccattcttgttgtgctgctgccccgtcgatgccgaaacggcagcaccggcaactggaacgccggcgccggcatgcatcatattcccgggagcgggcgcaccaccaaagttgctacccggcagcgatgtcttattgttgttatttagcatggcagctgccgtcagcggattggcattgcccagcatattggctacacgaggatcacggaagtttgggagtcacacaagaaacgctagttagttacacactttacacgaatatgtatatatggtttacagagatctctggcctatgatagccataacataagatttggtaatcacaaatctctgtaaacatatacaccgactatgctctacttacacatttgtgatgtgggcgtgttggagttcaccacatgatccagacccatcagcatggtcgtcggcgagagggcgccactcggcaggttgccgcccattaccacatttatacttggattatttacctgcgagcacagatttaaaggagagacgcggcgtggagagagggaatggaaatgggaacgggtagatggatatgtgttacattaactctggttatcacgacagtcaataagtacgctgcatttggcacttgattatttcagattattcatcatcgtgttgcatcaaatatgcaatcaatgccaattggaatttgatcagatgataagtgatcgaaataataataggtatttatgtatgtagtgtagagtatgttcttccgtatcatcgccctgacattgagtcactggatttgggtacttacattgcttccattcgagtctcgggattttttcttgcgcggcggtcgctcatcaccatcacctgttggagcgggaataaccaaaactttaaatgagagagattggctaagaacggcgaccgcgatgatcgcagaacggatcagagctaatgggctttaaaataattaacagcaacaaagtaagggaaaaattccggggtggaactctatatgtcacgtcaaattggtttataaaaatgaggatgaaattagaacgcaactgaaattgagcaacttaaaacgtaaatcgtattaagattgccctctaaaacgaagcagtaagtttatacttatgaattgggaccgatttggagcacatagagtaccaacccaaccaagttataagcgatagtaaattttgagga

SEQ ID NO: 3746 - DNA, 6776 bp, DROSOPHILA
cctgcttatatcgatgacagccttgtttttgttgcgcttacgttacgaaattaatgtaaagtagccgacgaatctacgttctaccagtataaatggattaaaactaacaacagcataagtgtaaactgctggtgaatttcccaaatagccatatgaaaaagctaaaagttgcaactttttaacaatcgtgtacaatctgtatgttgtatatgttcaattcaaaattcagcaacaatagcaacaacgcaattcagcaacaacaacaaacaaaaccgacaagctaaacttggctaagacaaaatcaacatccagcggcagcgcggccataaacaaagccaaaatcaaaagtcattcggatatatacatatattcgcccataatagcgaataaacagtaacagaacgagtggatttaacgaaacaacaaaaagaaaagaagaacgataaaatccaaaggaaaaatttatagccgtctgtgctgtactaggatttttgtcaataataagaaaggatacaaagccacaatgactctagtagcagttgtacttgtcaagtccttggccctcgaatcaggtgaagccagccgatttcaatgagaggagcctgggccctgagaatctggagcaggcgagtgcacagacattgctgagcatgaagcaatcactacggaccactacacaattttatcccttgaacaagaagagattcttatcaaaaaccagaacagaagcaccaggatcaggagttgaaaaaacgataggcggcggaggattaccaggagtaggagtcgcaagaacagcaggagaaggcgtaatcagtcgcaggaggaggaggtggtcaccggccacataagaccagttcccccccctaaacccactttcaccccccctacataccctctaacgaaggaatcgcaaggaggatcaaatcagtggaaaaggaggagagacggaggcggcccgtatgtcgtccagtgagccaccgcctcgttacgagccacccgtggagccagtcaatggcattgtacagccaccggtgattccaccagcggagcggcccggccgcaatacgaaccaattgcaatatctgatcaagacggtgatgaaggtgatatggaagcaccacttctcgtggccctttcaacagcccgtcgatgccaagaagctcaacctgcccgactaccacaagatcatcaaacaacccatggacatgggtacgatcaagaagcggctggagaacaactactattggtccgccaaggagaccatacaggacttcaatacgatgttcaacaattgctatgtctacaacaagcccggcgaggatgtagtggttatggcccagacgctcgagaaggtcttcctgcagaagatcgaatcgatgcctaaggaggagcttgaactggagccggtcacggccaagggtggcaaaaagaagcaacgggcgccggctacgcccaagtcatcgtcgggtggcgctggagcatccaccggttctggtacatcctcggcagcagttaccagcggaccaggtagtggctccaccaaggtgtcagtcgctgcctcatccgcacaacagtccggcctgcaaggagcgacgggagcaggcggtggatcttcaagtacaccgggaactcagccgggttccggtgcgggaggagcgatcgccgcccgacccgtatccgccatgggcggcacggtttcatcgacggccggcggtgcaccgtccataccaccgattagcacaatgccaccgcacacggtacccggcagcaccaatacgacgacgacagcgatggctggcggcgttggtgggccaggtgcagctggagccaatcccaatgctgccgccctgatggctagtcttctgaatgcgggccaaacgggcgcctatcccggtgcgcccggccagacggcggtcaatagctcctcgcttctagatggcagtacagccgcagtagcggcggcagcagcagcggctgcggcggcggcggcggcggcaggaggtgcagcgggagccgctggaggagcagggacaataccagcagttgccgtcaatgccgctaacgccgttcaggcctatgtgaatgcgggcgtgagcgtcggagtggacgccgtgataccgcctcagcagcccgccaaaataaagaagggtgtcaaacggaaggcggacacaacaacgccgacggccaatgcctttgaatccccgtacacgcaaatggactccaaatcggccaagattgcgacgcggcgggagtcgaatcgtcaggatcttacattccagggctcgggatacaatatgtcgccgctaggcgtctccggagtgcccggacttggcggtctagttgccggcggcgtggctggtgttgcggtggccaagaacaaggagaagctgtcggatgcgctcaagtcgtgcaacgaaatcctcaaggagctcttctcgaagaagcactcgggctatgcttggccattctacaagccagtggacgcggaaatgcttggcctgcatgactaccacgacatcatcaagaaaccaatggatctgggcacagtcaagcggaaaatggacaatcgcgagtacaagagcgcgccggaatttgccgccgacgtgcgattaatattcaccaactgctacaagtacaatccgccagatcatgatgttgtggccatgggtcgcaagctgcaagacgtatttgagatgcgctatgccaacatccccgatgagccggtagccaatgcggcccaccatcacggacatggccacgggcatggtcatggccatggccacggtcacgggcatggtcacggacatggtcatggtcacggatacggcggctcctcctcactcaagcacgatgccagcgattcgtccagcgaggactccagcgataccgaaaacgaatccaactcggatgaggagcggagcgctaggctgaagatgctcgagtccaagctgctcggtctgcaggaggagatccgtaagctgtcagaggaggcctccgccaaaaagaaggcgaagaaaaaactcaaggaaaagaaaaagtcaataggcggcggatcaggctctggttcggcttcgcaccattgtcacgccacgggcggcggtgcaaatgctggcggagcaggcggtcccggatcaggcggccatgggagcgtttccgtgccaggcggtgtcgggtccttgggtcccggtggagcgggcggcgctaatctcaacgcgctgctcggtggctcattggttggccatggcggagcggccgtcgcaggaggcgttcccaatgtgggtgcgttgcacagccaggttcacgacgtggccatggcctttagccagatggcgggcggcggtgccgcggccggtgctggctttggtgccggtgtgacagcagcaggagcatcgtcgggcggcaaggcgggcacactggccggcgctctggcagcgggcgcagcggcaggtgccggcggtacgacggctggcagcggcagcagtaaaggtgctaagagcaagggcggacgtggcgcaaagggcagcggagccggcggcgttggtgccagcaataatgccgctgcgggcaatgcggctggtggcgcagcgggagctgcagcgggcgctggatctgttggaggtgttggcggtgcaggagcagcgggcggcggcaatgcctccaagcgggccaagggcagcagttcggcgggcgctggcggtggtgttggtggcgcgaatgccagcgccggtggcgccggcgcacgcggcagcagcaagaagaagcctagccaggtgatgaactttgactccgaggaggaggacacggccaagccaatgtcgtacgatgagaagcgccagttgtcgctcgacatcaacaagttgccaggggacaagctgggccgtgtggttcacattatccagaatcgggagccatcgctgcgtgactccaatcccgatgaaatagagatcgacttcgagacgctgaagccgtcgacgctgcgcgagctagaaagctatgtggcgtcgtgtttgcgcaaaaaaacacgtaagccatattataaaaagccttctggcaagtcgaaggacgagcagatggccgagaaaaagcaggaactggagaagcgcctgcaggacgtcaccggccaactgggggcaagcaagaaaaccgccaagaaagccaatatgctgggcaatgccaatccgctgacggcagctgccatgctaaataacaacaataagacatcgctgccgggtagcaactttggtggtgcgcccgctcccgggaatatgatgcatgccggcgccggcgttccagttgccggtgctgccgtttcggcatcgacggggcagcagcacaacaagaatggaccaaatgatctaagcaaagtgcagcctggtggtcccatcaatgccgccctgccgccgcacagtttcgccggagggacagcaacggtggccaccagtcaatcgagcggcggcattcgcatagccagcaatctgcacaagccgtccggcctgggcggcggtgatcttggcgagcatcatgcggcacttgctgctgccctgacgtccggtataaacagcaccggcactgctggcggcggcattaacaataacggtggcagcaataacaacgctaatccactgggcggatcgcatggggatgcgatggtcaatgcctcactggcctcgctggcctcaggcctcaaacagataccacaatttgatgatcccgtagagcagtcgctggcctcgctggagttcagcgccggttctacgggcaaatcggggctgacggacaatttcttgatgcagcaacacctaatgcagcccgccggaccccagcagcagcagcagcagcagcaacagcaaccatttggccatcaacaacaacaacagcagcagcagcagcagcaacaacagcagcagcaacatatggactatgtgactgagctgctaagcaaaggagctgagaatgtcggcggcatgaatggcaatcatctgctgaacttcaacctggacatggcggcggcctaccagcagaagcatccacagcagcaacagcagcaggcgcacaacaatggcttcaatgtggccgatttcggcatggctggattcgatggtttaaatatgacagctgcatcattcctcgatctggagccctcgcttcagcagcagcagatgcagcagatgcaattgcagcagcaacaccatcagcagcagcaacagcagacgcaccagcaacagcagcaacatcagcagcaacaccaccaacagcagcagcagcagcaactaacccagcagcagctgcagcagcagcaacaacaacagcagcagcaacaacatctccaacagcagcaacaccaacagcagcaccatcaggcggctaacaagttgctgatcatacccaaacccatcgaatcgatgatgcccagtccgccagacaagcagcaattgcagcagcatcagaaggtgttgccgccgcagcagtcgccctcggacatgaagcttcatccaaatgcggcggcggctgctgctgttgcatcagcgcaggccaaattggtgcagacattcaaggccaacgaacagaacctgaagaacgccagctcctggtcctccctagcatcagcgaactcaccccaatcgcacacgtcgagcagctcgagcagcagcaaggcaaaaccggccatggactcgttccagcagttccgcaacaaagccaaagaacgcgaccgtctcaagctgctggaggcggcagagaaggagaagaagaaccaaaaggaggccgctgagaaggagcaacagcgaaagcaccacaagtcgtcttcatcctcgttgacttcggccgctgtggcccaggcagcagccattgcagcagcaacagcagcggcggcagtgacattaggagctgctgcagcagcggcgttggcctccagtgcctcgaatccttctggcggcagcagtagtggcggtgccggttcgaccagccaacaggcaatcactggcgatcgcgaccgtgacagggatcgcgagcgggaacgtgaacgttccggcagcggtggcggtcagtctggcaatgggaacaacagcagcaattcggccaacagcaatggaccaggcagcgcgggcagcggtggcagtggcggcggcggaggcagtggaccagccagcgccggtggaccaaacagtggcggtggtggcaccgccaacagcaacagtggcggcggcggcggtggcggcggaccagcgctgcttaatgctggcagcaatagcaatagtggtgttggcagtggcggcgccgccagcagcaacagcaatagcagcgtcggcggcattgttggcagcggcggacctggctccaatagtcagggcagcagtggaggcggcggcggagggccagccagtggtggtggcatgggcagcggcgccatcgactacggtcaacaggtggcggtgctaacacaggtggctgccaacgcccaggctcagcatgtggcggccgctgtggccgctcaggccattctggccgcctcgccattaggcgccatggagagcggaaggaaaagcgtgcacgatgcccagccgcaaatttcgcgcgtggaagacattaaggcgtcgccgggcggccagggtcagagttcgccggcacaacaatcgccgcaggatcgggcagccgccaagcgagccgagcagcggcgggccgaacaggagcgtcgcaggcgcgaagcgttggctggccaaatcgatatgaacatgcagagcgatctcatggccgcctttgaggagacgctgtag

SEQ ID NO: 3747 - protein, 1937 aa, DROSOPHILA
MSSSEPPPRYEPPVEPVNGIVQPPVIPPAERPGRNTNQLQYLIKTVMKVIWKHHFSWPFQQPVDAKKLNLPDYHKIIKQPMDMGTIKKRLENNYYWSAKETIQDFNTMFNNCYVYNKPGEDVVVMAQTLEKVFLQKIESMPKEELELEPVTAKGGKKKQRAPATPKSSSGGAGASTGSGTSSAAVTSGPGSGSTKVSVAASSAQQSGLQGATGAGGGSSSTPGTQPGSGAGGAIAARPVSAMGGTVSSTAGGAPSIPPISTMPPHTVPGSTNTTTTAMAGGVGGPGAAGANPNAAALMASLLNAGQTGAYPGAPGQTAVNSSSLLDGSTAAVAAAAAAAAAAAAAAGGAAGAAGGAGTIPAVAVNAANAVQAYVNAGVSVGVDAVIPPQQPAKIKKGVKRKADTTTPTANAFESPYTQMDSKSAKIATRRESNRQDLTFQGSGYNMSPLGVSGVPGLGGLVAGGVAGVAVAKNKEKLSDALKSCNEILKELFSKKHSGYAWPFYKPVDAEMLGLHDYHDIIKKPMDLGTVKRKMDNREYKSAPEFAADVRLIFTNCYKYNPPDHDVVAMGRKLQDVFEMRYANIPDEPVANAAHHHGHGHGHGHGHGHGHGHGHGHGHGHGYGGSSSLKHDASDSSSEDSSDTENESNSDEERSARLKMLESKLLGLQEEIRKLSEEASAKKKAKKKLKEKKKSIGGGSGSGSASHHCHATGGGANAGGAGGPGSGGHGSVSVPGGVGSLGPGGAGGANLNALLGGSLVGHGGAAVAGGVPNVGALHSQVHDVAMAFSQMAGGGAAAGAGFGAGVTAAGASSGGKAGTLAGALAAGAAAGAGGTTAGSGSSKGAKSKGGRGAKGSGAGGVGASNNAAAGNAAGGAAGAAAGAGSVGGVGGAGAAGGGNASKRAKGSSSAGAGGGVGGANASAGGAGARGSSKKKPSQVMNFDSEEEDTAKPMSYDEKRQLSLDINKLPGDKLGRVVHIIQNREPSLRDSNPDEIEIDFETLKPSTLRELESYVASCLRKKTRKPYYKKPSGKSKDEQMAEKKQELEKRLQDVTGQLGASKKTAKKANMLGNANPLTAAAMLNNNNKTSLPGSNFGGAPAPGNMMHAGAGVPVAGAAVSASTGQQHNKNGPNDLSKVQPGGPINAALPPHSFAGGTATVATSQSSGGIRIASNLHKPSGLGGGDLGEHHAALAAALTSGINSTGTAGGGINNNGGSNNNANPLGGSHGDAMVNASLASLASGLKQIPQFDDPVEQSLASLEFSAGSTGKSGLTDNFLMQQHLMQPAGPQQQQQQQQQQPFGHQQQQQQQQQQQQQQQQHMDYVTELLSKGAENVGGMNGNHLLNFNLDMAAAYQQKHPQQQQQQAHNNGFNVADFGMAGFDGLNMTAASFLDLEPSLQQQQMQQMQLQQQHHQQQQQQTHQQQQQHQQQHHQQQQQQQLTQQQLQQQQQQQQQQQHLQQQQHQQQHHQAANKLLIIPKPIESMMPSPPDKQQLQQHQKVLPPQQSPSDMKLHPNAAAAAAVASAQAKLVQTFKANEQNLKNASSWSSLASANSPQSHTSSSSSSSKAKPAMDSFQQFRNKAKERDRLKLLEAAEKEKKNQKEAAEKEQQRKHHKSSSSSLTSAAVAQAAAIAAATAAAAVTLGAAAAAALASSASNPSGGSSSGGAGSTSQQAITGDRDRDRDRERERERSGSGGGQSGNGNNSSNSANSNGPGSAGSGGSGGGGGSGPASAGGPNSGGGGTANSNSGGGGGGGGPALLNAGSNSNSGVGSGGAASSNSNSSVGGIVGSGGPGSNSQGSSGGGGGGPASGGGMGSGAIDYGQQVAVLTQVAANAQAQHVAAAVAAQAILAASPLGAMESGRKSVHDAQPQISRVEDIKASPGGQGQSSPAQQSPQDRAAAKRAEQRRAEQERRRREALAGQIDMNMQSDLMAAFEETL

SEQ ID NO: 3748 - DNA, 6191 bp, DROSOPHILA
ttgagtacagaaatttggatcaattgtttacaagttattatttcttatacaacatgagataaagtacctagcatcaatgcaaaagggcatccgagaattattcaattaaaactccaatacacaagcgagctaagttcgagacttgctggactcactgcatccccagaagaaactcagtggcgggggatctttccatttgctcatccaaacagctttcccaatggagacgaattcacttccgactgcattctgcatttgattcaaaaatgtgaatggatcatcggatggcattatcgaatgcgtgtgtgtgtgtgtgtgtgtgtgtgtatgtaacattatataacaatctgtatatatcgttgtatatatgctttgttattcaattgggttgtgttttcgaaacaagtctaggcatttttacgtactaagtagtgttaaaatatacgtttacggatcgggatcgtagcagcacttctacatatatacacgataatatcgaggacgaggtcccagggtccatttggatgggcttcagctgccacgactgcgattgagtggcttggtatgttagtatgttggcatgttggcctgttgttgtatattggttggcttggattggtttggattgagtggctggcttaacatgttggcctgttgttttgtgaattgtttgacttaagtacagcttgaggttggtgtgtctcttgtgtttgggatcgcgcaatttccggagcttcttccgttggcggagagtcgttggctcttggagcgttactctccgcatcgtattatttcgcttccgtggtatcgcaatcgcagtctttaggccttacagcagctgcagctgcagcagcagcagcaacagcaacagcacagtggtattaatacgacggccagaaggaggctgggaaacgcacaagtggctgtcacctaaaaaaccagcgagctaccgcactcaccggcaccggctgttttcggatccgttagcgggggcaacgtttcagtgaaatatgaggtccgcatcgggcgcacccttttggtgcttgaacttgtgcttattgggcttctggtagtagctctgggtgaagtttcgatgctgcggcggcatcaacgactcctggtagtcctcctcctcaatgcgctcagttatgttaagcgtaaggcgcttgaccttctccttctcctcgcgtatcatctgctcctgccgctttaggttggtggccaagtgcgagtcggatggtgccacaaatgacttaaattgctgctttccgcccttgtggccgcgcaccattagcacaaagggtacagatgtagcaccagaagcaccagcagcaccagcagcaccaacatcgctaccacctacaccgccgccggatttgccgttgccatctggtgaatctgcacctggagagccaggcgttccgtcctgattggggaccgactttgagatctgtgacatattgttgatcccagggccgatggtctgagcacctgttatctgatcgtacgattttttttgcaggcgcgccatcatcggcacaggtatatccttggccgtagcctttatcggctccttaagccgttcttggtacgagtctgtggtcattttttcgtacaattgctcgaactccaggtcctccttggacttttctggcggcgggagcggcggcagcggtggctccgcctcgttctctgtccagtcgttgctctggtcctgctcttggcccgacacttggcgctctcgctgatcattcgatgacccagaatcctcatcagtgccctggcaaagtagaaatcagacatgaaattagttgcatggtgtattgttttgtggaaatacgtacgccctcgtctatctcgcttatttcactgattgtgcccagcgacggatcctgagcattattggtagtctttagctgcggatagagcttctcctgcagatgatcaatcgccgccttggcctgctctagactcttgtaaatcttcagcttgggccgcacattgagtagacagtcgcgataggtgtgatccattaggatggggaacaaatcggaggtgttctccgttttgctgaacacgggatgggatttcttgaaccaatagtagtgttggaagaagaccagaaagtagtccagtctaaaaaaaaaaaagaaggacagctttagtagaaccaggagcccaatttcgttgaggctgacaaactaagatctcactcacttttttcgcgtggcctggctggtgaagtagggtgcacacgtgtccagtagcatacaggcaagcttcagtcggaacaggctatcgggcggatccagtggcgagacgacattttggtcattcgatacgcccagcgagatgatggagtacagcgtattaagaatgttcgtggactccaccagcttgtagttgtacatctcgcccagatacttggccatcgcgatgcgccgctgtgccatgcgtggcgaatgaatctcgaggccagcgcgtatatcctcaaacacattatcgatcacgatggtaaccgctcgtggctgataggagctcagtccggatacgagatcggccagacagcggatgagctggaagcgcagcagatacgccttgctgaggcacttaatggcataacaatttgtctccggatcctgccaatcgatgcggcgcagcattttgatacaacgatcaacgttctgtttgcaaagctcctcgaagatcaagtaacggatgtactcatgcattgccggccgaaccatgggctctcgcttggacgattccggcggctttaccaaatagtacacgctctcaatctgcgccgcatgtcgcgagtccattgccgtggctgttttcaagcgcagcatctggtccaggaacacattcatcagcagacgggcatcccggcaattgtacagatagacgccggtgacttccacaaaggcacaggccatctcgatttgatgatgctgaaagtcccttagcagcatcttcagacatcctaaggcatcgaactttttaaacaaaccaaacttaaccagttcaccaatgaatcgcacaatcttaagcttcgtctcgatattcagctggttcttcttgtgaatgtgccacttgaactccttgcgcagcagttcggccaaatcggtggccacatcggtattgcacatatgcacaatggccacgaagcgggagagatagggcaggatatccagacgcgtacgctgcaccgagaatatcgtacgcgtcagcttcttgcgttgatgcttggtattgaagttaagcaggaactcgatggccgccgaatcgatcagctccttgttcacacagttgaataggttgaccaggaagccatcgaactgctgacgcatctggttttggatctggatcggattctggttgagctgactttgctgctgctgctggcgacccagttccattagagcgttacccatcttctgcggcttgagatcctccgcagcggcaactggcgtcgttggctgctcttcgattggattctccggagtcgtatccgaagtggtggacggtggatcatctagatccatttcggcatctagattggcatcgatcgcttcttcggttagttcactgggctcctctaacgtttccaaatcgactttgggtgccgaaaagtttggcagaaactgtctcaaatcgggcaaatccgtgtagaaggctcgggtctcctcgtcgccccacggatccagcacaccaaaggaggcactgtccagcatgttgtcgatgactgtgcccggattacagccctcagactccttggccagctcgggcagtggttcacccagcagttccgacagcgattgagcggaggccagcagcttatcgaatccggcctgcatcagttcacacttctcgcgcttctccgtggatatctcacccttgcactccatggtgcgccgaatgttcttggtcatgttcatcagttcggcctgctcggccaggacatgcttgcacagggccttgaagtaacccttaagcatggtgcgcagattgagctgcttgtcggcagtcaggaagtcggatttcggcacctccaccccgtatttggtggccaactgttgcatcttttgcggcactaggccggcgtactcctcgccgcagtgccggcagaatgagaggatgatcgagaagttgctgtggtcatccttgtccagggcaatcaaatgcaccagaacaacacccagttgggccaatccgggcttcatttggatcacaccagagctgactagttcggcgaacaggcgaagatccacgcgcagtttgctcggattgccaatcttctcggtggccttgatgttcagtgccttttgccaggcctccagaaaatggacatcgaagtcggcatatgtgcagtgcagccgagaggccagcgtcaccaccgccggcacatcagtcattttcagtttggcctcgaccagcgcggcgcatatttccgagatgtatttgctcaggtttagagcagatatctcacgcaatagtccgtccagctgtgtggccgtgaatagtttcagtttcttgacgaatgccgtgttctttttgagattggagtccagtttggcgaagtactcctcaccgggcagctcgattgtggagttttggaggcgcagctgtcgcttgctctcgatcttctcgcgcagctcgcttatgaactgttgcagctcctcgcgctcttcggcctccagggcaatggcagcagccgcatccacatcttcatccgcatttgcgtccgtgtcgccggtatcgatgtcgttgtcgttgtcaccctcggcaacaccatctgccaaatctttcctcgacgacggcggtgtggacacctcgctgtcagtcgttgcagaatcgttggctagcatggcgttggtggaagttccgtgaacggattcacgttggcgcgacttgatgcgcggtggctatgttttgaaactggacctgctggcaaaggtatgcgaatcgggaactattttgttcttggagagctaaggctgagtgtgattgggcatagtttttaatgtgaaatagtcaccttaggttgatcagttgctggaactgttcggacgaattatatatttgatattatgttctttaaataactgtcattgctttgtttttcccacgtttttccgccacgatttacatgcgggggggttgaggagggcgatgtttttaatatttttttatgatatgttatcgataacagcagacgtttttgtctgggctcattgcttctcgatagcactagcgcttgcttaagctggtcactttacattcgctgttgtcatcggaatctaagttattaaaggctgatcacactgtgcaagttaaccgttttttaaagtaacaaaaattaaaatattacagatccagttattaacgtatatttctgttctctattatatcgtattatgtttaaccacttgttatttgttatattattttcattcatcaaaaagtaatgcactctaactatacattgagctaaaaccatggactaaacaggtgcgctgggtcacctttccatttgtccccgaatatgcttagttggattttcttatttagtcaaatgtacataacacacaaacataaaacacaaaatacgaacgggcactatccaaaaaaaaaaaacttaaaaacttaaaaacttaagacaggagtaggaggaacagaagtacactggattctgcagcagaactatttgggaaaggcagttaaatctcttcagactgctcgaaacatctgaatgcccttcacgctgcaatccaatcacatagaactccttctctgcagctttagctttggattccctgaagaattggcttaaatcccttgaaaaagtagttgtgcttttgacgacatgtaccagaatcagttcatctattcccgcgagaggcgtcgctttgggcggcagtgccggttccaggatcgcaatgaactgatggtcagcgtacatcccagtggccgccagcgtctaaagtacatcatggccaatccgtccgagaagtccacccaactgagccgccaaatggcgctgaccgtcatggagacggagaacgtgactctcgaccagcacggaatgtatcactacgagggcggttggcccaaggaggttaacttcaatgacgaggagcagacgcagcggcatcgcaagaaagtggaacgcgaagatagctggggtg

SEQ ID NO: 3749 - DNA, 4046 bp, DROSOPHILA
aaaatattaaaaacatcgccctcctcaacccccccgcatgtaaatcgtggcggaaaaacgtgggaaaaacaaagcaatgacagttatttaaagaacataatatcaaatatataattcgtccgaacagttccagcaactgatcaacctaaggtgactatttcacattaaaaactatgcccaatcacactcagccttagctctccaagaacaaaatagttcccgattcgcatacctttgccagcaggtccagtttcaaaacatagccaccgcgcatcaagtcgcgccaacgtgaatccgttcacggaacttccaccaacgccatgctagccaacgattctgcaacgactgacagcgaggtgtccacaccgccgtcgtcgaggaaagatttggcagatggtgttgccgagggtgacaacgacaacgacatcgataccggcgacacggacgcaaatgcggatgaagatgtggatgcggctgctgccattgccctggaggccgaagagcgcgaggagctgcaacagttcataagcgagctgcgcgagaagatcgagagcaagcgacagctgcgcctccaaaactccacaatcgagctgcccggtgaggagtacttcgccaaactggactccaatctcaaaaagaacacggcattcgtcaagaaactgaaactattcacggccacacagctggacggactattgcgtgagatatctgctctaaacctgagcaaatacatctcggaaatatgcgccgcgctggtcgaggccaaactgaaaatgactgatgtgccggcggtggtgacgctggcctctcggctgcactgcacatatgccgacttcgatgtccattttctggaggcctggcaaaaggcactgaacatcaaggccaccgagaagattggcaatccgagcaaactgcgcgtggatcttcgcctgttcgccgaactagtcagctctggtgtgatccaaatgaagcccggattggcccaactgggtgttgttctggtgcatttgattgccctggacaaggatgaccacagcaacttctcgatcatcctctcattctgccggcactgcggcgaggagtacgccggcctagtgccgcaaaagatgcaacagttggccaccaaatacggggtggaggtgccgaaatccgacttcctgactgccgacaagcagctcaatctgcgcaccatgcttaagggttacttcaaggccctgtgcaagcatgtcctggccgagcaggccgaactgatgaacatgaccaagaacattcggcgcaccatggagtgcaagggtgagatatccacggagaagcgcgagaagtgtgaactgatgcaggccggattcgataagctgctggcctccgctcaatcgctgtcggaactgctgggtgaaccactgcccgagctggccaaggagtctgagggctgtaatccgggcacagtcatcgacaacatgctggacagtgcctcctttggtgtgctggatccgtggggcgacgaggagacccgagccttctacacggatttgcccgatttgagacagtttctgccaaacttttcggcacccaaagtcgatttggaaacgttagaggagcccagtgaactaaccgaagaagcgatcgatgccaatctagatgccgaaatggatctagatgatccaccgtccaccacttcggatacgactccggagaatccaatcgaagagcagccaacgacgccagttgccgctgcggaggatctcaagccgcagaagatgggtaacgctctaatggaactgggtcgccagcagcagcagcaaagtcagctcaaccagaatccgatccagatccaaaaccagatgcgtcagcagttcgatggcttcctggtcaacctattcaactgtgtgaacaaggagctgatcgattcggcggccatcgagttcctgcttaacttcaataccaagcatcaacgcaagaagctgacgcgtacgatattctcggtgcagcgtacgcgtctggatatcctgccctatctctcccgcttcgtggccattgtgcatatgtgcaataccgatgtggccaccgatttggccgaactgctgcgcaaggagttcaagtggcacattcacaagaagaaccagctgaatatcgagacgaagcttaagattgtgcgattcattggtgaactggttaagtttggtttgtttaaaaagttcgatgccttaggatgtctgaagatgctgctaagggactttcagcatcatcaaatcgagatggcctgtgcctttgtggaagtcaccggcgtctatctgtacaattgccgggatgcccgtctgctgatgaatgtgttcctggaccagatgctgcgcttgaaaacagccacggcaatggactcgcgacatgcggcgcagattgagagcgtgtactatttggtaaagccgccggaatcgtccaagcgagagcccatggttcggccggcaatgcatgagtacatccgttacttgatcttcgaggagctttgcaaacagaacgttgatcgttgtatcaaaatgctgcgccgcatcgattggcaggatccggagacaaattgttatgccattaagtgcctcagcaaggcgtatctgctgcgcttccagctcatccgctgtctggccgatctcgtatccggactgagctcctatcagccacgagcggttaccatcgtgatcgataatgtgtttgaggatatacgcgctggcctcgagattcattcgccacgcatggcacagcggcgcatcgcgatggccaagtatctgggcgagatgtacaactacaagctggtggagtccacgaacattcttaatacgctgtactccatcatctcgctgggcgtatcgaatgaccaaaatgtcgtctcgccactggatccgcccgatagcctgttccgactgaagcttgcctgtatgctactggacacgtgtgcaccctacttcaccagccaggccacgcgaaaaaaactggactactttctggtcttcttccaacactactattggttcaagaaatcccatcccgtgttcagcaaaacggagaacacctccgatttgttccccatcctaatggatcacacctatcgcgactgtctactcaatgtgcggcccaagctgaagatttacaagagtctagagcaggccaaggcggcgattgatcatctgcaggagaagctctatccgcagctaaagactaccaataatgctcaggatccgtcgctgggcacaatcagtgaaataagcgagatagacgagggcggcactgatgaggattctgggtcatcgaatgatcagcgagagcgccaagtgtcgggccaagagcaggaccagagcaacgactggacagagaacgaggcggagccaccgctgccgccgctcccgccgccagaaaagtccaaggaggacctggagttcgagcaattgtacgaaaaaatgaccacagactcgtaccaagaacggcttaaggagccgataaaggctacggccaaggatatacctgtgccgatgatggcgcgcctgcaaaaaaaatcgtacgatcagataacaggtgctcagaccatcggccctgggatcaacaatatgtcacagatctcaaagtcggtccccaatcaggacggaacgcctggctctccaggtgcagattcaccagatggcaacggcaaatccggcggcggtgtaggtggtagcgatgttggtgctgctggtgctgctggtgcttctggtgctacatctgtaccctttgtgctaatggtgcgcggccacaagggcggaaagcagcaatttaagtcatttgtggcaccatccgactcgcacttggccaccaacctaaagcggcaggagcagatgatacgcgaggagaaggagaaggtcaagcgccttacgcttaacataactgagcgcattgaggaggaggactaccaggagtcgttgatgccgccgcagcatcgaaacttcacccagagctactaccagaagcccaataagcacaagttcaagcaccaaaagggtgcgcccgatgcggacctcatatttcactga

SEQ ID NO: 3750 - protein, 1241 aa, DROSOPHILA
MLANDSATTDSEVSTPPSSRKDLADGVAEGDNDNDIDTGDTDANADEDVDAAAAIALEAEEREELQQFISELREKIESKRQLRLQNSTIELPGEEYFAKLDSNLKKNTAFVKKLKLFTATQLDGLLREISALNLSKYISEICAALVEAKLKMTDVPAVVTLASRLHCTYADFDVHFLEAWQKALNIKATEKIGNPSKLRVDLRLFAELVSSGVIQMKPGLAQLGVVLVHLIALDKDDHSNFSIILSFCRHCGEEYAGLVPQKMQQLATKYGVEVPKSDFLTADKQLNLRTMLKGYFKALCKHVLAEQAELMNMTKNIRRTMECKGEISTEKREKCELMQAGFDKLLASAQSLSELLGEPLPELAKESEGCNPGTVIDNMLDSASFGVLDPWGDEETRAFYTDLPDLRQFLPNFSAPKVDLETLEEPSELTEEAIDANLDAEMDLDDPPSTTSDTTPENPIEEQPTTPVAAAEDLKPQKMGNALMELGRQQQQQSQLNQNPIQIQNQMRQQFDGFLVNLFNCVNKELIDSAAIEFLLNFNTKHQRKKLTRTIFSVQRTRLDILPYLSRFVAIVHMCNTDVATDLAELLRKEFKWHIHKKNQLNIETKLKIVRFIGELVKFGLFKKFDALGCLKMLLRDFQHHQIEMACAFVEVTGVYLYNCRDARLLMNVFLDQMLRLKTATAMDSRHAAQIESVYYLVKPPESSKREPMVRPAMHEYIRYLIFEELCKQNVDRCIKMLRRIDWQDPETNCYAIKCLSKAYLLRFQLIRCLADLVSGLSSYQPRAVTIVIDNVFEDIRAGLEIHSPRMAQRRIAMAKYLGEMYNYKLVESTNILNTLYSIISLGVSNDQNVVSPLDPPDSLFRLKLACMLLDTCAPYFTSQATRKKLDYFLVFFQHYYWFKKSHPVFSKTENTSDLFPILMDHTYRDCLLNVRPKLKIYKSLEQAKAAIDHLQEKLYPQLKTTNNAQDPSLGTISEISEIDEGGTDEDSGSSNDQRERQVSGQEQDQSNDWTENEAEPPLPPLPPPEKSKEDLEFEQLYEKMTTDSYQERLKEPIKATAKDIPVPMMARLQKKSYDQITGAQTIGPGINNMSQISKSVPNQDGTPGSPGADSPDGNGKSGGGVGGSDVGAAGAAGASGATSVPFVLMVRGHKGGKQQFKSFVAPSDSHLATNLKRQEQMIREEKEKVKRLTLNITERIEEEDYQESLMPPQHRNFTQSYYQKPNKHKFKHQKGAPDADLIFH

SEQ ID NO: 3751 - DNA, 4933 bp, DROSOPHILA
gtccatgcgacaggcaactggcaaggagaaggcactcatggccgccgtaagaattgaacattctgtaatgtaatcccctctctctaattaacactatatcttctggaagatgttcgagcgggagatcgtgcggtgtaaactactggaggctcgctatgatgaagttaggctaaagcggaaaacgcttcaaatggccgaggaggaacgtgtccggaagcagcaacaactggcgcccactctcgagctggatcccgacaatcccgatcagtttgtgatgatgatcgagggcgatgaagaatttcgcacggccatcaccgaattccaggacatcatactcagtgtggagaggaagcgttccaagcggcaggtgatcatggagcgtacggtctttgaggaatggaatccggctgacgaaaagcttcagggtgagcccgtcgtatacaccaagcccgagcgaaaggttcagacgtcgggaaactatgacaagaggacttcgggagagccaagagcttcgcaaggatccatgaagcaccagtaaaaaaaaatatgaatatgaactattggatatgttgatatgatgtgcaaattgaaataaagttatcatttaaatacaaactgtttgccaaagctgcgggaaacagatgaaaccccatacgatgagcaccattaagaccatgactagcgggtcaaaccacatttaatcacattatggagtactctttggagacctttattacgaccaacacaattagcccgactacgtgcgactttttaattaagtaacaacctttctaacagctaaatttagttcgttaaattcacttttcatatagcattagttgcacttctctacacagcaattaaatggagttaatagtacactgggaaaaaaaaaataagcaaaataaagtgaacaaatggggggggagaagattaaagctaaatcatccacttttagatggataatggggtgttcaatttggccacttggagctgagctctaggacttatcggtatccacacccgtgtcgaagaaatcgttgaccaatcgcatcgccttgcgtggaatcaggcgaccgatcttctcagcggccacgaaatgtcgtggaatcgccgcctcctccaatccctggcgctgagcctcgatgatcgatccggcggccacatcggcgggtatcagcttgaacagattggggaatcggtagcggggattcttgcacagacccgtatcgatcatatacggatatatggtagtcagcttgacctgcaagcggaaagtaggtgggttatattaaacttcgaattcatggagttattatgggaaaaggtctcatccatatgagataataaaatcgtagtgtgaaaccaagatgctcgcctaacggtgagaattaaacgggctgcttggtacgagctataatatattatttttaattagctactcttaaccacctaataaccttttaattggacactcaactggattataatgagcaactaaatgctaataaaagtgtgagtgagttggtacttacgttgttctgtgggttcttctgacgcagctcctcaacgagggcggccatgtagccacgaacggcgaacttggtgccgcaatagggcaccagattgatcagtccaaagagtccggcgcatgaggatagggccacaatgctgccctcgttgcgctcaatcatatcgggcaggaacgcctggatgatctgtgaatgaagtgaatggtcgtcaatgttactattgagataacatcgatattaacactatcacatcaacttacccagaagtgagagagcacattgatctcgtacattagacgaatctcgttctcggtatgctccagcagtggatggcagggcatgatgccggcattgttgaccaccacatgaatgaatccatgctccttgcgcaccttctgggccagttcgatcagttcctcgcgcttggtcacattgcaaacgtagccaaaggccttgccaccattgttcttgatctccttgacggtctggttattggtctgctcattgacatcccagcagagaatggtggcgcccagcttggcgtactgcagtgccatctccttgcccatgccgtggccagtgccggtgatcaggaccaccttgccattgacatcatcgagcggcggcgcgcggaaaagtccaacgatagcttccgcaatggcgagccagaatttgacgatcagcatcacgatgtcaaccaccagcaggacaatgttgtagatgtcattgctgttggcgttgctgccgttgtcagcactgaaagaaatatgtacgatattattaccaaatattagggtaaatttaaggcttaattgtgagcatgtttctgtaaactacattaaatatatatatatttgctttttaataataaagtaaaccacataatgctatggttttttgtggcaagtgcgtgctttctctacattgactcttgatcttgggcatcatcataattatcaagcggagtggagttcaaatgggattaatccggaaccctccaactcttgcatgacccacagtcatttggatggcaagtatgtgcgtgtatatgccttatcttacagccagcgacaatcgcatgacctttgccatcctcactttttgcggctacactgggagaaaacaagtcgcttaaatgaaaaattttctttgtatcattccattttttatgacacatttctgttatttacttatcaatgatgtcatgtaatgtgtttcggtttttcgtgggaaatgcggaaatagccaaaaaaaaaaaaaggggggcggcaatgggcgggtttgggtggttccaacgtgggtcatcgtgttttctcccagctcatgttctgtaattatatttcgctggctgcagctgcgtgagatcttgataatgccgaactgtttccagctttttggtttttttttttttttttttggtgtggtttcaatgtgttttcgcccatgcattacgtagtgcgatagtatatgcatatatgtatatatatatacttgctatatattctagcagatcgtgccatcgacttgaccatcattaccatgtccctctctctctcgctctcgccccccttgcactttctatcgctccgtttcacttgcgcatttcactgccatggagactgctcttatcggaatgctacttctggaatgctatttatagtacgacgttcggaatcggaccaaaatcgttccgaacagcccacaatattggaaaatattttccattttggaaagtagcatagtatttgaactgcgatcctctgcacttatgtcctctcaagcgtgtgaaaactatttcaccgaaaaaaaaaaatttcaaatgatcctttgcccggtcaataagtgtaaggcgatctttggtcagggcaatttgatatagttaaactaagtcgaacgaaggtgaatggcgcttaagtgagcggatacagattgcacaatggttggtcaaaggttgaagcgatcatccatcatcattcatatggatggtttggtcatctataatgcgatctctgggccaattattccatcgagctgaatagtattagttagtatttggtgctcattgaaccctgctcctccgggccactggttgtagacccaagtcgataaggtgatcttatcgctggcgattaaaatattgcactacactttgttccaaatgttccgttgataagatagttctcttaggttttttttttttctttttcttttcttgatttgttaccaactggtgggtagcacttctgtttcggtgattacccacctttgcgtcactttcgacatgtttcgtgtatttggctaaatcctgcgaggatcgttaatgtatatatatatctatatatatatatacgtatataggaagggatcggagcagccggagcaaaccgttagcggctgttaacgaattcggactgaatattgagcaaagtaaacactacgcaccgtaccgccacgccggtcttataagttattatttcaaatctactcacacacacacactcacacacacacacacacaccactgggttttcaaatactatatggtactggtacactggcacaccggcactacttgtagatacactctgccggcagcgttgacgtcgaccgcggcagcgacgcaggcagagcgttctataaacacaactacgacatatgttcaatggcactgtcattccgatttataccattacaatccaatgcgatgcgatccgatccgatccgatctatatggaacgaacgatatccgcggatgtgcaacggttcagccggtatgaaatgcatatttctatgtatgtatttatttttgttagatagcaaatgcctgtttgttaatccggggtccggtaataataccctagtcggccataaataagatatatatgtgtcatatataaaaatacacacaaccaggcggagtttacgacccagatcgttcagatacccagatacttagatacacagatacttcgatactcagagagatgagatacagagatgcggtgtgcgaaagccaaaggtgaaaaaagtgccaaagggggtgctaatgccaaggtagatctacggcgccgatattaacacacaaaagcttcgcctaaacagatcggtttcattcacttattttttttttgaccaaatcatatgcgaagataagcactggcaggatgatctttggcctacggcaaaaaaaaaacaaaaaaagctcaggaaaccagaaccaatgtacaatgtacgccaatgagaggtattatttggttcaaagatttagtttttttttttttttatcagggtagggtatgatggttagagggtagggtcttagctgtgcactacttgacccctgagacataggaatcagattgcgattagatagtgctccttgccatttgccggctcagcat

SEQ ID NO: 3752 - DNA, 1081 bp, DROSOPHILA
ttaacagccgctaacggtttgctccggctgctccgatcccttcctatatacgtatatatatatatagatatatatatacattaacgatcctcgcaggatttagccaaatacacgaaacatgtcgaaagtgacgcaaagtgctgacaacggcagcaacgccaacagcaatgacatctacaacattgtcctgctggtggttgacatcgtgatgctgatcgtcaaattctggctcgccattgcggaagctatcgttggacttttccgcgcgccgccgctcgatgatgtcaatggcaaggtggtcctgatcaccggcactggccacggcatgggcaaggagatggcactgcagtacgccaagctgggcgccaccattctctgctgggatgtcaatgagcagaccaataaccagaccgtcaaggagatcaagaacaatggtggcaaggcctttggctacgtttgcaatgtgaccaagcgcgaggaactgatcgaactggcccagaaggtgcgcaaggagcatggattcattcatgtggtggtcaacaatgccggcatcatgccctgccatccactgctggagcataccgagaacgagattcgtctaatgtacgagatcaatgtgctctctcacttctggatcatccaggcgttcctgcccgatatgattgagcgcaacgagggcagcattgtggccctatcctcatgcgccggactctttggactgatcaatctggtgccctattgcggcaccaagttcgccgttcgtggctacatggccgccctcgttgaggagctgcgtcagaagaacccacagaacaacgtcaagctgactaccatatatccgtatatgatcgatacgggtctgtgcaagaatccccgctaccgattccccaatctgttcaagctgatacccgccgatgtggccgccggatcgatcatcgaggctcagcgccagggattggaggaggcggcgattccacgacatttcgtggccgctgagaagatcggtcgcctgattccacgcaaggcgatgcgattggtcaacgatttcttcgacacgggtgtggataccgataagtcctag

SEQ ID NO: 3753 - protein, 320 aa, DROSOPHILA
MSKVTQSADNGSNANSNDIYNIVLLVVDIVMLIVKFWLAIAEAIVGLFRAPPLDDVNGKVVLITGTGHGMGKEMALQYAKLGATILCWDVNEQTNNQTVKEIKNNGGKAFGYVCNVTKREELIELAQKVRKEHGFIHVVVNNAGIMPCHPLLEHTENEIRLMYEINVLSHFWIIQAFLPDMIERNEGSIVALSSCAGLFGLINLVPYCGTKFAVRGYMAALVEELRQKNPQNNVKLTTIYPYMIDTGLCKNPRYRFPNLFKLIPADVAAGSIIEAQRQGLEEAAIPRHFVAAEKIGRLIPRKAMRLVNDFFDTGVDTDKS

SEQ ID NO: 3754 - DNA, 3160 bp, DROSOPHILA
aaagcttagtaaaatataaaaattttgtatattaatattgagatgtaatgccaagtcaagttgattaacattatctgctcgcctctccatcaagggcagcatcttcctttccggctactcgaacttggacggacaccttatagctgacatgctgcactcactcattccggttcgccgtctatccgatccgattcgaaacgatccggtccaccttccatatgccagatggaatggaagccatctatctagatatcggtggctgggtggcgtagtgcaacccaataaaacaaaacaatttcgaatagaaacaggctttgggcgttgcgttgcatgaatgcattcaatagatgaacaagattcgtgacaattcgctagtcgggcgggcttgtgtatctgtatctatgcggctatagttgttctgctgtggatgcgactggctaatcgaataaattagctcgcataaccagaccggttgactagctgactagctgactaactgactaactgactaactgactgattgactgactggctgactgtctaactgactggcttattgtttcacccgaggcttgcataaatatgacgccttggcgactcatccgcggcatccatctcaattcgcaccttcatctggggaatgatcccaatgtggatacgtgccaattacagatttgcgactgcaaattgcacccctgtcgtgggtcggggtcaccactaagtcaactagccaacgcaattagtcttaacagcattcgcgaatcggacccgctttaagtctggctatttgtagggatcaccagttcaggtgggatgcataaacaagttccacgctatcgatcgtgcaaagtattggcattcataactaaacgtctgatgataaatgtactaatgtactgcaccattaaagaccgaaatatatgtatattatgcataaattattgattaaaattttattaattacattaatataacaaattcaaagatatttggatgctgatcacacctgcagcgtggagaagaaggaaaccacagcgctatctgtgggcagacactggccaaatgcctcgattagcaatggttccgcggtgaccgtgcccataaaatcctccagggagacctgaaaaccaaatcattatatctgtaaggaattataccaccaccaatccattcaccttgccgtccttgtccaggtcgaacttcttgagcacaatctccaccagatccttgacgccctcgtcgggatcttcgtcctgcggttgttttatcaggcaatttcgcagcagcgtaaacatttcatccttggtgatgaagccatccgtgttcaggtcgtaaacccggaagcaaaaagccgcccgttccgccggcgtgccgcgcaggaatgttgaaagtccaatgagccagccctcgaggcgaaggggcaaaccctcgtgggccttgtcccagctgcagaagatgcgctccatcaggatctcctcggtgacgatgtcgaaagtgctgtgcaacagctcgcggaacacaatgcgatcgatgccctacgaagagtggcgctgaaacaccatttcttgacaggatctgttcatagttacctccacggcagcatgtggcttggcaatagctgcgctcgaggagctggaggccagcgtcttggccgcatattgacaatttgataccagcttgcgatagatgcggcacaacgcatccagctcgtccctattcgggcgccaagtggcacatacagttcatcatcgtactccaaattatgtatgtatgtttgtatgtaattcactcacttcgtaaaccgcgtcttctttcgcaggctgtccaacagcttgggattcactttgccgctcaactcatccatcctccgttgccgctgttgccgtttgttctgcaaagcagccgcggcggccttcgactgttggttgctcgagttgcgcttgccgctggcaaggaacacggataccgttttcagtatcgttttgttggcatgtagtgtggatctaccaacgccagtggtgccgccagttgctgtgggtgccgctgcaacaccaccaccaccaccaccaccgcctccaccactgccagcaccagccgttgccccgccatcccgattgggtgtcggtgttggcgaacgacccttgccagcgcccgcctttcctgcaacccaaaaaaaaaataaggttcagctttacatgggtgcgtgtctctgtctttgtgttggcctgctgctgctttatgtgtcaaagtcgacacgctcacccccaaaactcctggcgccgaaataaactcctcctccttggcgagcttagccagcaaaggcccttcaagtgtgtggatgtggagcagagcaaacaaaaggcctgaaatgcaaatgcgcctcgccagaatcaaaaccattcccatacccccattcaccccattcgcggcccattcaaatgggtaatagcgttcacattcggctcataaattgttttagccggctatttcgattcgaaatacactgagcgaaaccaaaagctgagaacttaactgcaccccatctggtatacaaacctcatatgcttatgagatttacaatccaaagtatcttaccatatctcacataaattcataacgattggactaatattatagatattatatgtacacaatcccattcagtgatactgattgatacttcttttttgtctaagtgcactcatttactgttctgctcactttgatttcaatctactctgccaccgaagtcctcccttctccgctttgttgtttcgtgtctcctttgagaaaaaatgttattatcttgtgattacccatataagtgaaggagcaacatatggggtcccgtctgtctatgtctatgtctatccatctgcgccccagacactataattttattagcattttcatttgctccacttggggagggggggaactgagtttttgggaatggcaatgaaagtggatgtggaaacggggaagcgtgttgggttcgggccaccgagaaccgtttgtctagacccccgataccatgtatgtacggcatacagtttcgtgtaatttgttgatatcggttgcccggttgccacacaaaacctgcaacatgggatcaagcccaaacccaaacccacacccaaacttgagcgaccacctctga

SEQ ID NO: 3755 - DNA, 971 bp, DROSOPHILA
gaaaggcgggcgctggcaagggtcgttcgccaacaccgacacccaatcgggatggcggggcaacggctggtgctggcagtggtggaggcggtggtggtggtggtggtggtgttgcagcggcacccacagcaactggcggcaccactggcgttggtagatccacactacatgccaacaaaacgatactgaaaacggtatccgtgttccttgccagcggcaagcgcaactcgagcaaccaacagtcgaaggccgccgcggctgctttgcagaacaaacggcaacagcggcaacggaggatggatgagttgagcggcaaagtgaatcccaagctgttggacagcctgcgaaagaagacgcggtttacgaaggacgagctggatgcgttgtgccgcatctatcgcaagctggtatcaaattgtcaatatgcggccaagacgctggcctccagctcctcgagcgcagctattgccaagccacatgctgccgtggagggcatcgatcgcattgtgttccgcgagctgttgcacagcactttcgacatcgtcaccgaggagatcctgatggagcgcatcttctgcagctgggacaaggcccacgagggtttgccccttcgcctcgagggctggctcattggactttcaacattcctgcgcggcacgccggcggaacgggcggctttttgcttccgggtttacgacctgaacacggatggcttcatcaccaaggatgaaatgtttacgctgctgcgaaattgcctgataaaacaaccgcaggacgaagatcccgacgagggcgtcaaggatctggtggagattgtgctcaagaagttcgacctggacaaggacggcaaggtctccctggaggattttatgggcacggtcaccgcggaaccattgctaatcgaggcatttggccagtgtctgcccacagatagcgctgtggtttccttcttctccacgctgcaggtgtga

SEQ ID NO: 3756 - protein, 224 aa, DROSOPHILA
MDELSGKVNPKLLDSLRKKTRFTKDELDALCRIYRKLVSNCQYAAKTLASSSSSAAIAKPHAAVEGIDRIVFRELLHSTFDIVTEEILMERIFCSWDKAHEGLPLRLEGWLIGLSTFLRGTPAERAAFCFRVYDLNTDGFITKDEMFTLLRNCLIKQPQDEDPDEGVKDLVEIVLKKFDLDKDGKVSLEDFMGTVTAEPLLIEAFGQCLPTDSAVVSFFSTLQV

SEQ ID NO: 3757 - DNA, 7180 bp, DROSOPHILA
tcatcaaaattccaacccaccggatgttctccaattctccatttctccaatttgattaacaattttaaaaagcgagaacgagggagagagatgactaagagagagagagagagagagagagaacaataaatcatgtagtaaatgtggtgtaaagacaaaatgtattataataaaaaaatatatgcttttggcttaaacacgggtgacataagttagacataagaattattgcatttaattacacgatcaattcgaatcctattttaaaatattacataataaccgtataataagattaattaacaagaaaaagaactgcaacgattattccgtctgttccacgcaatcgcctccatgcctttcctctaggatttgtcttggctttctatttcatttcatttagtatcgatcgtattcaccttttgatatatattttttttacttttcggcagagaaagtgctgctaagtctgatgattttctgcggtttccaaatatcttaatacacatatacagacaataaaaaaaaattcgcgcttacaattaaacggaacaaaaacaagacaaacatataaagtacacactattacataagaacaaataataatccgcagttttgctgatcgatcgatcgttctaaggtttccgttcctctggattgcaaattggataattgggttatcgtcgtgtggtatttatatgtggtgagggcattccaaaaacttatgtttgatggtggtatttgtgtttacgttttctatcaacttgttaaactctaaagaacgacgagcatcgaagtctgtttaatgccagatcaaggccaaagcaatttctcgtcaaatttcgcattgcatgtgcacttactataaccatttaaattgcgcttgcatctatgcttttatctctgctatctgtattttatcggttttgtttgtttgtttgtttgtgtttctattctgtttgtttctattttgctcttccatccgttccattttttttttgttactgtggtctatatatctgctatgatctgttgcgatcgttgctccaatccgttttgttatcagctactgatggctaaactaagagtttttaaatcttgtttttctttctgcttacattagtgtatatatatatatatattatgtatatatttatatgtatctgcgtgtgtgcgctgatcatcacacgccatcatcgaatcactttctatcttaaaatccaattatcatttatcaattatgtatatatatatatagatatatatatatatatattgttgctttttgttccatcgccaactgaaggggtatggtgaaagtataagtgagtgtgtttgtttggggaaattgggtggcaggaaaatggattctcgaagcatttgtattaggctgttgtcagtgttagtgttagcggtagttccgtaggctggcggtccaaccgatattataattccatgtccctggcctcatcctcactgtagtcggacatgctcgactcgctgtcgctgctctcccgctcctgctgcgccgcccgcaacgcgtcctcggtggcatagcgctgcacatagtcggccaccttgcgatgatactcctccggctcgtgcaggtacaatgcggccgcatcccgattgagcggatcgaccggattgggatatgtgagcagctgcggcaagaacgattcaaatatgttcgatagatcgtacaacgccgtccaggcctgattgataacatccaggcacaccgtacccgaggattcgtcaatgttcggatggtagatcttgttcacaaaaccaatgctcggtgacttgaagggatagttgtcgggcaggtagacgcgcaccttccacacgccgccctcgtagggcgtctccgttggaccgaagaacttgacgtggaactcgttgaggcctcccaggatggtcacctcgtgctttgattcgatcagcttgatcacatcgttgtccatgcgtcgctttccggcactgggcgaggacattttgttggtttatttgggattgtagttgcctggcttttgatttgattggtttggtttgatttgatttggttttggagtggtcgtctcctcgttgtttttcactaaggctaaggcggtgttatctttgttatctataagttgtatgcttaatgttgttcctttgaaatattgctattgagttacatccgctatccgcttccggttgcccagctgctgctccgccagccacgaactgctccgcattcgtcaactctcactggcaccgtccagagcaaaacgggagctgcctgcaatggcaattaatggacacaaggataagcaaggatattcaaattagagataggtcaggtggtgtcatctatagcatagagacatcaacttaaggaagtattgggatgttacttgaatacctatttacaattttgctttctaagtttatagtttttcagacgttatggagttaaaaatatagataggatatttttaaggaataaatatattaaattttaaagtgttcctaacatttctaattttatccttttttataagatgttctctaaaaatgcacatttaattactggtaattttatcacgcaaaagtttaacttagccaattgggactgtggcgccaagtcaggggatatgatctggaggaggtcgagttaccttctgagttatctatgtcccgtatatatatttatattcatggttatgtaggtcaccagcgaatctcttgctctcgcacacatacatagagaacatgcacatgcatacttggcctaaatgaggaaactatgtcagcaatctgtgacgtcgtcgcccaaatccacccactaccactcccgctttctctctccagctctctcactctcattgccatttgcaaaaatcgccgtccttcgaaacggatttcagcggacttttgctgcatactttcgggataccgttatgctctattcccctcccctccacagactctttcatcctttctctcaccactcacttgctcttggcgatttcgtttcaatttcaattccgtttcccgtttcggtgggtgagggcttttgtgctagttggttggttgggtggctgttgttttcaaacaagctcagctgtttaatgttgttgctcaaaagtcacggagcactgccagagagagagagagagagagccagaaagagagtagaagaggggcagccccaccgcaatcttgaaatcaacaaatgtacagtggggatgtgagaaacatgagcagatcgatcagcaacgtaaatcaaacgaacgttacggaattatgaaaactgttacacaaatttcaggaaaaataaaattttcaaattataatatattctttctgaatatatcgctttaccccactgtgccccattctatggctctccctctctcttcaccactcttctacgctttgggatgagctaattctgctgttactgctgttactctcttgtactttgtcaagtgtttgtatgtgattgtatgtttctgtgtgtgtgtgtgtgtgtgtgtgcgctggctcccctatcgccccctatctctttttttccttatggccaccacatatcaaaaatctttccgtttctgtctttctgtcacggtttggcttcgttagtttaacaaattgtgaaattctctttcgatttctgtgtggagaagcattactgtgcctgttgtttttgctttttattggccttactgtacgcaataagcgaagtaatactgtctctcgtcgctgtcgctgttgttgcctttgcattgcattgcttttgtgcaagactcttgagtggaagtggaagtgtgcgtgtgtacttgtgatgccaccacatggaagatcaccaagcaaccaagtcagcagcagcaacatcaataataaacaaacaaaataataaaagtcagctgcaatttgatgcttttgttgttgtctcttggaggtggaattcttttcactctttatgaatgtcttcatttataatatcaccattggcatcaccgttaaataatcacacacttattaaatatttaaatttaaactttttgcaaatatacctatataagacggatttttgtgactttgttatttacttgcaactattgttgtggtttttggtgatgatgtttttagttgttgctggccctccgtctcccctatccacatatatcagcctacatatgtgtgtgttttcgttttcgctcgttttgttgtctacttcaactagttactgaaaattaactggcaacagagtttcgagcccccaaagcagaaagcagaaagcagcgcacgttggagctcacgagcatctgacggcgacagcgacgccagcataaagcagagagcgacaatcgggagagcaagcgcaaaagagagaaggttggtgggggctgacgggtggaagaagagggacgagggagagagagattgctgagtgcagtacacgggaaaaactaaactgcgattcaatttcaaattagaaatatatttgcgtatggcagctccaaacacttaatgagtacttaaataaaggcaatataattataaaaaagtaataaaatagttaccaaattcctcatataaacatattgaaaacggtgaaatagaaacaaaatgtagtctgccgaatatattgcatacttcaaggcaaaaccagatggtaaatggaataaatttgttagcttctttacgttaaatttttaacttcttatgtggctcttttttcttagtgtaatggacccccttcaaaggaaaatcataataacaaagcgatgagcaacaacaaattggacgaagagagcccctaaagtaaagcaaagcaaagcaaagaaaagctataatcaaggacagcgacagctgtgaaatgcagcaaaggcaaagcaaagccagaaaaacaagaagctagagaaagaaatgaaacgggaaatggtaataggagggggagtgggctgaaagggtagagagacgggagaggctaaaaagccgaagtggcgatgcccttcaaaattgcacacatgtcactgccttagtgtgtgcgtgtggagcctagcaacaaaatatatacaaatacacatgccaaaagcaaatgaaggaggagatttaacgaggtcaaatgcaacggttaagcgaaaggttcgaaagcaaactcaaaatcaaagtcaaaaattaggaagacgtcttagtggatttcgtttttcgtgtttttgcaacctccccccacacatgcataatgggtcattgactgcacatgtgtgtgtgtgtacgcttgtgtgggggaggggcagaaaatggtagcaaattgttgttgatgtaaaagcattcaatttattactcagctttaaagcgcacatttaattgttcgtgctgataagacttttgaaacgcaaaacagggggagaatcgaaaacacaacgcaataagcaggccaaaagcaaagtgcgtagttttcgggtaggtggggtagggtggtgtgcaaaagggatggcaatagcacaacaaagaaaatattgcaactaagctaacgggggaagttatagagatccacatgtatatgtatatgtacaaatgcacgttctcagcttagggctcccgactaacggcgaattgctggaaacagaggtaaatatgtatgtggcgattggaagtttgattttgaattcaaggcagcagaatgcgaaattagagagagagggcgatggggattgcgggcgccaaagagagatggaaaacattcacagctgtgcgggggtcaaactgctattgttgttgttgttcgtctatggctgatgatgttgttgtcgcactctcccacacacacacacactcgcaaatatccgggatatattttaaatataaagtaattctatttttcatcaaacaattatgcatacacacacatattctgtacctttttattttgatttctctcggtgtgtgtatatttgcagttgcctcccgttttagttgtattgttgttattgttgctcgtgggtggtgttattgtggactgacggtcgccgtcgattcttacgcttcgatacttctccacatttccgtttaatcaccgtgattccctgtgcattttcctagatacttcgtgtctaattacttaattaattttgttttgttttccggaatatgaaagacttggaaaatttgtagtgtgaccagcgcctgcagagtgtgaccattgatgaccgttaaaatataccgcaagattctcaaaatataccactgaacaaaagtggttcaaagcttcaatggccacaagtcgagtttcaaacctaaattattctgcgtacaattttcaaaaaaaatcagctttcagaatttgaaatttaaactcgttgaatgtatacttgaatttttgcatttattattttcatctcttacaattgtaatttcgttccgttacattttgaatgcgtttattaaaacttgtaatttgtttggttttctgtatttaggatctctatttcgtgttaaaaaatgagaggataacaatcttttaaattagctctatttgcttgacgtaaaacgtgtttgtttttgttaacgtagtacttttaaacatcaattgtttttattgcagcttcgtttactctttgccttattgtttttatttatttcttttatttttcttgcaaataccgagagtgttatttaaattcaaaatcgaaaggtacaattcgtggctaatattggttttagtttctgatttagtttagtttttaactgtttgtaaatactcctattcgttatgaaacttggcaaattaaattcgttcatgaatcagcgcagcttgtctcaattttaatattaatttaaaaattagatccatacaggggtttttaaatagatcttttaatattatgctcatgcgttttgattaaaattggtttcttaaacaatataacaatgggaatctctaaaacttaaatcaaattggatcgcaatggttttaaggggggaaaccacaatagaaatttatggcaaaatgttgaattttataattacgttaacttttacttcaattcaggctgaggcgaattttcaattttttcctaagctataggcagtgttttctaaaccacttttcgttaactgaagggggtgaaaacttaaaagggtattgcttttttaaagtggaatgatatcaagatttctatactacgtt

SEQ ID NO: 3758 - DNA, 1553 bp, DROSOPHILA
caggcgctggtcacactacaaattttccaagtctttcatattccggaaaacaaaacaaaattaattaagtaattagacacgaagtatctaggaaaatgcacagggaatcacggtgattaaacggaaatgtggagaagtatcgaagcgtaagaatcgacggcgaccgtcagtccacaataacaccacccacgagcaacaataacaacaatacaactaaaacgggaggcaactgcaaatatacacacaccgagagaaatcaaaataaaaaggcagctcccgttttgctctggacggtgccagtgagagttgacgaatgcggagcagttcgtggctggcggagcagcagctgggcaaccggaagcggatagcggatgtaactcaatagcaatatttcaaaggaacaacattaagcatacaacttatagataacaaagataacaccgccttagccttagtgaaaaacaacgaggagacgaccactccaaaaccaaatcaaatcaaaccaaaccaatcaaatcaaaagccaggcaactacaatcccaaataaaccaacaaaatgtcctcgcccagtgccggaaagcgacgcatggacaacgatgtgatcaagctgatcgaatcaaagcacgaggtgaccatcctgggaggcctcaacgagttccacgtcaagttcttcggtccaacggagacgccctacgagggcggcgtgtggaaggtgcgcgtctacctgcccgacaactatcccttcaagtcaccgagcattggttttgtgaacaagatctaccatccgaacattgacgaatcctcgggtacggtgtgcctggatgttatcaatcaggcctggacggcgttgtacgatctatcgaacatatttgaatcgttcttgccgcagctgctcacatatcccaatccggtcgatccgctcaatcgggatgcggccgcattgtacctgcacgagccggaggagtatcatcgcaaggtggccgactatgtgcagcgctatgccaccgaggacgcgttgcgggcggcgcagcaggagcgggagagcagcgacagcgagtcgagcatgtccgactacagtgaggatgaggccagggacatggaattataatatcggttggaccgccagcctacggaactaccgctaacactaacactgacaacagcctaatacaaatgcttcgagaatccattttcctgccacccaatttccccaaacaaacacactcacttatactttcaccataccccttcagttggcgatggaacaaaaagcaacaatatatatatatatatatctatatatatatatacataattgataaatgataattggattttaagatagaaagtgattcgatgatggcgtgtgatgatcagcgcacacacgcagatacatataaatatatacataatatatatatatatatacactaatgtaagcagaaagaaaaacaagatttaaaaactcttagtttagccatcagtagctgataacaaaacggattggagcaacgatcgcaacagatcatagcagatatatagaccacagtaac

SEQ ID NO: 3759 - protein, 183 aa, DROSOPHILA
MSSPSAGKRRMDNDVIKLIESKHEVTILGGLNEFHVKFFGPTETPYEGGVWKVRVYLPDNYPFKSPSIGFVNKIYHPNIDESSGTVCLDVINQAWTALYDLSNIFESFLPQLLTYPNPVDPLNRDAAALYLHEPEEYHRKVADYVQRYATEDALRAAQQERESSDSESSMSDYSEDEARDMEL

SEQ ID NO: 3760 - DNA, 7116 bp, DROSOPHILA
gccacagtgtgttcgtgtcttttagtgagtgagaaatgcaaatggttgtcctaactttcaatgctcttgcatagttaattattttcaatttccagcctccttagcctccaattaataagtatttgagctttaacaattgtcaatgatttcctgttcggcttagttctccatctcatagattatataaacaaatttaacattatatgctcgttacattcgaatcgatttggattttgctagctgcaaatactgcgatcatacatcgttaatatatcaattgtttacttgtagattgcaattaacgtttcattcgcattcgccatgaatgtatattttcattataggtgtataattaggctataaatattatattcctcgaaagatttcattctttcttatgcttccatcttcttttgttttgtcaaaattttgaattccaaacaaatgggcaattggaactataaaaatttaaaagtgaggctaatctctgactctgcttctggctaaaattgtccctggctaaattctaaattagtgaaatcatcctaaacaggggataatttagtgttagactatatgggctataggctatagcttcatttctttcgcctagatcgctagattgggttatcatctctatgaggttgcatctactccacatgcaactagtacatttgtcctgcttacagactatgttcataagatatatgtagagtcgcgtgtgtgctccctttcgatccggcatggatcgaaatgcattcttttcaatatttgacttttttttttgacgagggctatcctagaccgaaacgctaaaacaaacgcataacaaatgcactgatcaaacttgaaattatttgagattttaaggtttggctcgctttcaacggctcgcctcactagcaacgctttacaattttggtttccctccgtgttttttgttctttttttttttggtttgggcttttgttgttgttttggtatacgtatccaataatccttaggccttgaacagctgcggaaattcgttcgctatttcccgcaccagctgctgatcggaggcactgcactcggtctcctcgcagaagatgcgcgtgaagatcttcatgagatcatgcttgcgatgctggtgctcctgatagttcgtattgcgcaggatgcgtcggcaaagctccaagtagcatggtcgcgtctgaaaccaaattaaagtgtacttagtagggagcactatagttgcattgacttttggcggactcaccgtactgccggcatccaaatcggatagctggcgaaccactatatcgataagcaccttgatgtcattcgtgtagaacatgcccgccgtatccggatggctgaatatgtcgataaacattcgcagcaccgtgttcatatgctcgttgggatgcttgagcaagcgtgtgggatcatctggttagaattcaagaagaaatcgatccaatttacatgcttatgttttgtagttaattaaaaagtatgcttaaaattgaaaacttaccctctcgattgagcaaaagtagcaacttctccgtaaacactttggcggatggcagattctgcataccttcgatgatgacattataggtatgttcgctaaattgctgattgaaggccaagatcaaggcaatgaccatgtccaccaagacctccggattattgccctcgacgatttccagtaggaagctggcaaaatgtacgcccaaataatctataatagacatcaaagtataagcatgcaactattggttaataagttaagatagcttttaccctgatgattaaccggcatgggctgtccaagtgagaagataatagtgagcatcttgaccagctgcttgaagcgatccagattggagaagtgcgtcttcatgtcctcgacctgaaagttaagtatgttaagttctaaacttagaaaaccattaggtggcacaatctgagctcctgcttacaatctccaatggcagcaccgaggtcagcaatatgtccacaatgatatagtccagatggcaagcggccgtaaaggtcttaagcagcagtcgcttgatggaccagcgcgtctccatctgatagtactgcaccagattgataaacatctggtactgatcgcaggacatctcgtagcaactgatgctctcatcagcattgatctgtaaggagtgatataagtttaagatttaaagttacaaaaaaaaaactagttcctaccaaaatctcaacaagctcctcaaggaactgaatgatgtcctcctcatcctcgtagagcatccaagtgcgttgctccgtatcgttcttgcagtccgccagctgggcaaagagatactgcaagcgcttggcgtcgtgcgtaatgcccagcagctccttgggcgtggccactttgccagtgacatgaacggccaccgcctccaggtacggattgatggcaccgttgtacagctgctccaggctggtcagcaccacgcgcaatgcttcacaggagagatcgaagctgaggttggtgttccgccgcagggcgtccacaatctgatatacatccgatgactcaaccttcaactggcctcctcctgtggcaccctcctcgattctgcccaggctcaggccgcgctgtcgatgcgacggactgtcgatgctgtccagcgcctggctattatccgcactatctccgttggccgggcaaccgtcgtcactttgcacggcgctggcatcatccgacttgtccggcgcactgtccgcttcctcctgctgcagctcctgatgcagggctgtggcactaccgttggccttgccgttgccgccgttgctgcgcaaagctgaggccgaggcagatgcggaaatggacgccgaggcagtgctcccattttgcggcttatgctgctggctggtgctcatttggctggtctccttgtatgtggtgaccacatcttcgctggtcgtcgtagtggtcgttgtcgtctccgagggctccgacgtaatgctattgtcctgcgcgacatcaccgccggtggccgctttgctcgttgatgccgcagtgggtgtggccgatgctgccgatggcgagggagctggtgctggcggtgctgggagcggctgttgctgctgcggcgtctggatggtgcagctgctgccctggaactgcatgctgcccatgctgggcgattcgatcatgccctgattctggggcaggccgcacgatgagcccaccgctggacttgacatgctcttcttgctcatgtccaaacgctgggagccaacgctgccgccgctgggcggcggactgtgctgcctgtgctgggaatgaagctgcgtctgggattgggtgggatggggatgcgagtgccggtggctacccttgtcactgtagctgtgtgaataggaaagcgaggagtcaccgtcgcgctcggaactctcctgcaagataggaggggagataggtcatcaataacattcatttggccatacgagtagttagaatctacccaccgcatacagacgctccatggtgtgcttcttctcgcgcagcctgtccagcagttcgtccttggacatgatgccattgatctcatggtccgtgcacttctccagcgattctatcgaggagttcagaaagctgatgagaaagtcgtgctccacctgtcaaaatttgcatatgtttagtaatccttttagccactagtgagcgatgtactccaccttaatcttcattacgtaattggagggcacaaagccaatgttgcctttcatgctgacaacctgccaccaattgcgctggcgggcggacgtctggtaaaggatgaagtactcgccctcatcgaagctgatggtcttcggatagaccgcctggaagtcgtacagagccttgagcatctcgatgccgatgcctaaaccgatgtcgttgccacctcctccactgggaacacttgctcctccaccagggccacctcctgccgctgcctctgctaaaataaaaagaattaaatcgaaacggattgattttaagtgattttcaaagctggaaaatttgaaaaactttaagggcgtcgacactcacacaagcacacggggaaaaactgcagcaggcgctaaaaaaaaaagttaagttcactgccgagggccaaactgcggactgacggcactggctacactcttattgatgctccaaaatgttttttcgtgccactaaactggactgcagcgaactgctgagttccgcaggattcgcacggagccgtcaaagaggatactcctcgtgctggtggaatttttaatggagcacccccacacaggaagaggaaaatgcaattttcatatttcacttgcgctcgctcactcgctcgctcttcctgcctttcccgtttctgctttgtgcgctgcttttaggtcctgcaacaacgccttgcgcttttgatccttttcagcttacattgttttccccacaaacacaaacacgccagagagagccacgtggcttctgcgctctctacgctccacgctacactgaaaaaagcacaaagtgcattcaatttatacactattttgaacagtttagagagaaaggtacgtgttcaagtccaacttctgtcctaagaacttttacatatatttaaaaacaaatttagattttttttaaatttaaattttctttgggtgcctattttattgctttgtgtgaaaatctcaacacgagcaaatccgtttcaaaacacagcgccccctccactgccccgcccactcgtgctttctctctccacgcgcgcgcatttccctctctctctctctctctatctttctctcacacttttttctcgcaggatatccgtgcaagagtgaaccggttcataaataagccagtgaatagcggtacaaataacagtaatatttgtggcccacatttgtggttttaatataatgcatgcattaaatcttcacaaatatctttatgtatattaatttttaataaagctacaatactaatggacgttttcaaagttaggcttttcgcactttttcaaatattttgcggttaataaaacctaaaatgaactagatcatttgctttaagtacttcaaaatcaactacttttcaaaatttactataaacaagtgttgtgtagttacaaattacaaaggatagtaatagatgtacaggactgttctaaagaaaaccttgtatttcctataggactgccccaaaagaaatcttattggacatccaataggaccgaaggcccctctgtcgccgatgattcacctggtgaatgctctcgaatgcaaagtgattttcggaactgcagggctgctgtactcactcacgcacacaaggacacgcggtgaatgggtgtaatgtatggaaatgcgacaatgggcacaacacaaaaaggatgcaatgagaatgtgccccgctcacttacccatgttgttgggcgcaccttttaccgtaattgcgtttgtcggttgctgttgttgtagtcgctattgctgctgttgtcttcttcctgttgtttcctgtctcagacgtcagctatccttcgtcctgcgccctcccgcacatccgctgttggcgtccaggagccaaggacgtttgcatatgtgtgtgtgtgtgtgtggatgtgtgtgctttatgttgccttccgacgatgggcgtgtttgctgctcctctcttttgtgctttcgatgtccttttgaaggcgacacagctagttccgctgctccatcacttgttgttgttccctttggccgcagcacgcgaatgagaagctcacttgattaattccaatgatgcgagatgcgaaatgcaatgggcgatgcgagaagggtgatgctgctcctctcctggcaaaatgcgatgcacttgttttatgtctcttttgctctcctgtctatttgtctgtcgccggggaggggcgatggtcggaaagggaattcttgtggggggcggtgatcactcgataaggcgaaactttagcaacaagaagtgttgcaattgtattaacattttcttgaatgttaacagtttaaaaaccgcactcactctttggcaattgtttagttttcaaaatttatttaaataaatacttgttatgcgctttaaagagagagcactgtatctaaaaagtatgagcgacaaattgttgttgcacagatatacatatgtgtttacaacaacaacaataacaaactattccacacccaaaaaaaagccgcaagctaacacacacgcgcacaagggttaacggcgtttagagtttgtttatatattgttttaaacaagccacgaataacactaaccaaaatttgagcacatccaagtggcgttaactaagttttcaccattttaccaaacaaagacagcgggatcaacaaacaaaaattatccaatcacttgtttttatttcctatttgctcttctccttttaatgtagaggtggggcatgccggcctgttatcgttatcgatatcagatatatgtgggctgccaacttggcgctagaatttaaatgttgaaaaaaagctcgatctctttcggttttcaggaaaacgtttctttatttgcatataatatttaactcgtttgtgggggacagtacgtgtagtgatttatataaaaatactgattttaagggcaagctaattcttgggatgcgttataaaaatgtttatttaaatgctagcaagtttttttttctggttaaacgttttgcctgtggcacacatatgtagtatatatattgtttttattttttcattttgattagttataaccgcaatttgctattttagactacaattcacaggggaaacccctttgtaataacgttcactaggcgtaaatagtttataagtacagtttttgtttgattcagaaggcatcatataaaaagttcctaagtcctggacgacccaattcgattaagtttaaagattcaacaatattttccgtttatttgcttgcttgtggtcacaataaatcataatcgtatcataatggggaaacaatcacatacacaataaattataatagcacagtgttgtttttttcgttatatgtgtacttatcatatctagtttaataacagcaggccacttttaaacaaatgtgta

SEQ ID NO: 3761 - DNA, 3188 bp, DROSOPHILA
tgctctctctttaaagcgcataacaagtatttatttaaataaattttgaaaactaaacaattgccaaagagtgagtgcggtttttaaactgttaacattcaagaaaatgttaatacaattgcaacacttcttgttgctaaagtttcgccttatcgagtgatcaccgccccccacaagaattccctttccgaccatcgcccctccccggcgacagacaaatagacaggagagcaaaagagacataaaacaagtgcatcgcattttgccaggagaggagcagcatcacccttctcgcatcgcccattgcatttcgcatctcgcatcattggaattaatcaagtgagcttctcattcgcgtgctgcggccaaagggaacaacaacaagtgatggagcagcggaactagctgtgtcgccttcaaaaggacatcgaaagcacaaaagagaggagcagcaaacacgcccatcgtcggaaggcaacataaagcacacacatccacacacacacacacacatatgcaaacgtccttggctcctggacgccaacagcggatgtgcgggagggcgcaggacgaaggatagctgacgtctgagacaggaaacaacaggaagaagacaacagcagcaatagcgactacaacaacagcaaccgacaaacgcaattacggtaaaaggtgcgcccaacaacatggcagaggcagcggcaggaggtggccctggtggaggagcaagtgttcccagtggaggaggtggcaacgacatcggtttaggcatcggcatcgagatgctcaaggctctgtacgacttccaggcggtctatccgaagaccatcagcttcgatgagggcgagtacttcatcctttaccagacgtccgcccgccagcgcaattggtggcaggttgtcagcatgaaaggcaacattggctttgtgccctccaattacgtaatgaagattaaggtggagcacgactttctcatcagctttctgaactcctcgatagaatcgctggagaagtgcacggaccatgagatcaatggcatcatgtccaaggacgaactgctggacaggctgcgcgagaagaagcacaccatggagcgtctgtatgcggagagttccgagcgcgacggtgactcctcgctttcctattcacacagctacagtgacaagggtagccaccggcactcgcatccccatcccacccaatcccagacgcagcttcattcccagcacaggcagcacagtccgccgcccagcggcggcagcgttggctcccagcgtttggacatgagcaagaagagcatgtcaagtccagcggtgggctcatcgtgcggcctgccccagaatcagggcatgatcgaatcgcccagcatgggcagcatgcagttccagggcagcagctgcaccatccagacgccgcagcagcaacagccgctcccagcaccgccagcaccagctccctcgccatcggcagcatcggccacacccactgcggcatcaacgagcaaagcggccaccggcggtgatgtcgcgcaggacaatagcattacgtcggagccctcggagacgacaacgaccactacgacgaccagcgaagatgtggtcaccacatacaaggagaccagccaaatgagcaccagccagcagcataagccgcaaaatgggagcactgcctcggcgtccatttccgcatctgcctcggcctcagctttgcgcagcaacggcggcaacggcaaggccaacggtagtgccacagccctgcatcaggagctgcagcaggaggaagcggacagtgcgccggacaagtcggatgatgccagcgccgtgcaaagtgacgacggttgcccggccaacggagatagtgcggataatagccaggcgctggacagcatcgacagtccgtcgcatcgacagcgcggcctgagcctgggcagaatcgaggagggtgccacaggaggaggccagttgaaggttgagtcatcggatgtatatcagattgtggacgccctgcggcggaacaccaacctcagcttcgatctctcctgtgaagcattgcgcgtggtgctgaccagcctggagcagctgtacaacggtgccatcaatccgtacctggaggcggtggccgttcatgtcactggcaaagtggccacgcccaaggagctgctgggcattacgcacgacgccaagcgcttgcagtatctctttgcccagctggcggactgcaagaacgatacggagcaacgcacttggatgctctacgaggatgaggaggacatcattcagttccttgaggagcttgttgagattttgatcaatgctgatgagagcatcagttgctacgagatgtcctgcgatcagtaccagatgtttatcaatctggtgcagtactatcagatggagacgcgctggtccatcaagcgactgctgcttaagacctttacggccgcttgccatctggactatatcattgtggacatattgctgacctcggtgctgccattggagattgtcgaggacatgaagacgcacttctccaatctggatcgcttcaagcagctggtcaagatgctcactattatcttctcacttggacagcccatgccggttaatcatcaggattatttgggcgtacattttgccagcttcctactggaaatcgtcgagggcaataatccggaggtcttggtggacatggtcattgccttgatcttggccttcaatcagcaatttagcgaacatacctataatgtcatcatcgaaggtatgcagaatctgccatccgccaaagtgtttacggagaagttgctacttttgctcaatcgagaggatgatcccacacgcttgctcaagcatcccaacgagcatatgaacacggtgctgcgaatgtttatcgacatattcagccatccggatacggcgggcatgttctacacgaatgacatcaaggtgcttatcgatatagtggttcgccagctatccgatttggatgccggcagtacgacgcgaccatgctacttggagctttgccgacgcatcctgcgcaatacgaactatcaggagcaccagcatcgcaagcatgatctcatgaagatcttcacgcgcatcttctgcgaggagaccgagtgcagtgcctccgatcagcagctggtgcgggaaatagcgaacgaatttccgcagctgttcaaggcctaa

SEQ ID NO: 3762 - protein, 801 aa, DROSOPHILA
MLKALYDFQAVYPKTISFDEGEYFILYQTSARQRNWWQVVSMKGNIGFVPSNYVMKIKVEHDFLISFLNSSIESLEKCTDHEINGIMSKDELLDRLREKKHTMERLYAESSERDGDSSLSYSHSYSDKGSHRHSHPHPTQSQTQLHSQHRQHSPPPSGGSVGSQRLDMSKKSMSSPAVGSSCGLPQNQGMIESPSMGSMQFQGSSCTIQTPQQQQPLPAPPAPAPSPSAASATPTAASTSKAATGGDVAQDNSITSEPSETTTTTTTTSEDVVTTYKETSQMSTSQQHKPQNGSTASASISASASASALRSNGGNGKANGSATALHQELQQEEADSAPDKSDDASAVQSDDGCPANGDSADNSQALDSIDSPSHRQRGLSLGRIEEGATGGGQLKVESSDVYQIVDALRRNTNLSFDLSCEALRVVLTSLEQLYNGAINPYLEAVAVHVTGKVATPKELLGITHDAKRLQYLFAQLADCKNDTEQRTWMLYEDEEDIIQFLEELVEILINADESISCYEMSCDQYQMFINLVQYYQMETRWSIKRLLLKTFTAACHLDYIIVDILLTSVLPLEIVEDMKTHFSNLDRFKQLVKMLTIIFSLGQPMPVNHQDYLGVHFASFLLEIVEGNNPEVLVDMVIALILAFNQQFSEHTYNVIIEGMQNLPSAKVFTEKLLLLLNREDDPTRLLKHPNEHMNTVLRMFIDIFSHPDTAGMFYTNDIKVLIDIVVRQLSDLDAGSTTRPCYLELCRRILRNTNYQEHQHRKHDLMKIFTRIFCEETECSASDQQLVREIANEFPQLFKA

SEQ ID NO: 3763 - DNA, 4361 bp, DROSOPHILA
taaaaagttcctaagtcctggacgacccaattcgattaagtttaaagattcaacaatattttccgtttatttgcttgcttgtggtcacaataaatcataatcgtatcataatggggaaacaatcacatacacaataaattataatagcacagtgttgtttttttcgttatatgtgtacttatcatatctagtttaataacagcaggccacttttaaacaaatgtgtatttgcgtgtgtatgtgtgtgtgtgtgtgtaaatatatctattaaaaaaaataaacaacttttcattgtacttgcatttataagaataggaatagtataataaatatatatgatataaacgaaaacaaacagaaatacacttttaaccttgcctcgttttgaactatatgtattcatatttttgtaggtctcgtggaacggcacttagttgagatttatgttgccgttgtagttcttgacgctggtatatagttggtttagcatttagctctctatataactatggcaaatcggctgcgatcgacggttcgaggaactcgaagttccatcgaaacgatgacgagagcatggtgacttcctggaggatatcgtggctggcggaggatcctacggcacgtggatcctcatgtgccccataaccattccttaatccatcctctccttctccgtcgcctcctccttcctggtctgcttgactttcatttccaaaaggtcacgcacggccgcaaaacatttgtccacaattaggatcttggtgcacgctaattgttaatccgtttgaaattatgctattaaaaataatattgataaatgttgctccgtatccgtaacgtatccattccgtttcgttttgccgttgccttcgccttcgcctttgcctttgccctcaacatatatgccgcactccatccgaacggacccacaaaacccgaatcacatgcgccggccaccggcggccagctgcgctgaacgcgtccgcagcgcgctcctcgatcatttctcctcgcagcagccgttcttggctaactgcttctgcaaggccggcggaatgaagtctttcgtcttcgtcttggaatgatagtcttgtccgagcagcgctggctccacctgcttgccctcctggatgccttggatgcgcttcagcaaatcgtagttgatgcgctcgctcaccacggaatcctgcctatttaatacaatattggattagttcagttgcagggttgaacatctagatatagatataacttacttgtaatccgggtggctaagcacctgttcgcgcatccaggtggccgtggtgattagctcgccggcggcacgcttctggataaagcgaagatactgttcaatggtgcaatgcgtatcggtgtccacctccatggactgcaaatagctgcggatcaatggcaccagacccggaaaaacgttgggctgttggtagattggtaagatgacataagtttctactttactttatgctggacattgtttcactcacctttccattgaagatctcattgatggacagcagctggaacagctcattctcctcgtcatcggtgtcggtgtgatcgctatcggtgccattcgatgatccattggaggagccattagtgccgttagtggtgccacttccgtggccattcatcttggccgaaccgttggtcagaggctgctgctcttcctggtcactgttctcgctgccattcccatttccattcgccagtccattgccattcaaagtggccttgccattcgtctgggcctgggctttagcttgcgcttgagcttgtgcctgcgccttggccgccctctgctcggtggtcttcgaggatttgcggaaccaaaacttctccttgcgacaagcatctcgcttctgggccgtctgcatgttctcgtccaccttgctgatcggcgttaggaagttcagctggtaggagagaatcacacgggtgagcagcaccacaaagcacacgatggccgcattctcgaaatcactgatctgcgcctcgcaaggtcgaaactcgacacgccagccaatggagctgttcggtggcggcggcttgaagcgcatggtctgccaattggtggactgaatgttctcgaaatgatccgtatcctcgttgtcgttttgatgcaccttctcgctgaacagcgacacggtgtcgcgtataaacaaatgggcaacatgctgggccaacagatgatcgataccgccctccaccagacgctgatagaccttctcatcgtatgtgagcggtacatcgttatatttggctccctcgggcgacaaatacgagtcaatcgaatcgtatcgcgacttggctatcctgaacttttgctgatccagcggcgccagtccgcgttcctcttccgtgcggcaatccaccgaggagctaatcacattccatcgacaatccgattcggttagatagcccctgtaaatgggcgaagcggccgtcagagccaacatgatcggacagaggggagccagctgatcgtagaggcgacgcgcctccgtaatgttacaggcctggaaggtgagctgcaagcaacagcagcccatgccgaagcccatggcgtccaggagcaccacatccggttcgccaggcggagcaccctccaccggtagcttcgtctttgtgtccttgaaaactgcaatggcaaagatatagatatagattagttggtcgcacctttaatggtgtattcgtgaatgaaatgcttaccttttagcttgatggacaccttctcgccgcgtcgcttgcgaatgttacgcgtgagtgtcttgaaacgcgggtgacccggaaagatggcctcatccgggaagtagagcgagcgggctgaactgagaggatcctcgggacgcggctgggcaagcggataagtgaaatttggtgcgccgagtcgtgggaaattcgtaatggacataacgcactcgtccttggccagcagctcggtgacctcttcgcgacgatagcgcatattggcctcaaccagattgaagtgtgccatcagaccgccaaagggtttgcccggtgtgccctcaatcatgtaggctccgtattccggacgccacagcgacttgacaccattgggatcggccagttccttctcattgagctgtgccagcagatcctgggcgcgcagcgccacacgtgccaccttctgttcatcgtcgaacttgacaataatgtactccacctcgtcgccccatttcaatatgtcaccctggcgatccttgagtctgtggtacaagttgatgaactgattgacgccatgctcacgcacatgatcagccagcgccttggtctcctcccaggagagtggactgccctcgctcagtagacccattgctgcaaaaagatgtgaaaaaaaaaaaccatttgttttactaacgctcatggaccatggcagtggttatccctatcggcatcctaatccatccctattccttatccctaccccacttttttcttacgaaaccgatccgatgagacgtccggaaaagactactacgacaactgcgccattatcatccggaataatataccattccatctatacatgtccatccctccactttcgtttccatttcaactagcgtacattgtgcaatcgcaatcgcaatcgcaatcgcattcggctgaacatgaaaaactgcaatcgagacaattgcagttggtaatttgcatttgcagtgcaattgcataaacgatatgacggagcaggtcaagaagtcccagcgcgaatttagattcgaatgtttggattgccctatagcaatggcatgcgaaatctaatccatatacgaactggtaaatacctctgctaaaactatatttaataattacaattaagttgcatgcaactatttggaaatagtcaatcctgtatgctttgcatttaattaagttgtcatatttttcttcgatttttttctctctgtgcaaacgcatgcttaataattaattaacatcccgtatccgccgatcgccagtcaatgccctccattggccgcacctcaagtttcagtcgaaagtcggtggaattcaattaatttatctacgttaagttatatggtgtggacgaacacaaaagtgcattcgtgtgcattcttttttttaatttattttttttttgtttgctccttgctcttgacactcgcacaatttacaacatttgagtcaattaattgataaggtgcgacaacggaccaaatattaatcaaataattgataacgtgagtaaatcagcctttgggtttaattccatgtgctccgatcgcacgtatgtatgtatttacgtatttgtgtttttgtaaaagtgtggaaaatatacatttatagtatat

SEQ ID NO: 3764 - DNA, 2154 bp, DROSOPHILA
atgggtctactgagcgagggcagtccactctcctgggaggagaccaaggcgctggctgatcatgtgcgtgagcatggcgtcaatcagttcatcaacttgtaccacagactcaaggatcgccagggtgacatattgaaatggggcgacgaggtggagtacattattgtcaagttcgacgatgaacagaaggtggcacgtgtggcgctgcgcgcccaggatctgctggcacagctcaatgagaaggaactggccgatcccaatggtgtcaagtcgctgtggcgtccggaatacggagcctacatgattgagggcacaccgggcaaaccctttggcggtctgatggcacacttcaatctggttgaggccaatatgcgctatcgtcgcgaagaggtcaccgagctgctggccaaggacgagtgcgttatgtccattacgaatttcccacgactcggcgcaccaaatttcacttatccgcttgcccagccgcgtcccgaggatcctctcagttcagcccgctcgctctacttcccggatgaggccatctttccgggtcacccgcgtttcaagacactcacgcgtaacattcgcaagcgacgcggcgagaaggtgtccatcaagctaaaagttttcaaggacacaaagacgaagctaccggtggagggtgctccgcctggcgaaccggatgtggtgctcctggacgccatgggcttcggcatgggctgctgttgcttgcagctcaccttccaggcctgtaacattacggaggcgcgtcgcctctacgatcagctggctcccctctgtccgatcatgttggctctgacggccgcttcgcccatttacaggggctatctaaccgaatcggattgtcgatggaatgtgattagctcctcggtggattgccgcacggaagaggaacgcggactggcgccgctggatcagcaaaagttcaggatagccaagtcgcgatacgattcgattgactcgtatttgtcgcccgagggagccaaatataacgatgtaccgctcacatacgatgagaaggtctatcagcgtctggtggagggcggtatcgatcatctgttggcccagcatgttgcccatttgtttatacgcgacaccgtgtcgctgttcagcgagaaggtgcatcaaaacgacaacgaggatacggatcatttcgagaacattcagtccaccaattggcagaccatgcgcttcaagccgccgccaccgaacagctccattggctggcgtgtcgagtttcgaccttgcgaggcgcagatcagtgatttcgagaatgcggccatcgtgtgctttgtggtgctgctcacccgtgtgattctctcctaccagctgaacttcctaacgccgatcagcaaggtggacgagaacatgcagacggcccagaagcgagatgcttgtcgcaaggagaagttttggttccgcaaatcctcgaagaccaccgagcagagggcggccaaggcgcaggcacaagctcaagcgcaagctaaagcccaggcccagacgaatggcaaggccactttgaatggcaatggactggcgaatggaaatgggaatggcagcgagaacagtgaccaggaagagcagcagcctctgaccaacggttcggccaagatgaatggccacggaagtggcaccactaacggcactaatggctcctccaatggatcatcgaatggcaccgatagcgatcacaccgacaccgatgacgaggagaatgagctgttccagctgctgtccatcaatgagatcttcaatggaaagcccaacgtttttccgggtctggtgccattgatccgcagctatttgcagtccatggaggtggacaccgatacgcattgcaccattgaacagtatcttcgctttatccagaagcgtgccgccggcgagctaatcaccacggccacctggatgcgcgaacaggtgcttagccacccggattacaagcaggattccgtggtgagcgagcgcatcaactacgatttgctgaagcgcatccaaggcatccaggagggcaagcaggtggagccagcgctgctcggacaagactatcattccaagacgaagacgaaagacttcattccgccggccttgcagaagcagttagccaagaacggctgctgcgaggagaaatga

SEQ ID NO: 3765 - protein, 717 aa, DROSOPHILA
MGLLSEGSPLSWEETKALADHVREHGVNQFINLYHRLKDRQGDILKWGDEVEYIIVKFDDEQKVARVALRAQDLLAQLNEKELADPNGVKSLWRPEYGAYMIEGTPGKPFGGLMAHFNLVEANMRYRREEVTELLAKDECVMSITNFPRLGAPNFTYPLAQPRPEDPLSSARSLYFPDEAIFPGHPRFKTLTRNIRKRRGEKVSIKLKVFKDTKTKLPVEGAPPGEPDVVLLDAMGFGMGCCCLQLTFQACNITEARRLYDQLAPLCPIMLALTAASPIYRGYLTESDCRWNVISSSVDCRTEEERGLAPLDQQKFRIAKSRYDSIDSYLSPEGAKYNDVPLTYDEKVYQRLVEGGIDHLLAQHVAHLFIRDTVSLFSEKVHQNDNEDTDHFENIQSTNWQTMRFKPPPPNSSIGWRVEFRPCEAQISDFENAAIVCFVVLLTRVILSYQLNFLTPISKVDENMQTAQKRDACRKEKFWFRKSSKTTEQRAAKAQAQAQAQAKAQAQTNGKATLNGNGLANGNGNGSENSDQEEQQPLTNGSAKMNGHGSGTTNGTNGSSNGSSNGTDSDHTDTDDEENELFQLLSINEIFNGKPNVFPGLVPLIRSYLQSMEVDTDTHCTIEQYLRFIQKRAAGELITTATWMREQVLSHPDYKQDSVVSERINYDLLKRIQGIQEGKQVEPALLGQDYHSKTKTKDFIPPALQKQLAKNGCCEEK

SEQ ID NO: 3766 - DNA, 3981 bp, DROSOPHILA
tgagcagcatgaggcggagcacaataccacggagctaagcgattggctgaggaaaaactatgcccagaagttcctgctcaactttttggacaaggacggcagtcgttttccctatcaacagataccgctggcaaccaagaattcatccaaggacaagggagccgtagatggcggagaactttgtatgccacaaaacctgggtattgtccagctggcctgtaagttctttccgactcccgtcgagagacagactcaaatgtttgcgcatttaattgagtacatgcacgagactttgaaacgccttaattcgctttcgccggagcagcagctctcactggtggcttcactgcgtgcgctgctcttcgaaaacgccacatcgctgatgaaaatcgtgacggagccgttgaccagcctgctgagcgcatccattgatgcatatgtgagccaacgatttaccacacgcgaaggcgttgccactcgagtgctgaaccttctctgcgagattgtggagcgttccgatttgtacacgcactttggcggcgaacagagattcactccgtttctcagctatctgccgcaactgctgctgaagccaacagtgggtgagagtacattgcgagccatggccacgctctgccgccaactgaatggagtcttcatggccgctctagtccgttctgctcctgagatagtcagtcacttggataagctgcagatcacgggcgatatcgaaggccaagagaagttcgaaaaccaaaagcgtgttcttaacttgttctactatgccagagaattggataaagagggaaaactggagcgttcagttaagcagctggaggagcgggtggagagcaaaggaattgccgattacctaaaggctgtactcggctacaactagtgattgcggacgggaatccgcaatatacacagtcagataattttgtttagcttctaagtttaatgtatacattatattccttctgcttaagacgaactctgttcaggttttctgttttttgggtggcttgggtttgaaacgatccagaacggagcgtggtgccttggtcttggccttgcccttggcacccacctcgtcggctgtgtgctgcttgataacgttcttcttggcctcgcgcacctcggcaataaactcctgtgtggcaaagacttggttatagatggggggctaaaaagtaaaatggtgctagcactcacctttcgcttggcatccttgacgatctgtttgttgcgcgccgccttggcagtgccgccacgtcccttcatcttgtggcgcgatttcatgttgatgcgcggcgccttcaaatggaacagcttcctcttggcatcgatcttctcctgcagcgtgggcgcatccacgccagtgatctcttgcggatccagggtgatcagttcgggcggaatcttctccagcagagcgtgaacctcgtgctcgcgtcgttgcttcgaagtctcatacggattgtcttccatagcatcgaagttgggctctccagagccgggcaccaatagcgattggaagcccttggccgtcgacacaccaagcacatcttcgtacgggcagaaacgcagcccgtggacaaaggcatcgcagcgttggcggatataaggcaaccgggtaccgtcacccgaacctccgccggagagcagatccgagtaggtctccagataggtgccctgcgatagcgccagcatgccacgttgcgacacatccagttcgttggcgggcagacgcagctggaaatgagtcagcggcttgtcgtgcaccagcatccgaatgtcccaaactttcacagccctatccaagccagcggtaaccaaatactggcccttgggttccaccgccagagcagacatggctgtcgaatggcacaggagcttggccagcggctcacgcactttgggcgaccacatggacaccacaccacgtccgccgccaatgcagagtacaccatttcggggattgtgtcgcagcatgcgtatatcgcccagtcccgtgttaaagttacccaccagctcgccaatggagacgtccagccaggaagcatagcccgcactgttgccggcggccaggaggaagtggtagggcaggaagtccaggcgattgacccgattcagccgcttgatgcaatgcagttcggtgccctttttgtcgtagaaatagacccagctcttctgggccaccgcgtacatggtgggcacatgcagccactgaacatcctcgacgctctccatcgcattgaattcgcagtgcagacgcttggtcacccaatcgaaggcggccacatgaccgcgtttgccgccgagcagcaaatgcctgccgttcttggtgtagcgcattcggtaaggaccgaattccatgttcaggttgaagtgcttggccgatgactggatatccacattctcggcaatttgggactgtctaaattcggcggtggtctcgccctcatctgcctgtagctgcccagcggtttcctggagtaggagctctgtgcgggccgcctgctcggtggcgtattcgaggtagacctccttgcgcgtctgctgctccttgaagtgccgcgttttcacacctttcggctgcacttgctcgccacgtgagtacttgtcgaggatctccttgggaatcgggttcttcttgggcctagcttccagctcctcctttgtgggtttggcgggagccttttggggacgcggcttcttcgttttattaatcatactgataaaatcgccagtgaaattctgtcggtttttgctgaacacttttacatgttttagatcgccgtcgcccgtttctgtgtccttttggccgtcgaagtagcgtttgtacggcgtcttagccttcgggcgccctttcggcgttactttcgtcatcttgatgtgtcagcaagatgaaattaacttaaaagctggcttcaaataaagttaatttgaaatttgacaacaacgtgcacgtgctgcttcttcttcttcaaatcagctgtcccggagtgtgaccatgtggcattagcgttgtttaccagagcagctttaaatactaaacaaataccgcatgctaagaaatttaaatattgagcgcgcaattttaaaaatctttaaaatgaaataaacataaaagttgtatattagaagtatgtttattccaaattaaaacttgttcaggaaataaaaaaggtaaacaaaatatataaaaaatacctttaaagactcaaagttccttaagtttgatttggatgcaactatgttaggtttttactcttagatctatgtagatattacatacagctacagcgaaaggatatcaaaacgcattttggccccaaaccgcttgcaaaacgctttcaagatcctttccaaccaaccgaaaagttacagaactacgcataatattgctaaagttagaccttattttggtgtaccactcgttagacgattccgtcagtctctgggaggcgcctccactaaataactccgccacgcaatcaattagtagacacggccatagggcagggtattcggatagtagggcatcaggaacttggccccgaaacgcggctgcgattgcgccgattcgctgctggatgagaacatcgaggtgcaaatctcggcccgatcccgatgcaatcgactgctgctgttcgacgtgctcgtcccggcgatgcccagtcctactcccagacccagactcaagccagctccatgacgacgctcccggcgacgcgatcgaatcagcgaaaagatggccaccaccacggccaccagaaagatcaggcccagaacgcagaacgagatggccagcttggagatggacagacagagcgttccctcgccgggcatcacttgacccctcacatgcggcgcataatcctcgcctgaaatatgaactcactttactattgatcaagtttcgaagtttaaattttagattacaaatctatacttcatagtacacttaattaaata

SEQ ID NO: 3767 - DNA, 1919 bp, DROSOPHILA
aagcagcacgtgcacgttgttgtcaaatttcaaattaactttatttgaagccagcttttaagttaatttcatcttgctgacacatcaagatgacgaaagtaacgccgaaagggcgcccgaaggctaagacgccgtacaaacgctacttcgacggccaaaaggacacagaaacgggcgacggcgatctaaaacatgtaaaagtgttcagcaaaaaccgacagaatttcactggcgattttatcagtatgattaataaaacgaagaagccgcgtccccaaaaggctcccgccaaacccacaaaggaggagctggaagctaggcccaagaagaacccgattcccaaggagatcctcgacaagtactcacgtggcgagcaagtgcagccgaaaggtgtgaaaacgcggcacttcaaggagcagcagacgcgcaaggaggtctacctcgaatacgccaccgagcaggcggcccgcacagagctcctactccaggaaaccgctgggcagctacaggcagatgagggcgagaccaccgccgaatttagacagtcccaaattgccgagaatgtggatatccagtcatcggccaagcacttcaacctgaacatggaattcggtccttaccgaatgcgctacaccaagaacggcaggcatttgctgctcggcggcaaacgcggtcatgtggccgccttcgattgggtgaccaagcgtctgcactgcgaattcaatgcgatggagagcgtcgaggatgttcagtggctgcatgtgcccaccatgtacgcggtggcccagaagagctgggtctatttctacgacaaaaagggcaccgaactgcattgcatcaagcggctgaatcgggtcaatcgcctggacttcctgccctaccacttcctcctggccgccggcaacagtgcgggctatgcttcctggctggacgtctccattggcgagctggtgggtaactttaacacgggactgggcgatatacgcatgctgcgacacaatccccgaaatggtgtactctgcattggcggcggacgtggtgtggtgtccatgtggtcgcccaaagtgcgtgagccgctggccaagctcctgtgccattcgacagccatgtctgctctggcggtggaacccaagggccagtatttggttaccgctggcttggatagggctgtgaaagtttgggacattcggatgctggtgcacgacaagccgctgactcatttccagctgcgtctgcccgccaacgaactggatgtgtcgcaacgtggcatgctggcgctatcgcagggcacctatctggagacctactcggatctgctctccggcggaggttcgggtgacggtacccggttgccttatatccgccaacgctgcgatgcctttgtccacgggctgcgtttctgcccgtacgaagatgtgcttggtgtgtcgacggccaagggcttccaatcgctattggtgcccggctctggagagcccaacttcgatgctatggaagacaatccgtatgagacttcgaagcaacgacgcgagcacgaggttcacgctctgctggagaagattccgcccgaactgatcaccctggatccgcaagagatcactggcgtggatgcgcccacgctgcaggagaagatcgatgccaagaggaagctgttccatttgaaggcgccgcgcatcaacatgaaatcgcgccacaagatgaagggacgtggcggcactgccaaggcggcgcgcaacaaacagatcgtcaaggatgccaagcgaaaggagtttattgccgaggtgcgcgaggccaagaagaacgttatcaagcagcacacagccgacgaggtgggtgccaagggcaaggccaagaccaaggcaccacgctccgttctggatcgtttcaaacccaagccacccaaaaaacagaaaacctga

SEQ ID NO: 3768 - protein, 609 aa, DROSOPHILA
MTKVTPKGRPKAKTPYKRYFDGQKDTETGDGDLKHVKVFSKNRQNFTGDFISMINKTKKPRPQKAPAKPTKEELEARPKKNPIPKEILDKYSRGEQVQPKGVKTRHFKEQQTRKEVYLEYATEQAARTELLLQETAGQLQADEGETTAEFRQSQIAENVDIQSSAKHFNLNMEFGPYRMRYTKNGRHLLLGGKRGHVAAFDWVTKRLHCEFNAMESVEDVQWLHVPTMYAVAQKSWVYFYDKKGTELHCIKRLNRVNRLDFLPYHFLLAAGNSAGYASWLDVSIGELVGNFNTGLGDIRMLRHNPRNGVLCIGGGRGVVSMWSPKVREPLAKLLCHSTAMSALAVEPKGQYLVTAGLDRAVKVWDIRMLVHDKPLTHFQLRLPANELDVSQRGMLALSQGTYLETYSDLLSGGGSGDGTRLPYIRQRCDAFVHGLRFCPYEDVLGVSTAKGFQSLLVPGSGEPNFDAMEDNPYETSKQRREHEVHALLEKIPPELITLDPQEITGVDAPTLQEKIDAKRKLFHLKAPRINMKSRHKMKGRGGTAKAARNKQIVKDAKRKEFIAEVREAKKNVIKQHTADEVGAKGKAKTKAPRSVLDRFKPKPPKKQKT

SEQ ID NO: 3769 - DNA, 2938 bp, DROSOPHILA
gctcagtatcagcagcagctctcaagcgtcgcttgccgccaacgcccccgccacacccacaccgccgcccacttcgtcagtggcaggagctgcagctacggtaaagaacgagatcgttgcatctgattcggccgaatcctcccctatacaagatttaataatggtaagcgccgccaaaatcaaactacagaatcttcactcgatcatcaaaaaatcgctaaactaataaacaaaatgagtatgatatcagaataatcttgatcgaaaaatatggaaagagttctaactaaaaatatatacgaaacttgtacagtttattatgcaaaaagccatttatatgcctaaaattatatttttgtttaactttctctgccatatttaatctatattgctagcctacctaatatatcaaaaaaattcggaagtttttaatgtcaatgggggaggttcagttaatcttcaattttacgttgtacttaatctggggaactagttttactcatttcacgtgtatatagtttattttaagattgtgttgccaactcaaccgttgacattaaaatctaattaaacgaagatgaagctcacctcatgatttggccacaaaaactttcacaacttctttgcttaagctgttctttcaagtgaccacgttgtgagcggacctagatcttttaaaaattggccaaatctttgtgctactgcttctgtctctgttactgtcactgtatcggtctttctctgcctatggttccaattgtagttttacctatccactatccactggtagcgctcgctaaaatctatcactgctatctctctcacctgatttctttatctaaatctcagctacataacaaaacacactttagttggtttcgatttgttttccttttttatttgcggggaaacagaagatccaattcaaataccaaactgaaaccaaaacaaaaccctcgccaaaaccaaatacaacaaataatctaaacccaccacgcacagcaaatgcaattgttgcacgcaccggcgtccacgcatccgcatccacatccgcatcagcatccgcagcattcggcagcgtcagccgccgcctatcaggccatgcaggtgcaccagcagcaacaccaacagcaacagcaggcggccgtctttcaccaccaggttgcagccattgccgcccagcagcaacaacagcaacagcaggcccaagtgcagcatcagcaacaaatgcagcagcagttccactaccaagcccaggctcaagctcaagcgcaggccatgctgcagacgtatatgcaacttcaggtgaacagtgctgtaggtgtgagcaccgcccccgccacgcctaccaaaccggtagccgcccagattccgggcgcgatctccggaccgattgcgggtccggttcctgtatctgtgccgacacagttcttcacggcgccgagcactccattgaccatcattccggcggcggcggtggcctcgtcggccatgttcgctaccgcggccacgcccacttcggcggccaccactccgaccaataatgtaaataatacagttaatctatcagccgtatctagaactactaccactactactaagaagcagccgcaggcagtggcggatgcagtcctgagcgccgtcggcggtaatgttggcaccgcagtgggtggtggtacaatatcctcgctcctggggccagaaccactgccgattatgccccaccacttaccactggccagcgttcggggctgcagcagcgccagcagcggctgcagttctgcatcttctgattgttctatgccatcgccaacttcactacacttatcttctcctaaaaaggtttgtgtgttcagtaaaaaaaactctataaaacaactctctcctcagttttctttgagttttcctctactcattttcctatcgagatgtagatagtaaccgttgccgcccactaacaccttttctcatgctttgcctgacgttttggaaaccttactgtacatgctcactaattcctaatacccgaatttttcatcactcaccgcagtagtttattttgttgccttttctcatttgttgtcgttcttcttgttgttgtcgttgtttttgtagatgtaattcagattttattgattgatttgtttaccaataaataacttagtattaagaccattaagctagtaataaattaatatattacatcttcacagacccattttacaattattgataaatatacctgagcttatttcccgttaaacattccgtgcttttcgcagtgcaggtgtgtgaaaactaggaaaagtgttttccgttatcaacaataaaataaaacattttatttgcgtaaatcaaagaggctctgacattcaatgctttttttttcctctgtgagagtgtgaattgagggataattaaatggcaattatgtgcaattatatataggtatagaaaactgaccctttttccggccttcctttttcggccgttcttattgggccacatctgctaaagggtgtttttgggtagtgagtaaattgtgcgcgataaagaaaagtgcaaccgctcgcccagctgactggcatacaaattagcctcggatcagtgcaatatcctaatgaaattaatggactcaatcttaatattgttaaaagtttttcaaatttcgagacgagcaaaacgaaggtttgcaaaacaaaaaaaatgtagaagaattatagttgctgtatgagtgggtttatttttgttatcagtcataactatcgcgttgcaggcgagcattagccgcaattgtttggccagcacttacgctttgtactgcccaactgttttagtttacctttgcatatttcagctttttggcctcccctcccccaccgacaaaatgttgtccatattgattagttggcgttgaaatgtcactgcaatttgttgg

SEQ ID NO: 3770 - DNA, 938 bp, DROSOPHILA
agcaaatgcaattgttgcacgcaccggcgtccacgcatccgcatccacatccgcatcagcatccgcagcattcggcagcgtcagccgccgcctatcaggccatgcaggtgcaccagcagcaacaccaacagcaacagcaggcggccgtctttcaccaccaggttgcagccattgccgcccagcagcaacaacagcaacagcaggcccaagtgcagcatcagcaacaaatgcagcagcagttccactaccaagcccaggctcaagctcaagcgcaggccatgctgcagacgtatatgcaacttcaggtgaacagtgctgtaggtgtgagcaccgcccccgccacgcctaccaaaccggtagccgcccagattccgggcgcgatctccggaccgattgcgggtccggttcctgtatctgtgccgacacagttcttcacggcgccgagcactccattgaccatcattccggcggcggcggtggcctcgtcggccatgttcgctaccgcggccacgcccacttcggcggccaccactccgaccaataatgtaaataatacagttaatctatcagccgtatctagaactactaccactactactaagaagcagccgcaggcagtggcggatgcagtcctgagcgccgtcggcggtaatgttggcaccgcagtgggtggtggtacaatatcctcgctcctggggccagaaccactgccgattatgccccaccacttaccactggccagcgttcggggctgcagcagcgccagcagcggctgcagttctgcatcttctgattgttctatgccatcgccaacttcactacacttatcttctcctaaaaaggtttgtgtgttcagtaaaaaaaactctataaaacaactctctcctcagttttctttgagttttcctctactcattttcctatcgagatgtagatag

SEQ ID NO: 3771 - protein, 310 aa, DROSOPHILA
MQLLHAPASTHPHPHPHQHPQHSAASAAAYQAMQVHQQQHQQQQQAAVFHHQVAAIAAQQQQQQQQAQVQHQQQMQQQFHYQAQAQAQAQAMLQTYMQLQVNSAVGVSTAPATPTKPVAAQIPGAISGPIAGPVPVSVPTQFFTAPSTPLTIIPAAAVASSAMFATAATPTSAATTPTNNVNNTVNLSAVSRTTTTTTKKQPQAVADAVLSAVGGNVGTAVGGGTISSLLGPEPLPIMPHHLPLASVRGCSSASSGCSSASSDCSMPSPTSLHLSSPKKVCVFSKKNSIKQLSPQFSLSFPLLIFLSRCR

SEQ ID NO: 3772 - DNA, 5863 bp, DROSOPHILA
taaactgcacacgtgagaaacttaaaagcaacaaagggggcaaacaatagacaaaacttaaattaaagtttcgccggaaccagaggacaagtgcgctaggcaacactgcccgccacgcaccattcactgcccaacactggccaggcggtacagttatttttggtcgtaacagcgaagcaatgggcaaaaaaaaacaaaagaattaaaagaatcagcaaatattgacgtaaaaacaatttgaacttgaacttaaactggatttgggctctttaaacgttaagataagctagcgaattttgttacatatatagacttaagatctagacccaagaaaaacgtgcacttgccaagcaaaatccggccagcaacggcaaaccatattgcatattggttggttaagctatcgtttcaaatacgatgctgtaaaagaatcaagaatctctcatttggtacacaataaatgcagttctgaacaaaatggcaccttagatgggccagacctggcttgcggcattcaaattttgttgggcaagtgctttacacataggatatatgatcgcattttacggatattacgactaacaagagctgactgcgctttaagagtttacgaattttttaacacacacgtactaagcgaaaatcgaaacgtttaacaaccatcttcaaacggatatatctataatcccatactcgatcaagtggaggtcctgcgtgaataatttcattattttggtcttatgtacatttgcaatgtatggtagtgtgtctgtgtgtgtaagcttcaagcttgataaatcccagttcctgttttgctcattcatttttgttccaaatcaccaatttaattgttttgcttctttctcaaagaattttgactctctcgcttctagcgctaccaactttacgcacacagattcggggtatcttttggtttttttgtgttcctggtcggttccatttcggttatttcctcatgtgcttttggttttctttttttttttttttttttgtatgtaaaatgtttaaaaaaattgttgcttcttatcgaaaactgtaactctctccacgtttccacctacacaatatatagtcctaaacttgtaacgccaaatacatgttctctctcatatatgcttgtaaagatatatatcccacatgtaagtgtgtgctctttgtatatagatatatctgcatctggtttgcatctaccatttgtttttcaattactcatttatgtactcgtatataatttgcctgaacttatttcatatgtgctctcagaatttttcttggttttctctttgaaaccaattccgattctcattttgatatcccgcggagctgctgactagtaacactgatgaatctcgggtcatattcaacatgaatagagctgtatatagtatttttggatgatgcggaagttcttgttacatcaaggattcaagtagtttttttcaacatcaatttgtacagctttcggcaagtgaaatgtactttttctagagctagtgacataattaaattttataccctgacagagggtatttaaactacatcactacaaagccgaacaaaagcacattgattgcataccaatttcatcttaataaccattgaaatttctctcgaatgtgaataaaaatcgataataaacgatattgactaccgcaaattcttgaggatagtatccattcatcgtcagtgttacttgtcagagccgtttactgggatttctgtggatcttctttcaaacccaaaaatgggccttaaactccggcgctttctgtgcggaaaattgggggagggggaagattgaaaaccggaaccggccgtgcgcttatgacatggagctgcacggcagccgtggcgaacccatctgtgtgagcacgcgatccagccactggagcggcccgttcagatggagttcgatccagcagggcgttgaggtcaccgtctggcggcgatattcggcgccccagcccttgacgaacgacatgcggatggtgcacatgcgtgtcaattggtagaccgcttcgaatccctgcgacacggactgcgacagcagggcggcaaactcctggttgttgaagatctttaggttgcaaccgggcggtatcttgcatacggtggccggatgccagccatatcgctgattacaatttgggctctgtacgaaaatggacgaatcgctcagacattctgcgaatacctcaccgccaatatagtaaagccgtacgcccttgccgatgtggcgacgtgtctgctccacgacctcgttgcgattcacattagacagcagtccgaggcaaaagcgctccgaattggagggatcggtaaagccatccaccgtgatcgagggctgcgaggcatggaacgtctcgccgacacgcgtatttagctcatagtaggagatggaacaccaaaaggccggctcgtggtacatcaccggcgctgcatcggcgggcggcgttagacgcgacatgttcatgttgtcgttaggatcgatggggtcaccatcctcgctcatatagccgggcggcggggtgccggtgttgggaatgctgctgcccacactaagcacactcgattgagagtccatgttttggccaaaggacagctgctgctgttgctgttgataggcggaggcggcggacgatgacgacgacgacgacgaggagggaccaccaccaccaccggcggcagtcgctggcgtcgaactggcagacgatgatacggaaacgggcccggcaccgcccaattccatgtactgcggcggactcaacgaggcgctgcgaatgatcgccgcattgtaatcggtgttgttgggtatctggtgcgtatggttgtccagcggatagtccacaatggagtcgggcggcgtgggcagcgatttgggcaccaggatggacagttcaatttttttgtagtggtacggatttatgcagatctcctccttgcgcaaatggaaggcgtactcgcaatgatcgaggggctttagttcattctgactctggagatcgggccagcgccacaggcggcaatagatgacgtgcggcagacccttgcgcagatgctcgccggcgggagctggcttgctgcgcggcaccgtcacgcaccgcgtctggcagttctgtgtggagatcgcgcgctctagctcctccagctgcgaattcttcttgatcttcttgaccagattcttgacggccttctctgaccacttgccctcgacgctgttgtcctcgttgccctttttgagtgctaacaaacgcttgaccacctgcggggtgaatggcaacatctcagggtctcagggggggggagttctcctgggctttcctggtgtcctccgcgtccactagctcctcctcctccaactctgcgttgccttttgaatactgctctcactgctggcgttggtcgagttttagttttagttttatttcgatcaccttctctggaatactggaacgggactgggaagtggaactggaacagtcctaatgctgctgctgcttcccttgtgcacttctgatctggaatagtggaatgggtttagttgtgcgtgctttggcaattaaaacctgataattggcttgcatgtgtgtgcgtgagcggctggatctgataaaagctcgaccctgatgacgatgttattgtgataattgcccgagcgtgtgtatatgggtaatctattaacttttgccttagattcacattcagatttctaaagaaagattcaatttagattttccatttccaaaacgacaatcgcaaatgcaatcgtctgcgtgggttgttgctgttcttgctattttcactaccgttgttattgctattcttgttgttattgtctccaacaaggtcaaatgtctgcgtttgcagacgctttttttttgctttcgttgagttacagcagccacagaaaacagaaacagaaccagaatgtgtgtatatttctgtatgtatgtacacacgcctaatctgtgggcagtttggaattttccatcttatcgaaggcggggcaataaattaccgaaaataacaacaacaaaaaacatgagcgtcgccggcaagaggggtacgatcgagttaaacgcaaaaataaataagtaattaaatgtgcattggggaaacagcgaaaagtgcacatacagccgctttggaatgtatccatgtatctgtatccgtatcttcaacccccacctaacacacacacacttgcgccgagtgtctcgcacatataaatattacctgtaacggtaccggcaactcgagctcctctgtcgtcctgctcttgctcctttcgcctgctctttcaacttctatcgtgcccgctcactcgcacgcacacactgcttccaggtccagatgcacgggaacggtaaccaaaaggcaccggaaccgggcgcacacatccagccgagccgagccgagccgcgccaacaggagggggtggtggtggtggtgctggtggcgttgatggttgtctggaacggggagggggccgtgtggtgggcaccgcttcttcaaatttctgtgtgtatatatcttgtgtgcgcgccagaaagtgacagctatacgcacacgcacaccaaagcacaggcaccgcacaccgacacgcaaggagcacacacacagttaaacgagcgcacagacacaaacacacagaggcacaacaagaacagagaacttattttgataaatatttaaacgcctccttgttgtttgttcttatgttatgctctttgtgtttattttctatacgttagtagttcactttacgttcgaattgtgctttatgggagtaatataattttttgcgtttcgcgattttgctattcgcaaagttgcagtgtgcccagacttgctgcccaacaatagtgtgaccgactgtgtagtgtgaccgttggctgaaacgcgaataagcttcgacgccacggctcaaaataaaataaggcgtgaaaacattctaatgatcgttttgataaattcatataaacaacataaatattgttacatattttaatactaaaatcataaatatacttgttcgcaaatatatttgcgccacaaaagaatgggattggatggccaactaattagttactaaatcgatgggtgatatcaactccctgcaagaatcaagtcagacagcttttatttttgaacgtagtggattttttgtttttattcacttattggtaattgtcaactaccaggatgaactggagtcaagtgcgggagaagcgccaggacttctgcagcgcctgcttgacgagctcatccggcgagggagtatcaaagcggaatctcttcacctggatgccgtaatccttatactggcacattcgcaggtgctgccgttccagcggagtgacggcgtacactagacggggctttctcggctccggatagcccaccatttcgtccagcatgagcccaatgggtcccggttgctcccggtagtcgctattcgctggtgaccgatcggccagcacgtcctcgtcgtagttgatggatcttttgctggccaagagagttacaccggtcgtgctccttcttccgcgatcgcaggcaatgaagggtatggcaaaaggctcacaattggtcaactggcgcgccttgctggccagctccttgggcggtgcgcctttatgcctggcgataatcgtggacgtgaggtcaatgagtgggggtgctgacgtggctgtattcacctttgtcccatcgcctatatccagcttcttcatgccgctctccaaccttgtcagcaggggtatgttcaggggctccttgggcatcgcgaccagttggggtaacacaaatcccattgattgcggcttgttttcgccctccg

SEQ ID NO: 3773 - DNA, 3145 bp, DROSOPHILA
cacactgcaactttgcgaatagcaaaatcgcgaaacgcaaaaaattatattactcccataaagcacaattcgaacgtaaagtgaactactaacgtatagaaaataaacacaaagagcataacataagaacaaacaacaaggaggcgtttaaatatttatcaaaataagttctctgttcttgttgtgcctctgtgtgtttgtgtctgtgcgctcgtttaactgtgtgtgtgctccttgcgtgtcggtgtgcggtgcctgtgctttggtgtgcgtgtgcgtatagctgtcactttctggcgcgcacacaagatatatacacacagaaatttgaagaagcggtgcccaccacacggccccctccccgttccagacaaccatcaacgccaccagcaccaccaccaccaccccctcctgttggcgcggctcggctcggctcggctggatgtgtgcgcccggttccggtgccttttggttaccgttcccgtgcatctggacctggaagcagtgtgtgcgtgcgagtgagcgggcacgatagaagttgaaagagcaggcgaaaggagcaagagcaggacgacagaggagctcgagttgccggtaccgttacagatcagaagtgcacaagggaagcagcagcagcattaggactgttccagttccacttcccagtcccgttccagtattccagagaaggtgatcgaaataaaactaaaactaaaactcgaccaacgccagcagtgagagcagtattcaaaaggcaacgcagagttggaggaggaggagctagtggacgcggaggacaccaggaaagcccaggagaactccccccccctgagaccctgagatgttgccattcaccccgcaggtggtcaagcgtttgttagcactcaaaaagggcaacgaggacaacagcgtcgagggcaagtggtcagagaaggccgtcaagaatctggtcaagaagatcaagaagaattcgcagctggaggagctagagcgcgcgatctccacacagaactgccagacgcggtgcgtgacggtgccgcgcagcaagccagctcccgccggcgagcatctgcgcaagggtctgccgcacgtcatctattgccgcctgtggcgctggcccgatctccagagtcagaatgaactaaagcccctcgatcattgcgagtacgccttccatttgcgcaaggaggagatctgcataaatccgtaccactacaaaaaaattgaactgtccatcctggtgcccaaatcgctgcccacgccgcccgactccattgtggactatccgctggacaaccatacgcaccagatacccaacaacaccgattacaatgcggcgatcattcgcagcgcctcgttgagtccgccgcagtacatggaattgggcggtgccgggcccgtttccgtatcatcgtctgccagttcgacgccagcgactgccgccggtggtggtggtggtccctcctcgtcgtcgtcgtcgtcatcgtccgccgcctccgcctatcaacagcaacagcagcagctgtcctttggccaaaacatggactctcaatcgagtgtgcttagtgtgggcagcagcattcccaacaccggcaccccgccgcccggctatatgagcgaggatggtgaccccatcgatcctaacgacaacatgaacatgtcgcgtctaacgccgcccgccgatgcagcgccggtgatgtaccacgagccggccttttggtgttccatctcctactatgagctaaatacgcgtgtcggcgagacgttccatgcctcgcagccctcgatcacggtggatggctttaccgatccctccaattcggagcgcttttgcctcggactgctgtctaatgtgaatcgcaacgaggtcgtggagcagacacgtcgccacatcggcaagggcgtacggctttactatattggcggtgaggtattcgcagaatgtctgagcgattcgtccattttcgtacagagcccaaattgtaatcagcgatatggctggcatccggccaccgtatgcaagataccgcccggttgcaacctaaagatcttcaacaaccaggagtttgccgccctgctgtcgcagtccgtgtcgcagggattcgaagcggtctaccaattgacacgcatgtgcaccatccgcatgtcgttcgtcaagggctggggcgccgaatatcgccgccagacggtgacctcaacgccctgctggatcgaactccatctgaacgggccgctccagtggctggatcgcgtgctcacacagatgggttcgccacggctgccgtgcagctccatgtcataagcgcacggccggttccggttttcaatcttccccctcccccaattttccgcacagaaagcgccggagtttaaggcccatttttgggtttgaaagaagatccacagaaatcccagtaaacggctctgacaagtaacactgacgatgaatggatactatcctcaagaatttgcggtagtcaatatcgtttattatcgatttttattcacattcgagagaaatttcaatggttattaagatgaaattggtatgcaatcaatgtgcttttgttcggctttgtagtgatgtagtttaaataccctctgtcagggtataaaatttaattatgtcactagctctagaaaaagtacatttcacttgccgaaagctgtacaaattgatgttgaaaaaaactacttgaatccttgatgtaacaagaacttccgcatcatccaaaaatactatatacagctctattcatgttgaatatgacccgagattcatcagtgttactagtcagcagctccgcgggatatcaaaatgagaatcggaattggtttcaaagagaaaaccaagaaaaattctgagagcacatatgaaataagttcaggcaaattatatacgagtacataaatgagtaattgaaaaacaaatggtagatgcaaaccagatgcagatatatctatatacaaagagcacacacttacatgtgggatatatatctttacaagcatatatgagagagaacatgtatttggcgttacaagtttaggactatatattgtgtaggtggaaacgtggagagagttacagttttcgataagaagcaacaatttttttaaacattttacatacaaaaaaaaaaaa

SEQ ID NO: 3774 - protein, 486 aa, DROSOPHILA
MLPFTPQVVKRLLALKKGNEDNSVEGKWSEKAVKNLVKKIKKNSQLEELERAISTQNCQTRCVTVPRSKPAPAGEHLRKGLPHVIYCRLWRWPDLQSQNELKPLDHCEYAFHLRKEEICINPYHYKKIELSILVPKSLPTPPDSIVDYPLDNHTHQIPNNTDYNAAIIRSASLSPPQYMELGGAGPVSVSSSASSTPATAAGGGGGPSSSSSSSSSAASAYQQQQQQLSFGQNMDSQSSVLSVGSSIPNTGTPPPGYMSEDGDPIDPNDNMNMSRLTPPADAAPVMYHEPAFWCSISYYELNTRVGETFHASQPSITVDGFTDPSNSERFCLGLLSNVNRNEVVEQTRRHIGKGVRLYYIGGEVFAECLSDSSIFVQSPNCNQRYGWHPATVCKIPPGCNLKIFNNQEFAALLSQSVSQGFEAVYQLTRMCTIRMSFVKGWGAEYRRQTVTSTPCWIELHLNGPLQWLDRVLTQMGSPRLPCSSMS

SEQ ID NO: 3775 - DNA, 3579 bp, DROSOPHILA
ggcgcgccttgctggccagctccttgggcggtgcgcctttatgcctggcgataatcgtggacgtgaggtcaatgagtgggggtgctgacgtggctgtattcacctttgtcccatcgcctatatccagcttcttcatgccgctctccaaccttgtcagcaggggtatgttcaggggctccttgggcatcgcgaccagttggggtaacacaaatcccattgattgcggcttgttttcgccctccgatcgctgccgttgcctcaactggatctcattgagtagcatttgattgtgtgcctccgcctctcggcggtattcctgctcggcagcggcatccgcattcgtctgcagctgcaattgtggaattctaagctgtggaattttgagctgcggaattgtgaattttggcatcgcttctgggctcgtgccacttatactgctcaatttggacaaatcgctggtgggctggagaccaaactcggcctggatcgcctggtggagggacttcttcggattgcttgccatttttcaaggcccaaactccagcgacgatgacgaatttgtttatttttttttttctttcttcttttttgcgtctctcctttgttgttttcttcgctcgtttgacgttgttttgtggcaaagttgtcaaatagtttcaactgattgactgattgtcaaacatgtttttattattctcacatattttaggattctcactctaagcagtttctttaaaaattttccgaattttataaacccgatatgcttccctcaaacaataacctaaaatgcagatagcataaatcggctgcacttgacaaccctgaacaacagctgtttggagggaaaatacaaaaatggttcgccaaatgttatatttcccttatcaatatagacccagtttctgtggcggaacttttatttataaatatgttttggaacattcatgtgtgaaaaaaaatgcaatttgatcgcaggtcctattgattttttaaggtattaagcatgatccagccggcagatggggccctcctccaccatctttagatccactttgggtccgaccaaatcgcgaatgttgttgatgccgtacttgatcatggtgggtcgctccagcgacagaccccaggcgattacattcacgttctccggcagtcccatgggcagcagcatctccggccggaagacgcccgagttgcccacctcgatccacttggccaggccggggtgatagcagaagatctccatgctgggctcggtgtacggattgtacgccggcttgaattcaagctgcgtgatgcccagctttctgaagaactcgtacagcgtgccaatgagatcgcccagcgtcagaccaacatctgcaatcacgccctccacctgatggaactccgccagatgtgtggcgtccagtgtttcgttgcggaacaccttgtcgatgctgaagtacttggctgctttgaagccgccctcctggttggccagcttgtacagcatcctcgcactcacggccgtcgtatgcgtgcgcagtagattcttctgcgcctcctccagcttccagtcgtagccgtaacccttcgatccatagccacccacagagtgcaccttcttcacgcgctccagatagtcctgcggaaacttgtggcttttggccggatgattcacgaagaaggtgtcgtgggcatcgcgagctggatgctgttgcggctgatagagcgcatcgaagttccagaatgacgattccacatagttgttcgtaggcatctctgagaagcccatctcgaggaatatctgccggaactcagtgcgcactttgagcaagggatggagatgtccacgcgttggtggtgcacccaacgcatcaaagttataggccttgaacttgagctggtcccacaatccatttgcgagcatttccaccgtgagatccgtctccaacttggtgagagtggtggcaaattcagggccgcgtgccagcacgaagctcttggtggtcgtttcctggaggagcttgcgtttcttgaagtcggccacctccttggcaggcagctggtcaccctttcccagcgccacctgctgcagttgattgcgcaccacatccgtaatggtgtccaccttgcggcgcaccagcggcggcgtgacgctcttgtccaccaaaatccagccgtgcgacatggctttgctaaagcccactttggcatttgcgccaccggctgccattagagccgcctgggcgattccctccggcggaactaggtcgtagaccagtgcctcatgactgccattctccacgacggcgcgaccctcgtctgtgaggcccaaactcttgtgggtgaccgtttccgcggtgactagttcgccatgcgcctgtatgctcttcaatgagcccacaatcttctggtgatcctcggcaaagagtgcggccaggtccagtgtgtccgccttgtcggtggtctccaaatgctggagaatgcgctccgtgagatcgggatgcatagctggcggttcaatggttgtatctttcaaggaaattcggaatttcaataccggaatctcgtgttgccacaacgcagcctatcggagctatcgttcttcgataactgcgtctatcgttcgaaacgacgacggtggctaaaaaatagccaataagcttaaaatagctataattatatctagatattggaaatttgtataaatatttcagcgaatagtaagatatgatacttttgtcactaacatttcaaaagtaaatgaaataataataaagatgtctcatataaagaactggtttcaactcggtttatttttccgcttaccatcacagtggcacctccaataaaaacagctgttgacgccaagactaaaagtttgcgttccaattagaacggcgaatatattcgaaaaaaggagcaaatcctggggagcaacggccaggtgggagccgcaatcatgctcaagtccctcaagccggacacgtacgccggaatggcgaacgccaagtgcggcgagatctacttccagagcctgcacagcttccgcatcgactgtgcgttctgcgagatgaagagctttgtgttcggagacttcctgctccacgtccagaacattcacttcgagaacggcctgctgaagacggaggcaacggacgccggtgcgaatctcaagcaggagcgggatcgtgagcgggagcctaactcgccggtgcccattgtggcgcaggtgaatccatttgcctggtacgagattggtggcgatcacaacgaggacagcgacgatgagcgcgttgtcctggaaaagcaggatgaggacgaagatgagcggccaggcagaagcataatcaagtggcaggaccatcagtcgctgaccagcgaatctctacgtcaagtccgagccctcaaggtggactacaaggaggaagactccgagcaggaggagtgcggcatggagctggatctggacagcgaaggcaggcactctgccaagattccgcactcgtgtccgcactgcacaaaagtttaccagagccgcaaggtcctcgaacgccacataatgcgccagcacaaagacactctctcgcc

SEQ ID NO: 3776 - DNA, 1579 bp, DROSOPHILA
ataggctgcgttgtggcaacacgagattccggtattgaaattccgaatttccttgaaagatacaaccattgaaccgccagctatgcatcccgatctcacggagcgcattctccagcatttggagaccaccgacaaggcggacacactggacctggccgcactctttgccgaggatcaccagaagattgtgggctcattgaagagcatacaggcgcatggcgaactagtcaccgcggaaacggtcacccacaagagtttgggcctcacagacgagggtcgcgccgtcgtggagaatggcagtcatgaggcactggtctacgacctagttccgccggagggaatcgcccaggcggctctaatggcagccggtggcgcaaatgccaaagtgggctttagcaaagccatgtcgcacggctggattttggtggacaagagcgtcacgccgccgctggtgcgccgcaaggtggacaccattacggatgtggtgcgcaatcaactgcagcaggtggcgctgggaaagggtgaccagctgcctgccaaggaggtggccgacttcaagaaacgcaagctcctccaggaaacgaccaccaagagcttcgtgctggcacgcggccctgaatttgccaccactctcaccaagttggagacggatctcacggtggaaatgctcgcaaatggattgtgggaccagctcaagttcaaggcctataactttgatgcgttgggtgcaccaccaacgcgtggacatctccatcccttgctcaaagtgcgcactgagttccggcagatattcctcgagatgggcttctcagagatgcctacgaacaactatgtggaatcgtcattctggaacttcgatgcgctctatcagccgcaacagcatccagctcgcgatgcccacgacaccttcttcgtgaatcatccggccaaaagccacaagtttccgcaggactatctggagcgcgtgaagaaggtgcactctgtgggtggctatggatcgaagggttacggctacgactggaagctggaggaggcgcagaagaatctactgcgcacgcatacgacggccgtgagtgcgaggatgctgtacaagctggccaaccaggagggcggcttcaaagcagccaagtacttcagcatcgacaaggtgttccgcaacgaaacactggacgccacacatctggcggagttccatcaggtggagggcgtgattgcagatgttggtctgacgctgggcgatctcattggcacgctgtacgagttcttcagaaagctgggcatcacgcagcttgaattcaagccggcgtacaatccgtacaccgagcccagcatggagatcttctgctatcaccccggcctggccaagtggatcgaggtgggcaactcgggcgtcttccggccggagatgctgctgcccatgggactgccggagaacgtgaatgtaatcgcctggggtctgtcgctggagcgacccaccatgatcaagtacggcatcaacaacattcgcgatttggtcggacccaaagtggatctaaagatggtggaggagggccccatctgccggctggatcatgcttaa

SEQ ID NO: 3777 - protein, 498 aa, DROSOPHILA
MHPDLTERILQHLETTDKADTLDLAALFAEDHQKIVGSLKSIQAHGELVTAETVTHKSLGLTDEGRAVVENGSHEALVYDLVPPEGIAQAALMAAGGANAKVGFSKAMSHGWILVDKSVTPPLVRRKVDTITDVVRNQLQQVALGKGDQLPAKEVADFKKRKLLQETTTKSFVLARGPEFATTLTKLETDLTVEMLANGLWDQLKFKAYNFDALGAPPTRGHLHPLLKVRTEFRQIFLEMGFSEMPTNNYVESSFWNFDALYQPQQHPARDAHDTFFVNHPAKSHKFPQDYLERVKKVHSVGGYGSKGYGYDWKLEEAQKNLLRTHTTAVSARMLYKLANQEGGFKAAKYFSIDKVFRNETLDATHLAEFHQVEGVIADVGLTLGDLIGTLYEFFRKLGITQLEFKPAYNPYTEPSMEIFCYHPGLAKWIEVGNSGVFRPEMLLPMGLPENVNVIAWGLSLERPTMIKYGINNIRDLVGPKVDLKMVEEGPICRLDHA

SEQ ID NO: 3778 - DNA, 4105 bp, DROSOPHILA
gattaactggaagcgtgaggaagtggatctttacgagctgaacgaagcattcgccgcccaatcactggctgtcctgcaggacctgcagctggatgctcagaaagtaaatgtcaatggcggtgccattgccctgggccacccgattggagcttcaggtgcccgtgtcttggtcactttgctctatgcgctggagcgcaccggtggaagaaagggaatcgcatcgctctgcatcggtggcggcatgggaatcgccctggccgtggagcgcctcagctagtcttaattcattgtcattcaagctatttattgccttttcctgtttcccacttaagtgtaaagtttatttctctattcgcgtagtattcgcacgtacttaaaggcacaacctcccaagtcgcaaaatctactcaattaaaattcaattgaaaatacttgcattgcagcatatttttagctgttgaaaagaggaattgtatacatttttccagttgcgtcagctgaaaactatttataaaacagcatttgttatgatgatgcacaaccgatttatttgcttttgtttctgtttctacactagaaattatttgtacattgtaaattcaattagctattaactgcaagtcggagagaacagtattgggtcgattccttgctattttaaaataagtaagggcattgcatcattataaaataggtaggctgacaaaactagtaactatccaaatgtaaacttatacatttaattgagctaacgcttgagttaaatagcattgcttgagaacaagacaccctcttttccgctcattgtcacatgtatcatttcatatgtagactccgagctctccgagtacttttccagtaccagtaacaggtaacttgtttagatcttcagcataagcatcgcggtcatcgaaggtcccactgcccaaagatcgaaaaaataaatatagtatttacagagacactactggcgatttataaacactcttcgtaatttcttatcgtggaagttagttatttattgtgccaataacaataatatcgggcatagttgtggcctttggaataagaccacgaatctcgcatttcgcaaaggggagagcccaaaatataatacagtaaacatattacaaaagtactagctattgctgacatgaatttgttaaggggaactaaactagttgtaagtctagtgtggaaaatcttattgctatggcgtacactgtagaggctaaattgaataattcagaatctcgcgtttttattgctattatcaaatacaattgtttgtacgtaagaatttaaagaggcttccactgatagaagccttatcggatttaccgcgcctcggaatcgcaggtcggttattgtctctaggaagatgatagcaaggcgcctatccacgccagcagctcttcagctgcacagtctccagctccttgggcagccgcggactgaagccatacggattgtggcaaacgattcgcttatctggcgcagtctgcgccacttgctccaccgtgggcacgcacaactgggcatagctgctgatgaagctggaccacagagttggtgtgcagtccagggcaaagtatggtccccacagctgggagtccaattcggcagcatacggatatttaccatcctcaaggagcagctcctcggctatggccacggcatcgaagtcgcggtgtttcaccggtgtgtaaacatcctggattatgttatcaccgaagtatagtgccttggcttcagagggcttcttctggagcattccagccatggcagtgtgcagctggtgccagttgccttgcgagtagacctcgcccgcctttatgttgtctgcctcttgcggcagttctgccagtttttccacatccacctgcatgaacggacgctgcatggtaaagaaccctggtttcttggcgtatgttaccacgaaatcgaagtatttgcgccaatccttgcccagcgcctgcgtggccgtcaaattggcgaagtccacgttggagccggtgagcaaaaatagcttcttgccggattttcgcagttccccgagccagttcatcacactgggatctgttcggagcacaaatcgttccggttccgctcgcatgctcttgaaatagagactctggtcgttggcgaagttctcccgactgtagatgttcatcaggccagcctgaacatcttgccagacctgatactcctctcctgccgatggcttctttcccctatcgaccagatccaccgcctgggcaaagaccaaggcactgggcatatcaaagtaatccaatagcgagcgcatttgcgtcgaggcgtcgccattccaggtggacagggggtccctgtagaaggcagtggtgatttcccaccttcgatctcttccatagatggcttgaatttctgtgtcgcttagtagacgggtgccatgggtggctcgcaggatctgggcctcactgctcagcttcagcacattgccacgcggtccgtccaggaacaggcccttctgcagaaagtccaagttgagcgattgaaggagtagatccctgtcatagcccttctgctctacgaggaactgcttgagcacctgatagatcagagcggacatctcgtggagattgtagcgcagaagggtgccgtccaggtcgaagcccactattccataatcctttaggagcagctccttgtgataggatgtcatgatggtgctggccgaataccttgagtttccccctgcagatttgtggaagcgcctaactgtctgctgctgacccgtcacttctcgtgttgctcttcccactgctgccggcggtgttctgactaacgtcattgaattttgcgccaatttatcgagattgcgtaacaggagacgaacatctgtttgggcctgtttgtgtacgtttgtttttgttttcgttttcgttttcgtggccagtcgaagtgaaagggcaggggcggaaaaggcgcccacggtggctgctctgcccagcgccagcatcttatcttatcaactagcacatctcatttgtccgaagcgtgatctaaatttaaaattaagccgaaattcactatcacttaggtagtcctcacaaaatcatttttcatctataaatgtatgtctacaactgccagagctgccaaccttttgaagttgagcagtactgacttacttccttggcttattcctagctagatttagctaggtataagcaagtgtaagctatcggaactcgatagcagcttaggtatcgttggcgcaatcgactcttgtgccatccctagcaagcgtaccggaatggaaaaaatatagttttttgcacattctccgatttcagcacatttttataagttttcgggccagtaacccgtttttcaccgcttagtttgtgggctcaaggcctccgaaaccatgtccaactgcatagagatccctttgcaggacaccgatgaggtgagaatcgatccgaaagattctagttttaagtgattaatacttctatttccccaacttaggtgatcgaggtggacccggatcaactgcccgactgtccagaggtgttgagcattctcaagcaggagcgggcgcccctgcacgtttgggtcaatgtggcggtaagttgaaagactgggtacaatgaatttagcatgttccacatggctactttttttccagcttgcctactacaaacaaaagaagacggaggactttgtcacgctgctggaggagtcgcgcagcgatgacgccaccaaggagtaccgcgactcggacaaggacctcatgcgtgccctggacatgctcgctgcccactatgtccaggaggcgtatcgggagaagtccaaggacaagaaacgagagctcttcatgaaggccaccaacttgtacaccagtgccgacaagattatcatgtacgaccagagccatctgttgggcagggcctacttctgtctgctggagggcgacaagatggaccaggcggatgcccagttcaactttgtgcttaaccagtccccctcgaatattccctccctactgggaaaggcctgcatcgcgttcaatcgcaaagattaccgtggagcgatggccttctacaagaaggccttg

SEQ ID NO: 3779 - DNA, 2105 bp, DROSOPHILA
aaaaatgattttgtgaggactacctaagtgatagtgaatttcggcttaattttaaatttagatcacgcttcggacaaatgagatgtgctagttgataagataagatgctggcgctgggcagagcagccaccgtgggcgccttttccgcccctgccctttcacttcgactggccacgaaaacgaaaacgaaaacaaaaacaaacgtacacaaacaggcccaaacagatgttcgtctcctgttacgcaatctcgataaattggcgcaaaattcaatgacgttagtcagaacaccgccggcagcagtgggaagagcaacacgagaagtgacgggtcagcagcagacagttaggcgcttccacaaatctgcagggggaaactcaaggtattcggccagcaccatcatgacatcctatcacaaggagctgctcctaaaggattatggaatagtgggcttcgacctggacggcacccttctgcgctacaatctccacgagatgtccgctctgatctatcaggtgctcaagcagttcctcgtagagcagaagggctatgacagggatctactccttcaatcgctcaacttggactttctgcagaagggcctgttcctggacggaccgcgtggcaatgtgctgaagctgagcagtgaggcccagatcctgcgagccacccatggcacccgtctactaagcgacacagaaattcaagccatctatggaagagatcgaaggtgggaaatcaccactgccttctacagggaccccctgtccacctggaatggcgacgcctcgacgcaaatgcgctcgctattggattactttgatatgcccagtgccttggtctttgcccaggcggtggatctggtcgataggggaaagaagccatcggcaggagaggagtatcaggtctggcaagatgttcaggctggcctgatgaacatctacagtcgggagaacttcgccaacgaccagagtctctatttcaagagcatgcgagcggaaccggaacgatttgtgctccgaacagatcccagtgtgatgaactggctcggggaactgcgaaaatccggcaagaagctatttttgctcaccggctccaacgtggacttcgccaatttgacggccacgcaggcgctgggcaaggattggcgcaaatacttcgatttcgtggtaacatacgccaagaaaccagggttctttaccatgcagcgtccgttcatgcaggtggatgtggaaaaactggcagaactgccgcaagaggcagacaacataaaggcgggcgaggtctactcgcaaggcaactggcaccagctgcacactgccatggctggaatgctccagaagaagccctctgaagccaaggcactatacttcggtgataacataatccaggatgtttacacaccggtgaaacaccgcgacttcgatgccgtggccatagccgaggagctgctccttgaggatggtaaatatccgtatgctgccgaattggactcccagctgtggggaccatactttgccctggactgcacaccaactctgtggtccagcttcatcagcagctatgcccagttgtgcgtgcccacggtggagcaagtggcgcagactgcgccagataagcgaatcgtttgccacaatccgtatggcttcagtccgcggctgcccaaggagctggagactgtgcagctgaagagctgctggcgtggataggcgccttgctatcatcttcctagagacaataaccgacctgcgattccgaggcgcggtaaatccgataaggcttctatcagtggaagcctctttaaattcttacgtacaaacaattgtatttgataatagcaataaaaacgcgagattctgaattattcaatttagcctctacagtgtacgccatagcaataagattttccacactagacttacaactagtttagttccccttaacaaattcatgtcagcaatagctagtacttttgtaatatgtttactgtattatattttgggctctcccctttgcgaaatgcgagattcgtggtcttattccaaaggccacaactatgcccgatattattgttattggcacaataaataactaacttccacgat

SEQ ID NO: 3780 - protein, 478 aa, DROSOPHILA
MTLVRTPPAAVGRATREVTGQQQTVRRFHKSAGGNSRYSASTIMTSYHKELLLKDYGIVGFDLDGTLLRYNLHEMSALIYQVLKQFLVEQKGYDRDLLLQSLNLDFLQKGLFLDGPRGNVLKLSSEAQILRATHGTRLLSDTEIQAIYGRDRRWEITTAFYRDPLSTWNGDASTQMRSLLDYFDMPSALVFAQAVDLVDRGKKPSAGEEYQVWQDVQAGLMNIYSRENFANDQSLYFKSMRAEPERFVLRTDPSVMNWLGELRKSGKKLFLLTGSNVDFANLTATQALGKDWRKYFDFVVTYAKKPGFFTMQRPFMQVDVEKLAELPQEADNIKAGEVYSQGNWHQLHTAMAGMLQKKPSEAKALYFGDNIIQDVYTPVKHRDFDAVAIAEELLLEDGKYPYAAELDSQLWGPYFALDCTPTLWSSFISSYAQLCVPTVEQVAQTAPDKRIVCHNPYGFSPRLPKELETVQLKSCWRG

SEQ ID NO: 3781 - DNA, 4878 bp, DROSOPHILA
tttcttatgctttgagaattttttaaacactctttaactacaatattgcatctattttgcagattgagtgaaaacgagcgagcaatcgaacagccatcatttatcagaggaaataaacggatcaccgagaaagagggaaattttttaaccgcagagggaaaagcaaacagacgagtcgaaaggaaatacgaaggaaaagtcaacaaaaaaccaaacaccaccaaataaaaccaactactattaatttaacgcaaacattaacgaataatcatattcaagcggtatatatatatatatatacacaagaggataacggataacacaactaactaaatatatatatatatacgatatatgaatgtatatttgaaaaccaaagctaagttccagtcaaagaaaaaaaccaaataaaccagcgcaaatttagtaaaagtataataaaacgaaaaaaaccaaaacaaattattgctatctttttgcatttttgcaattttataaaaaaataacaaagaaaacgaaaaacaaacaaaaccaaaaacccacaactaaagatcataataatctttaaaattcggagaagcaaaaagaaaataagaagtaaacacatttagcaaaatttactcttttatctaaacgaaaacaaaagaaagacataagaacaaaaaacacacaaatcaaattaagacctaattcaagcataaattaaattttaaacgttttagacagagagagagagcgctctaaacttaacttaaaaagcaaatacatttttttcgcgatcgtagttgatctaaaaccccccagaaaaaagcccaaataaaatctgcggaaaaaaaacctaactttaggcgggacttgtgcaaagcgctgaaaataccgcccccccccaaaaaaaaaaaacgagcagctctaacttgtaagcgaataccaaccgagcagtgagattaactactaaccaaaaaggacgaaatcaggaccggatttcagaaccacaatcacaatgaccaacgccatggatattgtgaagaacggcagtgccaacggatccgtggatggcagcaatgatgagtcgcgcaccaatttgattgtcaactatctgccgcaaaccatgacgcaggaggagatgcgatcgctcttctccagcatcggtgagctcgagagttgcaaactggtgcgtgataaagtctcaggtaatttgggtaaatattaaccaatgctactacatttcattccgaattcccgaaatatatattctgaaaccaccgagaagtgctggctgtaaattttaattagtttttgttgtatatagtaatctttaagatagtattgttcaacctgtaagttacagccagctcttctcttgttcattgaacttttaaccatagttatttaaactaatttgtttatgcatttatttttttttttcagtcttgccagcatcgttgaccgctctcaatccggcattgcagcaaggtaagtattccatagcgattatcataaatatatctattattataatactattatatattcaggtcagagtctgggctatggatttgttaattacgtcagggccgaggatgctgagaaggctgtgaacaccctgaacggtctgcgtttgcagaataaggttattaaagtatcatatgcccgtccaagctcagaatctattaagggtgctaatttatatgtatcgggtcttccgaaaaatctatcacaaccagacttggaggggatgtttgcttcgtttggcaaaataattacatctcgtatactctgtgataatatttctggtgagtattcagctcaaccttaactagtttcattacaataataacatattattatttcgcaggtctatcgaagggtgtcggttttattcgcttcgatcagcgcaacgaagccgagcgagccatccaggagttgaatggcaagaccccgaaaggatatgccgaaccgatcaccgtcaagttcgccaacaatccgagcaatagcgccaaggctcaaattgccccgccccttaccgcctacttgacaccacaggcggcagcggccactcgccgtttggccggagctctgccctccgccggtcgcattaggttcgtattaagatcacagaaaagtagggacttctttaagctatgtgggggaaaaacgtatccttaggttcagtattcattcaatccaaaatttaaacacttttttataagtgaatcttaagataagcgtgatttgtaagatttttgaaaaacaagctcaaaagattttgagatttgcattacttgagatatttagaaactttcgaaatcaacttaaaacagcctgaatactgaatactaaagatacaattgtgatattgttgcataggcataaccgattatcaatacaatcagcaatctatatcaactaattagcaataagctgtaaggttgatttgaactttaaattaagtattttctttaattaagtattaacttctgagttaagtggaaacgagttttttatttccgttcgtacatacatatcttttagcatttcgttgactaactaatttgtatttattatccaaaacatttcgttatttctttttctttctttgtcttttcgaaataataaattttatcatcatttttagcattggaaagagtcccatgttagcgattaacaagggcctacaaaggtgaatttattgatcttgttcattttatctgtgcgagctgttactttgtttcattatttgtttttgctgaaaatatataaacatatttacaaaatatatataaatgtctagcaataatttttatacctttaaacggtgattgtatataccttttttgttctgtattatccacttataatttatgttcatttttgcttacaacaatataattttttagtttgcatgtgagcgttaactttgattccagtatgatgtttgttgttatgatttcactacttttttaaatattaaaaaaaaaaaaaaacaatagcaataactacgtaaaaataagcaaagttaaaaaaaaatactataaaatataaattataaaaataggaagacgttgaagaaatctaatcgtaatcaatttgaattaaaaaatataattattcgcatatttactgtgtatttcagaaataacgaagtaaattcagaaatctttaataattttatgagtaaggaactataatttatttttgagtgcatgcaccttaaaaattcggagagcaaaattaataagctgcaatcccatttgaaatatatttttttcaatattaaaaactgtgaaagtagctggaattaaatgtgggtactttcaaaatgagtatccaatttataatatatttgtactaaattagcatgtaccaggcgatcgattagttaggtgtaatgaagggcctaggagagtatctaaaaattcacattgatgtcgaacatcgcacgattggcacataactaatttaattttcctttatctcaccaccggcttgaatcgcaactgcactttaggtactcaccgctggctggcgatctattggccaattcgattttaccgggaaatgccatgactggatcgggatggtgcatattcgtctataacctggccccggagaccgaggagaacgtgctgtggcagctattcgggccattcggtgccgttcaatcggtgaaggtgatccgggatctgcagaccagcaagtgcaagggattcggattcgtgaccatgaccaactacgatgaggccgtggtggccattcagtcgctgaatggttataccctgggcaatcgggtgctgcaggtcagctttaagactaacaagaccaaaaccacttaggcgaaccagccaatctggactagacctttccaatactccacgatctgtttgatttaacaacaacctagactatagattgatctgatctgataagatatgatgatatgatacgatgatatgatgtgacaaagacagtgtagtcgaaattgcgaaatttagcgcgagtttatgatatgtctatcatttgatttgtacgctaaacgaaattattatgattgtaattctaatgaaatcttagtgaaaattgatttatttccatctctataatttaattttattaactaatccaagaaatgaaaaaatgcaaaaaaaaaaaaacaaacaaacaacaaacaaacaaagcttgaatgaggcaaccaaaaaacacaacacagaaactaaggaaaactttagacaaaaaggagatgagccagacgacaactgtctataaattgacaaatgagaaaaatgagaaggtaatagggtcaaaggaaaaacaaaacaaaacaaaataaaaaacaaaaagcgaaaaacgataaataaaaaaccgcaaaaatatgaatgaaaatgatctaagtcgcaatatatagtaactatttttttttttttaaacttatgtatatgtaattcaattcgattatattcaattaaacaaagtatttaaacaagctaaccaaatgatttaatgtctattgatttaggaactaccagcataactctctcagcttacctaagtacttattataatggatatgcataaaaaatattgtattgtattgtattgtatcttgtgttcgttttgcaaccctaacttacattacattacattaattctagtgctattcagctcttatatttaattcgattcgccttgatttacactcgaagacgaaacgaaaatcgaagatatagccgcgatatatcctccaaacgtaacaaacaaaaccccaagcacccaaacacacacactcacttgtaatcattattatatatatatgtaaccagatttaaatatctttttttcgtcgtctaagattcgtattcgtattcgtcaagtgcaaaccaa

SEQ ID NO: 3782 - DNA, 1062 bp, DROSOPHILA
atgaccaacgccatggatattgtgaagaacggcagtgccaacggatccgtggatggcagcaatgatgagtcgcgcaccaatttgattgtcaactatctgccgcaaaccatgacgcaggaggagatgcgatcgctcttctccagcatcggtgagctcgagagttgcaaactggtgcgtgataaagtctcaggtcagagtctgggctatggatttgttaattacgtcagggccgaggatgctgagaaggctgtgaacaccctgaacggtctgcgtttgcagaataaggttattaaagtatcatatgcccgtccaagctcagaatctattaagggtgctaatttatatgtatcgggtcttccgaaaaatctatcacaaccagacttggaggggatgtttgcttcgtttggcaaaataattacatctcgtatactctgtgataatatttctggtctatcgaagggtgtcggttttattcgcttcgatcagcgcaacgaagccgagcgagccatccaggagttgaatggcaagaccccgaaaggatatgccgaaccgatcaccgtcaagttcgccaacaatccgagcaatagcgccaaggctcaaattgccccgccccttaccgcctacttgacaccacaggcggcagcggccactcgccgtttggccggagctctgccctccgccggtcgcattaggtactcaccgctggctggcgatctattggccaattcgattttaccgggaaatgccatgactggatcgggatggtgcatattcgtctataacctggccccggagaccgaggagaacgtgctgtggcagctattcgggccattcggtgccgttcaatcggtgaaggtgatccgggatctgcagaccagcaagtgcaagggattcggattcgtgaccatgaccaactacgatgaggccgtggtggccattcagtcgctgaatggttataccctgggcaatcgggtgctgcaggtcagctttaagactaacaagaccaaaaccacttaggcgaaccagccaatctggactagacctttccaatactccacgatc

SEQ ID NO: 3783 - protein, 338 aa, DROSOPHILA
MTNAMDIVKNGSANGSVDGSNDESRTNLIVNYLPQTMTQEEMRSLFSSIGELESCKLVRDKVSGQSLGYGFVNYVRAEDAEKAVNTLNGLRLQNKVIKVSYARPSSESIKGANLYVSGLPKNLSQPDLEGMFASFGKIITSRILCDNISGLSKGVGFIRFDQRNEAERAIQELNGKTPKGYAEPITVKFANNPSNSAKAQIAPPLTAYLTPQAAAATRRLAGALPSAGRIRYSPLAGDLLANSILPGNAMTGSGWCIFVYNLAPETEENVLWQLFGPFGAVQSVKVIRDLQTSKCKGFGFVTMTNYDEAVVAIQSLNGYTLGNRVLQVSFKTNKTKTT

SEQ ID NO: 3784 - DNA, 9657 bp, DROSOPHILA
tcgcaaccaaacgtcttgctgttgttcagattggtatatatgctggccctaaaagatttacacatttattaaactccttgtatatattaataatcacatctatagatttgttagagcttcaaatatttgtcttagttatgtccatttattgtaagcacgttgaaacacattaatgtatatgttcatctgtagacaagtaatgcggagagagaagtctcagatactatagttagttgctctgcatttggcgttcgcaaagatacatagtttttttcccggtgtaggctaaaatcgttatatatgtataatgtgtatagtgtattatggtatggcacacgcacgtatgtatgtgcacacatccaagtcaaaccgaatagaagaattctgacggtgactttggaggactagctgccaatgtgagctctgcctttcattttgcttagaatgtcaagcgagttgagttacttaaaaagctggctgtggattaaatacttgtatgtcttggttaagcatatgtatgtgtgttatgtttcgtctatgatcacgtttgtacacttaaacacccataaaacgtgcaaatatgtttcgaaaaattccattttacgctgaacacttaaaccaaataaatcgggccgcatcgggcgtctactgcgattaactgaatccaaattgtatgtatatctatatgcatctctttaggtatctggtaaactctagttggctgctgccgcctcgcgaggcggtcaggaaaatccatcaaaatattatgtcattgtatgcgacgactatttggttttgaatcaatcgtttgtttgatttttgccagttcagcaaggtttttatattggttttttgggctcatattgttatcttctctctctctctctctctgctttgcattgcggggttgtcattttcattttcgatttatgattttctttttaaacgcacacaaaagagacgttaggaaaacactgggcggcaattcggagcagttcgcttaaagcccaatctcccgcatggccctgtacaagcagggattcttcaagcactccctaggacccagctgccggccgtgtgatccccgcaggatcatcaggatggaacgggccgccgactggcagtcgttgctgtcgccgcaaacgctatccgcctccgccaagtactgatagtcgcaggctacctgtgaggcaccctggaaacggaaatgcaatgggtaaactatagttaaccatactcgactcaggcatcctgttttcacttacacatagatagcatatctggtgaacaccgcagaggggcaggagctcctggttaatgtctccggagatgagatcgacgccccgacagcgctccgccatggactcgataatggggcactggttggagcccacaatgtagttcttgttgcccagataggcgtcgtttagggtctcgtagggagcgctgcccaggctgagtgcctcctccatggtatttggctgctccggatagcgcaagtaaccactgcgcttcctcttttccatgtccttgggtggtctcgagtctctggaggatttgagaaataaacacatcgaaataatgtaaatttaagggcattttcatttactctgccagttgatctgcctgctccttcttcaccgactttttgttcaaccagtaattggagtccaacgcgttctcctcggattccggttcgatggtattgcgcatcaggtgactctcgttgtccactgatctccttaacttatccagagccctgcgcattttctccagactgtaagcggttgccaagcgcgagaggacatggtccttgattctgcggatgtcgtccttgctgttgagtccctcgtgtgcacccgtatacttgatggtctcgtcgatgatgaagtcctcgatggactgcagcttcttgtccatgctgtccagcttttcggcatcgaagtcacgcttctttttctccgcctcggagctgtcatcttcgtcatcttcctcatcattattggtgctactatccgtgtcgctgcgtttctttaggtttctgttaggaattacatttattaagtgtataagaaatgtttaagtcccattaaaactcactctttcttctgcaaggacttctttttgcgatccagaccgaagtattgtgaccaatctatggacttcttggcacggagcatcaggtgacccacagtgggtgcatgaatgtgcttattgcctccaccatttccagatagactggcagcagctcgtttcttcttgcgccgctgctcatcgacttcctcggtctccaggtcagcttcaccgtcctcctcgtcaaactcgtcgtggtcatcctcatcggagctctcctcaccctcctcatcatgctcgtccgcctccgtatcctcggcgttctcgccatgcgcatgatcacttcgcttgcgatgacgatactcgggtgacattccaggcacatggccaccatgatgaccggcatggccgccatgctggaccaattcaccagcgccagctggagcggatgtgggcgtctccttgggcgtaacattcacccgctgaaagttgatctccagccgcatatcccccaaggcggtggcggtggctggcggggattcaggaagattggtcgtgacctttgtctgctcatccgccgaccgcttgcgtttctcctcgttatgtgattgcgattctccgggcttgccgaacagttcgctcagctcctgggccacccgctcatcggttctgcccaatggagattccggattggagttggtggtgctcctcttggccacagggaagcgtttcctcttatcaccgttgtatggcaaccatggcagaaccggataggagcgcttcttttgcatgagcaagtagtaaggcggcactcgcatccgcttcttttgctcgaactgctcgacttcctgttccggttcctgttgggttttcgcctggtccaggtggcgccaccattgacgcactgcatcccgatccctggcctcttcgatttcgcgcagaaactgctccgtgagctcattgtgagcgggctcagcgttcagtggctggatttcacgctcgcggaaagccgaaggagcggatccatctgaaaaagattgagaaatagatttgagaaattaatttggtcctctaatttactgaatgtggttattttatatttagacacactgacaaaatatattcataagccattaatttgtgcaaaacattaacagtttaatattgatatattggtattgattgatgtattattcattataagattataagattcaattttaatttaaaggatgaagtggcatgaaatgatacgttatataacataacgatgcagtttgcgatttatttaaacgttctttcctgtttagcttaaaaacttgataaatatctagattttcgacgatttgttttgcctatcaatgaaaaatgacttaactttgaccttggcaaaaacataatatgcgataaaaagagagtcgataaatcctggacgtgtgtgtgtgtggaggacatgcatcaagttgctgggtcgaccggccattaaatcaaatgacaggaagacaggcaggatctgtcggtcctgagccgctttccagctgattgcattcatcatcgggacgctggagtggagccgtggagcatcgtcccactcagcactcacaagttaatcgaagctaagtggttttagccagcccattgttggcccaatccactccatactccctccgctgggtgctcaagtggacgcatgctcgccgatgctctgtggatgtccacagttcgggtcaggataatagcacttagacgcataaatcgttcgttttcgggcattcgcattgaaaagtagccacttgagcaaggtgctaatacttgtccattagtgcgctcctcaatcaggatatttgggaaaaaaaggaccctaaatcatggcttcattctctagagagctttggcaatttattcacgtaataaaacaattttagttgcccttttttatgaagaatggatagttattatacaaactcttatatttaatggagttcagtcttgtaattcagacagtgaagtttaacactcatacacttttgctggggattatatcatgctcatatattttcaattaatttataataaaacatcaaactagcattgtgcagtgctacgtgaaggaccttaatagtgagtaggtattccgaaggtgcgtgattctcagcgctgtgctttcgacttaccgaactgctcgtcacgttcgcgaaaagaggagaaacgctttctcttctcatcgaccagattactggggaccaagtcgccatcgtcatcgagtcccagacccatgcccatgcccagatccaagcccaagcccaagttgtgatccggaccgtagttgtcctcgtcgcgttctaagtacttgccaagtgccttattaactcgatggcgattccgattcctattcttgccaaataaatcgccatctgtgcgagcgtttcgggttggtgaagagggttttggtgaagaggtggagtggccaaaagagaaaagaaaaggaaaaatggaaacgaggaaaagtaacagcgatacatgtgactgtgaggggaaaatccggtaaatctgtgcttggggatcggctatccggggcacgtgcactccgcatgcggcttcccgacatctacgtttgcctgtgatggatatcactttcagacttcagcaaccacttgcggttacataatctacacatgcagttgacggccgtcatcttcagaaccagccacacaaatcgaatagtaatatttcggcatatatgtacatatatgaattggcatatgacgaaatatgcttcactgaacagacatttctagagtaaatggcataattcactcccaaatgaatttaaaatataattattaggattttatgcacatacaaatactatttcattccgattttgagccatttgttaaatatttttaaattcaaattttaatttataaacttttaagcacttcaaatacactactttattgctatttacttttctatatatctaagttaatagtaattattttccgcataagttttaagacatctactccaaactacttccactcttgaaaatgatatacgagcaattttcaaacaaagttttccataattttccataataataaaaagcacacagataactataatcgacaagtacagggtatgcattaaaaattgatgaactacaaggtagattggagcatcttaaaggtcctgtctggcgttcattctagttcaaccttcaccttaacgttaatcaaagttcaaattacatgggaattgcttgattaacttacatcggcgtaacgtgtgagcaaaggtgaaggtctgcgcttttccccgaggaaaaccaatttcccggccagattcgcccagcccccctaactcaccttcatcccagtcgtcgagagctggctgcggaggggcgttcagtggatacttggccgcctcccgacgatgcagttcatccacggccgcctgcagcgaaaaggcggcggtgcgctgtggtgtcgctaggatgcactgcaccaccgccagcagcaccaacatggcaccactggggcctacaaatcggttggccattgctgccattacctcgctggctgctttccttctttcactctgacaccaaattgaactactaaatctggaaaaaaaatagtgcaaaaaatattaaattcataagttattttcgaagatgcacaggaaagcactttcgtaaaggtccttggtctagtctaggaaatttatatcatagcagcaaacagcaaatgaaaaaaataatagctttttaaattatttctttctcttaaactttgtatctatctgtaaatatatacgaagcttatgttaaaaactgcgatatttaaagactaaaaccacttaaaaccgcattgaattgtttaaaaatttcgatcggaaaacgtggcttaggaaaaccagttaaatgttcaacgaacgggattaaaatggtttttaatgcccgacacgtttgcgacaggtgcgtaaaaaaacttttaattacatttgcactttaaagcgttgtccttttccgtgcatgaatgtatgtgtcgcagtgtgggtgggtttttgtcgttgtgtttgtgtgtgtgtgttcgtgagtgtgtatcaggtgtcatcttttcgcggccacttgatggcgtgtgaaattccatatttcctcgcttaattatgcaaacgagcagcaggtacccgaaaattccggacttacgccgcacgaagtatttgaataatttgcccatttcatcctgactgattaatgaagcgaatcccacagcctcatgcatatagaaaggaccaaggaatataaatcaataaaattccaatgtgcctgcaaatatccagcgtgcttggcaaattagaggggaaaacttcatccgatgagatcttgtattttccggcccgactttccggcattcttggccgctgacaaaagccaagctgacaattatgggaaacttgaattgctgctcggatgccaactgccattgaaatgctcatcccgaccttatttattcgctcctctgctttttctcggcttcatggtggcgcacataagtatgctacgcatttctcggacggaatatatggcttggaagcagaatatatggtaatcataccaagacgcccactacacactacccactaccctccatccacaaccactctgctccatagttgtgctcctctcacttggctcatacctgtggtggtcacgtttgcttttcatttttcccctattaaatgtcaaggcagccgacgcttttcattcgctttccttggcttttcctgcgcttctatggccactcccgcgctgctgaagaaccctatttgcgtctcgcctgcagctgttggttcgtctcagtccacgttcattgtattattgctgcttggctggcttttgtctaagaaagcgagtcccccagttgttgatgtttttgtgtctgtgcctccgctctaatccagattaaacgcagctgcaaaaagcagattccatttcccctcgactgcaaagggtttccctgccacatgcctgttgatcggaatgatgcagctcctataagccatctactaaggctcttacaatgtgcagagaaattaaatggggctactctgtatcccgtatttttaattcagacccacggctgatgttattgtggccagaagcacaagccgctttgagctaaaggatacctatactaagttagtattaagtgtttttgtttagcctatcttagatagacttgttttctcctacatagatttgagctatagatttgcttacaaatgtttcttttggggttttgaaatttaaataaatatatgaataattatgacagaacaaatactcttaaatggatgaaattatagcaacttatgtaagaaaagttaccattctgctaagctaagaagcagtaagaaccgtagtttttttttttaacaaaatctcttctaacgcacaatttaagtggctaacagggcgtatgattaatatgcatagcttcttaaacgtcgttttaattcaatatcatattctctgtctatgctaattcgattatgatcgattcaaggaactaaagtctttataagttacgggttagtgagaatcactgccaacagctcaagtggttcacggggcgtatgattaatattgattgatgcgcctgtcgtcttacgtttcccacatcaaacggagtcagtgctaataatttattgaatttcagctgaaaagactctgcctctcgccaatcagatttcccgaccgaacaaatgcgacccagcagggcatttaaattagcgtcctaattgaatttgtcgcagcaaccatggatactactgctctatatatatatatatacatctataccacgagcaggacttggccattttgctagctagaaaagggatccttttgcgggaattgggacaaattcaatcgggcttttgaccggcgactaagtgaatgtgaatgcattctggcggcaaaggaagcggctaattaggggccggtaaaagctttttgccttaaaatatttaaggccaacgaggcaaatgtcctgtcctcggggaagttgccaacttgttagccaagattttgcgagcgtgtgtatgtatcagatattcagggaaatgcccgaggtactttgtcaacaggccaacaaacaattcatcagctccattgtccaattagtgaatcccgggagttgcaaatgaattgtacgcaattattttggctccgcttcgtcctcccacgcataaaaatatatatatgtatataatatatacacacacgcccaccagcgaaatcaatggaaacggaaaatcctgtgcaacatttgcgtaattccttcgccacacacacaatcactggccaaaaagtttgcacttttcacaactcacttggattgttttaacaatgctctttatttccacgactttcgagtgcagttttccgtgcgaattttccactttctgtcagacacttttcacaacatggcgtcacgcctacgccagcaacacaaaggaagcgctcgtcactgccagccagtagccactgtacccacctctgtgctcagccaaggcggaaccaagagtgtcgccagtctctggagcttccatgctttatacaggacccgcgaggaccgacggcacccgaagctcgccgagcgcctctcgtcctcgcgagacggggagcgtgggagtcgcggagagaaagcttttagctgcagccgagcttcgttcgggaagacactgaacaaaattcttagaaatagttaaagtgtatgcaaaaatttcttcgaatatatacaaaatgatattatgtctctactaataactgttgcaaaataataattaaatattaaggaaaaacatttttttgatctaataaatttgcattctacaataaatcgattggaaaattaaaatattttatagttactaattattattaatgcaacaagcaatccaagttttcaccacaattcgaatccacaatttcttatgaaaaatgtaacataacagcattataagacttcattcgaacttagtagtatatgattcttacgttcagtagaacgaactattgatactaggcagtctttgcacgcacacactaatagttagagtgtaatttgcctctgtttcaaaattgtacaaatataaatcgaaacactgattttttcatcgcgcattttatgtaaaaatgggaactgccactcagtttattgttggtttcatcggcgccctgggcgccttttgtctaggcgcagtgatcggctggtcaggaccggtggaaaatgaagtcaagaattctaacgcgtacaactttacccctcgtcaaacggaatggggcctggtgggatctctgatgactctgggtgcagctttctcgtgcattccggtgggcgtgctcattggtaagatcgggcggaagacgacaatgctaatcctgctgccaccgttctttatcggatggctcctgatcctcctggcatcgcacatagcaatgctgctgctcggacgcttcgtagtgggattctgcggaggagccttctgcgtgacttgtcccatgtacgtgac

SEQ ID NO: 3785 - DNA, 2349 bp, DROSOPHILA
ccttggctgagcacagaggtgggtacagtggctactggctggcagtgacgagcgcttcctttgtgttgctggcgtaggcgtgacgccatgttgtgaaaagtgtctgacagaaagtggaaaattcgcacggaaaactgcactcgaaagtcgtggaaataaagagcattgttaaaacaatccaaatttagtagttcaatttggtgtcagagtgaaagaaggaaagcagccagcgaggtaatggcagcaatggccaaccgatttgtaggccccagtggtgccatgttggtgctgctggcggtggtgcagtgcatcctagcgacaccacagcgcaccgccgccttttcgctgcaggcggccgtggatgaactgcatcgtcgggaggcggccaagtatccactgaacgcccctccgcagccagctctcgacgactgggatgaagatggatccgctccttcggctttccgcgagcgtgaaatccagccactgaacgctgagcccgctcacaatgagctcacggagcagtttctgcgcgaaatcgaagaggccagggatcgggatgcagtgcgtcaatggtggcgccacctggaccaggcgaaaacccaacaggaaccggaacaggaagtcgagcagttcgagcaaaagaagcggatgcgagtgccgccttactacttgctcatgcaaaagaagcgctcctatccggttctgccatggttgccatacaacggtgataagaggaaacgcttccctgtggccaagaggagcaccaccaactccaatccggaatctccattgggcagaaccgatgagcgggtggcccaggagctgagcgaactgttcggcaagcccggagaatcgcaatcacataacgaggagaaacgcaagcggtcggcggatgagcagacaaaggtcacgaccaatcttcctgaatccccgccagccaccgccaccgccttgggggatatgcggctggagatcaactttcagcgggtgaatgttacgcccaaggagacgcccacatccgctccagctggcgctggtgaattggtccagcatggcggccatgccggtcatcatggtggccatgtgcctggaatgtcacccgagtatcgtcatcgcaagcgaagtgatcatgcgcatggcgagaacgccgaggatacggaggcggacgagcatgatgaggagggtgaggagagctccgatgaggatgaccacgacgagtttgacgaggaggacggtgaagctgacctggagaccgaggaagtcgatgagcagcggcgcaagaagaaacgagctgctgccagtctatctggaaatggtggaggcaataagcacattcatgcacccactgtgggtcacctgatgctccgtgccaagaagtccatagattggtcacaatacttcggtctggatcgcaaaaagaagtccttgcagaagaaagaaaacctaaagaaacgcagcgacacggatagtagcaccaataatgatgaggaagatgacgaagatgacagctccgaggcggagaaaaagaagcgtgacttcgatgccgaaaagctggacagcatggacaagaagctgcagtccatcgaggacttcatcatcgacgagaccatcaagtatacgggtgcacacgagggactcaacagcaaggacgacatccgcagaatcaaggaccatgtcctctcgcgcttggcaaccgcttacagtctggagaaaatgcgcagggctctggataagttaaggagatcagtggacaacgagagtcacctgatgcgcaataccatcgaaccggaatccgaggagaacgcgttggactccaattactggttgaacaaaaagtcggtgaagaaggagcaggcagatcaactggcagaagactcgagaccacccaaggacatggaaaagaggaagcgcagtggttacttgcgctatccggagcagccaaataccatggaggaggcactcagcctgggcagcgctccctacgagaccctaaacgacgcctatctgggcaacaagaactacattgtgggctccaaccagtgccccattatcgagtccatggcggagcgctgtcggggcgtcgatctcatctccggagacattaaccaggagctcctgcccctctgcggtgttcaccagatatgctatctatgtggtgcctcacaggtagcctgcgactatcagtacttggcggaggcggatagcgtttgcggcgacagcaacgactgccagtcggcggcccgttccatcctgatgatcctgcggggatcacacggccggcagctgggtcctagggagtgcttgaagaatccctgcttgtacagggccatgcgggagattgggctttaa

SEQ ID NO: 3786 - protein, 703 aa, DROSOPHILA
MAAMANRFVGPSGAMLVLLAVVQCILATPQRTAAFSLQAAVDELHRREAAKYPLNAPPQPALDDWDEDGSAPSAFREREIQPLNAEPAHNELTEQFLREIEEARDRDAVRQWWRHLDQAKTQQEPEQEVEQFEQKKRMRVPPYYLLMQKKRSYPVLPWLPYNGDKRKRFPVAKRSTTNSNPESPLGRTDERVAQELSELFGKPGESQSHNEEKRKRSADEQTKVTTNLPESPPATATALGDMRLEINFQRVNVTPKETPTSAPAGAGELVQHGGHAGHHGGHVPGMSPEYRHRKRSDHAHGENAEDTEADEHDEEGEESSDEDDHDEFDEEDGEADLETEEVDEQRRKKKRAAASLSGNGGGNKHIHAPTVGHLMLRAKKSIDWSQYFGLDRKKKSLQKKENLKKRSDTDSSTNNDEEDDEDDSSEAEKKKRDFDAEKLDSMDKKLQSIEDFIIDETIKYTGAHEGLNSKDDIRRIKDHVLSRLATAYSLEKMRRALDKLRRSVDNESHLMRNTIEPESEENALDSNYWLNKKSVKKEQADQLAEDSRPPKDMEKRKRSGYLRYPEQPNTMEEALSLGSAPYETLNDAYLGNKNYIVGSNQCPIIESMAERCRGVDLISGDINQELLPLCGVHQICYLCGASQVACDYQYLAEADSVCGDSNDCQSAARSILMILRGSHGRQLGPRECLKNPCLYRAMREIGL

SEQ ID NO: 3787 - DNA, 6721 bp, DROSOPHILA
aaaaatgatcatttccttttcgtttcatcatcgttttttgatcacaggtttttttttctttctttcttttgcgcgattattcttgtgcttttttttttttttttttgtagaaataaatcataaataaataaaatggaaaacccgattgcataataaatgtatgtaaataaaactgtgctcaaaataccaaaaaagtcgaatatcaaattaaaattaatgtgcaccgcaacttttcgttaagtgtacttaagccaaacgaaatgccgcaagcgatggaaattttggaaaatatctcttacaaagattgagggggtgaaaaaaaaggaggaaggactccaaaaaaatgttcgagttcctacaaaactagaacttagttcaactaagatgtgtgtaatgtgtaatgtgtaaggacgcacttacgcatcggtataaatatagcttaatgttaatccaattgttacacatttatgtatatggtttagttcaatatattttgccattggcccatgcacacgttttttctctccgtgtctgtttgtctacgtacaagcggcgttagtctatctatccgtttgatcctcaaaagttcgtcctcacttctgtgctacacattgcaattttctagccactcctctggcacaaaaaaaaaaacaaaacaaatcactggactaattagggattaacttgatttgtgaatttcgcacaacatattgcattcgttaggaacaattcggttattatgaaatgccaaccgcggacagaggggttttttgtttagttctatgatttcgttagacggaaagaattcggataggtatctgtatctctgggccctactaatttcacacattagctatggctaatcctcgcctgctgtttcatctcttcgctcttcctttgcgtctgacttagtctacagttttaatataaaacaatgagctaattaggcggttctcatctggcggccaactccaacagcaacactgcagcacggcgcacaactgggactttagcatcgctccagttgctcgcaggattgcgtctgcggctttttgcctttgcgcttcaaagagcgactgctgccccccatcgccaaatcggtttgatagggatcaatggcacagaactcgggtccaccgaccatgttgtgctccgccagcttgctgtacttctttcgcgagcgcgtaaagagattgaaaagggcacggattttgctcgatccagccgagtgatgctggtgctggggatcattgtggtcatcatgttcatggtgctgtccctcgactggcgcctcaacagacttggatttggttatgtgcttgggccgttgcttcttttggttcttggtctgctggcgctgttcctgggcccgcagcttaatgacatcgggatgcggctgaacatcttgcatccgacgcgtattcagtatggagttctcctgcatgtgatagccgttcacggcttccgtagaagcaatggacggtgaggcggacgcagtggtggacgatgaggacagcgatggcgaggcggagcggtaggtggcgaagctaattgaggcactggatgtatatagatccgatctggcagtcgttcgcggcgtggccacaaaatcgggctcttcgaaactgacgctctggaaggtcactgaactcttgcgcgacgtggtggagttctggcgcatctgactggcgggcacttgacactcatcgtcggcatccgcatctgctgtgtccacctccgccgccaccgcgtcctcatcctctgcttccccttcctcctcctgcctggtgaagaagcagtgccgtggaaactgcgagccggaaaagttacgctgaaagcgtccaccctcgaaggcctcctccgcatcatcgcaatccctggcagtcagcggtgtgctggagttgtacatggtcaggtcgccactggatttggagtttaccctttcgctgctggccatggacatctttttgatcacatcccgatagaaggcatggtcatacgtattgttatcctccgatggcagagttaactggttgggcagtgcaaagctattgctaccgttcgcaggcggatgatgactgctgctgtccagcgaatgcttctttctgcccacagctggactgttgcccagactgccgccaaagcgatgcagatgcacggcaccactggccgccgatgaattgccggacttcaggaagtgaaagcaaccggtcggactggcaacggtgtccgtttccgagctgtcatccgttaccaaatagagtggtggtggctgataagcaagcggatgatcaagtccgtactcctggctcctggcgcgatggtagatcttggctggggattgactggtggtgctgctgttggagttgttccggccgttttggaggacaattatcgtgttcggttgggaggtcaggttagtttgattgttattgttattgctattaatagtactaatattatttagctgattgttgttgttggcggagatgctgttgttgttgttgttgttgttgttggtggttgtggtggtggtagttgtgatggtggtggtgatggctttacaattgccaatgttgttgttgttggggcgcgttagtataatgggtatacctgggtacaacaatggtgtggccggcgtcccaccagcgcctccacttccacccaaaattcccaaacccggcggcggtgtcagcgaggccacctgttgctggttctgctgctgctgcttcttgtccagattcggagcactcttgctgaatgaggagtgagttgaggtctgggcgggccattccggctgaccgccgctcagttgcgaaggcaatagggatcgctcccgctggtgcatcgtcgacgggccccacgtcttgcccttgtgcccatcggtcactgattcaccccaatgtcatcaaaataatacggaacataagaacataacgaagaaaccaaaggcaaatcaataaaatatacaaaaattaattcaaaaataatgataacaaaaatatgcaaataatctagttcaatttgtccaacgatacgaggtggtatcttacattcccatggccatgacgtctagtctcctgttctaattttgggtctacttaatgcctaatcttatctcaaagacctgcataatgcactgaattctcatcagagacatacgtacatagagttaagtctaacaaatataccataaaaccatgattgaaaagtataattcatcataggactgtactatatataataccctcaaattaatcagatctctgggatagacaaagtactcacgtgccacgatgcgcaatccggagaaggaaggtgatcccggctgttccgccttgtcgcgtacagccgtaatcgtgtgccggaagcccgtgggcagcgatatctgcagtggtttgttctaaaagatagatataagatatgttatgcaagatttttttttggctaatttgactcacatacctttttgccctttttgtgtttgcgtttcgatggcaccggctgcaacatgacaagctcccgttcgatcaacactctttcacgctcgcgcagattctgctcccggatcttcaggagattcgccttttcgcgctgctcgttttgcaccctgagcagctgctcttccttgttgcgcagttcctgtcgggattaaaagggataacatggtggaacgtggcgggttagtgtgggctaagcatgatcactgtacacggggacatgtgctagaaaatagcattaactaggaactagaaaccatgcagctgttggcttgtgtgcggctctatcgtgggagttatccagccaataataaaaaaaaaacaggataactttgggtaaaatagaatagagtaaagtaatgtagaatagagtaaagtaatgtaacgaaacgaaacgaaacaacagaacgaaacgcaacgcaacgcaattgaaacgcaaacggcgggcaagagaaacctgttggacgcgcttacctcttcgatggtttggaaacgcttaacgtcgttggatgttttattgtaaaacaagggaattttgtattgttttgttttggagagagagtatataccaaattattagaatttcatcaacaacgaccaagtgggagaaagaggggaacgactatggaagaactgaagggcgcggcgtaaggccaacaaggaacggtctagaaacgatctagagcaactcaaacaggtagggggagtttatattttcagtttgcctggcgttttccagacagttggtaccttttctttttcgcgcaaatcgtgtagcactccagcgatctcctttcgccagcattcctgcatgtagtgaaacgactcctggggcgttagggtgaatttggagcatgcgatgctctccagctgtttgagaatctccttgaagcccggtcgcttgtgcggatccgtttgccagcagcctgcgggatttggacataatgaaatattacaataatatgtataggatcattgtctattgcgttcacttactcttcatcagggctccccacgtctcggggcaggtttttggtatgggcaatgtcagcgtgttaacagccacgccataggccacggacaacggatcgaagcccttgtagggcgtctcgcccgttatcagttcccacagcaagacaccgtagctccaaacatcggagaatctggcgggtaaggagttttgttagttaggaagacagacgacagagtgtgagagaaatggagctcacttggaataggtgctaacgctgatgacctccggtggcatccaagcgtacgtgcccgccgcactcatcctctgcgtgttgtacatctccctggccaaaccgaaatccgtgatcttgagcgtcttctgctgcagatgattgccctcgatggcctcgtagatcagcacattggaggacttgaggtcgcgatgtatgatcgacatgggcgcctcattgtgcagatagttcatgcctctggctatctgaatggcccagttgactagtacatcgggtggtatcttgccagccagtatgcgattgagacttcctcccctggcatactccatcaccagacagagtttggtattcagacatactcctcgcagggctgctatattttcgtgcttgagggcccaaaacagtttggcctcctgcaggacattgtcccgcatcctctgcatatcatcctcgcccgtttgatgggcaatcttaatagccacctcctcgccatcgtagtagccacgatggaccttgcagaagccaccggagccgataacttccttgatgtccagctcattgtattcgatctcatgcggctggatgtcgccaatggcggacgagacattcagttgcagtgggtcctcatcggtgacaaagtccttgggaaagacaccgacctgcaggagaaagattggggtttagttcaatggttcattgttagaaaggtaatcaatcaccttatctccaatcttgccggtccaccagcccacatcgccagacacctcgctgtccgtggacaggaccacaacgatttcgccgcgtcgcagtgtcagctcatcctcgccctgggcatcgtagtcatacagcgcggtccacaggctgccatcgcccacctgggtctcgacttgctctagatctggtatgggaatctctggtatctgcggatgatgcagttgctctaactgctgctgctgctgctgctgttgcagctgctgctcctcgctgatcggcagcatgttggtggtgtccaatcctcgggagacctgcgagggcatcagaggcgcacagttggcgacatggaaaccatgaatctcttctttgtttttgttttctgcttcttttccttttttgttgttttctctttgcttccttcgctttttaacttgcttttgtttcgctgtgtgtgaaagagagataaaaccgcaaaaggggcgaagaagaagcagcagcttagtaatatttgttgccaaagggggtggggtggggtcagcttacgggtaaggatgttgcggctaatcctgctctcctgcccaccggattcggattctccactctccttgtgtcccactgtccgtccgtctgtccgtccgttgaccacacgcacaagagcaaaaacaatagcaacagcgagaacaacaatcacaacaacaacggcacacaatcagacaacacggtacaaaacacacacacacgcacacgcgctgctgcacaccatggtcgctctctcgcagtcgcagtcgccgttaacgtcgtcggttattttgatctatccttgatcctgtgcaatcggttatatccgttttattagcccgtttctgcatatgttttttaaacacatatgtattaaaaaaaaaaaactagagttgcactgttcaaatgtgaactagtttaattgaactggtctttggacccagccgagtgaactggttacatttgcggttcacctgggattttggttccagttcgttggcataattttaactaaaattgtgatcaaggtagttgtttaaatacctttatattggtaattgttaatatttgtggtagaacaaggttttgtcgatcattttgttgtggctcacataaaccagttgctgcatttatactagttccattcgcaaatgtactaaaaaatgccatcaaaacggtgttgggcaacgcaaaatatttggtatttcaaaataccttattcagtattttcaatattggtatttatcatgtcgattattttattga

SEQ ID NO: 3788 - DNA, 3072 bp, DROSOPHILA
atgctgccgatcagcgaggagcagcagctgcaacagcagcagcagcagcagcagttagagcaactgcatcatccgcagataccagagattcccataccagatctagagcaagtcgagacccaggtgggcgatggcagcctgtggaccgcgctgtatgactacgatgcccagggcgaggatgagctgacactgcgacgcggcgaaatcgttgtggtcctgtccacggacagcgaggtgtctggcgatgtgggctggtggaccggcaagattggagataaggtcggtgtctttcccaaggactttgtcaccgatgaggacccactgcaactgaatgtctcgtccgccattggcgacatccagccgcatgagatcgaatacaatgagctggacatcaaggaagttatcggctccggtggcttctgcaaggtccatcgtggctactacgatggcgaggaggtggctattaagattgcccatcaaacgggcgaggatgatatgcagaggatgcgggacaatgtcctgcaggaggccaaactgttttgggccctcaagcacgaaaatatagcagccctgcgaggagtatgtctgaataccaaactctgtctggtgatggagtatgccaggggaggaagtctcaatcgcatactggctggcaagataccacccgatgtactagtcaactgggccattcagatagccagaggcatgaactatctgcacaatgaggcgcccatgtcgatcatacatcgcgacctcaagtcctccaatgtgctgatctacgaggccatcgagggcaatcatctgcagcagaagacgctcaagatcacggatttcggtttggccagggagatgtacaacacgcagaggatgagtgcggcgggcacgtacgcttggatgccaccggaggtcatcagcgttagcacctattccaaattctccgatgtttggagctacggtgtcttgctgtgggaactgataacgggcgagacgccctacaagggcttcgatccgttgtccgtggcctatggcgtggctgttaacacgctgacattgcccataccaaaaacctgccccgagacgtggggagccctgatgaagagctgctggcaaacggatccgcacaagcgaccgggcttcaaggagattctcaaacagctggagagcatcgcatgctccaaattcaccctaacgccccaggagtcgtttcactacatgcaggaatgctggcgaaaggagatcgctggagtgctacacgatttgcgcgaaaaagaaaaggaactgcgcaacaaggaagagcagctgctcagggtgcaaaacgagcagcgcgaaaaggcgaatctcctgaagatccgggagcagaatctgcgcgagcgtgaaagagtgttgatcgaacgggagcttgtcatgttgcagccggtgccatcgaaacgcaaacacaaaaagggcaaaaagaacaaaccactgcagatatcgctgcccacgggcttccggcacacgattacggctgtacgcgacaaggcggaacagccgggatcaccttccttctccggattgcgcatcgtggcactgaccgatgggcacaagggcaagacgtggggcccgtcgacgatgcaccagcgggagcgatccctattgccttcgcaactgagcggcggtcagccggaatggcccgcccagacctcaactcactcctcattcagcaagagtgctccgaatctggacaagaagcagcagcagcagaaccagcaacaggtggcctcgctgacaccgccgccgggtttgggaattttgggtggaagtggaggcgctggtgggacgccggccacaccattgttgtacccagccaagatctaccatcgcgccaggagccaggagtacggacttgatcatccgcttgcttatcagccaccaccactctatttggtaacggatgacagctcggaaacggacaccgttgccagtccgaccggttgctttcacttcctgaagtccggcaattcatcggcggccagtggtgccgtgcatctgcatcgctttggcggcagtctgggcaacagtccagctgtgggcagaaagaagcattcgctggacagcagcagtcatcatccgcctgcgaacggtagcaatagctttgcactgcccaaccagttaactctgccatcggaggataacaatacgtatgaccatgccttctatcgggatgtgatcaaaaagatgtccatggccagcagcgaaagggtaaactccaaatccagtggcgacctgaccatgtacaactccagcacaccgctgactgccagggattgcgatgatgcggaggaggccttcgagggtggacgctttcagccagatgcggatgccgacgatgagtgtcaagtgcccgccagtcagatgcgccagaactccaccacgtcgcgcaagagttcagtgaccttccagagcgtcagtttcgaagagcccgattttgtggccacgccgcgaacgactgccagatcggatctatatacatccagtgcctcaattagcttcgccacctaccgctccgcctcgccatcgctgtcctcatcgtccaccactgcgtccgcctcaccgtccattgcttctacggaagccgtgaacggctatcacatgcaggagaactccatactgaatacgcgtcggatgcaagatgttcagccgcatcccgatgtcattaagctgcgggcccaggaacagcgccagcagaccaagaaccaaaagaagcaacggcccaagcacataaccaaatccaagtctgttgaggcgccagtcgagggacagcaccatgaacatgatgaccacaatgatccccagcaccagcatcactcggctggatcgagcaaaatccgtgcccttttcaatctctttacgcgctcgcgaaagaagtacagcaagctggcggagcacaacatggtcggtggacccgagttctgtgccattgatccctatcaaaccgatttggcgatggggggcagcagtcgctctttgaagcgcaaaggcaaaaagccgcagacgcaatcctgcgagcaactggagcgatgctaaagtcccagt

SEQ ID NO: 3789 - protein, 1020 aa, DROSOPHILA
MLPISEEQQLQQQQQQQQLEQLHHPQIPEIPIPDLEQVETQVGDGSLWTALYDYDAQGEDELTLRRGEIVVVLSTDSEVSGDVGWWTGKIGDKVGVFPKDFVTDEDPLQLNVSSAIGDIQPHEIEYNELDIKEVIGSGGFCKVHRGYYDGEEVAIKIAHQTGEDDMQRMRDNVLQEAKLFWALKHENIAALRGVCLNTKLCLVMEYARGGSLNRILAGKIPPDVLVNWAIQIARGMNYLHNEAPMSIIHRDLKSSNVLIYEAIEGNHLQQKTLKITDFGLAREMYNTQRMSAAGTYAWMPPEVISVSTYSKFSDVWSYGVLLWELITGETPYKGFDPLSVAYGVAVNTLTLPIPKTCPETWGALMKSCWQTDPHKRPGFKEILKQLESIACSKFTLTPQESFHYMQECWRKEIAGVLHDLREKEKELRNKEEQLLRVQNEQREKANLLKIREQNLRERERVLIERELVMLQPVPSKRKHKKGKKNKPLQISLPTGFRHTITAVRDKAEQPGSPSFSGLRIVALTDGHKGKTWGPSTMHQRERSLLPSQLSGGQPEWPAQTSTHSSFSKSAPNLDKKQQQQNQQQVASLTPPPGLGILGGSGGAGGTPATPLLYPAKIYHRARSQEYGLDHPLAYQPPPLYLVTDDSSETDTVASPTGCFHFLKSGNSSAASGAVHLHRFGGSLGNSPAVGRKKHSLDSSSHHPPANGSNSFALPNQLTLPSEDNNTYDHAFYRDVIKKMSMASSERVNSKSSGDLTMYNSSTPLTARDCDDAEEAFEGGRFQPDADADDECQVPASQMRQNSTTSRKSSVTFQSVSFEEPDFVATPRTTARSDLYTSSASISFATYRSASPSLSSSSTTASASPSIASTEAVNGYHMQENSILNTRRMQDVQPHPDVIKLRAQEQRQQTKNQKKQRPKHITKSKSVEAPVEGQHHEHDDHNDPQHQHHSAGSSKIRALFNLFTRSRKKYSKLAEHNMVGGPEFCAIDPYQTDLAMGGSSRSLKRKGKKPQTQSCEQLERC

SEQ ID NO: 3790 - DNA, 6616 bp, DROSOPHILA
ggtctgcatttggccacttgatagtcagccggacttttacgcatatgtcggcaattttttatttatcgacattgcgttttattaaaaggtgttggacggatagaatgggcaacttcaactgatttcctctaggtttcactcactgatattgatagcgaaaagtatgtttttctgtatttcagttttttccccaggggaaaattccatattaatactgactatctgtcccacatgcaaataactcaaacaaaaggtaattttgaagtgggttccaactaacaaaactgccgagtcagatggttcgcaggcgtcaggggtcgggcccaaaggtctgacaccaacacgtcgcttggcggtgggcgagagttcattattaaaagtttttaaaagcagataagtgcacagactgatagagatacgaatatccaagcttggcaaacactcccgcatccacacgcagaacagaagttgcactgagcgaaattttccttgttaactcaataactaatttaagacaacccgtttcaggtattcagtatctcagttttaacttattatatacatatgcgttattatacattatccattatgttgtaatgcaataatgacgtaattgcaatttgtattttttgcagtgcagtgaaacgataacgatagcccctgctcgggcgccacttcacctctaattgaaacattaagttgcacatcacgtacgcggtgtcagacactagacgccaccaaacgcccgagaatcgggatgggagtcaaggaatcagggaatgggggtcacctaggagtatgctaaaatgcggctgcggtggcctttggttttaccttggtgctgaagcagatgcccttccgtaccccctcctcgactttcagggactatcaaccactcagcactttatttttccgtgttggcattttaaaaaggcatttaagctgagctccgtgggtttttgttaagtgtgcagagtgattatgccggaaatttgtttgtctatgatttcgtagaggttccctttgcttttggcaggcagggtctgatgaagatctgccgcttttcgcgtatccactcggtcatcactgtcggaggaattgaatttagaggggtttgaagacggattaatgactatcaactatcatcaactcaccccatttggaacccacaatcactggacaggcggcgtgccttgtgcggggatcaccatttccatccgtatccaaattgtaccagaagattgcggttccagcctggggagacacataatatcccacgtctccaaagacggtggctccaccttgttcgacatcagtcagctgaaaaggggggcacataatttgaataatcttgttattaatccttataattactcacatagaaaagcacagtagcaatacgatcgcccaaatcgatggagtagcgactacgtgtatcagtgtgattactagacgcaaaatcaaagtaatccatatgcaaaaaatagtgtccacctatgccgtaattaatcacctgccaattaataagtcttaaatatgcacatatatacatatatatcctgggtaactacctgaaatccttcagaatcagccaggtcaaagccagtcatgtccatgatgcgcctagtaattctcttcgtcagctcgttactctcctttttcaaccaaaaacccttggcagttcttcccctgttcttttttggaactgctcgttccttatgaattttggtgtttttcatattctgagcagccttgcctatcaacatagatatttctcgagcagagagcacttcgtgataaagcaccacatatggatccaatccgatttgctccgttttgagtggagctaagcgaaggaatggagtcgtggtaaagttatagaaacagtgcagtctagtggagctctcgagtggtccgttgcagcttaatttgaacgcatttgcgattggaacattccgcttcttattttctgtaggggattgatctggttgattctcaatgaagtccgttgtttttttccacagtcgaagtacacgcgcatcgtggggctgcagcttcaagcaattgtgcaacagaggcaaggcttctgaatagttttctataaataactacagttaagtttagtacagctaaaggagtgacaactaacgatcttttatttgggcctcggcaagtaatcttagagcatccacttctttgattggcaggtgccttggctggattaaaagttcctcttggaggcgctgtggcacttcctgcagctattgaatagcatccgatggtctatttttcatgaaaaggtaagctcctaccgaaagaatgtctgcagtactcatgctgtcactttagagtgagataaggtactagaatatatttaatattgaaccctttaaatggtacccacttgtactgttttccattaatgttcccattaataaaatcgccaactttcaggtcatatgtactctgaattcttgctatgccctcgcaggcatcccataagtcacgttcggtgggaagctcatccttccagctgtagaatgctttcaattgccatatccccactggttgctccatgtactttcgccagttgatccaatcctgatgcaatcgtcggatgattgaaaagccattcagcggattggacaaataggatatagcattccttcttcctttctcgttttcagcacgtattactaggagttgactaaggaaatactttacacaaaaagttcagattggtgacttgcaaattttacctgcgaattatctccagcttctgctccagggcatttgtatagttttcgaggttatcaatcagtttcttttccagctcgagaagtggcaccattgtcaccagtgataaggagtgactcttttcaagcggacggtgtccgaggaccaaggtgctgtgaaacagcatcaccagaaggcacctgataaaataacccattgtttgttctttgatgccatgtactgccgtagttatgagtatttactttgacgtttattcaggcctactaaataaatcttattttttaaaagcatgttagctttgttatttcgcctttattatacagtcagataagctgtattatttctttcaattaaaattcctgcatttcaagaggtgaaaagcgcaggaaatggtgctaaaattttaggtgcagtggagttcctattttttgaatataacgtttaagaacctatacaattttcatgtgtctagatcgatgtgcatttattttcatgtttttaaaaatagaaacccgctttcttatcttgtgcttttaatgcaaaatgtcaattaatggttggttcacgaccattaaacgatatttagcaggaatttccatttcttgattttgatgaacgactctggggaaaacacctattcctcttcggaatgtcgcgacttgatttgcaattgttcttatcgctgggaatgtttaattgacagcattatcgattctaatatgactttattgagttttatagtggtcgtatagtatcacttgtctaaaaacagtttcgctgagaatcacattcgctttttgaggcaaggtctgctgaatatctgttcgcgctctcgaatccacttgttgcacactacaaaggagtgaataagaaatacagatcgcagatgatagtttgtaagatggcgaacataccccatttggaacccactataacggggcaagcggcatgaagagtttgagtatcaatttgaccgttgtccttgagattgtaccacattaccacagatccgcgttgtgggaagacggcctttctaatgtttggaaacacggtggctccaccttgttctacatccgtcagctggagataattaagatatatcttatttgccaccatgaatagcaagacatgtgtgtttcagttacttacgtagaagagtactgtcgcaatgcgatcgccactcatggcagtcatgttggagttctttaggaaaaattaaagccgatgaagagagcacttcttgttgagatcagttacttacagtcttgttaaagaagtcgtagtgctggtcgtagtggcctcccaagccgtagttcatcagctgcagcatctcggagccatagagattgaacccggtcatgtcggagatgcgggcattaagtcgaacagtgagcgggttatagccatcggggaaccaggccactttggaggtcctggtcttcaccacctcgttccgaccggaggaggcctgatagacggtggccctttttagaccaggagtggccataccttggagctctttgatttccttgggtgagagcacatcgtggtagagcaccatgtaaggatccaggcccaccagttccatcttgagcggagcaaggatcagaaaaggcgaagtggttctgttgtacagacagtaaagcttgctatccgcggacggcgggaactgacctcgacagccgatctggtaggcagttggcacgcctgttgcctgaacctgcaatgtttttatttccagttaggttaattttagccctatctgattgaccttatcaaccagccaacacaacacctacgtacctttaccggaggcgcattattggtgcccgtccttatcatcgtttcgatttccgacttcttcagcaacagtttaatatcgtgcgggttatcagtcagagcaatgttgacaactttcagggcatcggcgtgctggtctgttttgattttaatagtagtgacactatagtggtagttaggcaccatatcttgaaatccgtcactacttactaagctttaacagggtttcagcatataccatccgcacttcatttttggaaatctcaagcggagcagccatcgaaaaggcctccatcaatacaacggactgatagatccagctagcagctgccaaatagtttttctggtcaaataagatttgtcccatggcataggtatccaatacagtgagactcacactgcaaacattatggtttagtgggttatcaataaaggaatgtttaactagctcaatcctacttgtactgtttgccattgaggaatccatgggagatttccggcactttaaggccataggtgctttgaatgcgatccaaggcagtgacagcctcctccacatccgtgtgggtgggcatgtgttccctcaactcctggattcgctccacctgagaaatacccaccggatcgtccatgtagagttgccaaataatccagtcgcgattcatgcgacgaatgagggaaaaggagttcaggggattggataagtactcctccgtggaactgcgggctttgtcattttccaaacgcagacttgttatgctcctaaagaaaaattaaatagaaagatggtttggaagtcgaattttgttaagtgaaagtgaagggacagtgaaagaagctagtagcccagtaccttcttacggtctgcagtttcttctccagctcgacagcgtaatcctctaggttgtcgatcagctgcgcctccaaatcgagcagcttgaccattcctgccaccgaggtgcagtggctctcctcgcctttcgcctggcggaggagtagaagcagcacctggtaggtgagcagcaccctcaccggaagcagccacttcgaagagcgcatcgtgggttacctttctggtcgaagttctatgtgggtctacgtgccggagccaactgccagagccaaaatagtcggagctggcaagttaacatcgagccgagataaataataaccgtagttcgtttatagcgttttgttcggctgctgataagcggcgcattgatagcggcacgcagcgatttaattaacccgagagcaccggaacaaaaatattgagttggcactacgtgctcgccatttggaaaagagctgcgtcatcaaagaacgtgctctcgcccagatcactgaccaccgccaatacaatgtgtgcaatgagcaactgcttatgaagagtcagccaaagacctacgatggttggaaaagctatctcaggtgaatcgcttaattcgctatcttttagatagacatatatttatctgaatcgattaataataacatttatgtagaggttgtaggtacatattattataagataagatatcacattaaatcgaagctcttgttaaagggttgtatgtattccaaagccattctttgcatttacaatttttaaacaagatttttctttttccaagacccttgggacatatacttcaaggtcttgaattcaacttttgccctaaaattctttctatcgaaaggagttctcacaaaattcaattcaatcaacatgaataaactatatttgtattccaccgccgatttactgctcatccaacctggagcagtacgtccggcgctcttcctattctacaccttggagacgattttaaacatgatctgcattggatatcacatcaccggattccagcccctcgagtggaaagggcaggaggtccactacctgtgcctgcttatctttaacgtcttcatggtgatgaacttcttccagagcatcgcgatttgcacgggacgcgtgcccaatgtcttgatggagatatggaaagcatcggtggcagccttcgctttcatcctgatatcctttctcaccatgtgggac

SEQ ID NO: 3791 - DNA, 2772 bp, DROSOPHILA
atgcgctcttcgaagtggctgcttccggtgagggtgctgctcacctaccaggtgctgcttctactcctccgccaggcgaaaggcgaggagagccactgcacctcggtggcaggaatggtcaagctgctcgatttggaggcgcagctgatcgacaacctagaggattacgctgtcgagctggagaagaaactgcagaccgtaagaaggagcataacaagtctgcgtttggaaaatgacaaagcccgcagttccacggaggagtacttatccaatcccctgaactccttttccctcattcgtcgcatgaatcgcgactggattatttggcaactctacatggacgatccggtgggtatttctcaggtggagcgaatccaggagttgagggaacacatgcccacccacacggatgtggaggaggctgtcactgccttggatcgcattcaaagcacctatggccttaaagtgccggaaatctcccatggattcctcaatggcaaacagtacaatgtgagtctcactgtattggatacctatgccatgggacaaatcttatttgaccagaaaaactatttggcagctgctagctggatctatcagtccgttgtattgatggaggccttttcgatggctgctccgcttgagatttccaaaaatgaagtgcggatggtatatgctgaaaccctgttaaagcttaaccagcacgccgatgccctgaaagttgtcaacattgctctgactgataacccgcacgatattaaactgttgctgaagaagtcggaaatcgaaacgatgataaggacgggcaccaataatgcgcctccggtaaaggttcaggcaacaggcgtgccaactgcctaccagatcggctgtcgaggtcagttcccgccgtccgcggatagcaagctttactgtctgtacaacagaaccacttcgccttttctgatccttgctccgctcaagatggaactggtgggcctggatccttacatggtgctctaccacgatgtgctctcacccaaggaaatcaaagagctccaaggtatggccactcctggtctaaaaagggccaccgtctatcaggcctcctccggtcggaacgaggtggtgaagaccaggacctccaaagtggcctggttccccgatggctataacccgctcactgttcgacttaatgcccgcatctccgacatgaccgggttcaatctctatggctccgagatgctgcagctgatgaactacggcttgggaggccactacgaccagcactacgacttctttaacaagactaactccaacatgactgccatgagtggcgatcgcattgcgacagtactcttctacctgacggatgtagaacaaggtggagccaccgtgtttccaaacattagaaaggccgtcttcccacaacgcggatctgtggtaatgtggtacaatctcaaggacaacggtcaaattgatactcaaactcttcatgccgcttgccccgttatagtgggttccaaatgggtgtgcaacaagtggattcgagagcgcgaacagatattcagcagaccttgcctcaaaaagcgaatgtgccttctggtgatgctgtttcacagcaccttggtcctcggacaccgtccgcttgaaaagagtcactccttatcactggtgacaatggtgccacttctcgagctggaaaagaaactgattgataacctcgaaaactatacaaatgccctggagcagaagctggagataattcgcagtcaactcctagtaatacgtgctgaaaacgagaaaggaagaaggaatgctatatcctatttgtccaatccgctgaatggcttttcaatcatccgacgattgcatcaggattggatcaactggcgaaagtacatggagcaaccagtggggatatggcaattgaaagcattctacagctggaaggatgagcttcccaccgaacgtgacttatgggatgcctgcgagggcatagcaagaattcagaaaaactattcagaagccttgcctctgttgcacaattgcttgaagctgcagccccacgatgcgcgtgtacttcgactgtggaaaaaaacaacggacttcattgagaatcaaccagatcaatcccctacagaaaataagaagcggaatgttccaatcgcaaatgcgttcaaattaagctgcaacggaccactcgagagctccactagactgcactgtttctataactttaccacgactccattccttcgcttagctccactcaaaacggagcaaatcggattggatccatatgtggtgctttatcacgaagtgctctctgctcgagaaatatctatgttgataggcaaggctgctcagaatatgaaaaacaccaaaattcataaggaacgagcagttccaaaaaagaacaggggaagaactgccaagggtttttggttgaaaaaggagagtaacgagctgacgaagagaattactaggcgcatcatggacatgactggctttgacctggctgattctgaaggatttcagctgactgatgtcgaacaaggtggagccaccgtctttggagacgtgggatattatgtgtctccccaggctggaaccgcaatcttctggtacaatttggatacggatggaaatggtgatccccgcacaaggcacgccgcctgtccagtgattgtgggttccaaatgggtgatgaccgagtggatacgcgaaaagcggcagatcttcatcagaccctgcctgccaaaagcaaagggaacctctacgaaatcatag

SEQ ID NO: 3792 - protein, 923 aa, DROSOPHILA
MRSSKWLLPVRVLLTYQVLLLLLRQAKGEESHCTSVAGMVKLLDLEAQLIDNLEDYAVELEKKLQTVRRSITSLRLENDKARSSTEEYLSNPLNSFSLIRRMNRDWIIWQLYMDDPVGISQVERIQELREHMPTHTDVEEAVTALDRIQSTYGLKVPEISHGFLNGKQYNVSLTVLDTYAMGQILFDQKNYLAAASWIYQSVVLMEAFSMAAPLEISKNEVRMVYAETLLKLNQHADALKVVNIALTDNPHDIKLLLKKSEIETMIRTGTNNAPPVKVQATGVPTAYQIGCRGQFPPSADSKLYCLYNRTTSPFLILAPLKMELVGLDPYMVLYHDVLSPKEIKELQGMATPGLKRATVYQASSGRNEVVKTRTSKVAWFPDGYNPLTVRLNARISDMTGFNLYGSEMLQLMNYGLGGHYDQHYDFFNKTNSNMTAMSGDRIATVLFYLTDVEQGGATVFPNIRKAVFPQRGSVVMWYNLKDNGQIDTQTLHAACPVIVGSKWVCNKWIREREQIFSRPCLKKRMCLLVMLFHSTLVLGHRPLEKSHSLSLVTMVPLLELEKKLIDNLENYTNALEQKLEIIRSQLLVIRAENEKGRRNAISYLSNPLNGFSIIRRLHQDWINWRKYMEQPVGIWQLKAFYSWKDELPTERDLWDACEGIARIQKNYSEALPLLHNCLKLQPHDARVLRLWKKTTDFIENQPDQSPTENKKRNVPIANAFKLSCNGPLESSTRLHCFYNFTTTPFLRLAPLKTEQIGLDPYVVLYHEVLSAREISMLIGKAAQNMKNTKIHKERAVPKKNRGRTAKGFWLKKESNELTKRITRRIMDMTGFDLADSEGFQLTDVEQGGATVFGDVGYYVSPQAGTAIFWYNLDTDGNGDPRTRHAACPVIVGSKWVMTEWIREKRQIFIRPCLPKAKGTSTKS

SEQ ID NO: 3793 - DNA, 3187 bp, DROSOPHILA
tttaagtggattaacatatatcagacactaatcacaggctatgtctattagctatccaagcgattaactggccaggtgggactgcttttcacggacaaatccaaggaggaagtcctggagtgggcagaaaactactgggccgtggaatacgcacgcagtggctttgtggccacggaaacggttaccctgccagcaggtcccctagaggacttcgcccactctatggaaccgcatctgcgttccctgggcctgcccaccaaattggagaagggaatcgttacgctgtacagtgactacacggtttgtgaggagggcaaagttctaacacccgaacaggcgagaatcctcaagctggtgggcaagcccatggccaaatttcggctgaccatgaagtgctcgtggacaaaaagcgaaggcttccagctgcatgtcgaggatgatgtgaacgacgaggaacaggctgatagcgcaatggaagaggaggccgaggccgaggccatggatgacaacgacgacgatgatgacgaagaggaggatgatgaataaataagtttaaggcgtagaaataatttttttatgtatatatcaagtgcagaaaatatacgtatattttaaaagtacattacatattatcttacgttcaacacagataatacttgattaacactagcttatactaataactaagtaaacaaaacacttaagaagcatttcagatattgcagctaaaaccaaagaaaggcacaaagcctcaggttgcgtcgtccgcgaggatgtagagcaccagaggctgttcgttatcgctctcctcctccaggagttcgctgttagttagggaaatatcctgagaggccgagccctccagctccaaggcaccggtgctagcacttgaaaagaattccagaggcatgggttgctcgggatcttcaggattcgagggggtttcagtctccagtgccacgtcctcctcatcattctccccggctgacaactccaaatgttattggtctgtcgagttcggcggcaccgtgcagcccgcggcaatgtgctccatcacctgctgcttcagctgcgccacatggtccttgaggttcttcacgatgctagccaggtcgacgttctcgcccttaagtaccttcacgcgatcctccagctttgagatgcgctccaacttgcgcttgcggcacttggatgcagccacacggttacgctgcctcttgcgctccagcttgatcttctcctgcgcttccatgtcaatgggattaacggtgggcgagctggcttgattgacgggctcgtccttaatcaccgagaagccctcggtcatgttggtgtaggtgaaggtgcctccgctgatgccattgttcaccgctgtcatggctgccgcagttgtgttattggcggcggaattagcggcggaattggcggacggaaatgcctgggagttagtgtgaagattgtgtaaggcctcctcgaatcccctgccgaagtccaactgctccacggtgacgggccccgccttggtggggaacacctttcccggctgcggtgtttgcatcagattgttggatagcaggatcttctccaaatcgggtgtgtttaccgtcttggatgacagatccggtgagttgatgaccagtggtgcgaagatgcgcttgttcttggcactcttgctgttcagatccagcgagccgggacgcttgttaggattcggggtggatgtgttcaggttcggcgactgaaagtccagtgacatggggccttcttctccaacgggctcggttttaggtatgatctgaatggcagttgctccggaactgccagcattctgaatacttaagttcgcagcagcggaaacgggggttttcatgtttgctcaagcaatgacgtcaatctgattcggatgaagtgaaagagacgaaaacggaatgaaaacaatctgataaaaactcgtttcgcgatgagtcatgcgaataactcgctcttcttcttactcaccagtgggtgggaactttgcttgcaaaatttgattagcacaatctgtacttttgtgttttctgctttctgcactgccactgcttaatcaccggttttatcggccaacgaatcgtttgatttttattttggtttcgctaaataattttacgaaaatatttattacgcgcaaggttgttttcagaatgagtgctagcggtggtacaagtgtcgattatttattcgatattgctatcgatactggtctttaaatgcgatgtttaaacaatgggcagcattgactcaagcaagaagcttagcagtgacacaaaccattaccggtagctaagttaataaaatacaatataggttttttttaacatttactaaatcattatgaaaggtgaatggaaacaaggccgtcgctagtctttcatgtttttcttgaaattttcttgatgtttggcagtaaaagaagatgcaatagatctctttatcactcctgggcgtcggtaaataggaaaggaaatatatttttcggtctggttaagatattgttttcgcacttggggaaccacaaactgtccagacggatccattatgtcaggaactccaggaaaacactgatgctcatgattttgtgattttgcgagttacaattgaaaaggggaaacaaaatatgacacttaactcggaacattcgcaaataatttgaaaacatccgagaaaaaaggccatacgtttttgggatattcccgatatatttatattcgacatttatgataactgtatagcaataaatattttcaaatatgggtttttgttctgttttgttttgtttttcaaactgtagcatatacatcaagtttaaatatatatatttgttcgtttatgtaaatacattaataatattttgatttcgcaaccaaacgtcttgctgttgttcagattggtatatatgctggccctaaaagatttacacatttattaaactccttgtatatattaataatcacatctatagatttgttagagcttcaaatatttgtcttagttatgtccatttattgtaagcacgttgaaacacattaatgtatatgttcatctgtagacaagtaatgcggagagagaagtctcagatactatagttagttgctctgcatttggcgttcgcaaagatacatagtttttttcccggtgtaggctaaaatcg

SEQ ID NO: 3794 - DNA, 1059 bp, DROSOPHILA
cactcattctgaaaacaaccttgcgcgtaataaatattttcgtaaaattatttagcgaaaccaaaataaaaatcaaacgattcgttggccgataaaaccggtgattaagcagtggcagtgcagaaagcagaaaacacaaaagtacagattgtgctaatcaaattttgcaagcaaagttcccacccactgatgaaaacccccgtttccgctgctgcgaacttaagtattcagaatgctggcagttccggagcaactgccattcagatcatacctaaaaccgagcccgttggagaagaaggccccatgtcactggactttcagtcgccgaacctgaacacatccaccccgaatcctaacaagcgtcccggctcgctggatctgaacagcaagagtgccaagaacaagcgcatcttcgcaccactggtcatcaactcaccggatctgtcatccaagacggtaaacacacccgatttggagaagatcctgctatccaacaatctgatgcaaacaccgcagccgggaaaggtgttccccaccaaggcggggcccgtcaccgtggagcagttggacttcggcaggggattcgaggaggccttacacaatcttcacactaactcccaggcatttccgtccgccaattccgccgctaattccgccgccaataacacaactgcggcagccatgacagcggtgaacaatggcatcagcggaggcaccttcacctacaccaacatgaccgagggcttctcggtgattaaggacgagcccgtcaatcaagccagctcgcccaccgttaatcccattgacatggaagcgcaggagaagatcaagctggagcgcaagaggcagcgtaaccgtgtggctgcatccaagtgccgcaagcgcaagttggagcgcatctcaaagctggaggatcgcgtgaaggtacttaagggcgagaacgtcgacctggctagcatcgtgaagaacctcaaggaccatgtggcgcagctgaagcagcaggtgatggagcacattgccgcgggctgcacggtgccgccgaactcgacagaccaataa

SEQ ID NO: 3795 - protein, 289 aa, DROSOPHILA
MKTPVSAAANLSIQNAGSSGATAIQIIPKTEPVGEEGPMSLDFQSPNLNTSTPNPNKRPGSLDLNSKSAKNKRIFAPLVINSPDLSSKTVNTPDLEKILLSNNLMQTPQPGKVFPTKAGPVTVEQLDFGRGFEEALHNLHTNSQAFPSANSAANSAANNTTAAAMTAVNNGISGGTFTYTNMTEGFSVIKDEPVNQASSPTVNPIDMEAQEKIKLERKRQRNRVAASKCRKRKLERISKLEDRVKVLKGENVDLASIVKNLKDHVAQLKQQVMEHIAAGCTVPPNSTDQ

SEQ ID NO: 3796 - DNA, 5427 bp, DROSOPHILA
ccgctttccattgcgttttcagcattttcaactttttcattactaaaagtttccgtctgctactttgatggccaacgtactacagctatacaaatttacataagcgtaagcataattaaatatcaacaatagtttttcattgccatttctacttgaactttttaaagtacgtacacgtaaacatattgattgatatcttagttatttgttttgagccgaaatataaaaagcctcaattgtaacatgagtgtttgttttaagccaattaacacaagttatgcaagaggattggcactttatttgtctctgccaagtggtttagatgtagataaaaattaagttgaggaaggttagaaattcaataaatatttttaacttcgtaattatcttaaaaaaatataaaattcctaaatgtagaactgcttgataaaatggttcctgctatcttaactagctagtagcaccagaaaagagttaattcacttttaatctgttcaaacagatcaccgaacgttgactccgctttttgttttcgcgttacttcttatttaattagagctcattattcagaaaacgtttatttgcccacggctttggcttatcaccaggcgaacagctgttggataaccctagagtatcttggcccaaaagcataacgtgacatacgatactagaatttctctcttatcagccaaatggaaaatgccttggttccattggccaagttcatagtcgatgtgatatgcatttgacaaggccgttgaagtattatgtatatgtaagagtatctgtttgcacaactgcagactgagggcgaaatcgctttcaaccagggcgtatactgaacggcaattccgtgtgtattatcatccgctggaacgcggccttttatttatttaattagctctagctttagtttctagcctgatattaggagtgggtggcattatcgcgttagcccagttgagtgctggctgcgatgccgaaaggtttggccaaaatgctaagacacctgccgctaatctcgctgctgctgttcgcacctactgtgttggcctacttcgagggctgtgataacaccttcaacctcagtccggggaccacctacgttgagtcgccctactaccccaacaattatcctggcggcacttcctgtcgctacaagttcaccgctcccctggactactacatacaagtgcaatgttccctgggaattccaaaggtagaaaattcgcgaagatacatggttttacaaatggaaaatacgtaaggcatgtctccccacccccagggcaatggtcagtgcaccacggataacttttggctcgacacagagggtgatcttctgatgcgcggtgccgagaacttctgtggctccggaaccctttcacgggagtccctgttcacggagctggttttcgcctacatctccaccggcacgaagggaggaagctttaagtgcaccctgaccaccgtcaaacagaactgtaattgtggctggtcggccacgacgcggattgccaatggccaacaggcggcagccaacgagtttcccagcatggcggccctcaaggatgtgaccaagaaccaggcgtccttctgtggcggaaccataggtgcgttattacagaatacaagtggaaaggcttcaagtggatataaataaaataagtcaaataaccatttgcgaacatgaaaaagttcaagttacgaaaatttcaagctattgagtgcaattcaaggtatctgagtaatagaatatatcttatacataatgaaaatgtcaatttaattaggcttgattggtaataacatattttgaattatattatttcagtggcccatcgttatattttaactgctgcccattgtatttaccaagttagcagggccacgaatattgtggctattgtgggaaccaatgacctgggaaatcgtaagttcgcaaaactcatacaactaagaatacataataatttaatgccctgttattaacctaattctttctgatcccgctattaagcttccagttccaggtactaccagcagtataatattcagcagatgataccacatgagcagtatgttagcgaccccgacgtaaacaatgatatcgcagttttgataaccgccagcaatattcagtggtcccgaggcgtgggacccatttgtctgcctcccgtaggaacgtaggttccccattaaatatccgtattgtattgaaactaattcgatttcccctttaggagcacaccattcacttacgacctcgtcgacgtgattggctatggcacggtcttctttgccggacccacgtccacaagtctgcagaagatcaatctgaatgtggtcaccaaccaggactgccagacggagtacaacaatgtggccacgatatacactgggcaaatgtgcacctatgactactcgggcacaggtcgcgactcctgccagtttgactccggtggcccagtcattctgcggaagtccaggcagttcttggtcggaatcatcagctacggaaagagctgtgctgaatcgcagtacccgatgggtgtcaataccaggataacgtcgtatattagttggatacgccaaaagatcggaaactccaattgtgttgtcagcttgtaatgtaaataaatggaccggaaataaatcttcacaaaaaggttgtttttctatgattagtggtaaagatttctaatcagcctttaaaggaaaaagttttaatatcaaataaaatggtagatcttattgcaatactcatattttttattgcgggttgtcacttcgtatgcgaaagttcttttttaaggcatatctttaagtttaacttgcattaaaaagatatataaattgtaatattttctcaccttgacctaaaaatccaatttaaggttctcaaatatttgcccggtatttcaaaacaaagaaatatacttttccttatcaattcgaatggtcttatataagctgcaccgtatcttcatcgagttcacagttgcatcagcttcgcaaccatcatgtacgaactaaagattactgggttactttcgttactatatattagtttgtcttgtgcccaacaacagtgcaccagattctttgatttgatcccaaaccgaacgattaatataaccagttttaattaccccggcgctataccaagtggttctaactgtcgatttcgcttgaaggcacccagtaatcatgttatctacttgagctgtcgctttgagttggtaagttctgttctagaatataagccataattaaaatatcactttaaaatgaatatcttgcttataaaacattgatttcgttcaaattagtttcccgacacctgcggctcggagtttcttttcatctcccgcgatggcgacctgcagttccgggatggcgaacggtactgccgcatgggccaggtcaaccggatatccaacttccagaccatggccttcgcctactattcgagcagtccgcagacccagcagcgatccagactcaattgccaagcggtggctcgaccggcgccctgcgactgcggctggtccttccccaatcgcatagccaacggagtggaggcgggaaagcacgagtttccctcgatggtgggcctccgggatctgagctccaacctgcccatcttctgcggcggcagcatagtcagcgagcggtacatcatgaccgctgcccactgtaccgctcgccaaccagtggccagtcgcctattggcgctggtcggggagcatgacttgagcacgggtaagcaatatgcatagtttgtttgaggactatttctaaaatcctaattactctcaggtgccgaatcaatctatgcggcgcagtatcgcatccaaaatatcatcaaccatcctggttacatggaaacagcatcgggcaatataaatgacatagccttgctccagacggcgaccccaattgaatggtcccgcggagtggcgcccatatgtcttcccattagacaggcgtaggtttagctctcatatctaaagtcgtgtaatcgtaaaatttgattttctcacagggagaacagcttcaactaccagaacgtggacatcatgggttggggaaccctgggcttcgctgcctccaagtcgaacactctgcaaaaggccacactgctgaccatggacaatgccgtctgccggagtcgcttcaactccagcataactcccagccacctgtgcacgtacgatgctggcggcaggggccaggactcctgccagtacgactccggcggtccggtgatcctgcgccagcgggagcggatgttccagttgggcgtgatcagttacggccgagcctgcggtcagccttttggcatcggtgtcaacactcgggtcacttcgcacctcaactggctgtggcgctatataggcggatctgtgtgtgtgcgttaaggatatgcgtcggatgaatgcccaaatgtgtgcacagaaagaaacaatattgaccataaaattaattttatcatatattgttacgagcatgagttgcacagagtttttacatttaaaaaattatcttattactgtaacttttgattaaacagacttctttgataatagataatcgtatttgaagttggcaaaaaaaaatctactcggctagtgattatgatccagactacgtatatttcttcttaaaatcacttagaatctcttagaattgtacgccttttcttttattttgtatgtatatgtgtataaaaataaaaaatgcaaaatatgaaaataatgaaatttaatgataaaacttagttgggtgaacggctttcataccttataccttacatatgtatataccttacttaaataccttacctaaagcattttattcgtcatgtacaactgctatagcagtggtatatagtactcgaaattttttcctgtgcacacgcatattttagaatatagttcctcagagtcattccttggccgacctccttgcactttcttcaggcatttgtcggcgttgtcttgagtttggcaaagtgttgacaaaggccttaatttgcatttaaattaaaaagcagtgacatgtttctgcctacatttaaacaacgaacaagctcggcagccccgcacttaccaatcataccccgctggccatgaagaaccgccaggcgtagttctttgtgtgcaataaagttttatcgcatactctatctgaatatggttggcactattagttcaccgtatttcccagtgtttaattaaggctacacaatcgacatatgggaaagcgaaaaatctgattctagtatatcagagaaaattaaaatttaaaattaattgggtcataacattggattttcaggttttcaaaagcgggaaagtgtacagatttctcatagttatccagtgtattttcgtatttattgtaaaattgctttattca

SEQ ID NO: 3797 - DNA, 2166 bp, DROSOPHILA
atgctaagacacctgccgctaatctcgctgctgctgttcgcacctactgtgttggcctacttcgagggctgtgataacaccttcaacctcagtccggggaccacctacgttgagtcgccctactaccccaacaattatcctggcggcacttcctgtcgctacaagttcaccgctcccctggactactacatacaagtgcaatgttccctgggaattccaaagggcaatggtcagtgcaccacggataacttttggctcgacacagagggtgatcttctgatgcgcggtgccgagaacttctgtggctccggaaccctttcacgggagtccctgttcacggagctggttttcgcctacatctccaccggcacgaagggaggaagctttaagtgcaccctgaccaccgtcaaacagaactgtaattgtggctggtcggccacgacgcggattgccaatggccaacaggcggcagccaacgagtttcccagcatggcggccctcaaggatgtgaccaagaaccaggcgtccttctgtggcggaaccatagtggcccatcgttatattttaactgctgcccattgtatttaccaagttagcagggccacgaatattgtggctattgtgggaaccaatgacctgggaaatccttccagttccaggtactaccagcagtataatattcagcagatgataccacatgagcagtatgttagcgaccccgacgtaaacaatgatatcgcagttttgataaccgccagcaatattcagtggtcccgaggcgtgggacccatttgtctgcctcccgtaggaacgagcacaccattcacttacgacctcgtcgacgtgattggctatggcacggtcttctttgccggacccacgtccacaagtctgcagaagatcaatctgaatgtggtcaccaaccaggactgccagacggagtacaacaatgtggccacgatatacactgggcaaatgtgcacctatgactactcgggcacaggtcgcgactcctgccagtttgactccggtggcccagtcattctgcggaagtccaggcagttcttggtcggaatcatcagctacggaaagagctgtgctgaatcgcagtacccgatgggtgtcaataccaggataacgtcgtatattagttggatacgccaaaagatcggaaactccaattgtgtttttcccgacacctgcggctcggagtttcttttcatctcccgcgatggcgacctgcagttccgggatggcgaacggtactgccgcatgggccaggtcaaccggatatccaacttccagaccatggccttcgcctactattcgagcagtccgcagacccagcagcgatccagactcaattgccaagcggtggctcgaccggcgccctgcgactgcggctggtccttccccaatcgcatagccaacggagtggaggcgggaaagcacgagtttccctcgatggtgggcctccgggatctgagctccaacctgcccatcttctgcggcggcagcatagtcagcgagcggtacatcatgaccgctgcccactgtaccgctcgccaaccagtggccagtcgcctattggcgctggtcggggagcatgacttgagcacgggtgccgaatcaatctatgcggcgcagtatcgcatccaaaatatcatcaaccatcctggttacatggaaacagcatcgggcaatataaatgacatagccttgctccagacggcgaccccaattgaatggtcccgcggagtggcgcccatatgtcttcccattagacaggcggagaacagcttcaactaccagaacgtggacatcatgggttggggaaccctgggcttcgctgcctccaagtcgaacactctgcaaaaggccacactgctgaccatggacaatgccgtctgccggagtcgcttcaactccagcataactcccagccacctgtgcacgtacgatgctggcggcaggggccaggactcctgccagtacgactccggcggtccggtgatcctgcgccagcgggagcggatgttccagttgggcgtgatcagttacggccgagcctgcggtcagccttttggcatcggtgtcaacactcgggtcacttcgcacctcaactggctgtggcgctatataggcggatctgtgtgtgtgcgttaa

SEQ ID NO: 3798 - protein, 721 aa, DROSOPHILA
MLRHLPLISLLLFAPTVLAYFEGCDNTFNLSPGTTYVESPYYPNNYPGGTSCRYKFTAPLDYYIQVQCSLGIPKGNGQCTTDNFWLDTEGDLLMRGAENFCGSGTLSRESLFTELVFAYISTGTKGGSFKCTLTTVKQNCNCGWSATTRIANGQQAAANEFPSMAALKDVTKNQASFCGGTIVAHRYILTAAHCIYQVSRATNIVAIVGTNDLGNPSSSRYYQQYNIQQMIPHEQYVSDPDVNNDIAVLITASNIQWSRGVGPICLPPVGTSTPFTYDLVDVIGYGTVFFAGPTSTSLQKINLNVVTNQDCQTEYNNVATIYTGQMCTYDYSGTGRDSCQFDSGGPVILRKSRQFLVGIISYGKSCAESQYPMGVNTRITSYISWIRQKIGNSNCVFPDTCGSEFLFISRDGDLQFRDGERYCRMGQVNRISNFQTMAFAYYSSSPQTQQRSRLNCQAVARPAPCDCGWSFPNRIANGVEAGKHEFPSMVGLRDLSSNLPIFCGGSIVSERYIMTAAHCTARQPVASRLLALVGEHDLSTGAESIYAAQYRIQNIINHPGYMETASGNINDIALLQTATPIEWSRGVAPICLPIRQAENSFNYQNVDIMGWGTLGFAASKSNTLQKATLLTMDNAVCRSRFNSSITPSHLCTYDAGGRGQDSCQYDSGGPVILRQRERMFQLGVISYGRACGQPFGIGVNTRVTSHLNWLWRYIGGSVCVR

SEQ ID NO: 3799 - DNA, 4404 bp, DROSOPHILA
tattttctaatagcatctttaggctactataaaatcagtgctggcaacagagttcttgtttgatgattttttgacttatagttttttgcttacacatcaacgggcaatttatacattcttttaaacagttattgcatgcgttttactctgccaaacatgttgcgcttggcctgtctccctttattcaaattagcaaacgttgaataaaatatattttataataaattttttcaacatataaaaagtgtgtattgtggtgaaagttggtattgatagtaataatagtttaaattcgatctttggttcaataaaaactatgtcacgtagtccaaattctcagaaagaacataatttgccgtctaaactaatttaagaattgcatttattaatttaacaattttttcttaaaaattttttaaagtttattcgctgttagcaatttttttacaacaattgtcaaacaacatttgtatgctattttcatttgcatcaaatatataaacatatagataaagaacagcgtttggcggctgggatatgtttttaataatagagggttgtgggacaacttaggctataaaaggcaaatttaaacccatattcgaagacttatgtctataatgaaactaaactaaaatttgcactaatgaaatgtgaataaatgtgtatttctactttacgccattttaaattattttaattttggttatgctaattttttataagttatatcacaacaatagagacaaagtgcgtcggcgtgtgatggcttgtttcgagtcaatcaaacaaaatacaaagacattatttgggattgtgccaatgcggaaggtaaaacaattacaggcattggttcaacatggaaatactctcacataacaacgtatataattggtatatgcatttgcacttgtgtaaaaaggggtagagagcaacacaagcgagtagcagagtttcactgagatccaagacaaaagattcgccgagctgcttgttagtattaactcttgctgagtgcctttttctttctttgtaccaggatgtcataaaacggattatggcttatggactgcgtcaaacgcttgatccactcctgctgatcttcctccgtggcagcggacatgcggtacaccgtatgcttgccctctaccacctgaaatatgaaaatataactaattaagcagtacatttttttttatcttgtgtacttactttgccctcagagtcagtcttgcatgccttgattatatcagcaccgcccgtcgcaaacaactcaaagcaatgcggtttgctgcgatcgtgaatctcgcgcaccgatatattctccagcggtataattccgcgtggttccttatccgttgtgtattcaaaatagtataagcaattatcgttcaaaatgaaccaacgtcgtttccacgatttgtatcttagccaaaagagtaaaagcaattcgttggtcagggaaccatcttggcattatttatcaacttacctgccgccttgcttccacagccagccctccttgtcgggattgaagaaggtgtgcatcaaatcatttccatcatcctgtggtattttaaatggctctgttcgaattgactcgtaaagggattccagcaggccacggggcaaatctccgccgttgttgatgccacgattcatcgatatgaattgatcaacggtgggtttgtctttaacctgtttaaaacagaattgtaacttgtattaaacataaaaaaagaaggctagacttcattttataaatgctgatgtaaaacgaataaaaaaccttttaatcaaaacatatgtatgtcaaatatagtggagaaaggtgttctgcttttctagaataattactgcgtcttagtcaaaatgatgccgaatttttaagaattgaaatagacaagttattcttgtatcccaataaattaaagtgcttacagatggattgtgtagtgaggtatttagcattataattgcgaagctgagcacatagcatgtgtccgtgttggtgaatatatctggatttagttgacagtagcgctgtgcgaaggtctccatcatgcgatcgatcttttgtgcctcgccgggcaggcgaaacgaccacagaaattgtctgtagcaaggaaaacgaaataagagaaacaatgctattagagattgtggtaataatgtggttgtcgggcaccttacctgagggcttgtacgagaatgagattggtgaaatcgtgaagcgccacaaaagccttaagcacatcctcattaaaatcgtttttctcgccgaggtaatcgcctagaattaagtatattttaaaagtgtctcatggtgttttcttatcgaaggccactaggtcttgggaattccatcacatttatttgcaatatcttaccaatggctgttttatttagtccctctcccttatagagaaagtgggcaacgtcctggggatcatgacgtagcagcctgttttcaacgagatactcaatgcctaaaaaaataagacaaaatagtaaaaatattaaaatataggttaactaactgcatatattaagagtatagtaaagcggtatactagattcgttggaatctaatctcgttggtatctaacagagaataaagcgtttcctgcaaatcgatagaacgttacacgactaataaagatgaaaaaatatcaacacgtttttaaaaagcgtgggcgtggctacatgggtcaacaaacttgcgctgcgtctatgtctctaggatcggtatgccaaatctcaaccttctagcttttatggttcctgagatctcgacgttcatacggacagaagggcatggctagaaattctattgatcctgatgaagaatatatattccttatattgtcggaaatgctccattctgcctgttatatacttttcgacgaagaatcttcaacgggtaattaatttaagcaaatacaattattaactccacaagctagcagcgcataataccttccccaaagtgatataaatttggatcgaactttagcagtcgtgacgagaaatatcggtttctcttttcaatgagctttaactatacttttatcatttttctaaaagatttttaacacgtagattaatgttgaatagctaaataaaaaccagtaacatttttacgactacgttaagccagacttgaaaataacttattcaaggaactagattccgaaaatattttgaaaataattcaaaaaatattttttccagttagtttgcaaccatttattacctttttttgggtccatgttaaactttttacggccaatggacatctgtttatctttattggaatgcttgcagtcttcgggcacatccagcgcctccatttccgatacaacctcgcacaactcatctttaatttgctgaaattatataataaaaattgtacaaattataataatattttttacaagtcaaacacgactaatgaaatttagattaaaataggcaatttaatgttaatgaatgtaacatttttttttcataatttgccagtgtctgccggatggagtaaaataaaagaaagcgagaatgccatagtcgagttctccgactaatgaaatgatgaaaacataccaaacaatttttcaaaaatgagggcgtggcagttttagagcgttagaatgggcaaaaagttttttgcatattgatagaaaatacaagactaagaaaaatgtgaaaaaatatcaccttttgaaaagtgtgatcaagaatatatatattttagatagtcgaaaaggcttccttctgcatgctaaatttttaacgaatctagtattcccttttattctacgagtaacgggtacaattagggattttaaaaattgttgtcatgacagatttttggggtttgtgggcgttgttagcgtatgagtggtaaacgcttccttccttccttcctacattatttagtataccctcgtaaagaatttgtaatgagaataacatatgtataaaagagtcaagtgttattccaagcggaatgacaattagattgacactcaaagaagcggaaccaacttgattcccccaaaatgaatgtgtgcaaagtaagtttatattgtgctaacgcatgaatgatcacagagttacaagaccgaaatatttgaattcccagtagttgttcacagaccagacccatcatgacattttgactttcgagggagtgtttggtataagtatcgaatcgaaaggagatatgtaaattaaccgcctcaattagtagtttcttcatgtaaacggctataagtatattattcattcttacgcagcggcgctctgcttatttcaacgaccccagctaacatcattaagattcacgatgaggtcagaggctgtatttggagtctatcgaattaaaatttagattgaaacaga

SEQ ID NO: 3800 - DNA, 1098 bp, DROSOPHILA
attatataatttcagcaaattaaagatgagttgtgcgaggttgtatcggaaatggaggcgctggatgtgcccgaagactgcaagcattccaataaagataaacagatgtccattggccgtaaaaagtttaacatggacccaaaaaaaggcattgagtatctcgttgaaaacaggctgctacgtcatgatccccaggacgttgcccactttctctataagggagagggactaaataaaacagccattggcgattacctcggcgagaaaaacgattttaatgaggatgtgcttaaggcttttgtggcgcttcacgatttcaccaatctcattctcgtacaagccctcagacaatttctgtggtcgtttcgcctgcccggcgaggcacaaaagatcgatcgcatgatggagaccttcgcacagcgctactgtcaactaaatccagatatattcaccaacacggacacatgctatgtgctcagcttcgcaattataatgctaaatacctcactacacaatccatctgttaaagacaaacccaccgttgatcaattcatatcgatgaatcgtggcatcaacaacggcggagatttgccccgtggcctgctggaatccctttacgagtcaattcgaacagagccatttaaaataccacaggatgatggaaatgatttgatgcacaccttcttcaatcccgacaaggagggctggctgtggaagcaaggcggcagaagatacaaatcgtggaaacgacgttggttcattttgaacgataattgcttatactattttgaatacacaacggataaggaaccacgcggaattataccgctggagaatatatcggtgcgcgagattcacgatcgcagcaaaccgcattgctttgagttgtttgcgacgggcggtgctgatataatcaaggcatgcaagactgactctgagggcaaagtggtagagggcaagcatacggtgtaccgcatgtccgctgccacggaggaagatcagcaggagtggatcaagcgtttgacgcagtccataagccataatccgttttatgacatcctggtacaaagaaagaaaaaggcactcagcaagagttaa

SEQ ID NO: 3801 - protein, 348 aa, DROSOPHILA
MEALDVPEDCKHSNKDKQMSIGRKKFNMDPKKGIEYLVENRLLRHDPQDVAHFLYKGEGLNKTAIGDYLGEKNDFNEDVLKAFVALHDFTNLILVQALRQFLWSFRLPGEAQKIDRMMETFAQRYCQLNPDIFTNTDTCYVLSFAIIMLNTSLHNPSVKDKPTVDQFISMNRGINNGGDLPRGLLESLYESIRTEPFKIPQDDGNDLMHTFFNPDKEGWLWKQGGRRYKSWKRRWFILNDNCLYYFEYTTDKEPRGIIPLENISVREIHDRSKPHCFELFATGGADIIKACKTDSEGKVVEGKHTVYRMSAATEEDQQEWIKRLTQSISHNPFYDILVQRKKKALSKS

SEQ ID NO: 3802 - DNA, 3900 bp, DROSOPHILA
ttgttgttgatgatggcttgctagctagctggctgcacttaatctgaatcaaaaatcggagaacgcaagggaggccttcgtcactatacataggtatacctaggtgtataatacataaatgggagtatatatcagccatatccgtgccatccgttgatggggcggctaatcttatacgagggatttgggattcgtttggatgtgtgatatacatatatttggttttggaatccgtcattaggcaaaactagtgaagtcttcactctacttttaaggcaaatcgcacaagtcgggggctgcacaagtctatgggtctatgggtgtgtatgtctgaatcctcgggcacatttttcgatcgggagtatctttgtgtgaatctcctgaagatttccttccctgcctataggttggctaacattaacatcgaagttgatatatgtacttgggtgtaaacaacttgggtagctacttttatgtacagacagtgggtatcaaattctgcaagaacctatagtatctggaatcttagccacaaggatatttcgtagtattccccatctcaactactgtcatccgtttgatatagatatatatatatgtatgtatctagttcttcctgaaaaccatttgatttatctgcgctttgatattgcatttctcttccaattgctttctgtgaacttgagttatcgcctcccagatcttccagctgctatggctaaccctctctttttcgcttgcctggatgtgcctgtcctgctctttcacaagcggtactcatagtgcgccgatcgagatcgccgagctcccgagtaccagcgatatggtactcgctgctgatgcagcgccaagtcagcggctcctccgccggtcccaatgtccgcgcccggactccgcgccaactgcaaggttagcgccagacgcgactgctaggaggatgaggccgatggcgacggagtgctgccactggacgcctgtcgctggcgtctctgctgttgttgttgttgctgctgctgctgttggtgtggcagctgcatcgccggtgccgtcatccgacgtcccaaggcgggcagcggattggcatccagataggcctccggactgaaacgcacccgactgtgctgggagccaatggaaccctctttggcactcaagtaggagctgtcatcgctggtcaacgagtccggcggcgtgggattagtgggtgtgccctgctgcgaggatgttgacccattgccaccattcccactattgtacttctttagcgagctgcgcagctttgactggccggccagtggtggtggtagtgcagcaaccaccgaacccgctccggattgttgatagcccagcgagagcgcatgctgctcgaagggcagactggctggtcgcgtcaccgccgccgtggcatatttgctcttggtcatcggcaacggactgtggatgaggcggttcagtagcttgggtgatcctgcatacagttcctgctttgtcggcggcggcacctggtcaagctctcgttcccgctcgcattccctctcgtactccgcattcagattgagattgttgtagtcatagcacagcagctcttcgtgctccagcagtacattcgaattgttcgaaacggttgagggagtgcgtcggtgtccggccgcacttacgcccatctgtggcacccgcggtggtggtgtacgggtctggctcaccggacagggaacggtcacgggcagcggcaccactggtggcgcctcatactggtagtcatagtagtccggcaggcgatggttatagtcgtaggaatagtccggatacgatttacagtcacgctcgtagctgtagttcaactccggccggtatggaaagtaattggaacctatcaacgggcaattagtatattttaaattggaggattctcctcgaatgtctaatggcttgcccactcaccgaagtaaccatttcggtagtttcccccatcgttggagtaactgggtccgtttctcaggtaatcggctggcgcataaagtggcggtggaccaatgccaccgcccacacgaaactcctcgaagacatccgcttgaggattggcattgccaaagctgctgttgctcagcttacgccgtggcgatggcgtcggtggctgggttccggcatacagtgcactcaccacggctggcggctgtgatggcgctactgttgtcaccacggccgatggaactggctgtggctggtgaggatgatgatgatggtgctgctgctgttgctgttgctgctggtggtgatggtgcaactgatgctgtggtgtccgctgcacaggtgtgtagtacggctgactgcctccgatgcgccgggccagagatgtgggctgcgatttgctgaccggagcttcaatgccaccaaatctggggggcaggaatagagtatatagtgtataaagaattcgcgctctttcggattcatttagcacttaccttgcttgtgtgactatcttacgtggcgtgctttccctgagctcctgctgcttcagtggcacatttacttccagttccaggatctgttccggcagtgaatcctccaccacctcttccgttccggtaatcgctgcctttggtgccgccttcagagctggcacttcgctgagcaaagtcggatgcactggcgacacgttcgacatgcgaacatcatatccggccgccactccggccagcagggatgccatgttgtacagcaacagttcgatcacggaaagcttcggcttgcgcgccgaatcgccggcatagagtgtcggcagtggcacgttgctggtgaagcggctgaggagatatggcgatggcgacataatcggcatgttggtggcacccggacgccagttatccatcttgctattgccctggtagcctggtcggtccgatcggcagcattccaaggcggatatgagacatgattgagttacggcatatggttggtactggcttgggggaacgatggctgggatatggtcggtagtcgggtggtaatcggatagtcggaggcggggggtacaagagtagttggatagtaaccgcaggcaacaccaaagtttaaccaccgcataccaaggagactctgttcgtcctatattaataggttaatctctctctctctctctctgtccaaaattgtggattgtgctcatgcacagagaaaatccattcttcattcagtcattttcacgttaaattgacattaaaagatagcttcactttaaataagtttaagtaatttaaatgttagtttggatcattggactttctctgtgctttttagctgcgaggcaatcaaaactggtcggcagattgtcttaagttggttttattgtcggatttctgtttctgggtattggttcttcttttttttttgtttgtttttttttttggggttggcttggccccaacatggaaaatacaataatatacaaagtacattgaaatagaatcgagcactaaacgtagaatgaacaaatcgtaaaatgaagtataaatatacaattgaaagttttcataaaaataatacaaaaaaatgatcatttccttttcgtttcatcatcgttttttgatcacaggtttttttttctttctttcttttgcgcgattattcttgtgcttttttttttttttttttgtagaaataaatcataaataaataaaatggaaaacccgattgcataataaatgtatgtaaataaaactgtgctcaaaataccaaaaaagtcgaatatcaaattaaaattaatgtgcaccgcaacttttcgttaagtgtacttaagccaaacgaaatgccgcaagcgatggaaattttggaaaatatctcttacaaagattgagggggtgaaaaaaaaggaggaaggactccaaaaaaatgttcgag

SEQ ID NO: 3803 - DNA, 1831 bp, DROSOPHILA
ccgaccaggctaccagggcaatagcaagatggataactggcgtccgggtgccaccaacatgccgattatgtcgccatcgccatatctcctcagccgcttcaccagcaacgtgccactgccgacactctatgccggcgattcggcgcgcaagccgaagctttccgtgatcgaactgttgctgtacaacatggcatccctgctggccggagtggcggccggatatgatgttcgcatgtcgaacgtgtcgccagtgcatccgactttgctcagcgaagtgccagctctgaaggcggcaccaaaggcagcgattaccggaacggaagaggtggtggaggattcactgccggaacagatcctggaactggaagtaaatgtgccactgaagcagcaggagctcagggaaagcacgccacgtaagatagtcacacaagcaagatttggtggcattgaagctccggtcagcaaatcgcagcccacatctctggcccggcgcatcggaggcagtcagccgtactacacacctgtgcagcggacaccacagcatcagttgcaccatcaccaccagcagcaacagcaacagcagcagcaccatcatcatcatcctcaccagccacagccagttccatcggccgtggtgacaacagtagcgccatcacagccgccagccgtggtgagtgcactgtatgccggaacccagccaccgacgccatcgccacggcgtaagctgagcaacagcagctttggcaatgccaatcctcaagcggatgtcttcgaggagtttcgtgtgggcggtggcattggtccaccgccactttatgcgccagccgattacctgagaaacggacccagttactccaacgatgggggaaactaccgaaatggttacttcggttccaattactttccataccggccggagttgaactacagctacgagcgtgactgtaaatcgtatccggactattcctacgactataaccatcgcctgccggactactatgactaccagtatgaggcgccaccagtggtgccgctgcccgtgaccgttccctgtccggtgagccagacccgtacaccaccaccgcgggtgccacagatgggcgtaagtgcggccggacaccgacgcactccctcaaccgtttcgaacaattcgaatgtactgctggagcacgaagagctgctgtgctatgactacaacaatctcaatctgaatgcggagtacgagagggaatgcgagcgggaacgagagcttgaccaggtgccgccgccgacaaagcaggaactgtatgcaggatcacccaagctactgaaccgcctcatccacagtccgttgccgatgaccaagagcaaatatgccacggcggcggtgacgcgaccagccagtctgcccttcgagcagcatgcgctctcgctgggctatcaacaatccggagcgggttcggtggttgctgcactaccaccaccactggccggccagtcaaagctgcgcagctcgctaaagaagtacaatagtgggaatggtggcaatgggtcaacatcctcgcagcagggcacacccactaatcccacgccgccggactcgttgaccagcgatgacagctcctacttgagtgccaaagagggttccattggctcccagcacagtcgggtgcgtttcagtccggaggcctatctggatgccaatccgctgcccgccttgggacgtcggatgacggcaccggcgatgcagctgccacaccaacagcagcagcagcaacaacaacaacagcagagacgccagcgacaggcgtccagtggcagcactccgtcgccatcggcctcatcctcctag

SEQ ID NO: 3804 - protein, 600 aa, DROSOPHILA
MDNWRPGATNMPIMSPSPYLLSRFTSNVPLPTLYAGDSARKPKLSVIELLLYNMASLLAGVAAGYDVRMSNVSPVHPTLLSEVPALKAAPKAAITGTEEVVEDSLPEQILELEVNVPLKQQELRESTPRKIVTQARFGGIEAPVSKSQPTSLARRIGGSQPYYTPVQRTPQHQLHHHHQQQQQQQQHHHHHPHQPQPVPSAVVTTVAPSQPPAVVSALYAGTQPPTPSPRRKLSNSSFGNANPQADVFEEFRVGGGIGPPPLYAPADYLRNGPSYSNDGGNYRNGYFGSNYFPYRPELNYSYERDCKSYPDYSYDYNHRLPDYYDYQYEAPPVVPLPVTVPCPVSQTRTPPPRVPQMGVSAAGHRRTPSTVSNNSNVLLEHEELLCYDYNNLNLNAEYERECERERELDQVPPPTKQELYAGSPKLLNRLIHSPLPMTKSKYATAAVTRPASLPFEQHALSLGYQQSGAGSVVAALPPPLAGQSKLRSSLKKYNSGNGGNGSTSSQQGTPTNPTPPDSLTSDDSSYLSAKEGSIGSQHSRVRFSPEAYLDANPLPALGRRMTAPAMQLPHQQQQQQQQQQQRRQRQASSGSTPSPSASSS

SEQ ID NO: 3805 - DNA, 5652 bp, DROSOPHILA
tcgcacacacataagtacgcacatatgcatgtagcgggtgaggagcgagcgatgaaacggaggaaaacgaagaaggaagaggaggcgaaggagagagaggacaggcaaagtgccgttttaacagctttcgcggaaagccggcacaaaaacaatctaaacaaactaaaaagaaggaaaaacaaaaacctgtttgtccagtttgacaaacaaaaaacgtgaggaaaaaaaaaacaaacaaaaatttgggtgaaattttactttcgtctggttttaatttgtttttgttgctggggcgtcagcaaaaactaccatccctttccctctttcgctcctacactcacacacacacacagccgcacaccacagcaacaacaaataaagaatgtcgccggaaattagtttcacttaaaagttgttaattttcactctaagtacgtgcattttatgcaagactcttcctttcgtttattaacttacacatatttaatggttttttctcctttcttttgtgattttacacttgttttgattttataaggtcacttcgaattttgctcgacccagatttggatgtccttcagttttccgaactcctgaccacttctggctactgcagtcgtactatgcgcaatttggataatttttttaatttgattttattttggtttgctgtggagtgttttttttgtttcctaatagtatgaccatacaatgaaccctcttttataccatccggctttcaaaaaaatatacttttaataccacattggattgccatacgatataccggtaatataccaacttctttaaattattaagcactgttttaatacaccgaatttcataaatgttccatacatataagcgtattaatttataaatcaaactgtaactgttatatcgatctgttgatctggcagcgtcgttggacctaggcctaggcctatcaaaaacccatatggcaacaccccaatcagctggatcttttgccgccgtgctcttctcttcgtaaaacgttgtgatgcaattttgttgttttcatgtctaaaagtgaaagttgccactgataagaggcagtagactgagactccgacgtaaaatttatccgtggtgaccccgtttcgtgtcagccaggcgacgaggccagcgtttggaccagcccccaactgaaaccagccgttctgcatctgcattccaaagggcggccgcacatggagcgcagggtcaaagccgcgccagaaaaccaaaaccaagatagcacccgccgatgagcgggcatcgaggagtgggcgcggaggtctaacctcaaagcacaagcacaatccgcagcatcagcacacaacgaatccttgctattcacaccattccctatctcgattccgaagtattcacaggatccaaggcgtagtcatcatagccgcaggatgcagcgcgtcatgccggcgtcctggagcagcgggggcagcctgctgccctttcgcgtttccaccaccacaaaggtgagcctagctaacttaagtacccagaactttcacgaaacaccctccaaatccccaccaggttgtgctcttctcactgaccgccggcgtggccctaatgagcgtactctcccgatttctgcgacgtcgcaagccaccgcgtccgcctcgtcgagccaggaagtacacgggtcggcgcaaccgcaacagcatgcgcagtccaaacgatctaatctcgatagccggatctaaggcctcggccagatcggggagtcctgtgggctccacactggcctactcggatcgcctgtccatggcgtccggctcgattggcgttggtgtattgggcgtacaaaatgccggtcctggcagctcggtagtcacacaactgacggcccaacagttgggcatgatgggcatggaggcactggacacagtgatcaacttctgggaggatgccctggcggcacactactcgcccggcggtttgcccgccctgttgaccacggcggaggactccgagttctgtcgcgagatccaaaacctgctggagatggcctacacgctgcaggagcagagcgaactgctcttcctggaccagcgatcggtgctgttccgcgaggagcattccattgacgaggccgaggaggaggcgggcgaggccgatgacgatcggcggtcacgcaaatcgggcagcgttctcagtcgcgctggttccgatccgaactttgattccgcggaaagctttgcttccgctctcgaccaggtggcggatctgcgtgagttcgatggctttattgagacctcgtacgaagagtatccgctattccagagtgcactgaagcatcacgatgagtacacggtgccgtgtcgtaccattcgggcggagttgatgcactgcagcaccgataccgaatacctggccaagctgcactgcgttcggttggcctttcagttcctcttcaaggatcccgctgtgggccagtggatctgcgatgctggtcggcagattctcaccgatctgctttgtctgggcgataaggataccaaggagtttcttgtgggctacgaggacatggtgaactatctgcacgatagcaacaactggccctgcatccaaatggagctggagcagcgcaatgtcaaggcgatgaccttctacgatatctgtttggacttcattatcctcgattcgttcaaggatcttgatgctccgcctgccagcgtaacagcggttgtccaaaatcgctggctatccaacggattcaaagagacggtaggtggtaaacttagctttaggtctaggcaaaatgttaagccctatggtcttttgattccaggcattaacaacagccgtgtggtcggtgctgaaggcaaagaaacggatgcttaagttccccaacgggttcatgtcccacttttacgtgatatccgagcagatatcaccgctaatggcctggggcttctttggacccaacgagaacttgcgcgacatctgccactacttccgagaggagctgctcgcctttctgggcgacatctttagcttccaaaagagccgcttcacgaccatcgaggaattctcgcaggatgtgctgcagcacatgcagacgcgcgtcaacaacattggcgtgaaatttagccagtaactggcgttcactttagctagccttctatccatacttcttggactccccttctatatattttttacaaaaaccatttggttcggtagtttccctaagaaatgctccacaagttgactaattttaaagccacatacatccagccacacgtacaccaaatccacgcatcgtcattgtatgaataagctgcatttaagtcaccaaaacatttgtaaaataaaactgtttaccgcccgctccgagcgagaatccagctgaaatacctccgattgcatgggtaaagtggatccaggtgacagacgcgctgcataccctgttatactatgttattcagtgatacatttagtacacacactcaaataaccacgcacaaactatactaaatttgagagtcagacatgaactagttattttatgacattaagaccattgaaaggagttggctgttttgttgtttaaatcctactaaactgtaaaactatatattagtttaataatctgagattattgatatagacatgtactcttaatgtttcgatatttttcaaaacgataacaaaatattgcagatagggaatcagttaaaatacttcagttttccgactaacgaccaattgttttttccagtgatgaatctaaaaattgaagtagtatcccccatagaaatgatttttgtaaaattatgaactctgaattatgtgaaatatagtggtcagatgctgagtaaaaaacgtgccgtagtccattatttagctatatagggtagtatggtagtagagcaagaagtgggctgcccactgcaagttaatcttcagcagaccggcagtctttggcttcgactcggtggagcacaatgtggaagagcctgggactcggttgcggtctactttctcttggcgccttcgtgagttcctagcttctagtttctattcctgccaagcttagtttgctccgccattcgaacccaaacacagatctcctgctttgtggcgctgcacatgctcaaccagattattcacatcgaactggacgcctccgttgacgtgaccatgcaattggaggccgacaaagatttggacgtacgctgccatggcaccctgatcgttggcaatccggatgcagcgcatcttagccggcaggagttatcgtatttgcgctggacggtggtgttcacgctgctctactccttcgcgaccacgctcctcatccgggccaagtacttgggcaattttgagattagcctggccacctccaatgcggtagatgttatggatatgaaagcatttacatactaaaatcctccctttgccagatgatgctgatgggatccctgctatcggtgcttctggttatggtcaccgttgctctccatcagcatgaaccattcccggatctgcggtgcaaccagttggttgtctaccacttgtactacatcgccctgaacaccgccatctcagtggtgttcttcctggtccattccattcaggagctgctgctgcatcgtttacagccgacattgaagtactaagtaccgaacctccataatcaaggttttaagaacaaaaaaaaaaaaaacccaatcgatatatgcagcttcctccacatcgaatcaataaaaaaaatgcgctagaattttatgtaatttgatttttattcaaacaatttgctttcatttggttggttggtttcctttttttcttttctcattttgtttgtttgtcgcttatttgagtgttgactgcagttcaggaaaggcattttttaacgttcctcgaaactagtggctaaacgttaaactaaatacatcaaatgagttctttctgtgtgtatttgtgtgtgtgtgtgttttttttttgataaatattgaaagacaaacgacgctcggtgcttgaaatcgccagttctggtttttttttttcaaaactgacgttttcaaaaaaaccgcacagtttcgctcgagatgtgaagctgcggcaaacaatctcaaaaccaaagtaaacgcacatccttccttcttaccgccattcactcattcatatatcctcttttgtgtgtatataactaacttttaggttctttttttttttttcttagcgttttgcttgcaacttatgtacttagaattagtttcaggggattaggggaaaactataaatcttagtggatatacgtgttttgttagcccagtttagttggtaattgatttatcatacgatagatagtgttactaattactccgattactcgccctattatggacttttttcttgtagactcgccctcgcgaataatcatttgattaccaccatggagataatggtggattttcgagggctagcacattttggtaaggtaatttcatcttgcttttcgtacttggatgcggtaccttgaaggtccgctctggcctgacttgatctccgctagcaaatcgtagtcttcacttaggatctaataaataaatgtttcttggttttattttccatggtttgcttcttctttttttttttgtttgtttttcttttttt

SEQ ID NO: 3806 - DNA, 2533 bp, DROSOPHILA
ttctcttcgtaaaacgttgtgatgcaattttgttgttttcatgtctaaaagtgaaagttgccactgataagaggcagtagactgagactccgacgtaaaatttatccgtggtgaccccgtttcgtgtcagccaggcgacgaggccagcgtttggaccagcccccaactgaaaccagccgttctgcatctgcattccaaagggcggccgcacatggagcgcagggtcaaagccgcgccagaaaaccaaaaccaagatagcacccgccgatgagcgggcatcgaggagtgggcgcggaggtctaacctcaaagcacaagcacaatccgcagcatcagcacacaacgaatccttgctattcacaccattccctatctcgattccgaagtattcacaggatccaaggcgtagtcatcatagccgcaggatgcagcgcgtcatgccggcgtcctggagcagcgggggcagcctgctgccctttcgcgtttccaccaccacaaaggttgtgctcttctcactgaccgccggcgtggccctaatgagcgtactctcccgatttctgcgacgtcgcaagccaccgcgtccgcctcgtcgagccaggaagtacacgggtcggcgcaaccgcaacagcatgcgcagtccaaacgatctaatctcgatagccggatctaaggcctcggccagatcggggagtcctgtgggctccacactggcctactcggatcgcctgtccatggcgtccggctcgattggcgttggtgtattgggcgtacaaaatgccggtcctggcagctcggtagtcacacaactgacggcccaacagttgggcatgatgggcatggaggcactggacacagtgatcaacttctgggaggatgccctggcggcacactactcgcccggcggtttgcccgccctgttgaccacggcggaggactccgagttctgtcgcgagatccaaaacctgctggagatggcctacacgctgcaggagcagagcgaactgctcttcctggaccagcgatcggtgctgttccgcgaggagcattccattgacgaggccgaggaggaggcgggcgaggccgatgacgatcggcggtcacgcaaatcgggcagcgttctcagtcgcgctggttccgatccgaactttgattccgcggaaagctttgcttccgctctcgaccaggtggcggatctgcgtgagttcgatggctttattgagacctcgtacgaagagtatccgctattccagagtgcactgaagcatcacgatgagtacacggtgccgtgtcgtaccattcgggcggagttgatgcactgcagcaccgataccgaatacctggccaagctgcactgcgttcggttggcctttcagttcctcttcaaggatcccgctgtgggccagtggatctgcgatgctggtcggcagattctcaccgatctgctttgtctgggcgataaggataccaaggagtttcttgtgggctacgaggacatggtgaactatctgcacgatagcaacaactggccctgcatccaaatggagctggagcagcgcaatgtcaaggcgatgaccttctacgatatctgtttggacttcattatcctcgattcgttcaaggatcttgatgctccgcctgccagcgtaacagcggttgtccaaaatcgctggctatccaacggattcaaagagacggcattaacaacagccgtgtggtcggtgctgaaggcaaagaaacggatgcttaagttccccaacgggttcatgtcccacttttacgtgatatccgagcagatatcaccgctaatggcctggggcttctttggacccaacgagaacttgcgcgacatctgccactacttccgagaggagctgctcgcctttctgggcgacatctttagcttccaaaagagccgcttcacgaccatcgaggaattctcgcaggatgtgctgcagcacatgcagacgcgcgtcaacaacattggcgtgaaatttagccacttagtttgctccgccattcgaacccaaacacagatctcctgctttgtggcgctgcacatgctcaaccagattattcacatcgaactggacgcctccgttgacgtgaccatgcaattggaggccgacaaagatttggacgtacgctgccatggcaccctgatcgttggcaatccggatgcagcgcatcttagccggcaggagttatcgtatttgcgctggacggtggtgttcacgctgctctactccttcgcgaccacgctcctcatccgggccaagtacttgggcaattttgagattagcctggccacctccaatgcgatgatgctgatgggatccctgctatcggtgcttctggttatggtcaccgttgctctccatcagcatgaaccattcccggatctgcggtgcaaccagttggttgtctaccacttgtactacatcgccctgaacaccgccatctcagtggtgttcttcctggtccattccattcaggagctgctgctgcatcgtttacagccgacattgaagtactaa

SEQ ID NO: 3807 - protein, 698 aa, DROSOPHILA
MPASWSSGGSLLPFRVSTTTKVVLFSLTAGVALMSVLSRFLRRRKPPRPPRRARKYTGRRNRNSMRSPNDLISIAGSKASARSGSPVGSTLAYSDRLSMASGSIGVGVLGVQNAGPGSSVVTQLTAQQLGMMGMEALDTVINFWEDALAAHYSPGGLPALLTTAEDSEFCREIQNLLEMAYTLQEQSELLFLDQRSVLFREEHSIDEAEEEAGEADDDRRSRKSGSVLSRAGSDPNFDSAESFASALDQVADLREFDGFIETSYEEYPLFQSALKHHDEYTVPCRTIRAELMHCSTDTEYLAKLHCVRLAFQFLFKDPAVGQWICDAGRQILTDLLCLGDKDTKEFLVGYEDMVNYLHDSNNWPCIQMELEQRNVKAMTFYDICLDFIILDSFKDLDAPPASVTAVVQNRWLSNGFKETALTTAVWSVLKAKKRMLKFPNGFMSHFYVISEQISPLMAWGFFGPNENLRDICHYFREELLAFLGDIFSFQKSRFTTIEEFSQDVLQHMQTRVNNIGVKFSHLVCSAIRTQTQISCFVALHMLNQIIHIELDASVDVTMQLEADKDLDVRCHGTLIVGNPDAAHLSRQELSYLRWTVVFTLLYSFATTLLIRAKYLGNFEISLATSNAMMLMGSLLSVLLVMVTVALHQHEPFPDLRCNQLVVYHLYYIALNTAISVVFFLVHSIQELLLHRLQPTLKY

SEQ ID NO: 3808 - DNA, 2409 bp, DROSOPHILA
aaaaacctgccatgcattcgccacctggccaagcggagtctaattgaggggcggcgctggatatcgggcctagagaaaggtcaaaacagcgcagcccaaaacgtaaatccctgccacaaggactggcccatgagagaggagtcttttgcggcagcccagctgctccgccagaggcagcagaaccgccggtggagcaacaactactccggcctggactccgccatgttccgaccagttgccaaaccggatgagatggtgccccgccgcaacaatgtggtggccgcccagaacgcggccaggaggcggaacttcaagtcggcgcaggtgtcccaataccagcagaggcaggaggaagagcaaagactggacggcgatccagaagccaaggccgaggagcacgactacgagtcggatctggaggttcgatcggtacgggagaccgttttcggaccgccggaggacaactcggaggaggagatggatcgcgcccgggctgagcaggagcttctccaacgcgtggccagcgcctccaagcaaacggaacgtttgcccgatagcgcctccatttcccgaaaggtcatctcgccatacaactcctaccgcagccatcgcacccgctgggcggagttccggcacaacatgatctttggccgtacgagttactgagccaacaggagcctcaacagaaggttcatccttatccgttgacgtctccctttccggaagtgtgaaatttacggttgcatttttacgcgattttcaagagcaaataaaaagtttggtcttcaaaattattttatatgctatatattatttgaatatgtaaacatcttcccggaaaatcatgtaacaggctagatgaagcggccatgcccaactatggaagtacagataatgggtatctaatagtcgaggctctcgtctaaaagatcggcaaggacattcagacaagtgaaaccatagcaatcattgaattttcattctttgaggaacaataaatgaatctcagtagtctttccggcgtacatcccaattacttgggattacaaaattatccaaatttgtcatacttttgagccatgatcaatattcttaggacactgtcaggcagaggtcttcaactcaccaggagacttcatcgacgaccccagatctgccagaagcccggagtctttgtccatccggagctgcgtcgcactattcccctcgtttacttcagcaaaggggaactgccacctaaaccgaatcaagaagtctcatccaaccggcagtgcgaaatatctccttcggagaagaatcgaaaaagcacggaggcctttgatcagttttgtaaaagacaacggcaatgcttttccagcacctaccagtgggcagagttccggcgaaagatgatctacggcagttactagtatgaagccacccagaaaggaccaaatccagtgaaagactcctttttattcattagcccctgcattgtgacttaaaaagtgttttgtttggatctaattcgccagcgaagtaataacaagaggctttataagccacaatgcactgcagtctgaaatgcatagttgaattcaagcaataaaacaggataacatagataactgaatttatttcttctcttcttggttcgactaaacaacctttagctaatagcttctgcagttccgtttattattataacaagtatccttaaccctttttgctacttagcacgcaggtttgctctcaaaaactagcgacatactttggcatacctgcgcatccttctgttctgagaaaagccaaatacaaacaaggactgggtggaaaagtggcaaaggaaagaatggagagaggcaccaagtgcactcaagtaatatgcttcataatttttattgtcaagcccttttcttttggctcgggtggcactggcgcgcactcgacaacaaaagctcaaaagcgcttgggaaaaatgtgaaataaaaaatgactatgaaaagcaaaggcggaaaatgaagtgcactgggggcgtggagctggtagtggtggtgctggtggcagagacaagagtgcaacaaagcagaccgggcagcataaattttataatatagaaaaaatcaatggccaacgggggcacaaaaaatgcagagcagcaaggattacggtccgggtctaggcacttttcattcaaagcactgtcctactagaaggcactcggaaaaaagagttgcaacaatgaactaattaaccaactatactcactaaagaaggttatttttaattcatttcattaaattcaagcaagtatttttcccagcatttccgtattttcattggaatcacatgcattactataattatttcgtttggtgcttcgctttttgaattctgctcctcacttcaaagctgcacaattaacttggt

SEQ ID NO: 3809 - DNA, 409 bp, DROSOPHILA
gaatctcagtagtctttccggcgtacatcccaattacttgggattacaaaattatccaaatttgtcatacttttgagccatgatcaatattcttaggacactgtcaggcagaggtcttcaactcaccaggagacttcatcgacgaccccagatctgccagaagcccggagtctttgtccatccggagctgcgtcgcactattcccctcgtttacttcagcaaaggggaactgccacctaaaccgaatcaagaagtctcatccaaccggcagtgcgaaatatctccttcggagaagaatcgaaaaagcacggaggcctttgatcagttttgtaaaagacaacggcaatgcttttccagcacctaccagtgggcagagttccggcgaaagatgatctacggcagttactag

SEQ ID NO: 3810 - protein, 109 aa, DROSOPHILA
MINILRTLSGRGLQLTRRLHRRPQICQKPGVFVHPELRRTIPLVYFSKGELPPKPNQEVSSNRQCEISPSEKNRKSTEAFDQFCKRQRQCFSSTYQWAEFRRKMIYGSY

SEQ ID NO: 3811 - DNA, 2518 bp, DROSOPHILA
ttttggctcgggtggcactggcgcgcactcgacaacaaaagctcaaaagcgcttgggaaaaatgtgaaataaaaaatgactatgaaaagcaaaggcggaaaatgaagtgcactgggggcgtggagctggtagtggtggtgctggtggcagagacaagagtgcaacaaagcagaccgggcagcataaattttataatatagaaaaaatcaatggccaacgggggcacaaaaaatgcagagcagcaaggattacggtccgggtctaggcacttttcattcaaagcactgtcctactagaaggcactcggaaaaaagagttgcaacaatgaactaattaaccaactatactcactaaagaaggttatttttaattcatttcattaaattcaagcaagtatttttcccagcatttccgtattttcattggaatcacatgcattactataattatttcgtttggtgcttcgctttttgaattctgctcctcacttcaaagctgcacaattaacttggtccgcaaatgctgtgatttcgccactcgctcccattgttgccagttaattttgatggattttttattgccttgttgcaaaatttgcatttcactctgccgttcactgcacttggccgcgtaattaggcgcacaactcgcagcacggctttgatgtgccgtcctgcgaattgggctaagtaaggacgagtgccgaggaccttaattgtttaattatgttttgtgctttggtctcgagtacgtgcaatgcgataattgctgaaaagggaacgcactcaaataatgttacattatcattttttaggttagccaaaagaaaatgaaatgtgtgataggtacacttagctgcttatcgaacaattaactgaatatgttctagaagaggctttaagaggaggtttctttttaacccagtcagcttttctttttaactagtcagcttttagtaacacatagccccgttttactttttctacgttcctcccatttaacaggcaaactaatacaatagacaagtcttaaatttacatactccctcctttcggccaatcctttaagccaaataaacgctacaccacagtacaactgcatccagctgaaggctaaccaatacctaaggtatccggaccacgaaattacaggcaaatccgactagtttcatcccctttccaaatgctgccagccaatggaaaccaatcggccctatccgcctatgtccgactggcggtccagcaagccacgtcccggatgactggaagattcgcctactcgacgcgccgaaaccagtgcgttggggatctgaagaagatcgacgaagtcctgtgccaccagcgggatgaacccaatccagagtaccatcatgctccgcgatgctttgttaagaactttcataagtaccaggagcaggcgcaggatcacggagaggtgcagacgacccgcttccgcaatccgcgataccgctgggcagacttccggcgacgaatggtttatggcacctacgatatctagacggtttctcttgaagctctctgcaatcaatttccatccggacatgtcttgtacgagtatagtcccccccccagtctatccataacgaagtatcccaaacccacatgcaaactgtacaatagtaagaattttgaggccagataaacggatccaactcggtcgtccgctcaaattgcaatataattcagcacagaataaatccgttacctcttaagtttattgtgcacttcgtttgaacttagtaggactatgtatgagtattggccagattttagatggtacctttaaattgaaataaggccaaggccaaatgtgtcaccccccccccccccttatttattggagaaccgtatacccctcatatatatcaaagtattatttgataaaattaaaaataaacatttatattaaaatacattatcttccatttaaacgctattacccacactcacggcttcgaatccgagtccaaagctaccggacttttatccatcatgtccgcaattggttccgtgtccgaaaactgacgatgcggccctcgcacggtattgattaagagggtgcggtggggctggaaacttagctcgtccgtaactcgtgtcatgtccttcccgtagtcggcgtccatgtggcgcaagttgaggaagctcttgaccagcaggaagggcggcctttttagatcggtccatgaactcttacggtcctggagctttacgggcgcaggtctgcgatggtacggaagcctgtgctctgacattcgtcgcctctgctgtagccgcatcttagcctcgaatatcggggacccgatgagaagccgaccggtgaacattatgccataggtggatgccgtaccgttggtcaaagaaatactaaaatttaggttaaccaatgtaagtaaaatttaagttatataaaaaaaggtttcatattatatgaatgtatctatcgggcctacttttatgtattggctttgcaattcttgaaatgaattgatatggac

SEQ ID NO: 3812 - DNA, 464 bp, DROSOPHILA
acaggcaaactaatacaatagacaagtcttaaatttacatactccctcctttcggccaatcctttaagccaaataaacgctacaccacagtacaactgcatccagctgaaggctaaccaatacctaagatgctgccagccaatggaaaccaatcggccctatccgcctatgtccgactggcggtccagcaagccacgtcccggatgactggaagattcgcctactcgacgcgccgaaaccagtgcgttggggatctgaagaagatcgacgaagtcctgtgccaccagcgggatgaacccaatccagagtaccatcatgctccgcgatgctttgttaagaactttcataagtaccaggagcaggcgcaggatcacggagaggtgcagacgacccgcttccgcaatccgcgataccgctgggcagacttccggcgacgaatggtttatggcacctacgatatctag

SEQ ID NO: 3813 - protein, 111 aa, DROSOPHILA
MLPANGNQSALSAYVRLAVQQATSRMTGRFAYSTRRNQCVGDLKKIDEVLCHQRDEPNPEYHHAPRCFVKNFHKYQEQAQDHGEVQTTRFRNPRYRWADFRRRMVYGTYDI

SEQ ID NO: 3814 - DNA, 4985 bp, DROSOPHILA
ctgctgcagctaaagcgggaacgcagctcagccgcctgggacgtgtcgaagccgcttgctccacccgaaatcccgtagatgaatggttgttgtcgcggcccagcgatcgatgagttcaatagttccgtttcgtttccacaattaacacccaacacaatagctctgcgcaagggaggggcactgggcagcgatggcgggtggaacgacaccagtggaactacccgcgcgaccagcccaacccacgactgctgcgccgccgacatgcactcaaaattttgaatttgtttgaacctatgaaattaactatgaaatcccctaaatgtacggttgaagaatataatttttcaccaacaaacccctctgtgtttcagttctgtgcatttcctttaaaacatacctcgacctttagcccttcctctgccttttcaatcaagtaagttcattagccatgcaaatggcttgacttgacctggctaaatcgattctgtctgccagcctgacaacttgttagccacccgactaattgctaatgccattgctaggggaatctttgccctcgagggctataaatcagctacgaacgatggcaccctggagatacatatatcagtgggtaataaattatactttagttttcaaaggaaaaacagtgcgtgataaagtgtaatagaagctacgaaaaggttgaagtttatgacctaaggaatcctcgcaagcaaatcaaaatcaaattaagacagtaaattgatgcaatcaattaatgaacagcaaagagaattcaatagcttctataaggaattagcattaatcatatatgtatgtatggaacactttcgaggtggtatctccgattggatgccacgaaacaaagcgagatggctatactatgaaccaagcgacttggaatagcccaatatacccatagtgaaacccaacccattgataagtcgctgttgtgatattttttctattacatttttattttggttttcctatttttcgtattgaataactcctttgttttgaacaacgtaagactttttcatttacaactgacgcagcgctggcgcctctgcagccgccgatcgtgctcctcatcccgctactgcgctggctcttcccgcggctcgtcctggtgtctttgtgtccgttaattagtgggcgagtgcggcgcgaaaggacgaagggcagagtttaaaaaaaaacattaattagttattagtttagatcagacgcgagagtgggcgcctagatagccacactctgcttggcctcgttctcccgctgctgcttgttgaccgccgatatgcacttggccatggtgggcgaggcgcgcgaaatggcgtcggtcatgaagtagtcgcgcagctcctttagcttaatatcgatggcgccaccgccgatggatttgctctgcaaacaaacaaacagtaataaattacaactttcaatggagcataatttcaacttacaatagtgcccgctgctccggcatcgccggctggctccaattggcccaggcgcgttagatgtggcgccacatcctccagacggttgcgcagctcgtccaggttgtcgtacggcagcggcttgcccaccacctcggacagagcgcgcaggatcttccagtcctcgcgagccatacccggtggcgaaacaccaggcagcgtctgctgcggcctgccctccgtgttcacgtagatgccctgcttctctgtgtaggcggcaccaggcagaacggcatcggcaatggaggcgccgttgtcaccatgcgatccaatgtacaccacgaagcagtccttgggcagctgctcgcgagtcaccttgccagcgtcggcgttcaacaggaacagcaccttgggctgagccttcacagcggtctgtgcaccggccttgtagcccacatcgagggcgcccacctgggcggcgttggtctgcagcacattgaaggggttccagttctgtaagcgaagcatgagattaagcaggaattcatgtgagcaaagggatgacaaacttaccggcttcttcagcttcttgcagtactcggcaacggtggcgtgaatggcggcaccatcggcacgctccaacaaatcggctccaataatgatggccggcttcttggcaccctccaagaccttggagaaggcatgagctccggagcacacgtccttgactaaagcggcatcggcgccaaggttctcgtggtcgtaggacagatcgatcttgggtccaatcgaggcaatctgcagttcgttgtgcacataggccttgcgcaaacgggtgttgaccaatggagcctcgtaacggggattggtgcccaccaggagaacggcgtcggcctcctccaaaccggcaatggtgctgttcaagaggtaattagcacggttgtcggtgcctccggcaataaatccttgttcagtggcgaccacttcgctgcccagacggttcagcagatccttcagggccacctgagcctccaggtcggcaagttggccagaaataccggcaatctgtccaccggctgccttaatggccttggccacggcgatgagggcaccctcccactctacggcctgtagttcgccgttgggcatgcgcaccatgggagccaccaggcgctggcgcttcagaccgtcgcaggcgaagcgcgatttgtcagcaagccattcctcgttgacgtcctcgttctcacggggcaggatgcgcagcacctcattggtgcgggtgctgacgacaatgttgctgccgacggcgtccagcacatcgatgctgctcaccttacggatctcccagggacgggccacaaaactgtagggcttgttggtcagcgctcccacggggcacaggtcgatcacgttgccggacagttcggtaaggaagagcttctccacgtaggtgccgatctgcatgtcgttgccacggccagtggtgcccaggtcatcaacgccggcaatctcggaggcgaaacgcacacagcgggtgcagtggatgcagcgtgtcatgatggtcttgactagcggtccgatgtccttgtcctcgacagcgctgttaacgcattaggtagaattcagttcaggttatggaaaaggaactttatggattattctccttaccgcttgcccgtgtagttaatgtccgtgaagcgggatcgatcggaaccgaaggccatggcctgatcctgcagatcgcactcgccgccctgatcgcagatggggcaatccagcggatggttcatcagcaggaactccatgacgccctcgcgcgccttgcgggtcaaatccgagttggtcttgatgcgccagcccttcatcacgggcatagcgcaggcggccactggcttgggactcttctccacctcgacgaggcacatcctgcagttgccggccaccgcaagacgttcgtggtagcagaatctgggtatctccacgccgatctgagcagcagcctaggatttgcagggcataggggatatgggtttagaaggcacttcccgcgaacgagggactggaaaccaacctggaggacagtggtgccgggtaccacctgcacgggaatgtcatccacaaagacctcgatcttctcgggcgctttcgccggtgtctgggccaccatggcgctggttcgcaccgcccggctggccatctgatgtgtgggcgagcccagagcgcccagcgccttgactagcggtgcccgtatcatattttctgcaacgagatggtaaccaaaaatccgttgcaatcggaggagccaataaaaattacataagtgttttggtacgctggttggcacaacactcccgcatatcgattgttcgcgattcgtgtgcgttttcggagtcagctcctccactgcaccgccatttgccacctgaatggggatcctggaggatgccaaaagtgggcgaagacctaccgaaatgctggaaaatattcctgtgatcttttaatgtggagacaactttttttttatcggattttgctttgacagaccgaccgcgttgccaactgccgcgttgacagctggtcaatcgcaatagtttatcggtttttaaatttattccttaaatataaatttatgtgcgacaccaatttataaatctccgaaattagttttctattcaaaaagtatatatttgatattgttacctgcttcgattaccaccttcaagttcaagtgttactgtagttggcaacgctagtgaacagctgttcaatttgtttggccattcacttgtgagcgaactcagtatcaagcttcaaatctcaaatcacagatggagccactcaactaatttattcgcgctctcaaaattaaacgaatttttaaaacttattacttcaaattaaatatagttcacttattttatttaagttcagaactgtattgtaaatattttatttttgttcttgactttaaatgatttgttgttaaatatttgacagttttgatagaagttttttttgaagtttttaccacgtaaaattaaatgttttgttttattttcagttctcttatcagctaacactcatacaaacgtatgtgcgtacttatgtatatctggccaggatcttttccgcttcatacgaattaatcatcgcataaattaccggcttaaaagtgcagcgttattctcgttacacagagagaaatttggtttaattttttgcataagataacacttatcagttgtaaacagagaacagaattgaaatgatttaatgatttgtatgtaacaatactgcaaataacacatataatattaagcatgccaaacgctgaaaattaagacttccaatcttaaataaactaagcgatttagaactcatactcttttgaaacaattactccaaatattattctacacatcatctgtttcatttcttcggcgcgtgtagagtgggcaaatattaggcatcagaagactgaaaactggttgcgacaactttcgttgcggccgccgaagaagtcgccccgtttgggcc

SEQ ID NO: 3815 - DNA, 2519 bp, DROSOPHILA
aaagcaaaatccgataaaaaaaaagttgtctccacattaaaagatcacaggaatattttccagcatttcgaaaatatgatacgggcaccgctagtcaaggcgctgggcgctctgggctcgcccacacatcagatggccagccgggcggtgcgaaccagcgccatggtggcccagacaccggcgaaagcgcccgagaagatcgaggtctttgtggatgacattcccgtgcaggtggtacccggcaccactgtcctccaggctgctgctcagatcggcgtggagatacccagattctgctaccacgaacgtcttgcggtggccggcaactgcaggatgtgcctcgtcgaggtggagaagagtcccaagccagtggccgcctgcgctatgcccgtgatgaagggctggcgcatcaagaccaactcggatttgacccgcaaggcgcgcgagggcgtcatggagttcctgctgatgaaccatccgctggattgccccatctgcgatcagggcggcgagtgcgatctgcaggatcaggccatggccttcggttccgatcgatcccgcttcacggacattaactacacgggcaagcgcgctgtcgaggacaaggacatcggaccgctagtcaagaccatcatgacacgctgcatccactgcacccgctgtgtgcgtttcgcctccgagattgccggcgttgatgacctgggcaccactggccgtggcaacgacatgcagatcggcacctacgtggagaagctcttccttaccgaactgtccggcaacgtgatcgacctgtgccccgtgggagcgctgaccaacaagccctacagttttgtggcccgtccctgggagatccgtaaggtgagcagcatcgatgtgctggacgccgtcggcagcaacattgtcgtcagcacccgcaccaatgaggtgctgcgcatcctgccccgtgagaacgaggacgtcaacgaggaatggcttgctgacaaatcgcgcttcgcctgcgacggtctgaagcgccagcgcctggtggctcccatggtgcgcatgcccaacggcgaactacaggccgtagagtgggagggtgccctcatcgccgtggccaaggccattaaggcagccggtggacagattgccggtatttctggccaacttgccgacctggaggctcaggtggccctgaaggatctgctgaaccgtctgggcagcgaagtggtcgccactgaacaaggatttattgccggaggcaccgacaaccgtgctaattacctcttgaacagcaccattgccggtttggaggaggccgacgccgttctcctggtgggcaccaatccccgttacgaggctccattggtcaacacccgtttgcgcaaggcctatgtgcacaacgaactgcagattgcctcgattggacccaagatcgatctgtcctacgaccacgagaaccttggcgccgatgccgctttagtcaaggacgtgtgctccggagctcatgccttctccaaggtcttggagggtgccaagaagccggccatcattattggagccgatttgttggagcgtgccgatggtgccgccattcacgccaccgttgccgagtactgcaagaagctgaagaagccgaactggaaccccttcaatgtgctgcagaccaacgccgcccaggtgggcgccctcgatgtgggctacaaggccggtgcacagaccgctgtgaaggctcagcccaaggtgctgttcctgttgaacgccgacgctggcaaggtgactcgcgagcagctgcccaaggactgcttcgtggtgtacattggatcgcatggtgacaacggcgcctccattgccgatgccgttctgcctggtgccgcctacacagagaagcagggcatctacgtgaacacggagggcaggccgcagcagacgctgcctggtgtttcgccaccgggtatggctcgcgaggactggaagatcctgcgcgctctgtccgaggtggtgggcaagccgctgccgtacgacaacctggacgagctgcgcaaccgtctggaggatgtggcgccacatctaacgcgcctgggccaattggagccagccggcgatgccggagcagcgggcactattagcaaatccatcggcggtggcgccatcgatattaagctaaaggagctgcgcgactacttcatgaccgacgccatttcgcgcgcctcgcccaccatggccaagtgcatatcggcggtcaacaagcagcagcgggagaacgaggccaagcagagtgtggctatctaggcgcccactctcgcgtctgatctaaactaataactaattaatgtttttttttaaactctgcccttcgtcctttcgcgccgcactcgcccactaattaacggacacaaagacaccaggacgagccgcgggaagagccagcgcagtagcgggatgaggagcacgatcggcggctgcagaggcgccagcgctgcgtcagttgtaaatgaaaaagtcttacgttgttcaaaacaaaggagttattcaatacg

SEQ ID NO: 3816 - protein, 731 aa, DROSOPHILA
MIRAPLVKALGALGSPTHQMASRAVRTSAMVAQTPAKAPEKIEVFVDDIPVQVVPGTTVLQAAAQIGVEIPRFCYHERLAVAGNCRMCLVEVEKSPKPVAACAMPVMKGWRIKTNSDLTRKAREGVMEFLLMNHPLDCPICDQGGECDLQDQAMAFGSDRSRFTDINYTGKRAVEDKDIGPLVKTIMTRCIHCTRCVRFASEIAGVDDLGTTGRGNDMQIGTYVEKLFLTELSGNVIDLCPVGALTNKPYSFVARPWEIRKVSSIDVLDAVGSNIVVSTRTNEVLRILPRENEDVNEEWLADKSRFACDGLKRQRLVAPMVRMPNGELQAVEWEGALIAVAKAIKAAGGQIAGISGQLADLEAQVALKDLLNRLGSEVVATEQGFIAGGTDNRANYLLNSTIAGLEEADAVLLVGTNPRYEAPLVNTRLRKAYVHNELQIASIGPKIDLSYDHENLGADAALVKDVCSGAHAFSKVLEGAKKPAIIIGADLLERADGAAIHATVAEYCKKLKKPNWNPFNVLQTNAAQVGALDVGYKAGAQTAVKAQPKVLFLLNADAGKVTREQLPKDCFVVYIGSHGDNGASIADAVLPGAAYTEKQGIYVNTEGRPQQTLPGVSPPGMAREDWKILRALSEVVGKPLPYDNLDELRNRLEDVAPHLTRLGQLEPAGDAGAAGTISKSIGGGAIDIKLKELRDYFMTDAISRASPTMAKCISAVNKQQRENEAKQSVAI

SEQ ID NO: 3817 - DNA, 8309 bp, DROSOPHILA
tgggccatcgggataatggactacaattaattaataacaatttgttgctgctttgttttatttcatcgctttcgttattttcacatatgtatgtgtgtgtgtttgtgtatatctatatatatactgcatatatttaaaatataaatttgttgttgttgttgttgctgttatgaaaggcatttgctttgtttttcgtttgttgatttaaaaaaatttcgcttgaattgttatttaattaactacataatgctagtaatgtctatttaataagatttgatttgaattgtttctttgttttccatttgagtttttatttatactcatttatttgttcattagtttagctaaaatttaatcatacaacgagcacaccattgctgtttcgtatatatgtagtaatctttagtcgctattcgcttcgatcattttattcagcgcctcgcctcaagtcaatcgttaacaatcgtttaacactcgttaagtctacaaatcgattaatgaaaaagacactatcccataggatagtacatatttgggtatccttcatcgtttatcctccatacattatccttctcgcttgatatgaactctcacagtgcggtgatataatggatcgatcttgaatcattgttggttttttgggttggaacgcaggttagttttagagcttttgccaggcgatagttaacgatagtacacgatagttaggttctaatattgtcataaaagttgggggttctttaaatatatatttatatatatatatatattataaatttgccgggagtgggggagagagagagagatacagagtttaagagagatgaaatgttatgtttctgttcattacttgctttaatttatctactaactttagttctttcgaggcgcaattgtagtaaccatataatataattataatgataatagatccacaaaaaaagtcgttccttaatagctgctctattattgttatttttttcttgttttcttttttttttaattttcttttcactagataaaaattcataagcgccattttgtcagcctatttctgattcagatttgatcaacagttttttttttcgccatacctcattgcttaagtttttttttccatagtttttttttttttcactattatttctgtttttagaaggccatgctggttcgtctcccgcccaggccaccacctcctccgccgggtccgcccctggttagcccactgtgggagacacttctgcccatcctggcctcactgccctttcgttcccttgcctttctgagcaaatccgatgtgctcggcctcctgctgtcctgggcagaggctgctcctccgcccgatccccctgctccccctccccgtctgcaattaacaatgtcggatgttgaggatctcctgatggtgcctccatcgtttgagggcaactgcaggcttccggctccaccgccaacgccactgtagggtgacagaaagctgggcgaatgtccgggcagaactgatcctcttggctcctcgggatcaacactctccacccgcaaatagggcattctacgctgcggctgatccaccgccggaacagagctattcggttgactgggtggagttgttcctgagttactccgtaggccactgtacagggactttagatgaaagtccagggacttaaagttgagcagggagcgacgtttttggcgttcatcgctggtgggcagtgcctgttccggactgccattggtattattattgttgttgttgttattgttattcagggagtcgaactggagttcagctgcaatgggaacagctgccgccgaatcgctggtgctgccgctggccatcaaatgttgctgctgtagttgcacatactgctgaggctggagatgttgctgctgttgttgctgctgctgctgctgttgctgctcctgcttgcttattgttgtcgtcatggtattgctacttaggctagttttactgctaatcactttcaaaaatttattatcgttatctaaggactccttttgtcactggatgaggcagaagccttgcttggcagcgtccttggcagcgtccacctcctcgatgaaggcctcatcctcgtgcttgggcgaatcggcgccgcagggtccgccaccgctcaggctgagcggcccctgcgggcacgctgattgtcaccggagcgccaaggtcgagatcatcggcggccgcaccggcttgttttccaatatcctttccagctccagcataacgctcgatgagagtcgtggcagcagctgcaatatcaggatggtcaaacatctgaataaatcgaaagatatctaactatctcaagctactttctgaaggtctctttattttatctattctttgtcttatgtttatgattatgtatgtgtgtatttttacctgcaacgactgcagactttggtgcagctgctccgccgatgtggcgcccagcagcaggcattgcactggctcatgtttcagcgaccaggcgatggacagctgggtggggctgcagcccagcttctcggcgagggcggcaaggtcgcggagacggtcgcagtggcggcgcccctcatcgatccggtccttaccccaactgccctgcggcgacagagcggcctgaaagaatacgaatggattttttttatcataactagactaaaaaaagacatatttaaaaaataataactgttttgagcagctaattaccaatgctaaacagtcttatcactttttgaagaatttaggaaatttaattttttggtcaattttcgcattttttgtaaggggtaacatcatcaaaatttgcaaaaaattgccaaaaaatagtatttccttttgtgaatacagttcgattggaaatttaattacgagctcaacgaggtatgacattccatattcagacaattatttttaaagttgtggctaaaaaactgattattttatgaccgaaattcggaaaaacggattttgccaaaaatttgatatttacaaatggaattttcgtcataacttggctaaaaatgctcatatagttgtacgaataactgttttgagcagctaattaccagtacaaacgatccctatcactttttggaggattttggaaaattaatttttgggtcaattttcgcattttttgtaaggggtaacatcgtcaaaatttgcaaaaaatgtcaaaaaatagaatttccatttttgaacacagtttgattggaaatttaattacgagttcaacgaggtatgacattccatattcagacaattatttttaaagttgtggctaaaaaaccgattatctgatgaccgaaattcggaaaaacggattttagacaacattaatcataactttgctaatcataacaatatttaaactgtctattgcttatattcggcacttacattacgattgatctcgtcctcggtccacgagaagctcttcgtcttgaaggagcccttgggcaggaaaagcttgtccccattctgggtgtcgctgagggccatcgagagtggaccccaggccatgaggcccactccgatcttgttgtacatctccggcaggtagagttcgcacttttcgcgacagaacatatggtactcggactgctccacaatgggcgtgatgcagttgaactggcggcagttggtataggcctccatgatctccacctggctccatcgagcggtgccccaatacattgcccagccctgctgtatcacgtagctcatggcgcgcaccacttctggcaaggaaatgaaaaagagtttacaaaatgtgcaacatttgtggcactttcgaatctgccacagatgccatttcgtttggataacttaccctccatgggacacatgggatccgccttgtggatgatgacgatatcgatgtactgcagctgcaatcgctgcaaactggcacgaacacattcgatgatgtgtttccgggagagaccacgttcctccgacctacgaagtagttgcaaaaattaatcccaatgaaggtcaagtaaaatgtcaaattatatatatatgttcatttaacaatttgtggactttaaagaaaagattaatcagagaatcagtagaaagctaactatactaattatataaatatagaaatatattttgcagtgccaacttacttggtgctccagtagaccttcgtggtgatgacataggcggtcctcttccagcccgcccgctgcagtatcttgccgatctccgtctccgagtgcgcctccgagatgtcgaacagattgataccgctctcgatggccagcttaaggattgcctccgcctggtcatcgctcacgcccggcgaaaataccggccaggtacccaatcccacattcgagatacgcaacccgcttttgcccagattcttgtaccgcagtcccggcgttggtgtggatccatggcgcaatggtagcgccggattggagcccaaactgatcgaacgacctgctcgcagcggaatggccaaataaacggtcatcacggtcggatggatttccaggattcgaaatggtcgagtgtgttcagttgccggcatggaaatgaaacaattcgtttcgggggaaaagtatgtgcgttccgtttagtgagagaccttttttttttttggttttcggttaaaggaggggctttcaaagtgccgggaaacgtgcaaaaacgaacagcaacaagaacagtaacaacacaaacgcaattccacaataaacagctggctaaatcaggctaaagaagtgacaatactctacacaagtgtcatacaacttgaaaacgtataacttttaaaaataactgtctcttaaatatttcagtactattcaaaatggacctggtggcaaattctgcttgcgaaataaaaagtgaaatgggtatatgatatatggttttcaatcagcaaatgggactgccctaaaggaaagtgtatgtgaaaatataaaaaaacaaacaaagagcgcggcatgcaatgaacatgaataaacaaaagtgacatttttccgttggtttttccgtttttctcccggttttccaccatccccctcataaaaaagtgcgtgcgtccggtgcgtgttttcttttgctttcttttttttttgttttgtttttttttgttttttttgattgcgtgattgtgacaggtggttcgtgtgggtggtgttgctttaccttacaaaatgaataaaataaattacaacttcaattgcatgttttggacccgaattcgatggaatagagagcactccaacgccctgcgccttaattcgctaaacaaaaccaacaattaccaacagctgaactacaaggattgcggaggtgggtgctttagttgaatgctcattttgtacaatacgctatacatatgtaggtatatgtttcatttacttgggctattttgaagcaagcgatacttgcttgtatgtggtagcatgcagaggcaggcaatcgaaaaacaatcgaaaaagtcgaaacaatcgacagtaaacaacataaatgataagcctatatgatagtgagaaatttgataccgaaatcaagatgaccgcccgtaccactgaactcctccatacagtcgagtgacgcaatgggagcccggcacctgtaaaggaaaatagtttggaaaaatcggattagtataatgacaataggttgcgagaatctgcaaagagtcgactaatttatggtaggtatcaatttttgtagaaattttctgttcatattacgtatacgcaaagttagcacattgcgtatacgcactttttacattttattgcgtatacgcactattttcacactacgtatacgcactgttatggcattacgtatacgccctgtattctaattacgaaaagttgacttttggctcattttaaccgtaatttcactgtatataattagttacctaaactaaaccgttcttttgtttagctacattttagaaatatcaagtatacgactcgttggccagaattagtaaattagtcaatgaatatctacttagaaagaacatcgttctcttctatcgtctaaacatttaaactttgatttagtataaccactttttttcgggattccaggacctttgacctttgttaatacctgtaaatggtgaccgggttcgattcgtcgctagtattgtccacattgttgttgttgttattgttattgttgctatcattggtcgagggaattacgcccatggcgccattaccgatcatcagttgctgagtcgtgggtcccgtaatgaagtttaaattggcgggcagtgccataagcagcggctgcggcgtcgactgcggcagaggcagcggcagcggcggtacaccggcatcgtcggcaacaacagtgggcatttcaatggatgttaccgctccgtctgtgacgtcaccgccgccgctgccctctggcgcagcgctgccgctctgctcgtgtcccaaaagcagcggcgtactctccggctgtagcgtgtgcgagtgcgagtgaggcagcaacggagctgctgcagcggttgcggccggcgactgcgactgcgactgagacgtcgactgcgccgcagagccgtcaccatttaaattgcataatgccatagacattgtgcttgtagttccactgcttttgttatgatttaactcaattttaatatttatcaaagtttactttcacttgtgttgttattttgcttcctacgttttctatatatatatatatatatttttttagatactattggacgccattgtttatcctaggtttgcacgcacttcatatttatttagctactgcgtgttgattggaatttcttctattatttatttaggcatttgatttcaattttaatagcagcaaggttttatttatatttgtgtggtttttttattgcaattctaattgaagtttgctttgacatttaaaatgtctgctattgattcagctacttgttaaatattaatatttatttttgaagttaagagtttatagtttggttttcttttacgtagtattttcaacacctattaggtttcaaatttttttattttttttgtaggttttctaaaattatatgttcatctttaaggttatttaagtttttttttgctttcgcatatttactattttgaatgatatgattactttgaaagtttatcataatttcaaagtttcaagttcagatatttcaatttcacttctgcatttgttttggttgatttttgttgtatcttacacttagactggactacaaatcacatgggattttgttttctaaaaagcatacttttaaggcaaagtccagtcgaataaatgtttatttatttattttttgtcgctattgaagatatttattctactatagaaataggaaaacgtattcttatcacatgaatatgtgtgccaaaaaatacaaaaaaaaaaacttgatcgaaactttgccaaaacttttgtcacaataattaagaagccgaaacaaggcaaaaataaacaacaatttcagcagagaaagagagagactgagactttgcgaaagaaaagagcttttcaccacactcagagaaaaaaaaggaaaaactggcgagagaatcgagaccgtaaatttcatgtgcaattggctgataaatggaaccacctgccgacttgttagcaaaatctaatattgtatatatagattggaattaaatatgccacatataagctgaagaaaatttaattgcttcatgtttcaaaagaaattttttttttttagtttctgattttattcgaaagtttcttactttgaggtaacactttgcattaaacccaaatgtccgaaaacataaatagatattttatggctgttaattttagctctgtgcccctggttcatttaatccgcctcgtgtcaaagcacagatacaaatctatctatatctatatccccagatgtattgatggctgttctttttgattttccactatcaaagtttaattatagattaaccttgacaatgattcagaatcgcttcagacagcttttccgtcttcattagcttgatcaatttggaaaatgcattattttcctctgggaaaacgaaagagctacagcgaccaagagagaaagagagagagagagagagagcgcgcttttcaccacgaccggtgtatttgacaccacaacaacaacaacaacgagaagaagaagaagaagagaacaaaaacaagaaggcacaatttgcactcgcctttcccctgcatttccctttccttgtctcaaactaacttttgacgtttatgcaacgctttacacaataaaactgacacctctaca

SEQ ID NO: 3818 - DNA, 3531 bp, DROSOPHILA
ttattcgactggactttgccttaaaagtatgctttttagaaaacaaaatcccatgtgatttgtagtccagtctaagtgtaagatacaacaaaaatcaaccaaaacaaatgcagaagtgaaattgaaatatctgaacttgaaactttgaaattatgataaactttcaaagtaatcatatcattcaaaatagtaaatatgcgaaagcaaaaaaaaacttaaataaccttaaagatgaacatataattttagaaaacctacaaaaaaaataaaaaaatttgaaacctaataggtgttgaaaatactacgtaaaagaaaaccaaactataaactcttaacttcaaaaataaatattaatatttaacaagtagctgaatcaatagcagacattttaaatgtcaaagcaaacttcaattagaattgcaataaaaaaaccacacaaatataaataaaaccttgctgctattaaaattgaaatcaaatgcctaaataaataatagaagaaattccaatcaacacgcagtagctaaataaatatgaagtgcgtgcaaacctaggataaacaatggcgtccaatagtatctaaaaaaatatatatatatatatatagaaaacgtaggaagcaaaataacaacacaagtgaaagtaaactttgataaatattaaaattgagttaaatcataacaaaagcagtggaactacaagcacaatgtctatggcattatgcaatttaaatggtgacggctctgcggcgcagtcgacgtctcagtcgcagtcgcagtcgccggccgcaaccgctgcagcagctccgttgctgcctcactcgcactcgcacacgctacagccggagagtacgccgctgcttttgggacacgagcagagcggcagcgctgcgccagagggcagcggcggcggtgacgtcacagacggagcggtaacatccattgaaatgcccactgttgttgccgacgatgccggtgtaccgccgctgccgctgcctctgccgcagtcgacgccgcagccgctgcttatggcactgcccgccaatttaaacttcattacgggacccacgactcagcaactgatgatcggtaatggcgccatgggcgtaattccctcgaccaatgatagcaacaataacaataacaacaacaacaatgtggacaatactagcgacgaatcgaacccggtcaccatttacaggtgccgggctcccattgcgtcactcgactgtatggaggagttcagtggtcgttcgatcagtttgggctccaatccggcgctaccattgcgccatggatccacaccaacgccgggactgcggtacaagaatctgggcaaaagcgggttgcgtatctcgaatgtgggattgggtacctggccggtattttcgccgggcgtgagcgatgaccaggcggaggcaatccttaagctggccatcgagagcggtatcaatctgttcgacatctcggaggcgcactcggagacggagatcggcaagatactgcagcgggcgggctggaagaggaccgcctatgtcatcaccacgaaggtctactggagcaccaagtcggaggaacgtggtctctcccggaaacacatcatcgaatgtgttcgtgccagtttgcagcgattgcagctgcagtacatcgatatcgtcatcatccacaaggcggatcccatgtgtcccatggaggtggtgcgcgccatgagctacgtgatacagcagggctgggcaatgtattggggcaccgctcgatggagccaggtggagatcatggaggcctataccaactgccgccagttcaactgcatcacgcccattgtggagcagtccgagtaccatatgttctgtcgcgaaaagtgcgaactctacctgccggagatgtacaacaagatcggagtgggcctcatggcctggggtccactctcgatggccctcagcgacacccagaatggggacaagcttttcctgcccaagggctccttcaagacgaagagcttctcgtggaccgaggacgagatcaatcgtaatgccgctctgtcgccgcagggcagttggggtaaggaccggatcgatgaggggcgccgccactgcgaccgtctccgcgaccttgccgccctcgccgagaagctgggctgcagccccacccagctgtccatcgcctggtcgctgaaacatgagccagtgcaatgcctgctgctgggcgccacatcggcggagcagctgcaccaaagtctgcagtcgttgcagttgcagctgctgccacgactctcatcgagcgttatgctggagctggaaaggatattggaaaacaagccggtgcggccgccgatgatctcgaccttggcgctccggtgacaatcagcgtgcccgcaggggccgctcagcctgagcggtggcggaccctgcggcgccgattcgcccaagcacgaggatgaggccttcatcgaggaggtggacgctgccaaggacgctgccaagcaaggcttctgcctcatccagtgacaaaaggagtccttagataacgataataaatttttgaaagtgattagcagtaaaactagcctaagtagcaataccatgacgacaacaataagcaagcaggagcagcaacagcagcagcagcagcaacaacagcagcaacatctccagcctcagcagtatgtgcaactacagcagcaacatttgatggccagcggcagcaccagcgattcggcggcagctgttcccattgcagctgaactccagttcgactccctgaataacaataacaacaacaacaataataataccaatggcagtccggaacaggcactgcccaccagcgatgaacgccaaaaacgtcgctccctgctcaactttaagtccctggactttcatctaaagtccctgtacagtggcctacggagtaactcaggaacaactccacccagtcaaccgaatagctctgttccggcggtggatcagccgcagcgtagaatgccctatttgcgggtggagagtgttgatcccgaggagccaagaggatcagttctgcccggacattcgcccagctttctgtcaccctacagtggcgttggcggtggagccggaagcctgcagttgccctcaaacgatggaggcaccatcaggagatcctcaacatccgacattgttaattgcagacggggagggggagcagggggatcgggcggaggagcagcctctgcccaggacagcaggaggccgagcacatcggatttgctcagaaaggcaagggaacgaaagggcagtgaggccaggatgggcagaagtgtctcccacagtgggctaaccaggggcggacccggcggaggaggtggtggcctgggcgggagacgaaccagcatggccttctaaaaacagaaataatagtgaaaaaaaaaaaaactatggaaaaaaaaacttaagcaatgaggtatggcgaaaaaaaaaactgttgatcaaatctgaatcagaaataggctgacaaaatggcgcttatgaatttttatctagtgaaaagaaaatta

SEQ ID NO: 3819 - protein, 548 aa, DROSOPHILA
MALCNLNGDGSAAQSTSQSQSQSPAATAAAAPLLPHSHSHTLQPESTPLLLGHEQSGSAAPEGSGGGDVTDGAVTSIEMPTVVADDAGVPPLPLPLPQSTPQPLLMALPANLNFITGPTTQQLMIGNGAMGVIPSTNDSNNNNNNNNNVDNTSDESNPVTIYRCRAPIASLDCMEEFSGRSISLGSNPALPLRHGSTPTPGLRYKNLGKSGLRISNVGLGTWPVFSPGVSDDQAEAILKLAIESGINLFDISEAHSETEIGKILQRAGWKRTAYVITTKVYWSTKSEERGLSRKHIIECVRASLQRLQLQYIDIVIIHKADPMCPMEVVRAMSYVIQQGWAMYWGTARWSQVEIMEAYTNCRQFNCITPIVEQSEYHMFCREKCELYLPEMYNKIGVGLMAWGPLSMALSDTQNGDKLFLPKGSFKTKSFSWTEDEINRNAALSPQGSWGKDRIDEGRRHCDRLRDLAALAEKLGCSPTQLSIAWSLKHEPVQCLLLGATSAEQLHQSLQSLQLQLLPRLSSSVMLELERILENKPVRPPMISTLALR

SEQ ID NO: 3820 - DNA, 3052 bp, DROSOPHILA
ccagaggagatctcatgttccggtggccgagcgattggagggtcaacttgtgagccaacagcgaagtcgattatcgcaggagaaccagcagttcttcctgataccatcacaggagcagcaggacagctccacggagaaccagggggatgaggatcaggacgagcaggaggatcactttggtggcgaatcagccgcctcctatatgcccaaagcggaggctttgcaccaagaattggatggctacccactgccggatcatgcgccgcaggtgaattactactcctcctcctccacggtcacatcgtcctccaccgccgcccgcatagccaccaaggctcccattttggcggctgttccggctgcccaggagcaaatctggaccaattgcaatacactcggttggtcccggcagcgggatcacctgcagcgtgtccagctaaagatgggtgacatggcgccctgcgagaatgtgtccattgcgaccgtcaactccatgtgcatggaggccacctaccagaagtacgactgcacggtgagtagccaaaagattgggaaaggcatagtgtattttctaaaatattacttagctttattaaactgattcacttcattgagagtaggaggggatacaaattaattgttcagttagttatttataatcaacgtaatgaaaagtaatttgtataaaaaagaggattgaattttatatttataactagtttatttgaaaaaaaagtttattacggcgattaattaaatctcaaatcataataggccagaagattgcttaggatctaaagtatgtttcattcacatagcttaaaattattaacaaaaatggttattttttacataatataacatttggtttggacgtttgtttggtgcgattactgcagtgtaagtcttaggaacaatggttcaaccttttagcttatgaatacatctaattggagtatcgtatacgtagtagagctatgtacaatccatgattggcgacctagatgcgaatcgagcgcatgacaggaacgggagacggaccaaccgacgtggacgctgtgcgtcttggcttcgaacagacgtccacgcgctggcgcttcttgggcggctccttttggtcatcgtcctcctgcagccgaggtatggaaatctcatccagctgctgctgcgactgttccctaaggaaacagttctgacgatgcacaggaatggcgccggcagtgggcagcgatcccaggaagcaattcatccggtagaccggcaccggcttgtactccggcaccggatcttccttttcttggtcctcctccttctgaccctcggcttgctccaaatccactagacgctttcgcttaagggactcggtctggcccagactgcggcgcatctttgaccagtcaaatctcaggtgaaaggtgatctccgggcaggggaacaaaagcaggaaatactccagcaaatgcgcctcaaacacgtagtccttgccgttggtcaggatgagggctttcctttgtgtctccggaatggcgaagcgggtcatggctggaaaaaaattcagtcaattaatattagaataatgtaatagattccgattctttacaatttactttcaatttattgtcttccaaattttaaactttttattttcatgaaaggtttatttaacaaatatttttttgatatttagttaggaaaagaaaacgctgtgaatgggattcaatacttttcagtgttcttaaagcaaaggcacgcaaatttagttgttgaattaaattttaaattggcttggaagacgacgccactgtatttcactcttccattcaaatttcgtgactcaccttgggagatgacctcttcgtaagtgttcgaggatccgcaagtgatgaggttggtctcgccctggaagagaaccttcaagctgctcctgatatcggccatcctttggttttcttttcgtatatagtagtaaaattgataacgatcttcacactggtaatccttcttcaactctctctattattttgcactgtttttctcgcagcgatgcgttcgcttggaatgttgccgatcgaatgaatgcaagccaacagttggcactctgttttatgtgtttttttttgttattgcggtgtcccttgcttcttcttgctatctccctttttccttttatctgcctgcagctgcactcatagttgttgtttctgctatcctaggtaaaccttcgcaggtaacgggggttgcttatgtgtgttcgctcgtgctcacattgaatggcaattggagagagtaaaaaagagaagcaaaaattactcattcaactttgttattgcttcgactgcttgtttttgttgctctacgccaagcgcgttgctgcatgtcgcgtgcgtgtgacgtcacgatcgccaattggggtggcacgagtttaattcaatggtgaaatattgaaaaaacagagtggatcctattataatattacaaaattatttttaaaatatttaatttgaaagtggacagaaactgttggcaaccaaaatttaaactatatatcattttttagagtggaccaaaattatattttattattatattttgaatttcatattgttcattttcagcaagaggagtattcgggagcgcctgtccagtgcctgattcccggaacgaatcagtgggcgctcattggggtctcctcctggcggatcgcgtgcggacccacgggcgtggagcggcccaggatgtacgacaagatcgcctcgaatgccgcctggatccgcgagacgatcagcgcgatatagtcgggatagttcaccagggggcggcggcacgcccctcagcgcatttgtgtagaaaacggaaccgaaactcactgggtattatgtgtgtgtgtagcaaagcaagtaaggcaattaagcatatgtactatgtaactaacctgctctaatgttactcgaacctatgtaactctatgctaactgtattctttaaacgtccttttttttgctgttttgtgtaatatttattaactatgttgtaattgtatgttaaacatgtc

SEQ ID NO: 3821 - DNA, 756 bp, DROSOPHILA
cgaacgcatcgctgcgagaaaaacagtgcaaaataatagagagagttgaagaaggattaccagtgtgaagatcgttatcaattttactactatatacgaaaagaaaaccaaaggatggccgatatcaggagcagcttgaaggttctcttccagggcgagaccaacctcatcacttgcggatcctcgaacacttacgaagaggtcatctcccaagccatgacccgcttcgccattccggagacacaaaggaaagccctcatcctgaccaacggcaaggactacgtgtttgaggcgcatttgctggagtatttcctgcttttgttcccctgcccggagatcacctttcacctgagatttgactggtcaaagatgcgccgcagtctgggccagaccgagtcccttaagcgaaagcgtctagtggatttggagcaagccgagggtcagaaggaggaggaccaagaaaaggaagatccggtgccggagtacaagccggtgccggtctaccggatgaattgcttcctgggatcgctgcccactgccggcgccattcctgtgcatcgtcagaactgtttccttagggaacagtcgcagcagcagctggatgagatttccatacctcggctgcaggaggacgatgaccaaaaggagccgcccaagaagcgccagcgcgtggacgtctgttcgaagccaagacgcacagcgtccacgtcggttggtccgtctcccgttcctgtcatgcgctcgattcgcatctag

SEQ ID NO: 3822 - protein, 213 aa, DROSOPHILA
MADIRSSLKVLFQGETNLITCGSSNTYEEVISQAMTRFAIPETQRKALILTNGKDYVFEAHLLEYFLLLFPCPEITFHLRFDWSKMRRSLGQTESLKRKRLVDLEQAEGQKEEDQEKEDPVPEYKPVPVYRMNCFLGSLPTAGAIPVHRQNCFLREQSQQQLDEISIPRLQEDDDQKEPPKKRQRVDVCSKPRRTASTSVGPSPVPVMRSIRI

SEQ ID NO: 3823 - DNA, 2864 bp, DROSOPHILA
ttctgagggaattccggagggacagtttgtttcgactgaacaaacattttctttttattttatttgtatattcggaattcgagtgaataattcagttcaaattcagatttggtaattgaaacattatgtcttgacaagactttaaatacactaccaaaattatcacttgtaatggggctggtgagtggtaattttaaccacaaaaaatattaaaatcctagcaagtatttttggattttttttatagaaagacaccagagaaagcctatatggcgtttaacaactcattttcaaatgctttatttcaatcgtagatcgtgcgggttaaaaccatggtcattgtattcaggtatgatatgatatgagcactaaaatatatatttcttttaaaaaagttgttgaacataaagaagtcttaacaaagtgaaaactagtcacgatcgcaacacgaacataaatagctaaacttgccactagccgccagatcacaaatcttcccgcattaaggagttaaaaaacaacctaagtagaaaaaaaaaccaaattggtctggcttataggtattcataaaattttataaatacatataaatgcacatatgctactcaacaacataaaaatcgactctcttgcccactatctctcttcttaatgtttttattgtatttttttttgggatatttactttcgattatttgctaaattaattcttagcaccaacaataattttaccatcatttttattatcggtttattaaaatttatatattttaagattaatcgttcatataaaaaaattcagagcccgtcaagccctccctacaaaggctctggaataagtctagtgtctttgctccctctctgtcaaatcacctaaaaagaagctggcaaaaactccagacaaaaagacatcacgaaattgtttttctgtatactacaagtgtatacgaatatgttcttaaatcgttgtttccaaaattaaaaatgtatgtatatattgatggtcaattacctgtatttcgagtaaaagttcctgcttcttgcgtcgcagctcaatcagcagtttttgctgctccggtgtaagttctgcaagaacgagatgcgaatcaataataaattcatatacttgtttctgggcattttgtaaattgtatcgcaacaccaacagtaaaaataaaaaacaccagagcagcattccaggcacacgcgcccaacacacatacacacgtgcatacacgagctgtttgcgatgcgatgaaagcatcttgtaggctacgtcactagcttaggccgataaacaattttcacttgtcgaaaccacaatggattgctaattgtgcaaattggcttattagcgttaccaaagctcttcggacttaattctgacgaaggccaaaaacgagaacgcaatgtacatatgtacataatatacatacatatgtgcactaacatttcacctagcacacaagtctatacatacaaatgttgcttgttgcttctcttattttgtagttgtgggtatcccaatttgtgatcttaataaaattttatcaatacaaagattcgtattctgttcatgctaggctatatccttcgggccagcaaaagtatctgctgtttacctggcattgagaattcactgcgcccctttgatatggcaccgtacgatctgttgtcgaaattgtccattgcgctaatcatcgcggagctactgagctactacacacactctcgcgcacacgacacacactctagttgtacatttttcaccagcagttggctaatttttaaggcttttcattgaacaatcaaagacgaacggataataaacaaatcaacaccaaaaaaattctatcgccattttctttcagctctccactagggatgtgctgaattcagctatcggttgagtaaacaactgaaaaataacaagtgcatgctgacttaagctgggtgttacgcgagctctgtgtggccacttttaaaatatcctgatgccactgcatcttgtaaccaaacgtaagaactttttaatcagtagaactaaaaaaattagggctaattatttacttgcaacaatacattaaatatttttaggggtacactttttcagagattagagcagaccttatctatttcaagacaaatagcttgaaaagctgtaaaacaactttgttacatccattatggtgtgatttgcgggaatcggctattaccatttcgaaaattgtttgttacaagttaaaaacataaacttaaagttttggacgtacataaaaatataacattaaaacaaccttgttataaaaaaatacaataccaccaatacttactgtccattttaaatctgttaaaaaattcactgaacgaatacgtctttcgtcataactccatttaaaatatcgtcaggaaatttacacatcatttcgtttttttaacggcacaaacacctcggacttggtggcaacgctgccaacatatgtgtgcactggcatcgataatttttacatccctattttgaaccgcagaattctagaaaattccactcgctggccatagtaattgtccgaattagtttaagctaagactgccggatcaaaagtaaaccaacatcttccatcttttcataaaattgaagacagtttcatacaattctacagtaagaaagcgatggccaagtggggagaaggagatccgcgctggattgtggaggagcggcccgacgccaccaacgtgaacaactggcactggacggaaaagaacgccacgccatggtccaaggaccgcctgcatcagctttttcaggatttcaaaataggcgagtatataagaatttgtagtagtgtagaacatacattttaggt

SEQ ID NO: 3824 - DNA, 328 bp, DROSOPHILA
aaaatggcgatagaatttttttggtgttgatttgtttattatccgttcgtctttgattgttcaatgaaaagccttaaaaattagccaactgctggtgaaaaatgtacaactagagtgtgtgtcgtgtgcgcgagagtgtgtgtagtagctcagtagctccgcgatgattagcgcaatggacaatttcgacaacagatcgtacggtgccatatcaaaggggcgcagtgaattctcaatgccagaacttacaccggagcagcaaaaactgctgattgagctgcgacgcaagaagcaggaacttttactcgaaatacaggtaattgaccat

SEQ ID NO: 3825 - protein, 55 aa, DROSOPHILA
MISAMDNFDNRSYGAISKGRSEFSMPELTPEQQKLLIELRRKKQELLLEIQVIDH

SEQ ID NO: 3826 - DNA, 2263 bp, DROSOPHILA
cattaaagacgagcttctgttggagcaacttcttaccaaaccgaaaacggtgggtgtgcacacaagcgtgctgttgccctccttccacaacggggggcgtggcaattaagcaaacgccccctccgagccaaggaaacaaaaagcgaacagctttcactttctctggcacaacgaaggtcacacatttggttgcattctaaaaactacgctttaaaaagtgcagaatgagtgagtaaattaaaaaatggataaaatatgttataatatattgcttataaaattgtcatcaaattgcaatcacagcttatagatttttaacttgaaatctagtagcagacctatttttctagccgctgctgtacgcacaacacatatgcctgaccagacggccagaatgaagaaacataagaaacaggaccctctatttatttatatgtataattttgtgtcgctttggttgttttttttttgtatttttttttttttttatattcctttggcagttccttttggcaaagttttttaatttaaaaacttcaagggaaaaatattgagggtgcgagaagaagagggaggtgtaaagtgtaaatagggaccacgcccacgttcatgcccaaaagatcatcatcggcatcgacaactcaactcaggtcaggccccgtttctctccgtctctttctaccgtcctatgtctgtctctttcacttgcatccttgacctgcgttagtgtgtgtgtgtgtttgtaagtgtgtgtatgtttgtgtgtgcgttctgacatcctgaaagatttgtgtttgtgttttgtgacagcgtccaaagcttccaaggaacttgccaaaggagtttctgccaaaaataattgttgttgctgttgctttctcggtgggtggatgcttggatggatgggtgtttggtccactggatagtgggccaccggaatggttggtcggttgtaatggtttcaattggatggttggtgagctgaatggctggcacttaccgcactgcaggaacttcgaggatatcccattcgacggacgtatagaactcggacagatccacgcccacctccacgacattggtgccgttcagctcgtcgatgtgccgcagatccacatcatctcgctgatcggatagagcggacgtcgcatgaccaggaagcggggcagctggttgatgaacacggtccgcacccaaggagccatcgtgtgcgtttgcggcgaccggaagtgaatgttcagcaccaatacagtcacacagatgctgcatcgaaaagaaatcgggttgtggtcagtatatggatattcacttgcaaatatatatatataacctattgtatttgtatttgtatataatacatatgtacaatagatataaaaatctaaataaatcatataaattattatattcgctgcaagtgcttgataaagtgtcactatattgtatttgagttgttcaaggataagatgcgacaccggcggttggtggcaacatgcagaaaggacttaagtgagttgctctcttagtctgggtaattaacttgcgacgcccacgtctaattagcagctggccaaggcgttggggaaagaataaggcggcaaaggacgcaggactaaggacgaggagatgaggggatggtgtagtggtgctggttgtcctgccagccttaattacatcatttgaggcgaggtcctgttgcgccactggcgattcccattgttggcagactccgtcgacttttgtttaccaacaattaggcggccatcatttggtgtgccagtcggccagctgcccagttgcctttgtgggcgtggcaaatgactgtaaattgccgcagccatttaataggcccccccagcggggggggggggtgttagttgggcgacggcgtggcattgggcgtggcactaagccaccaacgaatttcattttccgcctgcgtttgcaaacttcttcaaaaagcagtcgtcgaagttaagaaaagttgctcgaaattttcgaaagttttcaaagattttaaatttgctatttgctttttttttttttgctttaaatttttatatcatatataattaagagtagacaaagcatttgactttttccataacgaaatgtgatttattggattttgtgcgacagcgaacggaaaatatgttcataatctcataaataggatagtaaaattatatgcagttatccttttatttatttgtaagtctcgatatcaacagtgtgagtaattataattgatgcaatggattgc

SEQ ID NO: 3827 - DNA, 2319 bp, DROSOPHILA
atgtacatacttatatacatacgcagcacagcgaatccggatgcgaaacgattgtacgacgatttgctgagcaactacaacaaactggtacgaccggtggtcaatgtgacggacgcgctcaccgttcgcatcaagctgaagctatcgcaactgatcgatgtcaatctgaagaaccagataatgaccaccaatctgtgggtggagcagtcctggtacgactacaagctcaagtgggagcccaaggagtatggcggcgtcgagatgcttcacgtgccctccgatcacatctggcgtccggacatcgttctctacaacaacgccgatggcaatttcgaggtgacgctggccaccaaggccacgttgaattacacaggacgcgtcgagtggcgaccgccggcgatttacaagagctcctgcgaaatcgacgtggagtactttcccttcgacgagcagacctgcgtcatgaagttcggcagctggacatacgatggatttcaggtggatctgcggcacatcgacgagctgaacggcaccaatgtcgtggaggtgggcgtggatctgtccgagttctatacgtccgtcgaatgggatatcctcgaagttcctgcagtgcgaaacgagaagttctacacgtgctgcgatgagccatatctggacatcaccttcaacataacgatgcgtcggaagactctcttctataccgtcaacctgatcattccctgcatgggcatcagttttctcaccatcctcgtattctacctgccatcggatagtggcgagaaggtctcattaagcatatccattctgctgtcgctcactgtgttcttcctgctgctggcggaaatcattccgcccacatcgctggtggtgccgctgctgggaaacatctgtgtgactgtattggtgctgaacattcacttccggtcgccgcaaacgcacacgatggctccttgggtgcggaccgtgttcatcaaccagctgccccgcttcctggtcatgcgacgtccgctctatccgatcagcgagatgatcaaatcctcgcgccgcctaatggtgcgcacctgcaatggactcgaactgagggatcaaataccaccgctgccaccgccggtggccttgtctcgtatgcaccacagcccgaagacgacatcgcgtagcacctcgccgcatctgcagcaccgcgtgcaaacctacaacctgatggacgagtgcggcatgggcatgggcggcggtgcctctaccattaccggccatttgagctccctgtatccgccgacgatgtcgacggccaaccaacagacctcgaccacatcatcgctgatcgatgcccagtaccacaatcagtaccagcagacgggcggttcgctgctggaccatccacttacgcccaccaagttccgccaaatgacttcgacctccagccagacgggtcagaatggcagcgggaacggtaacggtaacggtggctacggcgggcatggccagagcggtggccatcatctgtatcgacagcagtcgagctgctcggcgaatttctcgccgctgccgcagcacgcccaccaggcgcacgcctccaccaccaccagcgatctgggcatggccaatccgaatgtgataaaatcgacgacgacggttaactcggtggccaccgcctcgacgctggcggactcctgctgcagcggcaccattcagatccaccagggcatgggcgccggagccgcttgccagtcgtcggagctgctgcaccatcagcagttgcaccaccagcagatgcatcaccagcagcaacagcagcagcagcagcagcatcaccaccaccagcgacccaccacctcggcagcggcggcagcagcagcggcagccgccggcggacccagcacctcggcagcggcagctgcagcagcggcggcagcggcggccggaacgccacccccaccgcctccgccggcgggcgtctgtgatattctgcccgcctgccagcgcgagggcgggccgcactgctgttcggggcgtggcaatgtgcgccaacggtggcacacctgtccggaactccacaaggccatggacggggtcacctacattgcggatcagacgcgcaaggaagaggagagcacaagggtgaaagaggactggaagtacgtggccatggtgctcgatcgcctgttcctgtggatcttcacaatagccgtggtcgtcggcaccgctggcattatcctgcaggctccgacgctctacgacacccggatgcccatcgatataaagctatcggagatcgcctcgacgacggccaagccgaatgtggccaggcctgtgttgtaa

SEQ ID NO: 3828 - protein, 772 aa, DROSOPHILA
MYILIYIRSTANPDAKRLYDDLLSNYNKLVRPVVNVTDALTVRIKLKLSQLIDVNLKNQIMTTNLWVEQSWYDYKLKWEPKEYGGVEMLHVPSDHIWRPDIVLYNNADGNFEVTLATKATLNYTGRVEWRPPAIYKSSCEIDVEYFPFDEQTCVMKFGSWTYDGFQVDLRHIDELNGTNVVEVGVDLSEFYTSVEWDILEVPAVRNEKFYTCCDEPYLDITFNITMRRKTLFYTVNLIIPCMGISFLTILVFYLPSDSGEKVSLSISILLSLTVFFLLLAEIIPPTSLVVPLLGNICVTVLVLNIHFRSPQTHTMAPWVRTVFINQLPRFLVMRRPLYPISEMIKSSRRLMVRTCNGLELRDQIPPLPPPVALSRMHHSPKTTSRSTSPHLQHRVQTYNLMDECGMGMGGGASTITGHLSSLYPPTMSTANQQTSTTSSLIDAQYHNQYQQTGGSLLDHPLTPTKFRQMTSTSSQTGQNGSGNGNGNGGYGGHGQSGGHHLYRQQSSCSANFSPLPQHAHQAHASTTTSDLGMANPNVIKSTTTVNSVATASTLADSCCSGTIQIHQGMGAGAACQSSELLHHQQLHHQQMHHQQQQQQQQQHHHHQRPTTSAAAAAAAAAAGGPSTSAAAAAAAAAAAAGTPPPPPPPAGVCDILPACQREGGPHCCSGRGNVRQRWHTCPELHKAMDGVTYIADQTRKEEESTRVKEDWKYVAMVLDRLFLWIFTIAVVVGTAGIILQAPTLYDTRMPIDIKLSEIASTTAKPNVARPVL

SEQ ID NO: 3829 - DNA, 4743 bp, DROSOPHILA
acggccgaagagtgcctgaaaagcaagtactttgtcgatccgccgcagggtgagttggaatttctattgcgacaaagaaaattttcaagtgactaaaccattttccacttttagcttgtgacccgggcatgatgcccactttccctcagcacaggaacaatgctgcacctgctccagctgtccagcctcccgccgacattcccatctcggatttactcaatgtatttattaagcgtcaacgcatggagtaaatgagaacgaatttatttgaacattatgcaatgcactgggtggaaaactataggtacggccggtccatcggcgtttgcttggccttcctgtcgcgggcgcgtggaaaccagcggtgtttagtcgtgtgggtcagctgcatcagctcctggcgagccacttctggatgtttgcttttaaaggcacgcatcgccgtcttcagagccgattccttaaccaccgccgagctctgaatctcgctgatctctggcagcggcagggtgttctcgtagggaactggtgtgtccggatgccaggccacaatggtgcgaccatttttggtcactgccacggcctccaccaggctcttgccaccgacggcattgcgctgcacggcactcgaggaaaataaacgaaatcctccgtataaacgtgccgctgacattttcacaattagagatgaaccgataactgaacagctggaatgttatcgttctaattaatgggcagtgatgcaacattagctacttggataaaaatagctaatacgtcaaaaagaaaactgaaaccatttgtatgcttactctgtaatggttaggcaaaaaaggctaatatacagttacaaaatatacatttatcgatttctttccaataaaaacatcgatagcccaaaaaatcgatgtttcgtcacctctgttaagtactcgataccaggagcttatcacttgccgtcacagctgattttcatttaaaaataaacattcccgttgaaatgtggattgcttacgccctggtggtccacgtactgcttctaggctcaattttcgtgatctactttcgttcgccggtgatcacgggccttactccacagaagcatcttttatattacggcttggagccaccggcgaatcgtttagtgctgatcgtgaccgatggattccgtgccgactccttctttgaggagaactgccgctatgtgcccaacctgcgcaagatcttcttgcgggagggcgtcgtgggcgtgtcacgcactcgtgtgccaacggaaacccgtcccggacacatcaccctaattgccggactctacgaggatccatcggcagtgctgcgcggctggaaaagtaatcccatcgatttcgacaccgtattcaaccgaagctcacagacctacgcatggggcgcgaacgatgttctcaatgtgttttcccatgtgtccaacggtggcgaaataaatctccggttctacaaccacgatctggacttttcgccaggctacgatgcctacgaggaagacgagtgggttttcaaaagggtgaagttgttgctccagcagaagagagaagccctgcagcgggcacagaacgtcgtgttttttctgcacctccttggactggacaccgctggacatgtccacaagccaggcgcgccaaagtttcgacggaccttggaaaagacggaaaaaggtgtttacgcaatataccaggagttcgagcgggtgtttcccgataagcgaactgcttacttgttgaccgcggatcatggaatgacggattcgggtacgcgataaagttgcagacccgcaaaattgctttctaacaaatagcttttttataggtgcccacggttctggttcgccccatgaaacggacaccccttttatgctctggggtgcaggagcctcgcgggccgttcccaaacctggagggcgaacatttatgcccaacaatgagggtcctgcaatgccactgcacgaattggagcaagcccaacttacacccctgatgtccgcgttgttgggtctcgcaccgcccatgaacaactttgggaagttgccgttgggttacttgaatgtcagcaaggaatacgaggcaatggctgcccatgtaaacgctctgcagctactagaacagtatgtggccctgcaaaagcagcataaaaagggatttttcgcggatattttactcgagtatgatgttttaaacgccgaagcgatcaaacgatacaaggatactatcgtacagctgcagaagaagagggagtattcactttgtatagacaagagccaagtcatcatgtcgcaagccctcgagggcatcgattactatcacggatactaccgtagagtgcttttactgagcaccacttccacattcctgggatggatgttctacatctaccgccttctgtctaggaacagggccagtaaagtggaattggtcctcgaaaggagtaacaaaatagtcagagtgagcatagttagttcagtgatcgtgctcattatttgtttgctgagccaaggaacaccactggatatatccttttatctgctgcttccatatttcgtttggcttaaggctttgcaaccttggaacattaacttctcttcatcgccagcttcagcgtatagtgtgccggccctgcagacctcaatgtggcagcttgtgttactcatcgcttgcgcagagctaatggtctttaccttcttcgagcgccgcctcatcgcgctgtgcttctgcgtctttgcctgctacaatagctgggaaaattttcaatggaaatccagggatttcttttcctggctggcattggtcctgattctgtcatgctttccgctgctgccgctgtcagtgggctaccaaaatggatacctgcttggagctggagttatagtcatttttacgaactcattttggaattctaagtcgagattatgctacaggaaccacacaaagtactctaatgccttgatactgctgcaaactatattgtgtgcttatcttcactcaaacggcattaatataccaattccattgaaattggctagctggttgtacctggtatacgcctttgcatctatattgctgagcaaagaatcaagactggatttgcgtctcgcccagattggctttaatttgggatctctctacgcaacactatgtacgtcctatgaggctgtgttcgttcaattgctgactatagagctgaatatctcgttgagggctcaaagtgcgcgggcagagagatcagttctccgtctggccttcaccctgctattgtacaccttcttttcgctctttggatccggaaacatagcgtcaatcagctcctttgatccgaacatcgctcgctgctacctcagtcattttgctccctttgtaatcatgggtctggtgctactgaaactactcgttcctgtggtgcttatcatgtcggtgatctatgccaacagcgagtttgtacgccagcacgaggagcagatcttcatctgtctgctgctcatttgcgatgtaatgggcctgaacttcctattcctggtacggaaccagggctcctggctggacatcggtacgtccatatcacacttcgttatcatggaggtaaccacgctggtgatgctcgtgatcttctataccgcaaagcagctgctgcgagtgattccttgggaggaaatagacttcaaaatgttgccgctgcgtttaatccactgggatgtgatcagcgccaaacatcactagtcctataaccgatttgacaaacattcgagctaagcttaaacatttatgttcgataatatttacaacactaattaagaattagtaacatacacatgtaaattatagaatctaatgctaggaatgtgtctgcgtgtaggtgagggtcagggtggatcgatttcatggacatccaaatctgaacttataaggaagacaaatacttatttgaaaacaagacaattttttactgattctgtactgtactgacgcatttaagaatgtattagaaacaccagtattgttactattttaaacatgaatatattaagaaatttaaaacacttttgatagttaaaaataaattgtaaactaatcatattaaagaaccctaatagatctttaaaaaaatcaaagacagaaattatatttcttaaaaaaaaatgtatcaagtgtatctttttgggattactccaaaaaatcgacccacccaattgtggatggtgttgtgtaggatgtgtattcgtgtggttttgtgtgtgtcatggcacgacgacatctaatgagttgtagaagcagcagcacggctatagaaacgtttatcccgattaatctttcagatatcgctccaccggattcacaccttgaaactttggactggcggtctcatctgaaatgtatcttggattagcattagggctaagtgattttaaaaacggagaacccacttgactgtgccggcttggccgtggtggcactttcccgcggagttgcttgcaggcaattgagccactcggccagcgagatctttttgtcaccattgacgtcgcagtagcgcggcatcttcttgccgcatctgcgcaagtggctgttgaatagaatagagttcataggccattaagaatgggatgtggtgtgatggctcacctggcactggtaaccagatcgcgaaagttcttccactctcgacgatcccacgacttattcttgttcttgtccagataaacaaagctcagagtggcga

SEQ ID NO: 3830 - DNA, 2625 bp, DROSOPHILA
atgtggattgcttacgccctggtggtccacgtactgcttctaggctcaattttcgtgatctactttcgttcgccggtgatcacgggccttactccacagaagcatcttttatattacggcttggagccaccggcgaatcgtttagtgctgatcgtgaccgatggattccgtgccgactccttctttgaggagaactgccgctatgtgcccaacctgcgcaagatcttcttgcgggagggcgtcgtgggcgtgtcacgcactcgtgtgccaacggaaacccgtcccggacacatcaccctaattgccggactctacgaggatccatcggcagtgctgcgcggctggaaaagtaatcccatcgatttcgacaccgtattcaaccgaagctcacagacctacgcatggggcgcgaacgatgttctcaatgtgttttcccatgtgtccaacggtggcgaaataaatctccggttctacaaccacgatctggacttttcgccaggctacgatgcctacgaggaagacgagtgggttttcaaaagggtgaagttgttgctccagcagaagagagaagccctgcagcgggcacagaacgtcgtgttttttctgcacctccttggactggacaccgctggacatgtccacaagccaggcgcgccaaagtttcgacggaccttggaaaagacggaaaaaggtgtttacgcaatataccaggagttcgagcgggtgtttcccgataagcgaactgcttacttgttgaccgcggatcatggaatgacggattcgggagcctcgcgggccgttcccaaacctggagggcgaacatttatgcccaacaatgagggtcctgcaatgccactgcacgaattggagcaagcccaacttacacccctgatgtccgcgttgttgggtctcgcaccgcccatgaacaactttgggaagttgccgttgggttacttgaatgtcagcaaggaatacgaggcaatggctgcccatgtaaacgctctgcagctactagaacagtatgtggccctgcaaaagcagcataaaaagggatttttcgcggatattttactcgagtatgatgttttaaacgccgaagcgatcaaacgatacaaggatactatcgtacagctgcagaagaagagggagtattcactttgtatagacaagagccaagtcatcatgtcgcaagccctcgagggcatcgattactatcacggatactaccgtagagtgcttttactgagcaccacttccacattcctgggatggatgttctacatctaccgccttctgtctaggaacagggccagtaaagtggaattggtcctcgaaaggagtaacaaaatagtcagagtgagcatagttagttcagtgatcgtgctcattatttgtttgctgagccaaggaacaccactggatatatccttttatctgctgcttccatatttcgtttggcttaaggctttgcaaccttggaacattaacttctcttcatcgccagcttcagcgtatagtgtgccggccctgcagacctcaatgtggcagcttgtgttactcatcgcttgcgcagagctaatggtctttaccttcttcgagcgccgcctcatcgcgctgtgcttctgcgtctttgcctgctacaatagctgggaaaattttcaatggaaatccagggatttcttttcctggctggcattggtcctgattctgtcatgctttccgctgctgccgctgtcagtgggctaccaaaatggatacctgcttggagctggagttatagtcatttttacgaactcattttggaattctaagtcgagattatgctacaggaaccacacaaagtactctaatgccttgatactgctgcaaactatattgtgtgcttatcttcactcaaacggcattaatataccaattccattgaaattggctagctggttgtacctggtatacgcctttgcatctatattgctgagcaaagaatcaagactggatttgcgtctcgcccagattggctttaatttgggatctctctacgcaacactatgtacgtcctatgaggctgtgttcgttcaattgctgactatagagctgaatatctcgttgagggctcaaagtgcgcgggcagagagatcagttctccgtctggccttcaccctgctattgtacaccttcttttcgctctttggatccggaaacatagcgtcaatcagctcctttgatccgaacatcgctcgctgctacctcagtcattttgctccctttgtaatcatgggtctggtgctactgaaactactcgttcctgtggtgcttatcatgtcggtgatctatgccaacagcgagtttgtacgccagcacgaggagcagatcttcatctgtctgctgctcatttgcgatgtaatgggcctgaacttcctattcctggtacggaaccagggctcctggctggacatcggtacgtccatatcacacttcgttatcatggaggtaaccacgctggtgatgctcgtgatcttctataccgcaaagcagctgctgcgagtgattccttgggaggaaatagacttcaaaatgttgccgctgcgtttaatccactgggatgtgatcagcgccaaacatcactag

SEQ ID NO: 3831 - protein, 874 aa, DROSOPHILA
MWIAYALVVHVLLLGSIFVIYFRSPVITGLTPQKHLLYYGLEPPANRLVLIVTDGFRADSFFEENCRYVPNLRKIFLREGVVGVSRTRVPTETRPGHITLIAGLYEDPSAVLRGWKSNPIDFDTVFNRSSQTYAWGANDVLNVFSHVSNGGEINLRFYNHDLDFSPGYDAYEEDEWVFKRVKLLLQQKREALQRAQNVVFFLHLLGLDTAGHVHKPGAPKFRRTLEKTEKGVYAIYQEFERVFPDKRTAYLLTADHGMTDSGASRAVPKPGGRTFMPNNEGPAMPLHELEQAQLTPLMSALLGLAPPMNNFGKLPLGYLNVSKEYEAMAAHVNALQLLEQYVALQKQHKKGFFADILLEYDVLNAEAIKRYKDTIVQLQKKREYSLCIDKSQVIMSQALEGIDYYHGYYRRVLLLSTTSTFLGWMFYIYRLLSRNRASKVELVLERSNKIVRVSIVSSVIVLIICLLSQGTPLDISFYLLLPYFVWLKALQPWNINFSSSPASAYSVPALQTSMWQLVLLIACAELMVFTFFERRLIALCFCVFACYNSWENFQWKSRDFFSWLALVLILSCFPLLPLSVGYQNGYLLGAGVIVIFTNSFWNSKSRLCYRNHTKYSNALILLQTILCAYLHSNGINIPIPLKLASWLYLVYAFASILLSKESRLDLRLAQIGFNLGSLYATLCTSYEAVFVQLLTIELNISLRAQSARAERSVLRLAFTLLLYTFFSLFGSGNIASISSFDPNIARCYLSHFAPFVIMGLVLLKLLVPVVLIMSVIYANSEFVRQHEEQIFICLLLICDVMGLNFLFLVRNQGSWLDIGTSISHFVIMEVTTLVMLVIFYTAKQLLRVIPWEEIDFKMLPLRLIHWDVISAKHH

SEQ ID NO: 3832 - DNA, 3424 bp, DROSOPHILA
caagaagaaggcgatcgtggacaagccaaacattgagcccagtgccctggagctcaaggtgctacccaagactagttggagcagtatgcgcaataagtacttgaatctacagcgtcgcatcgtcagtgaggcaaagagcaagctgtggcgagaaaatcacccacaaaatcagcagcaccctcaccaccagcagaccagtcatccaaaccatccgaaaccttcacagctgcccgaggcagttaaagaggaggaaaccggaggcgaggtccctagcgatggcggtgaaggtgccgtagaagcagcgcctgtgccagccaagcgtcgcaaggcggtgcacaagatgaacatgaatttctacggcgccggcggcgtggaatccaccaaatccgaagaaccttcgcaggaacgcacgccgctctttaaatacgagcccgggctgattgtggagtgctccctgctaaaaccatgcaccaatgttaaagaatttaaggctgaaatgcgccaatatccggatattaaatatgtggatattaaggagggcgaccaagtggccctactacgtttgggcacgcctgccgcagccgaggaactgctacgccaggtcaactgctccgagaggcagctgaaagtgctctctggccagcaggagacgctctattggcgaaaaatcgagcaggatcgcgaggcgaaactctcgaaaaaggtgcgcgtgcagcaaaaacgcggtcgcgagaaagtgggcaaaatgctgggcaagcacattaagtttgatgatggcgatgatgaagtgcaggcggccgccatggactgagtcactttcagttgaggggtgagtttggatttcatttcaggaaactctataatataagctatataaatttataaatgtaagcaaaagatacatttagatctagcacaagatttcgtaatattagagtaatattgtaaaaacaaattgaatttttaaaaaagaaacttcctagtgaaattgaaataaatcttctgaatgaaacaaaccatttatttttacaaatttgtctgatcttacaggaacgagaaagagatggttatattttctctttcacttatttattgatacgatcaaagaattgtgctagataaaagatacaaaaaagaacttttggcattattaataaaatacatttcctaattaattatgtacacgtttttgagaagatcttgctattcctaatggttgcatatttgcattcgttattatgtacactgtaatggaaaagttagcttatgacctattaacccctgtaaaactaaactatatgtaaagtgagccatccgctggccccaaataatgcatcgagatgagcaggacatcgatgatggtccagacgccgaggccgccaaagctgaacagctttccaatcccttcctgccagtggcccaagtagaatcgatcggctccaaagccccctagcgtgaggctaatcagcagggctgtgctccaccgatagccctgcgtccagttgcatcgcaggttgcgggtaaaggatcgattgccgaggcagagcacatcatggtgcacggtgcagttggtacggaatagcttatccgtcgccgagttgcaactggagcgctggccacagctctgttgccacatttccgtttggtagcagtatcggcaattcatttgtcgctggaaactccgttcgcccaggcactggacattgttgatcacctcgcaggttacattcaagtcccggccgtagatgcatccatgattgtagttgcaacggatgcagggaaactgcaggcgatcacagggcgtttccttatcgtacgggcatagcatgttgttgttcccattgctgctactgctactgctgctgctgctgtaggcggttatgttgtccaggagtccaccggcacctcctccactcttggccaccatgctggacaccaggggcggcacatacacctcgttatcgttggcatttccattgccattgctcgcattgctgttatccttgtgatcgccttttgagtccgataagtccatctggttgccaccgctggccgtttcgctgttcctgatccccgtcagcacgaagatcatgatcaggacaatggccgatcgcatgttgaccacaatgcactgtcgttggagcctcattttggtcagatagagcggggaatacgccggaaatgttattgtttttccctttaagaaaatgagtggggtgggagagtgtgaccgtatacgcgtggcatgaaaatatcaaccgcgaatgctcaggagaaatttctttaaaaagcgtatcgaatagtttatagatatgttttggctcaattaaattggctaaacagataagtatacctctcccctcatcgtaacaaattagtaatatctaatcctaatatcctttccatttaagttgtgaccattggccgctttagtcgtaggagtgtattaacggtatttggtaatcgcgacatctggccataccgcaccgtctgcgaaaaaaacccaaaagtcgccgattttggctgattattgcaaaaataatattaactatccgtttgctgttcgtgtgctcggttcgggtgtgttaaagttaagcgcaacgcgaggaattggtgcaaatttaccagcggctggacacacaaaacgaaacattcgcacttggcctcccttcgcacgccccctcgccgacgcccctcgcccctcacacccttcagccgttcgtcggacgccgctgttcgtagtgcgttttgttgttgtttccactggaacactctctatttgtattgtttcatttattagtttttttttgttgttgttattgttgtgtgctttaacttatcggtaacggataacggtatcgagagatatatattatatatagtaagatgtcgaagaacaagctgaatctggtgctgccgccggtaaatacggaggcaactgttgccgccgccacagtggcgccgacgccgccattcaaaaccccctcgggcacagagtaaatattatacataatatccttaataactgactggtttttaggccacccattccaataacaccgcatcccccctccctcgctgtttccccttccactcctcgttttcggtttcctactcagtggtaagataatcctgtagttttgcgagttaggtgggtaattaatatccatcaattgatccaaggaaatcccatccagctggaaagaaagagacagtcggagtgaaagagcaggtactctctctttgtttgttggtgtgggtggtgctcctttcgtgtgacgcacaggtacacagcgagaaaaaacttactgagtaaatacagtaaactgttttagtgctttttggattaattaacgggatgacaaagtcagtttcgaagataaatagaaattataatttaatagtcctacctttatcgtatatt

SEQ ID NO: 3833 - DNA, 1424 bp, DROSOPHILA
ccaatggtcacaacttaaatggaaaggatattaggattagatattactaatttgttacgatgaggggagaggtatacttatctgtttagccaatttaattgagccaaaacatatctataaactattcgatacgctttttaaagaaatttctcctgagcattcgcggttgatattttcatgccacgcgtatacggtcacactctcccaccccactcattttcttaaagggaaaaacaataacatttccggcgtattccccgctctatctgaccaaaatgaggctccaacgacagtgcattgtggtcaacatgcgatcggccattgtcctgatcatgatcttcgtgctgacggggatcaggaacagcgaaacggccagcggtggcaaccagatggacttatcggactcaaaaggcgatcacaaggataacagcaatgcgagcaatggcaatggaaatgccaacgataacgaggtgtatgtgccgcccctggtgtccagcatggtggccaagagtggaggaggtgccggtggactcctggacaacataaccgcctacagcagcagcagcagtagcagtagcagcaatgggaacaacaacatgctatgcccgtacgataaggaaacgccctgtgatcgcctgcagtttccctgcatccgttgcaactacaatcatggatgcatctacggccgggacttgaatgtaacctgcgaggtgatcaacaatgtccagtgcctgggcgaacggagtttccagcgacaaatgaattgccgatactgctaccaaacggaaatgtggcaacagagctgtggccagcgctccagttgcaactcggcgacggataagctattccgtaccaactgcaccgtgcaccatgatgtgctctgcctcggcaatcgatcctttacccgcaacctgcgatgcaactggacgcagggctatcggtggagcacagccctgctgattagcctcacgctagggggctttggagccgatcgattctacttgggccactggcaggaagggattggaaagctgttcagctttggcggcctcggcgtctggaccatcatcgatgtcctgctcatctcgatgcattatttggggccagcggatggctcactttacatatagtttagttttacaggggttaataggtcataagctaacttttccattacagtgtacataataacgaatgcaaatatgcaaccattaggaatagcaagatcttctcaaaaacgtgtacataattaattaggaaatgtattttattaataatgccaaaagttcttttttgtatcttttatctagcacaattctttgatcgtatcaataaataagtgaaagagaaaatataaccatctctttctcgttcctgtaagatcagacaaatttgtaaaaataaatggtttgtttcattcagaa

SEQ ID NO: 3834 - protein, 284 aa, DROSOPHILA
MRLQRQCIVVNMRSAIVLIMIFVLTGIRNSETASGGNQMDLSDSKGDHKDNSNASNGNGNANDNEVYVPPLVSSMVAKSGGGAGGLLDNITAYSSSSSSSSSNGNNNMLCPYDKETPCDRLQFPCIRCNYNHGCIYGRDLNVTCEVINNVQCLGERSFQRQMNCRYCYQTEMWQQSCGQRSSCNSATDKLFRTNCTVHHDVLCLGNRSFTRNLRCNWTQGYRWSTALLISLTLGGFGADRFYLGHWQEGIGKLFSFGGLGVWTIIDVLLISMHYLGPADGSLYI

SEQ ID NO: 3835 - DNA, 3841 bp, DROSOPHILA
gcatcataaaacctaactaataaaatctcatccctttgctttagctaccaaccgcctcatgtgcgacgacgactcaaggtgcaggacattgtccagaagtacaaaatggatctgagcgaggccgatctgttggcccatctgttccaacgcgcaatttagccggctatcggaagtattattaacccgctacctagtttaagagccagagaagtggtcttttctatattctgtattaacgtgtgcttaactaaaaccccaaaacaaaactgatccataatcggtgtccactgagtgttacccgattgattatcgtatgctaattattatttattgctaataaatcgaattatactttgtaaaagtatttgtaatattataagccatgcgtttttcgcctccgttttgggcaatccgttcaagctatgctggtagtggaaacaatggctctccatgtgtattcacataattggcagccacatccgaaatcaattttgtccacagcatgtgggtacgattcgagatgatcgcgtgaggagcaaatgaaagcaagacgtgttctaattgaaatgtttatatattgaaaactaaataaattagtaaaatctatgtttagtttaatattcaagttaatggtttaacaactccaactatgatgaattcatcttgtaatctcgtgagtgaaaggtccgtgcttcacgtcgccttctctttcgggttagcacagcatcttgttagtttcaactttgacttggatgtctgggagtcttggagtctgggagtcgaaactaaaaattgggtccactgatcggaggtggggcatttggacacacgctagcccggcatttcgcaactccagcgacgggcaatcaattcaaaacaaaactgttgccggccaaggggccatctcgtcatcatcaatgaaagtcgtgatgtaatcggctaacacgttacacattttgtggctggttttgcatatgtatatgtatgtatgtttgggccatttatttattaacaaataatataagttaatgatgaagaggccggattgccagctcttggcttttcattgtgcttttctcagccttgaaaatgaaattgggtaagcataacaagtttttgaagatcttcgtggtatttgttgagtttatttatttcttcaaataataatgatgtatttaattatttacaaattatttctttacaaatatttacgcctgagaggcaactaaaataaatgcattgttatgatgaacctgtcatttagaaataattgtgggaaaatagtgttacaataacttgaactgcattgttatttaagtgtgattgagttgattgttttgcaacaattatttaagtcttttatggaaagtgtctttggaatttgttaagccattaacaccatttgctttatttcgactttatggccagcttatttgtggtatgtaaataaaacactttaaattggttcaaattgtttattaacaaataatttaagttaataatgatggatgtttttttttctgataatgactgtgaagaattagcctaggaaaaaaaatacataacgatagaatagaagatagtgaaaaaaaaaacaattcatttggtctaactaactaggcgagctgtggatgcagtgcatctaccaggccgagggtggaccaccgctgctccagccaccggaagcggcacctccgccggagctccagccaccggaagcggcacctccgccggagctccagccaccggaaatggcaccgccaccagagccccagcctcccttggagccaccagcgctctgggattgctgctgctcctggacgcgcatcaccttcagggttccccgctgcaccacgtgtccgcttttgaagaaggctccctgcgcctgatcggccttcaaaatgatagccttgcccttggagccgaaggtgttgatcagctggccattgatggcagccacatcagcggatccaccaccgccgccgccaaaggaatcctcctgcagcaccaactggatgatctgcggcagaatggcattgaactgctgggtatcgaaggaggcgccaccaccgtaaccatgtcccgaagcatacgactggccgtaggagtgcgaatggccctgatcataggagtagccattggagccactggcagcatgataggcaatgggagcagctggcggagcaggggcaggaatcgaaatcggaatgggaacgggggcaggagctgggactggagccggggcctgttcgatgatcttgtatatctgggcctgctgaccgccataggatccgtgaccactggcgtagccatgaccatgaccgtgactgtagccatgaccttccgaggacacaatgccgccggctgatcctccagcgttgctgtagccctgaccctcctgcagaatgaccttgatgatctgcggtgagccaccgtgtccatgtccgtagccatgtccctgcgcatacccatgacctccgccgcctccctgggcatatgaatatccgtgacctccgccgccgccgccgccaccaccaccaccaccgccgcctcccgaactgggcgtggctatcacattgtaagtggtcttgctacctcctcctcctccaccaccgccgccgccgcccagaagggacaggaaggtggcattgcaggcgcagatggtggccaacaggcagatgaagacctggtgataaggtaatccgtttagcacacatccagctgataatccacatccgttgatgccacaactcaccttcatttcagcgttgagctatctctgtttcgaatttggaaaaaaataggtggaatcgaaggcgacacctgtgcgtcgagctgttcccggctagtgaatgatgacgatctctagcagatccaacgtttttatacaagagttccaccggagattcaccacaaaccgttagatgcggcgatggcccgtgacgtcagcgacggagagccgtcgatgtggagtcatccaccagtcataagtccatcgaaaaaccatgttgctctcgaaattcacctgaggtctccaaggggcggcacagggtgcttgctgtgagataagggaaatttatgatctttcgtagattattaataaaacaatttgttcattgaatgttagtccattgatgtttggaacttttttttaataatttcgaactagttttgagtcttcttacgtaggacaacaagtaaaatggaaataaatgtaattgaaatgggtatttagtcatataattttgtaggaattcttatatttaagcccagttattaatggctcaatatgagatgcaataaaaaagcaccctgttggcggcaatcgtgttcatctatttctcaaactgcccaaaatcatatgcaacaataacaaatcgccgacggacaagcgttgaaaacgcagaaacaaaaacaataacaatagcacgaacataataacaataacaaattcaagcgaataacactatttaaccagttaaagcttaagcagatgcgctccgctcacgagagagacgaggtgcgtcgtctcgtaggtcaagtcaccgcaaccgactgaccggctttttgcatacgattatcgatttgaacggttcgccgcttacactgaaaacaaactttggatgacaaactaaaatcggttgtttgtaacttatcatttcgatcaatgtcgtatagatattgtttgttcttcactataattataataatcagaagagatgatatcgtaaatattcttactaaaattatgtttgctttctaactttactttacaagcaccgcccttttttatttccatcttatttttaaagcatagaaatgttgacccacttttcgccca

SEQ ID NO: 3836 - DNA, 1132 bp, DROSOPHILA
gaacagctcgacgcacaggtgtcgccttcgattccacctatttttttccaaattcgaaacagagatagctcaacgctgaaatgaaggtcttcatctgcctgttggccaccatctgcgcctgcaatgccaccttcctgtcccttctgggcggcggcggcggtggtggaggaggaggaggtagcaagaccacttacaatgtgatagccacgcccagttcgggaggcggcggtggtggtggtggtggcggcggcggcggcggaggtcacggatattcatatgcccagggaggcggcggaggtcatgggtatgcgcagggacatggctacggacatggacacggtggctcaccgcagatcatcaaggtcattctgcaggagggtcagggctacagcaacgctggaggatcagccggcggcattgtgtcctcggaaggtcatggctacagtcacggtcatggtcatggctacgccagtggtcacggatcctatggcggtcagcaggcccagatatacaagatcatcgaacaggccccggctccagtcccagctcctgcccccgttcccattccgatttcgattcctgcccctgctccgccagctgctcccattgcctatcatgctgccagtggctccaatggctactcctatgatcagggccattcgcactcctacggccagtcgtatgcttcgggacatggttacggtggtggcgcctccttcgatacccagcagttcaatgccattctgccgcagatcatccagttggtgctgcaggaggattcctttggcggcggcggtggtggatccgctgatgtggctgccatcaatggccagctgatcaacaccttcggctccaagggcaaggctatcattttgaaggccgatcaggcgcagggagccttcttcaaaagcggacacgtggtgcagcggggaaccctgaaggtgatgcgcgtccaggagcagcagcaatcccagagcgctggtggctccaagggaggctggggctctggtggcggtgccatttccggtggctggagctccggcggaggtgccgcttccggtggctggagctccggcggaggtgccgcttccggtggctggagcagcggtggtccaccctcggcctgaataaa

SEQ ID NO: 3837 - protein, 348 aa, DROSOPHILA
MKVFICLLATICACNATFLSLLGGGGGGGGGGGSKTTYNVIATPSSGGGGGGGGGGGGGGGHGYSYAQGGGGGHGYAQGHGYGHGHGGSPQIIKVILQEGQGYSNAGGSAGGIVSSEGHGYSHGHGHGYASGHGSYGGQQAQIYKIIEQAPAPVPAPAPVPIPISIPAPAPPAAPIAYHAASGSNGYSYDQGHSHSYGQSYASGHGYGGGASFDTQQFNAILPQIIQLVLQEDSFGGGGGGSADVAAINGQLINTFGSKGKAIILKADQAQGAFFKSGHVVQRGTLKVMRVQEQQQSQSAGGSKGGWGSGGGAISGGWSSGGGAASGGWSSGGGAASGGWSSGGPPSA

SEQ ID NO: 3838 - DNA, 2719 bp, DROSOPHILA
gaaggtatattgactttggccggaaagacgaaacatttgcgagcatataaagaatatacgtatattcatgatcagtatcagcagccaggtggatttcgctatgcccaccagttctactacgcaaactcagttctacagatatctaaatgaaactaccattaaagtttgttctctaatacttgtcaggtagtatataagtaggaacgggccggattggacttgggccattgcatcactaggaatattcgaaaaaaatgttggtcaaaaagtattttagttcggttttcggaattttttaaacaatatataattttggttttaatttggtaaaaatccgacgaatatatattccgaacagtcggaaaagtaattgaaaatggcagaaattaaatcacagttcattttgattcactatgatctttatgcggaataaaatcttagttttgatatataaattgtgcaatgatatatatctttccttcctgttctctatttaaatttggtaatgcgttctcttggaatgctaatgtaatggatagaaaaatcaaattagctcatcatataaaaagaaacaatataattgttatcctctttaaccagaagtaaatgccatttaaataaaaatttttttgcttcatgataatggtatatacaaaactaagaaaaattatatcgagaaaattactactgctgaacagtagtaaaaaccaaatactgcattctaacattaagaccaagccgagcggcatagccgctcttctctattgccagtatccctgcaaactcttcaatcctagatatcattttcatatatcaggtaatccttaatttctcgtctcctcaacaacctcgacattatcaaaaaattccataatgagatttaaattacgccggcgagtgcaactcaattgagcgacactcaaaatcgccccacagttgagtgcgacatacccacattgagcggggctcgaaggtataaaagctggagcagcccagaccacagtcaacagtttcctccgagcgagcattcagtcctcacacaatctatcacagaagccaaaaaaaataagattcaccatgaagaacgctgttgctattctgctgtgcgccctgctgggtctggtaagtgttgcaaggagacagaagccgatggcagccagtaatctaaattcatccgtttgctcctcgacaggcctctgcctccgactacaagctgcgcaccgccgaggatctgcagagcgcgcgcaaggagtgtgccgccagcagcaaggtgaccgaggccctgatcgccaagtacaagaccttcgactatcccgacgatgacatcacccgcaactacatccagtgcatcttcgtcaaattcgacctgttcgatgaggccaagggcttcaaggtggagaacctggtggcgcaactgggccagggcaaggaggacaaggccgcgctgaaggccgacatcgagaagtgcgccgacaagaacgagcagaagtcgcccgccaacgaatgggccttccgtggcttcaagtgtttccttggcaagaacctgcccctcgtgcaggccgccgtccagaagaactaggagttcagcgcagttccacatcaattctagaagcgaaagatcaatcaacacgcaagcaacgcggcattttcgagttgaaatccgctcaggctctgcaatcctacgattgaaataaaaccatataatagtgcttttgaatgaagaatgttctttttattattcacaatatttctgagggctggaagagaggtagggctgctggtggtggcaggaatcaagctgttactcgcatcctcaatcccaaaaaaccttgtcccgcccaaaggaaaggcattgatagcttatttaattcgattatatttgtcttcatctttttcgctttagtaaattcaacttcttttcttatcttctctttactctatatattttttttttaaatatataaattacacacgcactttttatatattttgttgatttacttctttcccaagagtcttgtgttcttttgattttttttttatattttcttccttctttatttgcttttgccatcttttaacttcttttatttggggtttgtggtttcttttgcgcttcttttatatatacttattgttgtatatacttttttgttttttaaatcaacttcttgtttttcataatcttttttttttttttgatgttttattgaaaattaaaatgtgtgaaaagggggtgtttggtgttgggtgcttcaaaaaacattatagccaagtcaagatattcgttttccttgttgattttttattattttcgaggtctcttcttttcgcctgttttcttgctgctgatgcattttttattgaaacgatattttttctggcgttttctgttgcgattgttttctcttttttatttagcaaagaagtttggcaataaaataatgttttttgaaattatattgtaaaaaaatctgaaatcaaatagttaatggattaaagacgacagtcggtaaatcgaatggaagcattataataaaacccaacacgctgcgaatgagagcaaggtattcccataaagggttcggaaaattattctgtttttgaccataaatttgattgtttttatttcccgtaatgatctaccagctatgcaaactaaatctatttagctccataaaaacaaacggcattttctaacaacttaaatttaacataa

SEQ ID NO: 3839 - DNA, 649 bp, DROSOPHILA
cagtcaacagtttcctccgagcgagcattcagtcctcacacaatctatcacagaagccaaaaaaaataagattcaccatgaagaacgctgttgctattctgctgtgcgccctgctgggtctggcctctgcctccgactacaagctgcgcaccgccgaggatctgcagagcgcgcgcaaggagtgtgccgccagcagcaaggtgaccgaggccctgatcgccaagtacaagaccttcgactatcccgacgatgacatcacccgcaactacatccagtgcatcttcgtcaaattcgacctgttcgatgaggccaagggcttcaaggtggagaacctggtggcgcaactgggccagggcaaggaggacaaggccgcgctgaaggccgacatcgagaagtgcgccgacaagaacgagcagaagtcgcccgccaacgaatgggccttccgtggcttcaagtgtttccttggcaagaacctgcccctcgtgcaggccgccgtccagaagaactaggagttcagcgcagttccacatcaattctagaagcgaaagatcaatcaacacgcaagcaacgcggcattttcgagttgaaatccgctcaggctctgcaatcctacgattgaaataaaaccatataatagtgcttttgaatg

SEQ ID NO: 3840 - protein, 143 aa, DROSOPHILA
MKNAVAILLCALLGLASASDYKLRTAEDLQSARKECAASSKVTEALIAKYKTFDYPDDDITRNYIQCIFVKFDLFDEAKGFKVENLVAQLGQGKEDKAALKADIEKCADKNEQKSPANEWAFRGFKCFLGKNLPLVQAAVQKN

SEQ ID NO: 3841 - DNA, 6978 bp, DROSOPHILA
aaaaagtttgggcgtgaccggcttggcggatagggggcgttagagtgggtctggcaataagttttttgtcaaatcgatagaaatgtaagagactaattaaattatgaaaaaaatcccaacaattttttctcaaatggcagttttagggcgatagagtgggcatgggaaaaagatttcttgaaatcgatagaaatttacaagcctaataagaatgtgaaaaaatatcaacacatttttcaaaagtgtgggcgtggcagtttcgtgcggtttttgggcgttagagtgggcgtggcaacatgggtcaacaaatctatagaatctgtatgattaacctcaaccttctagcttttattgttcccgagatctattgatcatgataacgaatattcacatatactttatatggtctgaaacgcttccttctacacttcaacgaatctagtatacacttttattctactagtaacgggtttagctaatgctactaagagagaactgtataaaggaatgcctcgccaacttgatttattgtaatgtaatataattcaaaagaaacccctgtagtcaagttttaatattcttttcgtatataagtggaatcaaatgtttcaaacatttgtaaaaaatgtgggcatgacattctatgacgttactatactcgtactcagatacttattttaattattttaatcgtataaagaggcttttttgtgagcgttatgaaaatgtatggtggattcttagttacttctctttcagttaggacttagcacgctctgaagtgttaaattccaaaatgactcgttggctagcaccaacaatcagttaggactaaaaacaactgctgaaagagccagctcacaacacttgccaatggccatcaacaaccagatggaatccacagtaaggtgggtgattgggactgagacatcaaaccgaggactcgaacaacacgttccagtgccaacacgttccgaccgcaaaccgaacaatgtccgactcaatttcgcagattcataaaaatgaatgaatgcaatgtggcagcagaatccctaaatcctcggatggagcggtctggcgtcattggaaatggaaaatcaagtttgtgaaattgactctcaagtgatggaacttggggagagtacgggacgtgggtggtggcggttgggatcactggaggacgacggcgaccattaaaatgaattgcactgcactttgtgccatcaacagaatcaactgccggcaaacgaatgatgcaccataggaatgacgtaaaatacaaaaataaaccgaatggaaaaaggaggacggactgaagaactgaagaaaagcgcacactgagaaagaaggaagcgggcagagcggcaagggacacgacgatgagggagagggaagaaaccgactccaaatccgacttcaaatccgaattcgagtccgactcacagaggcagccaacagaacattgcacgctatttcaataaaagtgaattgcccgacgcggcgatggcgacgacgtcgtcagcggacgcctcaaacttcagccgccgcctcctggaggaccatcccaactcggcactggagaaagaagtcgcaaaggatatcaaccggcgatggaaacgtgacacgaggaggaattgtgtttctcacttgtccttgcacaacataggtgcatattttaataatagagtacaagttttcaactaatcgcatttgaaaatctttgagcaattagaaaacaatccaagttggaagcggggctatttacaaaatgaacaaattacattttagtacattattatgaaattgaaatgtgcttatactctaatatgtaagagcaagaagtaacttggaaaattgaaattcgaagtcgtattgtcagtctatttagaattgtgatatcccatccttaggacttttatctccaagagttgccagctaaaaggaacgaccgtaaaagttgagttagctggagtctgaaattccggaagcgtgtgtagcgctccgctgttgacatgactgacgatgtcgtcgtccttcctgtccccgtggcctcccatcgcattcggcactggcgtactgaggcgtactgaaagatgcagagctcagagactccactccgcgacaccatccggcagctttgctggccacttggtctcgttagtcgtaaaagcaaagtatctacatcaagcgagcacaacaataacttcaaatgagcattttaataaatttttcaaataatcgcttgaaaagtggaaaattctcaaccccagcggagaggttggtctcccgtttccatcttggtcccgattgcacttcaacttaatgtttgcttaaggaattagttggcaaaggcgaagtgaacaacttcgaaagttatgagtagttatgaagagcagcggaattcgacgatgcgattaggatccgccagtgctaataggttcctttgagatctcattacgagagggaaaaataagtgtatgcgagaactaaaagggatagcattatgttttccgatgttgtggtacaatctgaaaccgctcttaaaaaacataaggaggacagaatacacgtttgatgagaatgttaagggcaaatgtcattagatatataataacagatatataattctaaaaaacacgtcctaacattaatcataatatgaattaattagtgcgtataaggataacgtaaacacggtaataccaaagacactagaataactagggtctttggtaatactagtaaaaaaaaaacagagagaacgctataatcatttggtcgactttcagatacgcgttgatgagttcaaacaccgtcatgcttattacgaaatttaacaattaacaaatccaaacttaggtattcaaatgacacgcagatgcagccattctaataatgttgtttgagcgccctaggggattagtacgggattacaaccgaccaaaaatgtttttccttccgcttccttatttccttacccgtacaaatattcatttcttggagtggggatattgcagtttttggtgaaatagccgcaagcttgatttgcaagcgcagggcataccaataccatgtggctgctctccacgcatgggggtgtcctcgcgctttttgaccggaatgcccagcacttaatgagttatattttgttgtattatttcggatacttactctcacatactgcaacaaggaatttttaattactccaacgcaacccattcgctagcagggttttcatttgcaggcttttactaacggcactcttctcgactttcttgttgcttatttaagacttattcgaatgcaaactatttgggcgggttttggaaaatactacaatttgtgacattttcatacatatgaccagcaatttccgctgcagcttgtcacaagcctgcggctcttatgaatttctaattagcggtctttgtttgggttgccaaagtgcaggaatataccaataaattggcgaatagtttaagttaagttaaagtgtagccacattattgaacattatgttatactactcactttttggccagtaattttccacatgtcccacactgatatttgggttttgattgttcaacatctttcgcagcatattttttcttctccttgtcgcctactttggcatgctttgtgattacgtggttcttaaggttgtgtcttctagcaaatttctgaaggcactcagtgcattcaaaaattttttcatttgtatggttccttaggtgagccctaagcgagtgctttttgaaattcttcgggcacaaagggcactgaagaacctcgtttttccctattgttccggatcgtgtgtgaaaaatgcggtgataaactagatcggactcatattgagattggaagcgacattgatcgcaggagtacattgatttcttttgagcttgtgatagatcagcgggggttgatgtgctggccaggggttgacagctgcgggtgtgtcgtccgagtgcctgagctgactcaaagcttattccacagctcaaacacaaatgattatccgaggaatgaacttctgcttgatgttgggctaatctttgggacgattcaatcgtttttctgctgttcgagcactttgcgttaacatccgcacttcttttggcgggtggactaggaactgtctcctctaggacttctcttagcatatgttctatttcgttttcgggttgtggaatagacgtttggggtcgggctttttgcttatgtatcaccaagcttctatgacgacgcgcatccaaagagttgtcgaattccaaacggcaaatggcacaaaaataccttgctaagtggtgtttgtgctttttatggcgttgaagagctaagcgagatttctgtgaggatccacacaaattgcatcgaaacctactctggtattcatcggctgcagtccctgtaagagcaagtcctggatgctcagtgatcgagtgttgacgtagttggatgttgtacaaaaattccattccacacctagagcactggatccgtcttctttgggcgatacatatgggaactgatctattaagggctaaaagcacctccttatgggaggaatccaacaaatgcagcaacatggaattattggtgttcgagttaaactggcaaaaggaacaccaaaaagtcccccccagtctcttggtcaactccaagtgctcgtgggatttccaatgataaagaaaggtctcctcagtgttggcatagaatcgacaaggcatgcattgaaatggagattgcctcactatgcttcccatgtgcttaagtatttcctgcaagcaagcttgtcttctaattcgactctgctgttggagtcttctgaaatgataatgggaaattaaatgtttgccaatcaaatgccttgccattgtgtgccggcatagatcgcatcgcagaagatttgctctcctctgtcgtttcggtggctttggttcatttttgtccgcatcgtcttttattgagaagtccttgcttagggtaagttccctgcccagagtagcctgctctaattcgcactctgcttcagctcttttgatgtgatagccactcctcaaatgttggttataatataagcgacttttcagccgcctgcagcaaatgttgcaccaataactagctcccggttggtccagcttggtaagatccaaattttcgcggtactccaactgcttgctacccggaacccatttgcccttggtatggtccgctggagggtgagtgtagttttcttcggggggctcatcccaacttggcgagaggcgttctatatgcggatgtcgtagctgcggccgctgttctggtttccacttaccacctgtgtgactggcgggcacaatgggcggtgagtgacgccttgcatcgtactcttcctcatcttcttccgcatcaaattcctcgtgttcatcctcatcatcctcctcatcactcgcttctgggtactcatggtcaaagtgaagcggcttaaagacagtttcatcgttctccctcactgctttcagtaggggatcgccagctggcgcggaccaggactcatctttgcttcgctcttgacggggtaccgatcctattttcccacccgtggcgacgctctgcagttgtagggacgaaaagaagagatcggctccaagttcgtatgggagatcataggcttcagtcaaggactttgaggtcttaccgccatgactggcggcagttttgcgaaggtaactacttggagcctccggttccgtgaaatggaagccatcatatgaatgatccaaattactgctactgataagcgtcgccgaaacatgagtgtcagcagagattcttgttcgtccatcggtttttggcgaagcattttgctttcctgttataagacagttccgttttcgatgatcaatatattttgagagtccaagtatagttgcgttgcacctgatgcacagatgagtgtcctcgagatggtcttcgttcatggttatctgcggaaacaaaatacaaaattcggaatcaaaaatctgcacaccaaaacaaaacaagcgagaatgctatagccgagttccacgactatcagatacctattactcagctagtgggaatgcgaacacgaagtttcatatatatattttttggagtatcgatagatattggggaataaaaggggaaaacatttttaatttttttaaaagtgtgggcgtggcaacaatacaatctcttatagttcctgagatgtcgacgtccatacggacggacagggccgtattgactcggctattgatcctgaccaagaatatatatatacatatatatgatccattatgcctgataaatagtttctaacgaatctattatacccttttactctacgagtaacgggtttatactacatgctttatacaaatatgtgtttttgtggaagcttttatgcttttcgattacgcctaaaaatttcgaccgatttgcagtgatccagtcctgtcatacgccttctacccaactcctcttcaagggagcattaaatgaactcgcagtattttaattccgcttcatttattggctcgagattcgctccagcagtcctcagaccgtgcgtcacaacaacagtcatggccaccgcagcgttgacatggccgtgtccgtaactcacgtcctgttctgcgagcttcaggttacgtatccgacagtcgtccgcgtgtcctgtgtgttgcggcctgtcagaaacgaagtttatggcgtctgtgctgcatccgtgtaagcgctctgtcgctgctgtctctctctctctctctctctccgtgtcctgctgtccctttccggcccttcagagatgctaaatgtaaaagtgtcatttccgccacatgtgagcgcgatgaacgatgcgtcgaagtcgacgttgacgccaggaacggaactccaatgttgccgctgtgctgctgctgtgttgtcgtctcggttgttaataattttagcgcacaattgcag

SEQ ID NO: 3842 - DNA, 2916 bp, DROSOPHILA
ataaccatgaacgaagaccatctcgaggacactcatctgtgcatcaggtgcaacgcaactatacttggactctcaaaatatattgatcatcgaaaacggaactgtcttataacaggaaagcaaaatgcttcgccaaaaaccgatggacgaacaagaatctctgctgacactcatgtttcggcgacgcttatcagtagcagtaatttggatcattcatatgatggcttccatttcacggaaccggaggctccaagtagttaccttcgcaaaactgccgccagtcatggcggtaagacctcaaagtccttgactgaagcctatgatctcccatacgaacttggagccgatctcttcttttcgtccctacaactgcagagcgtcgccacgggtgggaaaataggatcggtaccccgtcaagagcgaagcaaagatgagtcctggtccgcgccagctggcgatcccctactgaaagcagtgagggagaacgatgaaactgtctttaagccgcttcactttgaccatgagtacccagaagcgagtgatgaggaggatgatgaggatgaacacgaggaatttgatgcggaagaagatgaggaagagtacgatgcaaggcgtcactcaccgcccattgtgcccgccagtcacacaggtggtaagtggaaaccagaacagcggccgcagctacgacatccgcatatagaacgcctctcgccaagttgggatgagccccccgaagaaaactacactcaccctccagcggaccataccaagggcaaatgggttccgggtagcaagcagttggagtaccgcgaaaatttggatcttaccaagctggaccaaccgggagctagttattggtgcaacatttgctgcaggcggctgaaaagtcgcttatattataaccaacatttgaggagtggctatcacatcaaaagagctgaagcagagtgcgaattagagcaggctactctgggcagggaacttaccctaagcaaggacttctcaataaaagacgatgcggacaaaaatgaaccaaagccaccgaaacgacagaggagagcaaatcttctgcgatgcgatctatgccggcacacaatggcaaggcatttgattggcaaacatttaatttcccattatcatttcagaagactccaacagcagagtcgaattagaagacaagcttgcttgcaggaaatacttaagcacatgggaagcatagtgaggcaatctccatttcaatgcatgccttgtcgattctatgccaacactgaggagacctttctttatcattggaaatcccacgagcacttggagttgaccaagagactgggggggactttttggtgttccttttgccagtttaactcgaacaccaataattccatgttgctgcatttgttggattcctcccataaggaggtgcttttagcccttaatagatcagttcccatatgtatcgcccaaagaagacggatccagtgctctaggtgtggaatggaatttttgtacaacatccaactacgtcaacactcgatcactgagcatccaggacttgctcttacagggactgcagccgatgaataccagagtaggtttcgatgcaatttgtgtggatcctcacagaaatctcgcttagctcttcaacgccataaaaagcacaaacaccacttagcaaggtatttttgtgccatttgccgtttggaattcgacaactctttggatgcgcgtcgtcatagaagcttggtgatacataagcaaaaagcccgaccccaaacgtctattccacaacccgaaaacgaaatagaacatatgctaagagaagtcctagaggagacagttcctagtccacccgccaaaagaagtgcggatgttaacgcaaagtgctcgaacagcagaaaaacgattgaatcgtcccaaagattagcccaacatcaagcagaagttcattcctcggataatcatttgtgtttgagctgtggaataagctttgagtcagctcaggcactcggacgacacacccgcagctgtcaacccctggccagcacatcaacccccgctgatctatcacaagctcaaaagaaatcaatgtactcctgcgatcaatgtcgcttccaatctcaatatgagtccgatctagtttatcaccgcatttttcacacacgatccggaacaatagggaaaaacgaggttcttcagtgccctttgtgcccgaagaatttcaaaaagcactcgcttagggctcacctaaggaaccatacaaatgaaaaaatttttgaatgcactgagtgccttcagaaatttgctagaagacacaaccttaagaaccacgtaatcacaaagcatgccaaagtaggcgacaaggagaagaaaaaatatgctgcgaaagatgttgaacaatcaaaacccaaatatcagtgtgggacatgtggaaaattactggccaaaaacgtgcaatgttctgttggctgcctctgtgagtcggactcgaattcggatttgaagtcggatttggagtcggtttcttccctctccctcatcgtcgtgtcccttgccgctctgcccgcttccttctttctcagtgtgcgcttttcttcagttcttcagtccgtcctcctttttccattcggtttatttttgtattttacgtcattcctatggtgcatcattcgtttgccggcagttgattctgttgatggcacaaagtgcagtgcaattcattttaatggtcgccgtcgtcctccagtgatcccaaccgccaccacccacgtcccgtactctccccaagttccatcacttgagagtcaatttcacaaacttgattttccatttccaatgacgccagaccgctccatccgaggatttagggattctgctgccacattgcattcattcatttttatgaatctgcgaaattga

SEQ ID NO: 3843 - protein, 969 aa, DROSOPHILA
MNEDHLEDTHLCIRCNATILGLSKYIDHRKRNCLITGKQNASPKTDGRTRISADTHVSATLISSSNLDHSYDGFHFTEPEAPSSYLRKTAASHGGKTSKSLTEAYDLPYELGADLFFSSLQLQSVATGGKIGSVPRQERSKDESWSAPAGDPLLKAVRENDETVFKPLHFDHEYPEASDEEDDEDEHEEFDAEEDEEEYDARRHSPPIVPASHTGGKWKPEQRPQLRHPHIERLSPSWDEPPEENYTHPPADHTKGKWVPGSKQLEYRENLDLTKLDQPGASYWCNICCRRLKSRLYYNQHLRSGYHIKRAEAECELEQATLGRELTLSKDFSIKDDADKNEPKPPKRQRRANLLRCDLCRHTMARHLIGKHLISHYHFRRLQQQSRIRRQACLQEILKHMGSIVRQSPFQCMPCRFYANTEETFLYHWKSHEHLELTKRLGGTFWCSFCQFNSNTNNSMLLHLLDSSHKEVLLALNRSVPICIAQRRRIQCSRCGMEFLYNIQLRQHSITEHPGLALTGTAADEYQSRFRCNLCGSSQKSRLALQRHKKHKHHLARYFCAICRLEFDNSLDARRHRSLVIHKQKARPQTSIPQPENEIEHMLREVLEETVPSPPAKRSADVNAKCSNSRKTIESSQRLAQHQAEVHSSDNHLCLSCGISFESAQALGRHTRSCQPLASTSTPADLSQAQKKSMYSCDQCRFQSQYESDLVYHRIFHTRSGTIGKNEVLQCPLCPKNFKKHSLRAHLRNHTNEKIFECTECLQKFARRHNLKNHVITKHAKVGDKEKKKYAAKDVEQSKPKYQCGTCGKLLAKNVQCSVGCLCESDSNSDLKSDLESVSSLSLIVVSLAALPASFFLSVRFSSVLQSVLLFPFGLFLYFTSFLWCIIRLPAVDSVDGTKCSAIHFNGRRRPPVIPTATTHVPYSPQVPSLESQFHKLDFPFPMTPDRSIRGFRDSAATLHSFIFMNLRN

SEQ ID NO: 3844 - DNA, 4074 bp, DROSOPHILA
tggctaaactgggaggcctgctcaccatcgtgggcaggaatttggataagctcaacgagaccgcggagcagatagtggcagctggaggagcgccagcactccaggtggcggcggacataaacagcgagtccgacgtccagggcatcgtctccgccacattggccaagcacggtcgcatcgacgtgctggtgaacaacgccggaatcttggagctaggcagcatcgagaacaccagtctggagcagtttgaccgcgttatgaacaccaacgtccggtcgctctaccagctgacccacctggtcacaccggagctaatcaagaccaagggcaacattgtaaacgtgtctagtgtgaacggcatccgttcctttcccggagtcttagcatacaatgtttccaaggctgccgtggatcagttcaccaggtgcgtggctctggagctagctcccaagggtgtgcgtgtgaactccgtgaatcccggcgtaatcatcaccgagctgcagcgtcgtggtggactggaccaggaagcctacgtcaagttcctcgagcacgccaaggtcacccatgccctgggtcgacccggcgaagtcaaggaggtggctgcggccattgcattcctggccagcgacgaggccagcttcagcaccggtatcagcctgcccgtggacggcggtcgccatgccatgtgccccagataagaacggagttttttatccatgcatgcatttatcttatttttttatttttaattaaagtagcgcgcttacctcgtgtatttcaaatacttttcaaggatgtgattctatgtaaatgtaatagtttgctagaaataaataaaatgaaaaccgccctataaaaattggcaacgtacgcaagatttaatttgatacttaaaattttcaagttcgtagtaatggacttaatcggcggaaaacaagggaaaattaaagacattcgtctggacaggatcagatgatcatatagaatatcctagcagagactagcgcggacacatgacctgcttgccaccgtccacaggaagggtcacgccggtcacgaagctggccagctcgctggccaggaagcaaatggcggccgccacctcctttggctccccaatccggcccagggcgtgggtcttcttcgagtgctccagaaattcggcgtagctctgctcgtccatgccccccgccttttgcagattggtgcgaatcacacccggattgaccgcattcacccgaacaccctggggacccagatccagggcaagggagcgggtaaactggtccaccgccgccttggacatgttgtaggccaccagattgggaaaagcgcgaagtccgcagacgctggacacgttgacaatgctgcccttacactgcagcaactggggcagcagcaacttggtcagataaaacccagaacgcacattggcctccatcacgtgggtgaagcaggccagttccgtgctctgcagcgttcccgtgggcatgatgccagccccatttaccagcacatccagcttgccctcgtagcgctccgtggtcttccgcgcaatgcattcgatctccggaggcttgagcagatctccggctatgccgtacggctcgtggcccatcttcatgcagcgtttcatcacacatatgaggccctcctcctcccgatccaccagggccaggcaggcacccagcttcgagaacatctccgccgcggcggccccgatcccggaggctgcgcccgtgataagcaccactttgccggagaagtccagaccagccttgcccttgctgcccatcgaatcgaaatttcaaatgaaaatccaaactacattcgaatgtacgtacatgtgtagatgacttatcgaggaaatataaccctgatccccaagaacgtgatcttagttctttttactaaataaataacaaaaatataagagcaactgatagttactaactaaaaaaagagtttggattaagaacctcgactttgtccaataaaatctcaatattaaaaattaactgagataaagagataaactttaactaaccctagttagtggatcacgttcaaaaatattgactttgattgatttttgataaactactctagtgctgaacacaaagatgactaaataaatggcaatcagttttatgtacacaatcaaaacaataggtaaatcaaaataacaattaaaaaaatcggattaaatgcatttactcatggaagaatccatgcaggggaaactaaaagttccatgtcctgtgggattagcgtgggcacatggcatggcgaccgccgtccaccggcaggctgactccagtgctgaagctggcctcatcgctggccaggaaggcaatggccgcagccacctccttgacatctccaggacgacccaaggcatgggtggtcttggagtgttccaggaactttttgtacgtctccgcatccatgccgccgcgggcatgcagattggtgaccgtcacgccgggattcacgcagttcacgcgcacacccttggcagccagctccaacgccacacagcgggtgaactgatccactcccattttggatatgttgtaggccagaacgccagggaaggagcgaatcccattgacactggacacgttcacgatgttgcccttggtcttgaccagctcgggggtggccagcatagtaaggtggtagattgccctcaggttggtgttcatgacgcggtcgtactgctccaggctagtcgtctcgatggtgcccgtctcgatgattccggcattgttgaccagcacatccaatttgccgtactgctgcagggtttccgaccaaatcctctgggtgtccgcctccttggcaatgtcgcccaccaccagggccggctgtgattggctcaccttgctgcactcagcggctaccttcttcaggttctccacattgcgtccattgagagccagacaggcgccgtacttggcaaacttaatggcggttgcagctccgattccggagcttgctcccgtaataaggaccactttgcccgcgaaattcatgatccgatccagaattatgtaaggggatctcaagctcagtgcgcatcttgctggattcaataggggtattcacctggtagaaatccgaaaatcttacaggagaaagggtgtgcttggttttacgtttaaaaaatctggtaaaatgatcaattaaatttaatttgtgttaagggagcaacaattataaaaatctattgttttatttaattcagcttttcaacggtaagctctattaaaaaatgtattattaatgttgaactccatatgttcctctagaatacttcgaatactaaaaatgtattagtcaacaaattattatataaattatttatatattgtattaaatattttattaagtattttggtatattataaaatgttaagtcttagtatattttcgaagtgtgcttggtattttttaacggctatccggtctcacttacgtgatcatgtaaacgaaatgcgagttttaggaaagtgcactgttttggtcaggcaaacccgcagcttatccacgccatctgggcgccgcagagtggtggtcacgggaagtggcgcagtcactccgctgggcaacaatggaccggattcttggcgacgcatcctggccggcgagtcggcaatttctcggctgagtgcggagtttaagggcttgccctgccaggttgcggctcaaatcccgagggaaaacctacagctggatcaacacctgaccaagtcggacattaagctgatgagccccgccacgcagcttgccgtattggcggctgaggaggccttgtcaaccggaaagctgtgccccaagcaattgagcgaggaggagcttgagcggttcggagtgtgcgtgggcatgggcatgttcgaccttgcagaggtctatggcgcctggaaccagctgcaacgaggttacaacagagtaagcccctttttcgtgcccaggctgctgcccagtatggcgtgtggtcacataagcatgcgacatggcttaagaggacctaaccactcggtgtccacggcctgcgccacaggtgcccat

SEQ ID NO: 3845 - DNA, 1777 bp, DROSOPHILA
agcttgagatccccttacataattctggatcggatcatgaatttcgcgggcaaagtggtccttattacgggagcaagctccggaatcggagctgcaaccgccattaagtttgccaagtacggcgcctgtctggctctcaatggacgcaatgtggagaacctgaagaaggtagccgctgagtgcagcaaggtgagccaatcacagccggccctggtggtgggcgacattgccaaggaggcggacacccagaggatttggtcggaaaccctgcagcagtacggcaaattggatgtgctggtcaacaatgccggaatcatcgagacgggcaccatcgagacgactagcctggagcagtacgaccgcgtcatgaacaccaacctgagggcaatctaccaccttactatgctggccacccccgagctggtcaagaccaagggcaacatcgtgaacgtgtccagtgtcaatgggattcgctccttccctggcgttctggcctacaacatatccaaaatgggagtggatcagttcacccgctgtgtggcgttggagctggctgccaagggtgtgcgcgtgaactgcgtgaatcccggcgtgacggtcaccaatctgcatgcccgcggcggcatggatgcggagacgtacaaaaagttcctggaacactccaagaccacccatgccttgggtcgtcctggagatgtcaaggaggtggctgcggccattgccttcctggccagcgatgaggccagcttcagcactggagtcagcctgccggtggacggcggtcgccatgccatgtgcccacgctaatcccacaggacatggaacttttagtttcccctgcatggattcttccatgagtaaatgcatttaatccgatttttttaattgttattttgatttacctattgttttgattgtgtacataaaactgattgccatttatttaaatgtagtttggattttcatttgaaatttcgattcgatgggcagcaagggcaaggctggtctggacttctccggcaaagtggtgcttatcacgggcgcagcctccgggatcggggccgccgcggcggagatgttctcgaagctgggtgcctgcctggccctggtggatcgggaggaggagggcctcatatgtgtgatgaaacgctgcatgaagatgggccacgagccgtacggcatagccggagatctgctcaagcctccggagatcgaatgcattgcgcggaagaccacggagcgctacgagggcaagctggatgtgctggtaaatggggctggcatcatgcccacgggaacgctgcagagcacggaactggcctgcttcacccacgtgatggaggccaatgtgcgttctgggttttatctgaccaagttgctgctgccccagttgctgcagtgtaagggcagcattgtcaacgtgtccagcgtctgcggacttcgcgcttttcccaatctggtggcctacaacatgtccaaggcggcggtggaccagtttacccgctcccttgccctggatctgggtccccagggtgttcgggtgaatgcggtcaatccgggtgtgattcgcaccaatctgcaaaaggcggggggcatggacgagcagagctacgccgaatttctggagcactcgaagaagacccacgccctgggccggattggggagccaaaggaggtggcggccgccatttgcttcctggccagcgagctggccagcttcgtgaccggcgtgacccttcctgtggacggtggcaagcaggtcatgtgtccgcgctag

SEQ ID NO: 3846 - protein, 264 aa, DROSOPHILA
MGSKGKAGLDFSGKVVLITGAASGIGAAAAEMFSKLGACLALVDREEEGLICVMKRCMKMGHEPYGIAGDLLKPPEIECIARKTTERYEGKLDVLVNGAGIMPTGTLQSTELACFTHVMEANVRSGFYLTKLLLPQLLQCKGSIVNVSSVCGLRAFPNLVAYNMSKAAVDQFTRSLALDLGPQGVRVNAVNPGVIRTNLQKAGGMDEQSYAEFLEHSKKTHALGRIGEPKEVAAAICFLASELASFVTGVTLPVDGGKQVMCPR

SEQ ID NO: 3847 - DNA, 3639 bp, DROSOPHILA
ctccgaagatttgtaccttgctaatgcattcatgaaaccaactatccttgtagatatcgaaagatcttcaagacttaaacctaatgataagcaatgagatttcagtacacactattaacacacacggaattcagtaatttccatatggttttaatttatgtagttagtaactgtttgcaagtttttatactttttcttactttgtacaccttaatgcccaaatacatatattattgaacttctgcaagtgacgaaattaaatggattttaaagtatttaaaacttataaaggtttgtttttagtttgccaaataaataaacatgacagctttgcttcatctgcacagcaccgaatcttcaatcaatccattacatacacaataacgcactcattacttatcaatttcccactgatgatataattcaccacatatcctttagctttggcgatggcaaaacatttccgattcgacatatggaagaggacacggaatctttgctaggatatcacagcgatacgcgcatcgagttggaggaggactttctgccagagccgcgatttcaagactcgattccatagctaatcatgaccagcgacaatgtagctacatattacatttagagattcagttgtgaagcctccttacgacatacatatactttcagtgtgtaaataacagaggtacagacagtccatcctatagggacaactaggttattatgtttaagttacgaatgagtcgatagacaattgtaatgtatatgtatgtaagtgataatgcgaaaaatgttaggagatcaaaatcttaattcttgcttggacattcgagtttgaaatttaaaatcgtattaatttagtgtgtaaggataaagttattagaacatttcgaacaaaagtatatgtctatataggaatatagctcgttatagctcgcgtcaacaaaaaacaaaatagtatacacgcttagtggaataacaagaaaatcaaaagcgaaactttaagcaacacatacggatctgtatatttacaaaaataaaattccaactattcccattaatcgaaccgacttaagtcgtcatctgcacacgagtggcttgttccagaaacggtggtggatgaaaccacttcaaaatcgtcttgtgctggggtgtttttcgctaattcctcggaggaatcggcaaaaggattggccgtcagtcgagccactttcggcaatggttttgaaaatgaaggttcatcaacgactgtttcatcaggagtatcctctacttgcttccttttcttttgctttttgctaactaaaacatctcgccgtactgcaatgcctgaatcctcacttttaggtagcagatcagtcaaatcgatctccacatcagccacttgcggttgcagtttctcctggagagccgctaaagcaatcaacagcgcttcctcggtgcgaatggttcgagatccttggcgtggtaaaacatttacatagtggtcgaacagcagctcaggatcatctacggtcagtttctcgtcgttggccaaggcagattccaagccttgcagtccgccaaatacaatgagcatgtgattaaagttatatgatcggttgggcacctcatgtacgttggttccgcgatccgaggtacccaccgtaacatcgtagccggttgcgtagggtgatttggtaaaaatctcagacatggagtgtgcgatgcgcacctggtagccccaataaacacctgtttcccgacgtggttcatccgggctaactagtgttccccgctgctttctacagctctctgttaggacgaatagttcattagttcggcactgggagcacaaatgttcgatttaaatgcctaccactttgaggttccatttttacagttactctgacgcctggttctattgccttgtcaaccaaaacgtcgttaagcagccccacgttggcgtagctgtgtccctccttggccttcttgtcgcaaatgacgccctcacgatacctgaatttgctctgttgacggagatggtgcggtgtgtccaatggattcagcaagccagagtacttaaggtctttgtgcagcgggaagaagtattttcggagatactgcgggcattccagatactgcaatatgcgtgccagttgtaatgagctgctgcgcacagtgccagtgctgctgccttccccatctgcctcgtaactacgctttgtttcccgggcggtggctatacccacgtcgtcgaagacgattacctcgttcacccgaaagatgcaggcggcccgggctatttgaccggccacgtaggcccgcagctcgttggattgggcattctcgagaattgaaccgggaacagctatgctcagcgtggacggattaggcttatccttagcctgcacctcattggctgcctttcccgcctgtgattctgcctctttggcttgctgcagctccttgagcagcttgtcctgcttgcgctgccgcttcaacgctttccgctcctcgttcaccttcttccaggacttgtggggcccaataggcctcccattgctgctggctgtgggggcggcgagcatcgttttcatcaacaattcgtttactcgattgaaactgttgcaaacaaaatacgcacgtgcaacctcggtggacagtatgtggtctgaacataataccagtgttggtatctatcggttaatggtattaatcggtcaggttcataataatgcacagatttttcattccacctggtaacatatgtagttctctcaagaagtgaaatgaaaacatttattgcgatttgaatttaaagcgcttgattcaataaacatggacaatgggaaggaacagtccagtccggaaacgcacagtacgcacccgctattcaaagcgaaatccgggaaaaccgagatcccaaccattgatgaagctgtggactatctacaaatccgagctatagagctatcgagtttgacatctccgccgttagactatacaatgatgcgatcatcataacgcccttacggatgatcagtggacagtcggatcgacctgcatcttgtttttaaaatattgcatcttaaacgtttgtttagacctcgcttcagttcccactgtttgttatgaccaccaaaggaattataataataaaaaatgatttttatattattagtccttcaaaatggactatacgtccatttaatgctgcatttaatacgtcattgtgttatcattttaggggtttctttcatttaagtagtcaatttttcttacatatatttttatttaattttctaaatatctgaagacaaccgttgaaaaacttacgttacaattgccccgctttggtatgttcttcagtatttttacacccacacgcaagagagctggccgcgagagagagagagcttccgctgagagcgagcttttgcgggagcaccaagtctatttaagcaacccgcaattcaaaactttttgtaatttttgcctgacacggaatcggaatacagaggcttctgcttgcgatatatttcaccgttcgcacttgtttacgtttgccattaaaatttttcaaaaaatctaacgagtaacagcggttgaatcgccggtggcaaaaatatagaaccgtgtgccgttgtgcgttggtggatc

SEQ ID NO: 3848 - DNA, 1575 bp, DROSOPHILA
tccaccgaggttgcacgtgcgtattttgtttgcaacagtttcaatcgagtaaacgaattgttgatgaaaacgatgctcgccgcccccacagccagcagcaatgggaggcctattgggccccacaagtcctggaagaaggtgaacgaggagcggaaagcgttgaagcggcagcgcaagcaggacaagctgctcaaggagctgcagcaagccaaagaggcagaatcacaggcgggaaaggcagccaatgaggtgcaggctaaggataagcctaatccgtccacgctgagcatagctgttcccggttcaattctcgagaatgcccaatccaacgagctgcgggcctacgtggccggtcaaatagcccgggccgcctgcatctttcgggtgaacgaggtaatcgtcttcgacgacgtgggtatagccaccgcccgggaaacaaagcgtagttacgaggcagatggggaaggcagcagcactggcactgtgcgcagcagctcattacaactggcacgcatattgcagtatctggaatgcccgcagtatctccgaaaatacttcttcccgctgcacaaagaccttaagtactctggcttgctgaatccattggacacaccgcaccatctccgtcaacagagcaaattcaggtatcgtgagggcgtcatttgcgacaagaaggccaaggagggacacagctacgccaacgtggggctgcttaacgacgttttggttgacaaggcaatagaaccaggcgtcagagtaactgtaaaaatggaacctcaaagtgagagctgtagaaagcagcggggaacactagttagcccggatgaaccacgtcgggaaacaggtgtttattggggctaccaggtgcgcatcgcacactccatgtctgagatttttaccaaatcaccctacgcaaccggctacgatgttacggtgggtacctcggatcgcggaaccaacgtacatgaggtgcccaaccgatcatataactttaatcacatgctcattgtatttggcggactgcaaggcttggaatctgccttggccaacgacgagaaactgaccgtagatgatcctgagctgctgttcgaccactatgtaaatgttttaccacgccaaggatctcgaaccattcgcaccgaggaagcgctgttgattgctttagcggctctccaggagaaactgcaaccgcaagtggctgatgtggagatcgatttgactgatctgctacctaaaagtgaggattcaggcattgcagtacggcgagatgttttagttagcaaaaagcaaaagaaaaggaagcaagtagaggatactcctgatgaaacagtcgttgatgaaccttcattttcaaaaccattgccgaaagtggctcgactgacggccaatccttttgccgattcctccgaggaattagcgaaaaacaccccagcacaagacgattttgaagtggtttcatccaccaccgtttctggaacaagccactcgtgtgcagatgacgacttaagtcggttcgattaatgggaatagttggaattttatttttgtaaatatacagatccgtatgtgttgctt

SEQ ID NO: 3849 - protein, 485 aa, DROSOPHILA
MKTMLAAPTASSNGRPIGPHKSWKKVNEERKALKRQRKQDKLLKELQQAKEAESQAGKAANEVQAKDKPNPSTLSIAVPGSILENAQSNELRAYVAGQIARAACIFRVNEVIVFDDVGIATARETKRSYEADGEGSSTGTVRSSSLQLARILQYLECPQYLRKYFFPLHKDLKYSGLLNPLDTPHHLRQQSKFRYREGVICDKKAKEGHSYANVGLLNDVLVDKAIEPGVRVTVKMEPQSESCRKQRGTLVSPDEPRRETGVYWGYQVRIAHSMSEIFTKSPYATGYDVTVGTSDRGTNVHEVPNRSYNFNHMLIVFGGLQGLESALANDEKLTVDDPELLFDHYVNVLPRQGSRTIRTEEALLIALAALQEKLQPQVADVEIDLTDLLPKSEDSGIAVRRDVLVSKKQKKRKQVEDTPDETVVDEPSFSKPLPKVARLTANPFADSSEELAKNTPAQDDFEVVSSTTVSGTSHSCADDDLSRFD

SEQ ID NO: 3850 - DNA, 3335 bp, DROSOPHILA
aggtgcgattataaacatttttttgttgtacttagtatttgtcttctatcatatagaagcaattctatcatatatgtaccaacaaaatggccacgccaacagtaaagaatgttttaatttttttgtttgtgatatttgcgaaaataattttaaaatttcttaattgcctgccacaatctgagtaacgtttatcttttagtcggggagatcgaccgaaccattctccttttttatattcgttacttgtaaagtaaaatggtatactgaatcgttgaaaagtatgtacatttatatgtctggcaaatgtctggcaaatttctatcgatttgcagaaatagtagtactacgcccattcaatatctcagaaaaatcatgaaatttcgctttcgcattcacactagctgagtaacgggtatctgatagtcggggaactcgactatagcattctcttgttttattttgttttaatggaacattattaggtggcgcaactaataagaatttcttatcaaaaagaactgaatattttatatttaatgttttatttttttatttttaatgtttaacctgtttggcttaactgaatgctccaagcgaaaggcagttttcggtcaaactaaaggaattaaaaaaatgtacatctaaaaattaagatggaactgctgatagctgatacatgtgagttttcctaaattccaaatgcacgtgtgatatacatttatgtacaaccaatgacgttcttgataaagccatgccttttaatcgccaactttttattaatatttttataattttaagggttgtataattctaagatttctgggattttttccaacatgcataaattaatctctttctgtatgtttctttaacagttctgtattcaaacgaatattttagaattaatatcaattcatgttttagtttaatgaaaggatattaggatgttgataaaatctattattatttaaatttaaacagcgttccctaaaatattttctcagccagccttgtgagtcttcaagtggtgctggtattctttgtagctgttgctcttaaatatttcaccggcttcttcatcggagcacttagcgcagtggtaaatgaacatgccgggatgctttcccgtcttgatgatgtgcttacgtaggttatctatggtgctgcactggaagtcgcagtgggggcattggtggggcttctggcccgagtggcgcaacgagtgccgacggaggtgacccttgatgcgggctctgaaatcgcattgatcgcacgaaaaccactcctcaccattcttctccgtggaatgagccgacttgaggtgcctgcgggaaaacagaggataaacttgagcgaagccatatttaaaatcttaacgcttgattaggcagtaaattccagtggcggcttgtcccgccaccgcagtcagaactaattgctaatttcgcattcgaatcacacgctcgaaatcaaaatacgagtaagttggcaattggcaattgcctttcgactcaagaagaaaaaaaagaggctcagccaatccggttgtcttagatggtgatcagtttttcggttagaagaggaagcctatgttggccaatcgagcggtctggccaggtcgactagccaaagagctacatctgagagggcattcttaattcttattttcattttcttgttctatcgctgtgttttaagaaaggaggaaaatagctaataacattcgctctgaaaagcgttatttaaaatgattgtcaaacattttacaatatcttaaaatgaggcaaagatttgttcaatcatgcaaaatacagtgattcgaaaatgaaaatgaaacatatctaaaggactaattgtcctaaagcattaatcgttttgcttgcaataactaaaatattaaaattattttcccttaaagattgtccgaatgctaatgtaccaataggctctacaagaaaaaaagatattcccgcactcacacgactttagttacgcaccttcaattatgcccaatacttctgtagctgtttccccagaagcccactaagggagcatccttgcatatgtgtgtgttggatgtccactccacttatcagctactgtccaaaccaaggactcacaattaattgccaatgttttttgtgggcccgggctgctggaatcggaatctgtgtgaaatctcaagcttcgactgaataaactgaagtccgaagaccaagggaaacagatgaacgcgactcatgcgcgactcggtaggcttaattagcggcgagtaatggagcttgaagatcgaaccgccagttgtaggaggctttccaccacgatccgccctcatcctcccctatatacctctgtcgaatgtcgaccaagccgcgaaacgcggcttgcaaatccaaggcgggactgccgaccgatcgctttcttggttgcgctttgaaattccaggattaccaccgctgcctttcgatagctaattgaagatctcggatgtgagttaagcacatcacaacagttttctgtctcagtgactggattcctgggcaagatttacgcaagacccgattttcggcggacttttaatacttttaatacaattaatacagtatgtaaaatctacagttttttatacctaataataactttggtaatcttaaattaacattctttaaaagtcatgtcggtacaaaggtgagagttttcctatatagatttagtgccttggaagctagtgtatataattatgattacatatgatataacgattagagcgttgagcaatttgaccaaaaaacatccataataaatataaggaagatatttgaagatacttattataaggcacgatgattaactcccggaagctcgaaaagtaatatataatatatcgacaataagcaaatttaattaaggaaaagtgcgggtcattgtagaccaaaggtcgtgcgaagagctcatcaactacaagtaacttatacaaagcaggaaaccaaaatattgtacatcagcgcttgttggcttgtgtttagatgaagattttgcgaaaaattgaaatcttgcgtgaagttaatacaagtttcccttattccatgtaccctaagtgaagcttccgcacaatatttagttagcaactacacaaagcattcttgcaagttgaggcagcgggtgcaataattcgaatttccaaaatatttctagcacaccaattgagctaatgtcggaagacgcattagaagcaccacacacgatagaaggatacaatacaaatataaatcacaatccacgcatatgtatatatatatatacatatattcaatgcggtctttttcaataaatga

SEQ ID NO: 3851 - DNA, 459 bp, DROSOPHILA
atgagggcggatcgtggtggaaagcctcctacaactggcggttcgatcttcaagctccattactcgccgctaattaagcctaccgagtcgcgcatgagtcgcgttcatctgtttcccttggtcttcggacttcagcacctcaagtcggctcattccacggagaagaatggtgaggagtggttttcgtgcgatcaatgcgatttcagagcccgcatcaagggtcacctccgtcggcactcgttgcgccactcgggccagaagccccaccaatgcccccactgcgacttccagtgcagcaccatagataacctacgtaagcacatcatcaagacgggaaagcatcccggcatgttcatttaccactgcgctaagtgctccgatgaagaagccggtgaaatatttaagagcaacagctacaaagaataccagcaccacttgaagactcacaaggctggctga

SEQ ID NO: 3852 - protein, 152 aa, DROSOPHILA
MRADRGGKPPTTGGSIFKLHYSPLIKPTESRMSRVHLFPLVFGLQHLKSAHSTEKNGEEWFSCDQCDFRARIKGHLRRHSLRHSGQKPHQCPHCDFQCSTIDNLRKHIIKTGKHPGMFIYHCAKCSDEEAGEIFKSNSYKEYQHHLKTHKAG

SEQ ID NO: 3853 - DNA, 6040 bp, DROSOPHILA
tgccgtgtgtctccctatcacctgctccgcaactacaacgatttgattttcaactgagcctctgaggttcagagctgaaagccaagagaggattggtagcttgcacttacccggttgcagagctctggatgggatttacccacaacagggccggaggagaagcaatgtttctgtgtgttttcgcttacaataagagtgttttaatgttttctgtattttccgcttctttcgtttaattactttaaatctaaataaacgtacataggtaatttaaataaaaacaaaacaaggatttgcttatacaagttatttttacattacaaaattatacaacgcaacttttcgccttgctctcgtttttaaatcattttttttttttttttaatcatttcaatccgcgttgattcgtgttttgtttttaactagatttacttggtaacttgattaaatcattttcagacttcaccacataaaatgtttatcgtttttgcgttttagcgttttgctgatgatttttacactgctttcatccattgcaaacttaatgctaatttaattttttttttgtgtgtgtatgtttcaacatttttgaatcgactttttaccataaacttaacgtacatatgtagatcatctccgtttgaattatcgtctcattgccgatcagcgttcagctattatatgcatggtatataatttagttaagcatagctgcgtgagttatacatacgtaatgtctgtgcctatgacgatataggatcgaaggtgggtgctgtggtcgagtgctgggcattggtgtgctggtgtgttacgaatagattgctctttgggcagggggaatagagaagccttgggtcgctacaaagatttgcatttatacataagtacactaacgcacagaacgtttccaagtcgtaagatatatatatatataagaaacgcaaggtacgccgagcgctcccgttccgttcgattcggtcctagcctaccctatatgcgactactgctggtcctgcgacatccggaacatgtgcgtcgtattgctggccgccgccgtggccacagcagcagccgaggtggccgtcggcggcggcgattgggcggatgcggtcatgtagctgctgtcgctgctcccgctggcgctgattcggtgagtggcgctgctgctgctggctacgctgaccagcgaacgcgcctcgcccacagccgctgccgactccacgatggccgacactgcctccgccccgattgtcgccgctgcgctggaggagctggtggcgggcgcctgttctgatgcttcgactggagcacgctccggagagcgtcgctgcgcagctgcgttgttggcgtcctgcatgttcaagggaatagatgtacattgagactaacaacagagtatccccatttgttactcacgtctcgcgggtatatccgcatcggctgctcggcctgggcagctggcgctggctccgcctccggcgcattctcatccgccttgtccgtgtacatcatgatctcgtggcacagggggcaacgatcctgaacgtacagccatttgcgcaggcaaacgccgtggaagaagtggcgacaccgcgtgatcttggcggaatacatttcctgcaaaacgatagttgagtcacgtgcaatattgcatgcaatacaatacaatacgcacctgatagcagatggcgcagacatcgtcgaatgcctgcagctgggcgggagttgcctctggcagggctgagatcttgtggaccgccgaacgccgcttcatgaagaccgaccagcccgcccgcgcctcgcaccagatattgaagtaggcgtggatgcacatcatgatcgctctgatgccgccgcctgtagcattttgggctatcaagttatagttatcggtacacaaaatcaaccaaataaaaatattacatgcacacatagaacagaaaagctggacgcggacaatatgggctcgatgatatcgagatggctagatcagatgccaatggaatgcggtgatgatcactcgcgcttactgatgtgctaatgtaacaaggacgggacacgctgcgctccaacttaccagactcgaagatcagaatccaagcaccgttgatgaacagcaggatgccgaagcagaactccactgagttgccgaacgcgcgcacatagtacaggtagtcgtccagcttctcccagaagaactgccgacgcgcgtccagcaggaagagcgtgtaggtggccagcgaaacgagaacctgcgggagaagtagtagctgtagctcttgaagcgtacatatcgcattcgcacgcaccttgacgacgacctccacagagaaggcggtaaccgctagcagccaggtggagatggattgctgcgaccagaggtggtagagcagagacactgacaacaccacgaggaacgcgcagacggagagggcgcgcacatggcgcttccgcgagggattccgtgccgcactgagcgacatcaagatgggcgacacgatgttgtgcaggaagtgcagcagagcggtcatcagcaggcacagattgcggcacagcctgatgaagcgtttgtccggcgacagtgaggtcaggcccgtctgcagagcgaggatgtagaagagcactgcggagacagtgcccagcgacttctcctcgtcgtcgtaggtgagcaggtaccactggaagccgcgtccgatgtagtggcagaacatcgagatgacgcccgtcatgcccagcaccgccgtcatagtctcacagccgtcgaccagcagcttctgtgtggccgtcattagatccaggggctcatccgattccgtcgtggccagggcatagccgccttggattagtctgaaaagcagggtgttctattcgatcattatgcatttaaaccagttaatccgtttgcttcggccattaataacataagtctcggaatggatattcaattctgtgattgatggccttgttccattgacacattaacgctccaaatgcaagaattagaatgttccacgtgcatgattaacataaattaatgaaccgcttcggaaacgaaacccacctgatggtccaaaaaaccctcagaacgttgggcacattgagcctctgccattcgttttcaatgagcgccgacagtccaaagttggacacaaagttcatggcgtactggtatccgttgtagaccgtgcgactggcctccatggcgctctgcatcagcgtgatcttcgtgaggatgatgggcgtgaaaacggccaccacgggcaggtgttgcaccaccttcgccggcagcggcagcatggccaacagaattggactagcgaagatgatgggcatcgatctctggacatgttcgaacctcggtcccaggtgaatgtaggcgaacagcatgcccatgaaccactgggccatcagatgcggcgccagcgacatgaccaccccgcccgagtccagcagcctagtggtgttcagtgacatgaggtcctccaccatgctgggactgcgctccgtcagcgccagcgcactcacgttcgaccagtaggacaggaaggtgaggcccagcgaggtgaggaacatgtagaccatcaccaggtgccgggtccacagcatgaagatgcacgcggcggataggaaagctgcaagaaagcacacagattgtgagtcaggcatatatctacgtttcgctggcgttcaaagtgcgcccaataagcggcccttggaattctggatgacttcgcaggcagatcgaaaacaatgaactcgaaataacttaattgcctgtgtttacgttttgggttcaatgggaatgctcaagcttgcaattcacgctttttaaggggtaactaactattcattcatatacatacatggcctttttgcttgagtaagcattatattcgattctgcgattacttgttatctcaatttaactcatatctaagttattatgaaagttactgactaatccttgaccatgacgtgtagttaaatgtagttaaatctcatccctgaccttatatgctgagcattagaattctaagcagatatatagatgtgaccgttctaagcgcaacccctgtagatgactcaccgaacacgcataaaacgaacttgaccgtggtggtgctgagcacatccgccagtgtttggtccttggacagctcgttcatcagcgagttgaaaccggagctgagcatgccgtgcgttttggccgcctcggaggccttctcgatgctctgttccagcacagattgggcggaggtggtcatgtgggagaacaactcctttatgctggtgaacggatcctggccggatggcaccgctggcgcttctgtgggcgtagcaagtgcgccactggccttgtccttgtccggatagagccacgactgcatgcccatgtccatctttagtatctcatcgatgaccatcaccggtggcacgcgcatcatcacgtccaccaggccgagaaccttcgtccgcacggacatggctccctatatgtatccgtaaccgtatcccgtatccttctccgggcttttggcctcctcgctttgctttgctgatcccgcgtgactaggcactaatcgcgagccaatcgagctccaatctgcatttgttgtggattcgccttcgtcttggatttcgcaaaaaaacaaaaaatagacgacggaatgacgatttggctgcgtgagtgtgtgggtgcgtgtgtgtgtgcgttcgcatgcagcaggtgcaaattcccgctggcgcgtcgtggaaaaggtcgttgcggcaggctgctcgtttatgctccgcttttggccacacaattgcgctgcgctctaaactttacacttttcacaattggtttttgtttttctcctctgcttctcctccttcttcagcggcccatctatcgattggtgctgctgcctatcgctgcggtcgccagtgctgccccgcggccctgctttcgccggactatcgattgtcgttgccagctgatcgtgtggcgcgctttttgaaaattccctctgcctttgagccgcgaaacggcgcgtgttgctgcgtgtcggtctggggtactggtaattttaggtattctgttcaaaaactacgttctaaagggtctggtctagccttctgtgtgcgatagagagacactattgggcagagtttactttaacttgaagccgattgaggtttgggtagcaatttggttacgacttgttgcttcagttattgttgaaacatttaactgcatttactatttagtttctaatagttacagttttacattcactcaatatacagcctaggctggtgttaacagagctgttaactgatatgtccagtgttgactagtgctgctgttaacttggcgcgctgtctacgaaatttaaatttgtgctgaatccaaaaagtaataactagcaggctagaatatccgattacgtaaggtatttcatttaacattatgcttacagaggaacgagcaaaccccttaaaacatttcctctgctcatatttcccgaaatgcccgcagtttctagttctaaaagcgaacatttcctgcattcttgcgaatgcgcccaattccaatccaatccgtatccgcagggccccgaagtcatttacgtgaatttcctcaattgttcggccattaacttttgccatttgccaccttaattgttgttctttcttgttttgtggcacacagcccctggaagaagccccactccccccaccgaaatccacaaccctttttgctatgcaaatgcacaaattgaggcaacggcaacggcaaatgcgatgcagtccgcatttgggtttcgttttggtttcgtccccaacgcaacgctcgtaattatgcgcaattgtttagcgtttagctaggaaagttcaactaacataattgatttttcatgccgcgccacaagaattttaaacaaactgcacaggtcataacaaaacaaacagacgaggaatgcatgtttgtcgaattttttgtgtgagctacgagtacttcttttagttgtagtagtagtaatgatacattcactat

SEQ ID NO: 3854 - DNA, 2971 bp, DROSOPHILA
caacacgcgccgtttcgcggctcaaaggcagagggaattttcaaaaagcgcgccacacgatcagctggcaacgacaatcgatagtccggcgaaagcagggccgcggggcagcactggcgaccgcagcgataggcagcagcaccaatcgatagatgggccgctgaagaaggaggagaagcagaggagaaaaacaaaaaccaattgtgaaaagtgtaaagtttagagcgcagcgcaattgtgtggccaaaagcggagcataaacgagcagcctgccgcaacgaccttttccacgacgcgccagcgggaatttgcacctgctgcatgcgaacgcacacacacacgcacccacacactcacgcagccaaatcgtcattccgtcgtctattttttgtttttttgcgaaatccaagacgaaggcgaatccacaacaaatgcagattggagctcgattggctcgcgattagtgcctagtcacgcgggatcagcaaagcaaagcgaggaggccaaaagcccggagaaggatacgggatacggttacggatacatatagggagccatgtccgtgcggacgaaggttctcggcctggtggacgtgatgatgcgcgtgccaccggtgatggtcatcgatgagatactaaagatggacatgggcatgcagtcgtggctctatccggacaaggacaaggccagtggcgcacttgctacgcccacagaagcgccagcggtgccatccggccaggatccgttcaccagcataaaggagttgttctcccacatgaccacctccgcccaatctgtgctggaacagagcatcgagaaggcctccgaggcggccaaaacgcacggcatgctcagctccggtttcaactcgctgatgaacgagctgtccaaggaccaaacactggcggatgtgctcagcaccaccacggtcaagttcgttttatgcgtgttcgctttcctatccgccgcgtgcatcttcatgctgtggacccggcacctggtgatggtctacatgttcctcacctcgctgggcctcaccttcctgtcctactggtcgaacgtgagtgcgctggcgctgacggagcgcagtcccagcatggtggaggacctcatgtcactgaacaccactaggctgctggactcgggcggggtggtcatgtcgctggcgccgcatctgatggcccagtggttcatgggcatgctgttcgcctacattcacctgggaccgaggttcgaacatgtccagagatcgatgcccatcatcttcgctagtccaattctgttggccatgctgccgctgccggcgaaggtggtgcaacacctgcccgtggtggccgttttcacgcccatcatcctcacgaagatcacgctgatgcagagcgccatggaggccagtcgcacggtctacaacggataccagtacgccatgaactttgtgtccaactttggactgtcggcgctcattgaaaacgaatggcagaggctcaatgtgcccaacgttctgagggttttttggaccatcagactaatccaaggcggctatgccctggccacgacggaatcggatgagcccctggatctaatgacggccacacagaagctgctggtcgacggctgtgagactatgacggcggtgctgggcatgacgggcgtcatctcgatgttctgccactacatcggacgcggcttccagtggtacctgctcacctacgacgacgaggagaagtcgctgggcactgtctccgcagtgctcttctacatcctcgctctgcagacgggcctgacctcactgtcgccggacaaacgcttcatcaggctgtgccgcaatctgtgcctgctgatgaccgctctgctgcacttcctgcacaacatcgtgtcgcccatcttgatgtcgctcagtgcggcacggaatccctcgcggaagcgccatgtgcgcgccctctccgtctgcgcgttcctcgtggtgttgtcagtgtctctgctctaccacctctggtcgcagcaatccatctccacctggctgctagcggttaccgccttctctgtggaggtcgtcgtcaaggttctcgtttcgctggccacctacacgctcttcctgctggacgcgcgtcggcagttcttctgggagaagctggacgactacctgtactatgtgcgcgcgttcggcaactcagtggagttctgcttcggcatcctgctgttcatcaacggtgcttggattctgatcttcgagtctggcggcggcatcagagcgatcatgatgtgcatccacgcctacttcaatatctggtgcgaggcgcgggcgggctggtcggtcttcatgaagcggcgttcggcggtccacaagatctcagccctgccagaggcaactcccgcccagctgcaggcattcgacgatgtctgcgccatctgctatcaggaaatgtattccgccaagatcacgcggtgtcgccacttcttccacggcgtttgcctgcgcaaatggctgtacgttcaggatcgttgccccctgtgccacgagatcatgatgtacacggacaaggcggatgagaatgcgccggaggcggagccagcgccagctgcccaggccgagcagccgatgcggatatacccgcgagacgacgccaacaacgcagctgcgcagcgacgctctccggagcgtgctccagtcgaagcatcagaacaggcgcccgccaccagctcctccagcgcagcggcgacaatcggggcggaggcagtgtcggccatcgtggagtcggcagcggctgtgggcgaggcgcgttcgctggtcagcgtagccagcagcagcagcgccactcaccgaatcagcgccagcgggagcagcgacagcagctacatgaccgcatccgcccaatcgccgccgccgacggccacctcggctgctgctgtggccacggcggcggccagcaatacgacgcacatgttccggatgtcgcaggaccagcagtag

SEQ ID NO: 3855 - protein, 804 aa, DROSOPHILA
MSVRTKVLGLVDVMMRVPPVMVIDEILKMDMGMQSWLYPDKDKASGALATPTEAPAVPSGQDPFTSIKELFSHMTTSAQSVLEQSIEKASEAAKTHGMLSSGFNSLMNELSKDQTLADVLSTTTVKFVLCVFAFLSAACIFMLWTRHLVMVYMFLTSLGLTFLSYWSNVSALALTERSPSMVEDLMSLNTTRLLDSGGVVMSLAPHLMAQWFMGMLFAYIHLGPRFEHVQRSMPIIFASPILLAMLPLPAKVVQHLPVVAVFTPIILTKITLMQSAMEASRTVYNGYQYAMNFVSNFGLSALIENEWQRLNVPNVLRVFWTIRLIQGGYALATTESDEPLDLMTATQKLLVDGCETMTAVLGMTGVISMFCHYIGRGFQWYLLTYDDEEKSLGTVSAVLFYILALQTGLTSLSPDKRFIRLCRNLCLLMTALLHFLHNIVSPILMSLSAARNPSRKRHVRALSVCAFLVVLSVSLLYHLWSQQSISTWLLAVTAFSVEVVVKVLVSLATYTLFLLDARRQFFWEKLDDYLYYVRAFGNSVEFCFGILLFINGAWILIFESGGGIRAIMMCIHAYFNIWCEARAGWSVFMKRRSAVHKISALPEATPAQLQAFDDVCAICYQEMYSAKITRCRHFFHGVCLRKWLYVQDRCPLCHEIMMYTDKADENAPEAEPAPAAQAEQPMRIYPRDDANNAAAQRRSPERAPVEASEQAPATSSSSAAATIGAEAVSAIVESAAAVGEARSLVSVASSSSATHRISASGSSDSSYMTASAQSPPPTATSAAAVATAAASNTTHMFRMSQDQQ

SEQ ID NO: 3856 - DNA, 9762 bp, DROSOPHILA
cgctgtagcgctcttcgctctctcgctctcaaacaaaaattcgagagagcctggagccacctctagagccacggccaaaaaatcgtgtgccaaaaaatcgtatggcgttacgcatcttgttattctagggtctttgggcaaaccaatgtatggccgttacgcatcttgttattctagtgtctttggtaataccgtattcctttcaaaagatatacatcaatgcttatcttctgtcttgtgaacatatatgatttgagttcatataagattaacgaaaatttcgaaattaagataactattgctgtatcatcagtggggtgtttaaatgtagtaaatatcgagaattttaaaagatacaatttcaaaaatgacaaatgtgttaattctaaataattgtatataccataaaaacaaaaaataaaaatttgctgttgaagatttttaattgtaataataatcttgtgcattagacatttgcaaagaataatacaaaaaatacacgaatgcattgtttttccacttatcaattaataataataaataagtgtattcatgtgaattaatttcatttcttgtgttagcatcagattttcatttcttcgtgcactctctcctagctttctttttaaccgtgacatatcgggatctgccaagaaaactatttgatgacaggatctagaggaagtaaacaattcgatgcacttgtcaaggtagaataaggatggctgtattcagaactcttgtcagttattatccccctaagttccgattttgggaattcctaatgagtagcacaacaaaattggctgcactcagccacaattatattttggtaaatgtttcaaagtactccgtattataactcgtacctatgtatatgcatacatatactagtattttcaatgacatgcgcacagagtcgagcttttcatgcaaacgagctcttataaaaaaatgtattcgacgtgttttcattggcataagtagctcgatattaacttaaacgacatattgttttaggaataaagtagttttaaagtaaaatacagtttttgccgttatttaaattcaaaggaaagactcaaatttgtaataacaacacgcaatctaataagacagtgtaaaaacatagagtactgtaacaattatactgaatgttggattagtttggtttgcttatttcttaattgggatctccggcacctgcaacctttatgacagcgaactaaacaaataataatgttttggaccaagttttatgagatttacataagtcaaacataaaacaatgtgtactcctttaaaaagaaagccattaaataacaatattatatgctctacatcttaaagtgcgacatagtttatactgtggtggtactgtggtataaaaaataaacaaataaaaataagttgggtgttgttattatatattattatacaccttagttacagaaagttacgttcttatctgcatgaaataaatatgtatgcccgaagatattatatcttacataatcgatttctttgttatttacttgaattaagattcgaattgtcgtaaaaaaattacacatacttctcactattacagacatggcaagcatagtacttatagcttgcttggctatattgggattaattattacaatcgctctttttctggctggaggatacttgtggtggaggcataaaagatcacagttacagtttattgaaccaaatgaagatgaggaatctagtagttatagtcttcggtaagtatttgcatttcctgtttagtatatgactttatatatttcatggggacagacattcgactcttaacaagcgatagaggatctatttatgtctatgactgtatattatcaacgattttgagtatgcagtatttctaaattgtcctattcatttgacttttttataaatacgttagttgagtaccctcggaatatttagaatatttatatatcatgctctgcaatatataataatatataattataatttagctacaaaaaaccaacatttttgagttgtatgcagtttaatgaaacatcataatttatagcttattatcggatgattgattggcaaatacaaaattttaacgttaaaatattttattcttctgtaacgggaaccaatcgatataaattgctaattatgcccgttacttgtagattaaaagggtatagtagattcgatgaaaagtaagtaacaggtagaaggaagcgtttccgaccatataaagtatatatattccgtctgtccgatctcgatcccaggaactataaaagctggaatgttgagattatgcatgcagtttccagagacaaatgttgccaagcccacactaccgcccgtcgtattttcatacgtttattagttttgtaaatttctattaaattgccaacttcatgctacgcccactctaaagcccacaaccatcccaaaactgccacgccgacacttttaaaaaatgtattaatgaattttcatatttttgctagtctcgtaaatttttattcacattttgaaaaatgttttaattttgtggcgtggcgacatcaggaaacaatattgagctgtgcctatgtctctggaatttacatgcttagtctcaactgtctatcttttttagtttctaaggtggtgggtgttattttattttttcttttcattccagtttttatcggtacgccaaaaagaatgtcgagaagatgttgaaataagactttgcgagagttgtatgcagttagcttgaaagtagtgtacatacggacgagcgagcagatggacggacgtaaagggttagttcgtctcggctagtgatcctgatcaaaaatcgctcaaaaatcacaaccaatcgaaacgcaagctatcgtaatttttgtcacacaagttgagagaatgtgcaaaagggaatagtacatacatatacacaaaaaaagaaaacgattgattctttggtagtccgtaacaagtgataatcaaataccaaagacactagaataacaagatgcgtaacggcccatacattggtttggcactatgcagccacttttttggtgactgccaaaattactctctttccagctcactcccgctgagagcgtaagaaatctaaaaatataatttgcttgcttgtgtgagtaaaaacaagagacgagaactcagtataagtgtgcgtgttgtgctagaagacgattttcgggccgaaatcaattctgatcgaagaaacgaatttacatggtacatattagggtagtttttgccaatttcctagcaatatgataaaaaaaaaatttttttttaaattcgcgccctgactattataattttaaagctctttaaatatggtttgttaaaatcgccgctcgaattagctaccgtttacacatttatatttatggtttaattctaatttgtctctcatctgacaattttttaaaagcgaaatatttttttaaaacacttttaatgttaatgttacatcatattaagtcaaatgatttaataaatatactaaataattaaatatagataactgtttattgcaaaagtaatatcaaagacgctagaataattctaatgctttgttaatatcttgaggcaccgaagtgcggacacaagccctcaacaatcattggcttattaatttttcacacgcccgcaagatgaatactctaaatggaaaaatattcttatataaagtcatttttgaaatttatttttgggataatatgtacatagatttggctatttctaatctattttcaaataataataacgttaaggcaatgcaaaacaagaatttttcgcatggtgccaattgatcaaaaataatatagatttaacgtctaagaacttctgaggtgaagggcatattttgtcaaatttacaatgcatgagcatacgtgtgcacacatacatttgtctgctatcactttgtgcgttgaaaagagctgttcgctgtagcgctcttcgctctctcgctctcaaacaaaaattcgagagagcctggagccacctctagagccacggccaaaaaatcgtgtgccaaaaaatcgtatggcgttacgcatcttgttattctagggtctttgcaaatacggtccaaaaaggctgttttctcgttgtaatcaaattaattagtaatttattgaatagaaaacttcccacgtaaaataacgggcacaataacgcacaaaaatattaatctcccaacaattttacttaacacaatctttcagggctgctcaggatattgttgactctggtaatccacctacaaaaccgcaagtgccggtggcacatgctatcacgactcctctccaaaataatattaacaggaaattaaatggatttttaagtcttagaactcctttgattgggtaagtatttatgaaagtgaggcaaatgagtaaatatgtatatactgttataacgttaatagcgggtcgggggcctctcaaacaaaaccgcaaatcatttcttcagttggaaatcctggagatgggactacgaaagattctgcagtaagtatattaccgttttttcttgaacctataaatcgaaaacaataaaatttccatgtaataggctatatagaaatgtgtacttgcctttcaagctgttttgatcataattaaaatcgacaggtggtcctgtggtaggtgttaaactgagaaattttatttacctacaacattcccattgattgagcacccaccattgccgtcacttttggttgggtgtcttcctcaaggagatcccagcgagcttcggtgtggtatctccattaactattttacccgttaaattttaccaagaatttatttattcaagaatggctaacacgcagtatttctccaatttcgatgtcatatatctcggtagtttgttttaatcagattcgcaatttgtgcgtagtaatacacaattttgttttatcggcttcaatgttttgcatcaaaggtgtgtcattctttcggatcaacggaagacttgcgtgtgtcaaaagactacctgtgcggtttttgctctagcataagcttatctgttttagaatatataatatgttgagttaaattaagttaaagcattcaaacacagtacatgaacgcaggtttgaatgcgaattgaatttcaggctcaatagcacagcaatttttaaaagtgaaacttcggtttttaaagcataatttttatactaaaacaggcatgtagcttctcatactggggtgagaaggttagaccatattccaaaggctctgtgatgttaaaatttaccatcaccgcattcagtacagtacagtacaatcacagcaaaaatcaattaaatagcttcaaccagtttgttacaagttttggtaattaaagttatttctaatcgctccacagtgcccgtatttggcgcccgctgcactgattcgttctccaagttaaatgtagaagtccatggattggtctactgaggttgtcaaccgggttggatattaggggcttaacaatctggatggccgtactataaaattaaatttagtggtgacgttcgtgtctgccaccaacatttcaaccataaaatttcatttgtaagagtttgagattgagtttacccaaaatttgtttttgcaaagtgattattatagttttaacctgactctgtcgatgtcaaattggctgcaggactaatggagttctcatacgattgttgttttttgtgtgaaatgaaggcccgaatgatgatctggatagttttgaaaaataaacttccggtgtcgcgtgcgaattaaaattgttactatttaattatatgaaaagtagttttaattttttattatttttacttattcggtgatagactttttacacaagacttacaacttaagacttacaagggactttattactagcctatctttaatttgaagctagttgttcacgatctcgtcccactcaacctcggccagaagcttttctttaggattttcttgagctttcaaatatatttaggatacaaaattgaagcgcaataagttgatcatggcttggtctccaagtggaagttgtgtttactttaagtttggttatttctctggtggctaagagttggttgacaaagacaagggcaaaggcaatgctgctgagattggaatttgaaatttgtttatcaactggggcacagtgctatatttgtgggttggataactctcctccttcttaaatgtcgcgccgcttcattatggtgaatcaatatttggtgatttaatatttctttaatgtcttcattatttaacatttttgtgttaaatgcatcaattattgccagtgtaatagtatcaataatgttttgcaagtcgaatattaacaatcgtaaacaatgttttcttaacggcaattcttgatcaataaaactgtttttaaagtgatcggaaagtgattttatctcattatacaatttggaattgataataaattgttggttattgttttcaatttctatttattttttttatttattttattctgtattgtaatgaaatcatcgtaatccggagttcctgctaaacatttccaaacagtgcctaactcatttcttcccctttttgatctcgttgataatagttatgacaaaattaattcgattaattgtagttcctaagttatttcccattgtgaccttttatttgtatccttttttatatatcgtgattctatatcgattatttctttataaaaacttaaattagttacgtggaataggtcggcatatgattcataagtaagaacatcctttttgtatttgtaaatttataagaaatataatatttgttaaaactcaatattgtcattgacaacaagttattgaacttgtccgttcgaggtactgtgtctggggtctgcgaaatgtaaagttaaaccacatctttgtgcaaaggatttaaattgagcagaggtgaagcttggttcattatcagtcataattactttgcgtggggaaattgttgaagtaattccattaccttattctcgatgttaagtttattttgaatttcttttactactaggaattttgaatacccgtcaatgcaagttaggaaagtaagatttgacgcgtaataaatatcgaggtgtacattttctccttcattagttgggaattaggaattttaattggatgcctgttctatttatttttgtttcaaattgtacaattttttatgaattcctttaattttatataataataataatattaataataataatttgaatggccactaatataatctattgattgtctgtaattttcgtctagtcctctatgagctcgactatgtgtttcttatgaaatccttatcttcattattctctacgtcttgcagaaatgtgttattaaaattattttttaaaggtaattgaatatgataaagataccgttatgtttggtgttagatattctcttaatatttctactaaattttctggtgtgtcatattcgattatatgtcgtgtcttataaaaaactctcaatgcacactgggccagattccctttttttggcataaagtcaaataataaagctagagagctgatttttttagaattggtgcatctgacatttaaaataccgtaccgtaaaatttcaagtaaatcggacacgcccatccataccgcccatattaggatataaagttaaggagtagatttggcatgattatttctttttattaattaatataataaatttaagctgaattttttgatgtatttatttaatatacatataattatactattatattaatcaaaattttctacgtccaaatgcatagaaaatgcatcatcctgatccgaatccgagtcgctattatcgcttcccaaaaaagttcatttttaatacatttggtgcgtctacaagattgacgacttatttcgggaaaaccgattttttattttgagaccgatcttttagtttatatttagtcttaaaactaaaggatccgatgaatccacggataagaataatgcataagaataattcgactggccgtataattcagcaaattttggaaagatacttcggtaaaaggtctctgtcacatgaactcccgcaggtctacacgctaatttagcttctctgactggataagtgttgctaaattctgttttgttcaaagctctcatgtcgttatattttgctttgagtagagagccgtcaatcaaaaatgcaagagcctgaattggtgtgagcggtactggctctgagaatatcaatttttttctaatttcagtggatgcagttgaagttgaaatggtttgctttaatacaaaagcagtatcgctcattttttacttgttggctgaaattgatgcttcacggacaggcagacttgtattattttcttcaattttagccagacccgttgctattcttcttttgagccgtgatcttgcatcactgtaagagagtcgaggtcgtcccattaggcagtctgaagcgacttggttgttgttttggtccacgacaaccatcatgtggatgaaagcccaactggaatgtgttttttttaattcttcaattgtacggttacatttagccaaatttttcattatatatacagctgcggttaaaataatagcactactgcaggtggaaagttgatttccctaaaaaaaattattaaatctttatattttttaaagtcagattgcatgaataataagtaccatatgttggctctctgagcaagaaatttttagtctctcaatgtaaccggttctttttgtttttgggcacttgctgcaaaagtgcgcgaaataaggcggtaacaaaaatagcactgaccacgtttttgctgaataaaattaataggagtgattgctttgggttttttcgaaaaattttgaaaaaaggagttgtattaaaggttttaactgaattttttcccaaccgaagaccaaaaattctctagtcatgggtcgcggaaagcattgtaccgtcgaaaaaagaaatttgattaaaaatatgatctctgaaggtaaaaaaaatacgctacatatacagatacagatttttcattatatataggtgaaagcttctgatttgcttagcgattttagctttctcgtcaatagtaatgtcatttaatttaaattcgccaacaacccagtcaactaaggttttttcatttagattctcctttgatccattcatccagcagaacccgatcggctaatcttaaacttgtcttaaaagacaaaatataaagagcataggaaaatttaggcaaaaggcaatactaacatgaatttaattacagttttgagtaaacacatcagttattagttagataacgaacattttggctagattgtgcctaaactaagacgtatgcaaagacaacaacaattacaacatggaacacataattctaaatcagtaagttatatctatattaagcataccttgacctttatattccattttatttgaaaatgtttggacacttggtgtatttttaacagaatcacaaagttgagtagaagttttgcgccaattttgcttgaacaaacagctgaccaaacatattaaaatatctttttggtgtccccaatctatgctcttccataatatatagttaaattcaaaatacaatttttaaaatttttcgactgccaaaaaaaagggaatccccgttgaatccccgttgttaagaacagttgttgctgaaactgatttaacggtttacgggtctc

SEQ ID NO: 3857 - DNA, 630 bp, DROSOPHILA
taaacgacatattgttttaggaataaagtagttttaaagtaaaatacagtttttgccgttatttaaattcaaaggaaagactcaaatttacatggcaagcatagtacttatagcttgcttggctatattgggattaattattacaatcgctctttttctggctggaggatacttgtggtggaggcataaaagatcacagttacagtttattgaaccaaatgaagatgaggaatctagtagttatagtcttcgggctgctcaggatattgttgactctggtaatccacctacaaaaccgcaagtgccggtggcacatgctatcacgactcctctccaaaataatattaacaggaaattaaatggatttttaagtcttagaactcctttgattggcgggtcgggggcctctcaaacaaaaccgcaaatcatttcttcagttggaaatcctggagatgggactacgaaagattctgcagtaagtatttatatatacagctgcggttaaaataatagcactactgcaggtggaaagttgatttccctaaaaaaaattattaaatctttatattttttaaagtcagattgcatgaataataagtaccatatgttggctctctgagcaagaaattt

SEQ ID NO: 3858 - protein, 137 aa, DROSOPHILA
MASIVLIACLAILGLIITIALFLAGGYLWWRHKRSQLQFIEPNEDEESSSYSLRAAQDIVDSGNPPTKPQVPVAHAITTPLQNNINRKLNGFLSLRTPLIGGSGASQTKPQIISSVGNPGDGTTKDSAVSIYIYSCG

SEQ ID NO: 3859 - DNA, 3408 bp, DROSOPHILA
cagagcacatttgtcttgaagtcgtagttttctcctggaaaagcgccggagaagatttcgacaggcacatcactaaggtgttaagcagtccagtcgcctaagatatacaaaaccaatttgatcattgatattcgaaaaataaatcgtatatgtgtaatttacattgaatttactggtgtccctcgaaaatggattatttatgtaatggacttttagtggatatatatatggtcaaagctgttaactccgttcatcgccttagtaatgcgaaaatggttggtcataatctttatgtgtatatcgatggaatgcgacggggaaagtcagaaatattttgcagagccgatgcagataggatgtatccgtttattatatccagacatttaacttctagtttggacacttggctatttttaaatacaataactactgatattggaagcattcgaaacggcagtctttattcaattattcaacatataattcaactccgacaaagcatgccttgttgcaagcatgcaatcatctacagtgcaccctttgacctttaaatatggaatccctagaagaattatttacggatttattaaggtttgtacgtttgtgatgtcgaggtggttaacttaacgcgtaattgaatgccaactattttagaccttatattttaattgataaaactatctcattagatgatttcaactgggcttcaagtgcattgatgagggaaactaaagattcacatattttgacaagttaaatgtgtttttaaaaaattcaatgacaacaagaaacaaggaaaacttctgcaagaccgagcttatatacccttgcagtaatcaaattaaaaaaatatatgtttaccaaatagcaaaaaatcaatgttcacaaacaatgaaaaacccaaaataataaactgaagccttaaaacgctttatgaccgaagtcaatgatagatttaaagctaaaaaacgatcaccccgaaacctgttacatatgaaagattccgttagctaggcttttatttgttaaaagacatttttaaatgttcttattaaaaacttaaataaagctctatttcaattcttcttagaattcgagactaccgcttatcttatagaactcatcctcggagcgcgaattcaatacgcacagatgtacagcctggcactgggctactccgaaatcgaagtctccaaagcgcttgaggatctcgcgagcgtcaaagctgttaccagatttatttgccttattgcggtagcggttgttcatcaccgtcatgtgcagtttaatggattcacgttcaatattgtctgtagcgcacagtgctgtagtctgaaagtgggccagacactgatccgcaaacttttgcagatccggagactcgatgcgggcatacagaatgcgagtggagcttggatcgtcgttcataatctccaggcccttaactttaatttggaaaggtattttaaggccatccagtaaacgacgacatgattccagattcttcagggcttcttggcgttcaatgtcatctagcagcacatagacgcctaaggtaagatgaatgcagcactccggagtgaaaagctccttatcgatgcctggcaactcggcctccaaaatgcatttctaggaaaattggaaataagtttttgcacaactagtttttttagctaatacctttagttccataaaacgctccttgacttctccagagtttagagccacggccaaaaagtgtgtcggtttcattttttttcgtaaagaggctacaagatggtggatttgtcgcagtgcagcgcatacttgactgcgttgcttggccttgatagtcacttcgtttgacctatcgttcggacgcggaacaaagatctctgtacgggtctcttcctctatgcggcgcttcgtagatcctttcatgccaattagtccaccgtaaaatgatctgcaaggatatgtgtcagagatatcgtcagcggttctttgtattcaacccacttggacacatgaatggaaagactaaaatcgccatttgctgactccttaatacatttgacaaccgcatcgtcctcgtcatcatcatcatcaccataaagatctggacagaagtggtcaatgtggataattaaaaatctacaatatccacttacccggctcttcgtaggctttgtactctagtttattccgttggttttgaccattccacttgtcgccaccgaagtcgtcgtgaacaacgttgactctatagcgccgattctggctcatcttttggacaggaggtgataacacttcgcggctcatggtgatcaaaaatatttaggactcttttataattacggcgatatccaaaatcaaatgtacttcattaaatgatagacaagccgggaatgactactatgcactttggtatattaggaaacactttaaaaaatactagacttgaataagtaatagtgatggcagctacttatttaagtattaaaaacatttatatgggatgaaatatttgttcttaatttcataacaaaatgtacacgttattttataccaaacattatatagagtgggtgtacgaggaaatctgtcttggatcatgttagatgtttaaataaattaattgtaccataataaaaatctgagactaaataattatgaagaattattatatttatatcagaaacatatccaaagtcaagcaattatatattgaaaactacgcagaatacgatgatccaaaatgtgttaccaattgaaattcttataatcgatagtatcgtgtcacggcacccacaacacacgaaccgcccatccctaaaccaatttgagtttccccaatttgacagccaaaatttagttggtttcatctgaaaaagcaaattaactgagaaatactaccgaaaatgtcgcagcgataaggtgaaataggcacctgtccgcccaaaaggggaagcaagcagcggatagcgtcaaaaagcgtttgttaacagcttgcgaagtcagtgaatcactaaaagataaagacattgaattggccagtggagcgaccgctggaggagcacccacaattgcagacccatcgatcgcccctaatccgctccagctccaggtggaggtgacaccaacgccccgagacacacgcgcccttgccgaagtggtggcccacataaatagaatgggtaacgacgatcatcgacggcggaagacaccctgcggattttgtatggcagtcttcaaatggataccagtgctatttatcaccgcggtaatagcttggtcctattacgcttatgtggtggagctatgcatccgtgagttgtatttacagtcatgtaggggggggatataacctgatgtttcctttttcaggcaactcggagaaccgcattggtatgatcttcatgcttctgt

SEQ ID NO: 3860 - DNA, 1252 bp, DROSOPHILA
accaaagtgcatagtagtcattcccggcttgtctatcatttaatgaagtacatttgattttggatatcgccgtaattataaaagagtcctaaatatttttgatcaccatgagccgcgaagtgttatcacctcctgtccaaaagatgagccagaatcggcgctatagagtcaacgttgttcacgacgacttcggtggcgacaagtggaatggtcaaaaccaacggaataaactagagtacaaagcctacgaagagccggatctttatggtgatgatgatgatgacgaggacgatgcggttgtcaaatgtattaaggagtcagcaaatggcgattttagtctttccattcatgtgtccaaatcattttacggtggactaattggcatgaaaggatctacgaagcgccgcatagaggaagagacccgtacagagatctttgttccgcgtccgaacgataggtcaaacgaagtgactatcaaggccaagcaacgcagtcaagtatgcgctgcactgcgacaaatccaccatcttgtagcctctttacgaaaaaaaatgaaaccgacacactttttggccgtggctctaaactctggagaagtcaaggagcgttttatggaactaaagaaatgcattttggaggccgagttgccaggcatcgataaggagcttttcactccggagtgctgcattcatcttaccttaggcgtctatgtgctgctagatgacattgaacgccaagaagccctgaagaatctggaatcatgtcgtcgtttactggatggccttaaaatacctttccaaattaaagttaagggcctggagattatgaacgacgatccaagctccactcgcattctgtatgcccgcatcgagtctccggatctgcaaaagtttgcggatcagtgtctggcccactttcagactacagcactgtgcgctacagacaatattgaacgtgaatccattaaactgcacatgacggtgatgaacaaccgctaccgcaataaggcaaataaatctggtaacagctttgacgctcgcgagatcctcaagcgctttggagacttcgatttcggagtagcccagtgccaggctgtacatctgtgcgtattgaattcgcgctccgaggatgagttctataagataagcggtagtctcgaattctaagaagaattgaaatagagctttatttaagtttttaataagaacatttaaaaatgtcttttaacaaataaaagcctagctaacggaat

SEQ ID NO: 3861 - protein, 352 aa, DROSOPHILA
MSREVLSPPVQKMSQNRRYRVNVVHDDFGGDKWNGQNQRNKLEYKAYEEPDLYGDDDDDEDDAVVKCIKESANGDFSLSIHVSKSFYGGLIGMKGSTKRRIEEETRTEIFVPRPNDRSNEVTIKAKQRSQVCAALRQIHHLVASLRKKMKPTHFLAVALNSGEVKERFMELKKCILEAELPGIDKELFTPECCIHLTLGVYVLLDDIERQEALKNLESCRRLLDGLKIPFQIKVKGLEIMNDDPSSTRILYARIESPDLQKFADQCLAHFQTTALCATDNIERESIKLHMTVMNNRYRNKANKSGNSFDAREILKRFGDFDFGVAQCQAVHLCVLNSRSEDEFYKISGSLEF

SEQ ID NO: 3862 - DNA, 3861 bp, DROSOPHILA
gatatttccatgagtaaacttatgtttgagttgcttttgcattctgtattgcacattctgaagctatctaaacgagacttaaccacgatccttgttttgcaggccaaggcccaggctgccattgccgtggaggtcgccgaagcgttagtcaaggctgccgaatagacgtaatcaccacacaaccgccaccaataaaccacaatcgatgctttgtgtctgaaataaataaaaaacataacgatcaccttaaaaagccagagagttatgaaacaataaaaaagcgaatcataatatcgtattaatgacccgtgatccaccaggcaaatgatttttttttcttttttttttcatgttatgccgctaaactgtgtgtttatatagtttataatatatgtatgtgagctggtgaagagaaatgtgtaatatttgctcgctgtgggatagaccgttgatatgataatgctttggcaatctttaagtcaaaaatatgagtgatttgcattttggccgaaagagacgaacgtcgtttctttttcccttgccaatttatgcaaatcgcataagcataaaaacttacaatttgtaaatgagctcgtctttcatcttaacaaatagtatagtttgtatttcatctggtgtgttgcattcatggatagttcgcatatcttatctcggatgattgtttaaatttctctcaaaagtagtaataaaaagcaactttgttttttttttatggaaacaagaattaatcaatggctaaaattatacttttggcagatagaagataatccattttgaaactctttataaagatgataaatactatagaattgaaaaaagaaaattggattttttttttttggaattgtctatgtatttggtaacaaaaaaatgtgttgtaaaaaaaatgtcttaaattaactcatggcgttgtgtgggaatggtaatatgctgtcgatgtagttagcaggaaggtcctccgatagattggcgaattgttctagtatcccggtgggccgtaggtctgggcaggggcgtgaccgatgggcagggactgctcctcgggagcaaaaacgggtgcaggagcgggatgtggcacactcaggacgggagcgggtgctggggcggcatagactggagctggggcaggagcggagtaaactggagcgggagcaggagcggagtaagctggagcgggagcaggtgcggagtacactggagcgggagcaggagcagagtacacaggagctggggcaggagcggagtacactggagcgggagcaggtgcggagtacacaggagcgggagcaggagcagcataaactggagccggagctggagcagcataaactggagccggagcagcgatctcctgaggaggcaggtaggaagcgactggagcagccactggtgcgggcacatcgatgggggcataggctggaccggcagctggagcggagtgctcatggatcacacgcaccaccttggtggctccacccgaagagtaaccaccggaggagtagccacccgacgagtagccacccgacgagatgccgctgtcgtggctctcgtgaacgaccttgatgacctgggacacggcaccgccgccaaccgaagagccgccgatgaaggatggtccagccacgggtccagatgccacattcaccaccttgacaatctgcggagcgctctcgaccagcggggcactcacaatgggtgcggattcctgcaggatcttgatcaccttgacggaggagggggcgggcccagctggaggcagataagcgggtccaggagcgggtccatagccaccgccgctgccgccagagatgaccttcaccttgaagatctggggagccgcctcgtagccatagccgctgccatagctagcgccggaggagtagccaacgccgccctgctgatggatcaccttgaccacctggactgggccactgggtccatggccgccatagccgcgagcgccactaccaccgccgccgcctccgttgccaccaccgcctccgaggttaaggccgccaccaccgcctccaccgccgccaccgccgaggagtcccaggaagccagcgttggccacagcgaacagagcacacatgcaaacgaagacctggaaggatggcagagtataagaagcgatttagtttcatgtttcatgttgcatccttagaggattttaaagaatatataaagttcattaagtttttgttatgttttccaattagaaagtagagttttatcgctggtttttttttctatatctttaaaggatctttgatcttcatagactgtattttccaaatggatatactttgtattcattctttgtttaaatattttcattttcaatcttctgatattcttcagcacactttgtatttgaatattaactatcacttcttcgaaagttcgaaagaatttaaactgagctcaggatgctcttgccactttgtcacttttcaaatcagtttggataaataaaaaaaaaaaaactagaagaggatatttgccggcacaggacattgtgagcagctcaccttcatgctgactactaatccacttgatgcgatgataccaattccaaaaaaaaaaaaacgccttgagtgccgatgagcaagcgactgatgtccgatcgattggagaccaagtcttttatacgatataagccagcaagggcgaacaaaaggcgtttcattaacatttccaaactgcccatcaacgccatcatcatcatcgccacgatgatgagcagcatcatgatgatgggctttcgttttcatttcgattttcaccaaatgctgctggacgcacccaaaagtgccaatcgtcgtggttggttcttccatagccagttggattcggagctaccagctaccagctaccagctaccagctaccagctaccagctaccagtttcagtttcatcaagtcttacgctgcatttcccaaattccgaatggggatcccacaattagcatgaaaatgagacgctacgttagtgataagctcggaatggggctttcatatttcgtatttttttttttattcggcatcttatgttttatggtttaggttttcgttttcattttgattttgatttcgatttggattttggattttggtcaattcaatttgcatacacgggcgtgctgcaaagcggttgcctcacaaggcggccggcagtctgtcataaaccaaagcgaaaacctaacccaacccaacccaatccaatccaatcgaaaccaaaccaacccattccatttcacctcatccggcaatttcaaggtgaatctgaatcggaatctgttgtcaagccgaaccatctcattgatggtggctatattccatctatatgcaggtatttataaaacgagccgattattatgcaagccaccagtcgcatcttcgagccatgtaaaacgcattatgttggcccaataggccaaagatgttgtaaaattggccaacggttcggatcagtgatatctgttggcgcattttaaatagccactaagtattacatacttacaacaataaacatatgtttatttacacaaatattcaacataatcaactgatgtgcatatatatatatatccatttagaatcatatttctactcagtttataacaattttataaaatactatcaaattgttcaaattggttatgcttttcggttaagaaacgtattaatttataccaaaaaaaaaagagattttcagtgggcagatcagattggtgggaaatcaagtaatatccaagaaatggttggctaacctgcactctgccactaatcgtgattatgatcttgtcgcggtctattatggtttgttaattgatccat

SEQ ID NO: 3863 - DNA, 1434 bp, DROSOPHILA
atggaagaaccaaccacgacgattggcacttttgggtgcgtccagcagcatttggtgaaaatcgaaatgaaaacgaaagcccatcatcatgatgctgctcatcatcgtggcgatgatgatgatggcgttgatgggcagtttggaaatgttaatgaaacgccttttgttcgcccttgctggcttatatcgtataaaagacttggtctccaatcgatcggacatcagtcgcttgctcatcggcactcaaggcgtttttttttttttggaattggtatcatcgcatcaagtggattagtagtcagcatgaaggtcttcgtttgcatgtgtgctctgttcgctgtggccaacgctggcttcctgggactcctcggcggtggcggcggtggaggcggtggtggcggccttaacctcggaggcggtggtggcaacggaggcggcggcggtggtagtggcgctcgcggctatggcggccatggacccagtggcccagtccaggtggtcaaggtgatccatcagcagggcggcgttggctactcctccggcgctagctatggcagcggctatggctacgaggcggctccccagatcttcaaggtgaaggtcatctctggcggcagcggcggtggctatggacccgctcctggacccgcttatctgcctccagctgggcccgccccctcctccgtcaaggtgatcaagatcctgcaggaatccgcacccattgtgagtgccccgctggtcgagagcgctccgcagattgtcaaggtggtgaatgtggcatctggacccgtggctggaccatccttcatcggcggctcttcggttggcggcggtgccgtgtcccaggtcatcaaggtcgttcacgagagccacgacagcggcatctcgtcgggtggctactcgtcgggtggctactcctccggtggttactcttcgggtggagccaccaaggtggtgcgtgtgatccatgagcactccgctccagctgccggtccagcctatgcccccatcgatgtgcccgcaccagtggctgctccagtcgcttcctacctgcctcctcaggagatcgctgctccggctccagtttatgctgctccagctccggctccagtttatgctgctcctgctcccgctcctgtgtactccgcacctgctcccgctccagtgtactccgctcctgccccagctcctgtgtactctgctcctgctcccgctccagtgtactccgcacctgctcccgctccagcttactccgctcctgctcccgctccagtttactccgctcctgccccagctccagtctatgccgccccagcacccgctcccgtcctgagtgtgccacatcccgctcctgcacccgtttttgctcccgaggagcagtccctgcccatcggtcacgcccctgcccagacctacggcccaccgggatactag

SEQ ID NO: 3864 - protein, 477 aa, DROSOPHILA
MEEPTTTIGTFGCVQQHLVKIEMKTKAHHHDAAHHRGDDDDGVDGQFGNVNETPFVRPCWLISYKRLGLQSIGHQSLAHRHSRRFFFFGIGIIASSGLVVSMKVFVCMCALFAVANAGFLGLLGGGGGGGGGGGLNLGGGGGNGGGGGGSGARGYGGHGPSGPVQVVKVIHQQGGVGYSSGASYGSGYGYEAAPQIFKVKVISGGSGGGYGPAPGPAYLPPAGPAPSSVKVIKILQESAPIVSAPLVESAPQIVKVVNVASGPVAGPSFIGGSSVGGGAVSQVIKVVHESHDSGISSGGYSSGGYSSGGYSSGGATKVVRVIHEHSAPAAGPAYAPIDVPAPVAAPVASYLPPQEIAAPAPVYAAPAPAPVYAAPAPAPVYSAPAPAPVYSAPAPAPVYSAPAPAPVYSAPAPAPAYSAPAPAPVYSAPAPAPVYAAPAPAPVLSVPHPAPAPVFAPEEQSLPIGHAPAQTYGPPGY

SEQ ID NO: 3865 - DNA, 3562 bp, DROSOPHILA
gccacggcagccaattcccgttggaccgccgcattgttgtgttggcatttggggacagatttatcaccagatttccgcggtacagcaggagcagtagcagcaggagcaggaggagctgcagcaggaggagcagaagcaatagagacttgcgtaattgcagactccatgtggttgatctccttcgactgtgccttatgtgcagagcccagcagcttaatgttcttgcgcgactgggtcacctcgacggaagatggctccttcttcctttccgccgggctcgtggtcggttgcttggcacttgttgtcctgcgggagggaattggatgagttgaacactggtgattcgccaaaatatgtgtggttgggctgggttaagtggggctgctctcatgttactaatattacacttaactaaagacacacttagaatattgaatattcacatcctcataccacacagacaggaatatgttgttaacctaataacaataatattaatattatatgtttcttaagacatatttactgctagtttattgtattttcaatttaaactattgtgataaaataaaatttgtggtttgaaatgatgaaaactgactgagatgcacataaatgtggttcacaaagaaagaggtccttggacatgaagaatttttagaggatgataactattaagcttagtattctattgactatggccctttttgaggcgcatgcgatgtgcctttcggtgcatggaacgatgcagtcgctccttcactgggcgctgaactgttatggattccacggattccttccgctccttgaatgtctcctgctgtaggtgattggatgtgctggtgactttggtgatggctcgatgcaatctgaaagaggggacgagcagctagaatagctcctccactagccatcgccccacaaacgactaaaccagccctctaccgcttccccccaacaaccgtcccagcccaagcccccaaagatccccgagagcagctcacctggcttgcttcgtgactcgcacgggttttggcaactcgtcccgattgctggatggcgtggaattgctgaccgtgcggttactgcaactcgtctcccggtcaatcagttcatacagactgttgcgatactggtccacgtcgtagcgcacatgatctttcagcggcggcacgacgtccatgtgaagatccatctccgccgacgcgtactggaagcgactcacataaggatgccttatggcctccttggctgtcagccggttatgcggattcagcaccagcagggccttcaccagcgaaataccgtcgtcgcagcagttcttcatcatttcgtccagcgaatagcggcgatcgcgttggatattcctgctcagcaggacgctgccgaagctgggtccaatcgaagcgatgtccagctttgtcacattcggcagggaagtcacaatcttctcaatctgaagcaaatatatatgtatgtaaatttaaacctataactatgaaatggtatatagatactctgctacctgattgacagtgctagtgccttggaataggggcttctgcctgatcatctcgcccaggatgcagcccaggccccacatatcgattcccttggtgtagctggtaaaaggtaaaaggcaaagggatatgctagtgtctcagtaagttcatgcaagctaaacaaagcacccacttgcgactggccaccagaatttcgggggcgcgataccaacgcgtggcaacataatcagtcagcatgccgtcctgttccaaatcatcatagatgcgtctcgaggagagggttctggccagcccaaaatcagccactttgagcctgcaaatagggcaatgtccatagatggaaatggagtccactgatgttactgaattactgaattgtcagtggaatattacctgcatttgctgtcgatcaggatgttgctgggtttcaggtccctatggatgacgttgcccgagtgaataaacttaatcgcattgatcagctgatacataacgaatcgcttgtgaacgtccttgaggacattgccccgcttgatcacattgtgcagatcgctctccatgaactcgaacaccaaataaaagtccaagttgttggaggccctgaagagaatgcacattatatacacgcattttagaaaacaaaaaaatatcgaaagaacttacttaaagatatccaccagccgaacgatgttgggatggcagcgaaaggcccgcaggaatataacttcacggtaggtgcgctgggcatcggtttcgtcgcggaaggcatcaaagaccttcttcagggccaccgtgttctttgtacgcctgtcagtggccttccagacgatgccataggcacccttacccatgcgctgcgaaagacaaagaagttattaatcgtttcgacctatgatcacttgacttcaatttagtataattttccgttctccgaacgaactttttgacttacctttcgcacatcgaaaatgctttccacagtttggtccagctcttgaatgcgtcgctcttgagcgtgggcagtttgatagttggccatcgtagcttgctccttttcacctgtgccctttgcttatccttatccctatccctattcctatccctatccgtgccccttaaccttgtgacctcttttgcttattgggatgctgggacttatccggcagttggtttctagttggcccggttgcgactctggcagagccccgagaactccagccccacgtggcagcttcgctatggacgatcagagtggagtgcgaaatttatcagttagctggcattcactgtggcgctgttgctgttgcgcgtggatgtggcagtggcagtggcgcccgagtggttttgcggctccaactggagcatcaggggccctcgtcctcgcgtgcttgctcccatatgcaaacggcatcaagtatgtcaaataaaatgaaacgccaacaaaaagcagtgcaaaagtgcacagtgaaagaataaaatcgaaatgtatgagataaagttaatgaattaaattcacacagcatagtacattttaattattcaagagatccagtctttaagatattcaaaatatttgaaacatttctgtattactttttgattaaagctcatcattagccaaagtatatacatatgtatgtctgtatatactcctatactaacaaagatatttcgatcattggattggaataaaagggataatggctttttctctctctgcatgcaagtgcaccggaaacggaacaacggccataacgggagcacaaataaaaagcgggaaaaaatagcaagcgaataaataaatcgcgaggcggacctgattgaaaccgaattattgttagatcgatcgcgggcagaaggcgaaagcgaaaacgagacccccaattggatggcctggcaatgcctacagtggaccctcaagtgcccacggcaacgtcatgtaacaatgctcggctgcacagtgagcactcgctgcagagaacaatgcgtaaagctcttggatgcttcaactctcatttataacgcgatttataagtgtt

SEQ ID NO: 3866 - DNA, 1179 bp, DROSOPHILA
atggccaactatcaaactgcccacgctcaagagcgacgcattcaagagctggaccaaactgtggaaagcattttcgatgtgcgaaagcgcatgggtaagggtgcctatggcatcgtctggaaggccactgacaggcgtacaaagaacacggtggccctgaagaaggtctttgatgccttccgcgacgaaaccgatgcccagcgcacctaccgtgaagttatattcctgcgggcctttcgctgccatcccaacatcgttcggctggtggatatctttaaggcctccaacaacttggacttttatttggtgttcgagttcatggagagcgatctgcacaatgtgatcaagcggggcaatgtcctcaaggacgttcacaagcgattcgttatgtatcagctgatcaatgcgattaagtttattcactcgggcaacgtcatccatagggacctgaaacccagcaacatcctgatcgacagcaaatgcaggctcaaagtggctgattttgggctggccagaaccctctcctcgagacgcatctatgatgatttggaacaggacggcatgctgactgattatgttgccacgcgttggtatcgcgcccccgaaattctggtggccagtcgcaactacaccaagggaatcgatatgtggggcctgggctgcatcctgggcgagatgatcaggcagaagcccctattccaaggcactagcactgtcaatcagattgagaagattgtgacttccctgccgaatgtgacaaagctggacatcgcttcgattggacccagcttcggcagcgtcctgctgagcaggaatatccaacgcgatcgccgctattcgctggacgaaatgatgaagaactgctgcgacgacggtatttcgctggtgaaggccctgctggtgctgaatccgcataaccggctgacagccaaggaggccataaggcatccttatgtgagtcgcttccagtacgcgtcggcggagatggatcttcacatggacgtcgtgccgccgctgaaagatcatgtgcgctacgacgtggaccagtatcgcaacagtctgtatgaactgattgaccgggagacgagttgcagtaaccgcacggtcagcaattccacgccatccagcaatcgggacgagttgccaaaacccgtgcgagtcacgaagcaagccaggtga

SEQ ID NO: 3867 - protein, 392 aa, DROSOPHILA
MANYQTAHAQERRIQELDQTVESIFDVRKRMGKGAYGIVWKATDRRTKNTVALKKVFDAFRDETDAQRTYREVIFLRAFRCHPNIVRLVDIFKASNNLDFYLVFEFMESDLHNVIKRGNVLKDVHKRFVMYQLINAIKFIHSGNVIHRDLKPSNILIDSKCRLKVADFGLARTLSSRRIYDDLEQDGMLTDYVATRWYRAPEILVASRNYTKGIDMWGLGCILGEMIRQKPLFQGTSTVNQIEKIVTSLPNVTKLDIASIGPSFGSVLLSRNIQRDRRYSLDEMMKNCCDDGISLVKALLVLNPHNRLTAKEAIRHPYVSRFQYASAEMDLHMDVVPPLKDHVRYDVDQYRNSLYELIDRETSCSNRTVSNSTPSSNRDELPKPVRVTKQAR

SEQ ID NO: 3868 - DNA, 3715 bp, DROSOPHILA
ggtgatctgtgcaggaatctcgtgctgttagcaatggagctactaacacgacagctactcaccagcgaggagagcacaaatccggcgcccaggatgtacacggtctgtgagaactgctgcacgaaggctccgtagacgaggcccacaattccgaagaacgtgatgatgaagcgcgaccagcgctccgcctttccctgacccgcgaagtcctgcggcggtagagtgccgtgttagtgttatgtgctaatggttgcgaagcatacctaccatatgcgtctggatgtccaacattttgtgcaattcacaagctgcgattcaacaattttcggcgtaaacaattttcttttgcggcacgtcagcagccgaatggtgtgaccgtgccgagcgaaaaatgccaaggggatgagaatatactggaatttggaactcggtgaatttcccattatttttgtacatgcttatttccctctttttcaaaataagtgtgtttgaaaaatagcgaaattgtttgtagctttcaattgtgttttattattttaaatttaaaatatgcaaacaaaacggagattattactctctaaatgatgttttcctttgcagagtaagctcttgaaacaaaataaataagttcagttcaccttttcttatgcaaaatatgtaaaataagtttatagaaggcaaaaatgttgcatctttaaatgatttatataattttaaaccacgccaattaatgcaaactaatagcccatttaaaatacttaacttcatttacatatatgtatgcatgcatatctttaatgcaattatagtcattttattgaaaaggcttgcgatgtgaataatcgctcgttgttcatacatatgtatattatttgtacaatgcgttcataacgtggacgttctggcttgtgtgtcactataactaactaaataagttaaaaggcgaacaggtggaatgtaaagtgtagaggacctcgcgcctcccgattcatggcaggactcagaccctggcggccttcgtgcgccgcagctggacgacattgatcacgcagacgagcagccatgcgagcagtgcgatccaggcaaagaccagggtgaagtacaggcaggcggccgtattgatgcgcccgtagcgtcgccgctcgtacgacacgctctccaccagatagtccatgaagtcgaagacggcggcgcacgagagccgcgacttgatcacgggcacaatgttgcccacgccctggatctccttcagcagcgactccctgtactgcttgcaagtcacctcgaagccatccgtgaacacggccgagtagaccagttggtagacggccattattgtcgagatgacggtggcgggcagccctaaattagttaagtattacacatttgtacatagttaagttcggagacgatggacactcacagtagtagggcgagagaccatcgggcgtgagttccgactcggtggtcaccacgatcatgtcaccggagctgcaagcagagagcagagaggcgtaagcaaacagttgatgctgctccaagttggagcccatgatggcattactcatagccagacagacgaacgagtgtggctggccgattaaccccattgacccgccgacactcgatcgcgatcgcccgctcttaccgctgacggatggtggccgtgcccgccttgggcttgccccgaccgatgcacatgcggtagccgtggtagacgcccaggacgacggcgaagagcagcggcagcagcaggccgtaggtggcgaagtggcagtaggcgacgttgccgccctcgaagctgtggaacgtgctcttgccgtgcagcacgcagccgcaattggtgtccgggcaggcattgagcacgtactgccagtgtgtccaggccaccgccgaggtgatgcagcagaccagcgatgaaacgatggccagcgggtagagtagggacagggctcgctccgcgtagtacgacatcgtgcgaatggtatctgctcgcaggagtatctgaaataagcggacaagtgaatagtgaatagaatatgggtatctttgatccccagccaggtcaagttgatcttaattcaactttaaagtacttatggtaatgggcagtcaagttaattaattggccacttttcgagcgctctaattgctcatctaattgtaattatgcccaattcgttcaagatgattgcttaaacgcaattgtgggtttcgttttacatttcctcaaatggagaaagaacattattactagctgttcaaatttaacagcaattttgagtttgtaacgaagcttttttctaagaagttactaacaattgttagcttatctgattagtttaaaaaactcctttttttgacgatagtgagcatctcttgaaatttaaaatcgataactttgcaacaacaacaactctttgggcgtcccttaacacacacacacactgtcgcacctgcccaaacacacacacatagaacaggttgcaacgcgcactgtaccagatataaacaaactataatgtttgcagctaccactttcgatgtccctttaagcagctgaatttcggttgcgcaaagcgtttagttgttcgctaatgctgtttctatatcacatttctcacagaattcagggataaacaggaaaactgcactgctgacacatacacgcacacaggcgcactgcaggcacacctacgtttatcgatatcgataggcgggcgaccgaagaagcgaccgaacggttgagcggcgaagaaacgactgaacgaccgtcgtttcgccactgcgttctgatcagaacgggccgctagtgctaacgcttttagccgtctggcaacgccgatcaccaaaattcaaatgggatttccgttacaagtgatctgtgtttaaaattttatttttgattattacaagttttatttaaactaaagcgcagtaactagacagtatttcatgactatgtgtttgagttatgttagaagtaaatttcccgagaactgggcctaatcaattttcctaataacttggagcgcatttgccaactaagcgaattccctgcacccactgtgagcgtataaaatcgctgtttgccggggtgaaaagcattagttctcccagtaaatccaatcatggcatccccagtagtcagcctgcttctcgtcgggatctgcgccctggcctttgtccatgtggctcggtcggaatgctgcacctcccgggagctggtggaattcaagatggacagaggcgactgcgaggctgtgcgtgcaatcgaaaactatcccaacggctgcgaagtgacgatctgcgccgatggtgttgcccagttgggcgcctactgcggccagggatcgtgcaacatcttcggctgcaactgcgacggcggctgtctgagcggcgattggtcacaggaatttgtgaggaggaaccagcagtacggaatccagatcatcaaagtcaccaggctgccattttaaccccttgcatcacataaacaataaagagaagctttaattgcatccagaaattactaattaattatgtgtattttattttatatatgcatgaaattgataaggttcccactttctaatcaaatgtaaacagttcaatctgattactaggaactattcttatttttaatcttgaattccattaattacgctattaactaaaactattatactaaaaaaaaaacaactatcatcaaaat

SEQ ID NO: 3869 - DNA, 999 bp, DROSOPHILA
tatcgatatcgataaacgtaggtgtgcctgcagtgcgcctgtgtgcgtgtatgtgtcagcagtgcagttttcctgtttatccctgaattctgtgagaaatgtgatatagaaacagcattagcgaacaactaaacgctttgcgcaaccgaaattcagctgcttaaagggacatcgaaagtggtagctgcaaacattatagtttgtttatatctgatactcctgcgagcagataccattcgcacgatgtcgtactacgcggagcgagccctgtccctactctacccgctggccatcgtttcatcgctggtctgctgcatcacctcggcggtggcctggacacactggcagtacgtgctcaatgcctgcccggacaccaattgcggctgcgtgctgcacggcaagagcacgttccacagcttcgagggcggcaacgtcgcctactgccacttcgccacctacggcctgctgctgccgctgctcttcgccgtcgtcctgggcgtctaccacggctaccgcatgtgcatcggtcggggcaagcccaaggcgggcacggccaccatccgtcagcgctccggtgacatgatcgtggtgaccaccgagtcggaactcacgcccgatggtctctcgccctactactggctgcccgccaccgtcatctcgacaataatggccgtctaccaactggtctactcggccgtgttcacggatggcttcgaggtgacttgcaagcagtacagggagtcgctgctgaaggagatccagggcgtgggcaacattgtgcccgtgatcaagtcgcggctctcgtgcgccgccgtcttcgacttcatggactatctggtggagagcgtgtcgtacgagcggcgacgctacgggcgcatcaatacggccgcctgcctgtacttcaccctggtctttgcctggatcgcactgctcgcatggctgctcgtctgcgtgatcaatgtcgtccagctgcggcgcacgaaggccgccagggtctga

SEQ ID NO: 3870 - protein, 251 aa, DROSOPHILA
MSYYAERALSLLYPLAIVSSLVCCITSAVAWTHWQYVLNACPDTNCGCVLHGKSTFHSFEGGNVAYCHFATYGLLLPLLFAVVLGVYHGYRMCIGRGKPKAGTATIRQRSGDMIVVTTESELTPDGLSPYYWLPATVISTIMAVYQLVYSAVFTDGFEVTCKQYRESLLKEIQGVGNIVPVIKSRLSCAAVFDFMDYLVESVSYERRRYGRINTAACLYFTLVFAWIALLAWLLVCVINVVQLRRTKAARV

SEQ ID NO: 3871 - DNA, 2948 bp, DROSOPHILA
aaacacaacaaacatccccgacggactcggtgttcgtattcgccatgccatgtctactgcaaatcactttgcaataatcataaacgaatggattcgcggcgcgtataagtattttgtttttttttttatttgggcctttacagtgctgacatcatctcgccgacgtcgctgcgatcgggcggggttattgaatcttaacaaaaagtggaaaatgggcgaactcgagtaattataattacatttaaggagcttaagccctgttgtttctgtctcaaaaaaaaaaaagaaactttgcgcacacagacgatttcaagtgatttcaatttgctatcccaatggaaatcgatggagccacgtttcccttaaatggaattcaactacattcaatctaatctaataaatttatataaaactaaattccagtcaaagaatgtgaatacacttgaacaccaaccacatttttagatcattaaaaaatataaatagatggataaatatttcagcaataaattcagtcataaatacaaacctcgaattcaaaattaagaaacccctctgccataatcggagtttaacgaaacttgacccaaaaactcccccggacaaataaacggcacactgctcgtaatttgccaaatccccggcgattcacacgagccaaagccatcgagtctcttgcctcttgtcttcccgcacaacggaaatgaatcgtatgcaaagtgagtgagtgccgggagtgggaacccaaatcgaaatgatgtaccgccatcgggttacatcacttttgggcacaacaggcgacaaagaagaggggctgggctcggtcgaatgcacgacgccgatgtcgatgacaacatgctttgcatatgaagagggagcccggggttcaagaaaccaataaacggagtgtaaagttaatttccaaagagctcttaatcgaatagtttaaagcaaaagcattgtgctgggcagcagttccattgtttccctcgcttcttctttatttacaacttgcggcttgtttcacaataatcactaaagagcactcgttgcactccacaatcacttcgggtgactcatcatcgtctgcgggtccatcgaacagatactgaccgccgcatcggcagtcgtacgcgtagctccacattgtcgccggccctttgttcgcctcggattctgattctgattcagatgcttggcagggaggtggagctgaaggtgccggtgcctcgtcgtcatcttcttcgatttccacttggatccgctgcatttcactcaacacaacggtggcgtagatgttgctatgcgcccggaatttcgactgcagcagttcggcgtcgtagtgcttgcgcctaatgggatctttcagcgtgttccacgccgcgtttatcgcattgaagtcactgttctgggcctccgatcccggatttgggtcatcgagctgtcgcaatttgtcgggatgacattgtagtatcaattgtttgtagctgcacttgatctcatcgaaactggccgtggatggcacattcaagagttcatagaagtcgggcatctggaaaagggatattcgtgaagtatttgtattgaaatcataaaaatctttgtacttacgttaagtctaaagggtcaactatcacatatcacatagcatatgatttataagatgtcatcccactttaacactttatttgcaattaatttttaaaaaccagacacattttcactatttagcatgtttatattttatgtagtagtacaaaagagctttgatcaacatgtgtatcactaattaagccaagttatattaaagttaatctcgtaactggtttttgtgagactcacttatctgaatactaagtttatgcaactgataataaaaatcttgaatgtcgtcttcgattttatttaaaaacaaattaattaaaacaaatttgcaatttgtttattcttgattctccgtacaaaaaaaatgtgcaattaaagagcagggcgtttaccaacactaaggttctaatgtccataaaacagctgtttcttgtttacatggaacgcgacgctctgttgaataaacagttaatttaatcaatatgaaaacggcacccctatttacgcacacagtcacactcatacacatacagacacacatgccgcttttgttactggaaaaacggaaatgtccccaggaaaggagtgtttttgtgtagagcgtgtattttattcttgtgttgctaggtggcgataaacataaatgtccccacaaatggaaaatgcatcgcatgtccgccggtcaaaattttctaccccgtccgtagatgccgatccccaatcctcaatagccataaaagagaaaagtcggacatattgtcaaaagtcaggccccaattgcacttggagagccgaaaacaaggtcaacaaactggttagcagcagcagtcaaaaaaaaaagaaaaaaaacagccatattaactcgaacagcgaatgtgccatcgcttacgctgacccaatttcgaaattagcgaaaaaggaaagggacaaacaacttgccccggtacaggaactccgcgctaattaattaatggcagaacatcaaacaagggcatctaatttagaacgccgctcgctgcaactcggaacttgccttataaggtgagacggctttcctgctcccagatcacgtgtggaaatctcttgttgctccgtcgatttgtttattaagtgagaacaccgttgttttgtgggggtggcagggtgggagcggtaggcacgacccactcgctttcagaactttttcagtctcttcctctcagcacttttttcgaacgccgaagcacacgccttgcactcgcccgcaaatagcaaatgtcgtcatgtgaagctgtattccgtcagcacttaactcgcgtcttctatctactgcctctctttcgtttaaaaagcgcgtttagcgt

SEQ ID NO: 3872 - DNA, 889 bp, DROSOPHILA
gaataaacaaattgcaaatttgttttaattaatttgtttttaaataaaatcgaagacgacattcaagatttttattatcagttgcataaacttagtattcagataagtgagtctcacaaaaaccagttacgagattaactttaatataacttggcttaattagtgatacacatgttgatcaaagctcttttgtactactacataaaatataaacatgctaaatagtgaaaatgtgtctggtttttaaaaattaattgcaaataaagtgttaaagtgggatgacatcttataaatcatatgctatgtgatatgtgatagttgaccctttagacttaacatgcccgacttctatgaactcttgaatgtgccatccacggccagtttcgatgagatcaagtgcagctacaaacaattgatactacaatgtcatcccgacaaattgcgacagctcgatgacccaaatccgggatcggaggcccagaacagtgacttcaatgcgataaacgcggcgtggaacacgctgaaagatcccattaggcgcaagcactacgacgccgaactgctgcagtcgaaattccgggcgcatagcaacatctacgccaccgttgtgttgagtgaaatgcagcggatccaagtggaaatcgaagaagatgacgacgaggcaccggcaccttcagctccacctccctgccaagcatctgaatcagaatcagaatccgaggcgaacaaagggccggcgacaatgtggagctacgcgtacgactgccgatgcggcggtcagtatctgttcgatggacccgcagacgatgatgagtcacccgaagtgattgtggagtgcaacgagtgctctttagtgattattgtgaaacaagccgcaagttgtaaataa

SEQ ID NO: 3873 - protein, 183 aa, DROSOPHILA
MPDFYELLNVPSTASFDEIKCSYKQLILQCHPDKLRQLDDPNPGSEAQNSDFNAINAAWNTLKDPIRRKHYDAELLQSKFRAHSNIYATVVLSEMQRIQVEIEEDDDEAPAPSAPPPCQASESESESEANKGPATMWSYAYDCRCGGQYLFDGPADDDESPEVIVECNECSLVIIVKQAASCK

SEQ ID NO: 3874 - DNA, 5819 bp, DROSOPHILA
attctaaaaaccttattgcaccccatttaatagttataatcttaagcatcacggctccctgcattctgctggtcatcctggcttccgcttttggctgccataagctgcgcgtgcgcaacagtaacattaccatcgtgggacaacaactgacgcccagccagcagatcatcgcactcaatctggcgacggcaccagtgctattcctggtgggcgcgggtgcggttttgttttggacgctgggtgcttcatgcttcgtgattgctatgcatgctatattctacaacatcgatgctattgtaacggaggagaatgagggtttcctcgcccaggttgtctgaccgccagccagaagctaaaccctaggtcttctgggatcgtggcaaccagggacgaggaaaggggctaaacatattcgccactatggggccttgcaagtcgacacaatatgttgtacacctatttataacgaaatctagttaagccgcagactttaaataatcgaaatacacactatgacagattcatacgactatattctttttggcaaattaatcgcaatatatgaggcgcattcgctgagaacttcgatttaattcgaaaaaaaaaattaatttaaaggatgtggtcaagtcattggactctgtggcacttacaatatttcagatattttcgagctctttagaggcatgcgttttaaaaatgtattcttttaaataaagaataaatataagtaaccggaaaaaaatcgcatagtcggttctccaaaagaagtttccataaataagctgtttaaaatacattgaacaaacggctcaataaatcaactagaaatacaccacgatcggaattctctgcgatatgcaccacaaggaaggtaaataaagttacctaaagtacacacatatacatagctcgcgtaaaactaagtcggtatttcaatgaggtacaggtagttagaactaggaatgctttgttagctgcgtaagtcttggtccttcgcctaggcgtactgggcactcgccagtgtcttcgtctcctgctcctcgtcgctggcctgctggtccagcttctcgaatccgttgcgatcccgatcgagaagtccgcccagcttgaagccatcgcttttctcccacgcgtggcgacgaccgcgtgctccgaaaggcaggcaacctgtgggatatgttggtacaactgattaactaacaattaccatgggatttatatgagcaataacactagtcaccccattcccttcttagttcatgcatagatctgcgatctggcgtgcactggaacaaaccaaaaacgaaaacagaatacacttaaggataaacgtaaattttgtttgtatgcttatgtattttgtataaaaagttgtatataatttgtatataaatgcggtataaattttaattacaataaagttgaacgaaaagtaagccaacgaatacagaacacacaagaagtggacatgctgtgtaattaacgacaccaaaaaaagcgtaaatagggagattcaattgtggatacaaatgtaaacaggttggagcttataagtacaggacactaaatcagttaagtgtgacagcacaacacaggacattgagtgaggagttagcactaccgatcagccaagactctgggtggaagcagtcagctttcggtacaccaagtcactgggcgtagcggagctgttcgcttggttacctcgtttcctccgccgcgcaaagatcaaagccaaggcaaaggtagagccggcgaaaaggagcatgagcgaagccaccaggattgctttgccgctcgggtggtgcacagccactgcgggaacctggtcccctcccacagcttggctaatagcgctgtccctagagtccttgctggccgacaaggacattggcttggccagagatcggtggacgaacttgtggatacgcattggattcagctcggccacgtagatctcattgccgtcggctgtaacggccacgtcgtgcgggttctggaactgcaggttattggggccgaacttagacaccagttgcttgctgcgcatgcttagcacgaaaccgtgcacctcgttataatgctcaggatggatgcctaactcggcggttggtccgttgacaatgaccagctgcccacctgtagcggaaaatgaatacatttagggttgagatttgtacaaaagatgctctgttatggtaatgtgaatgataatgcaacattttaaatagatgcttaaccgtcgaaaggttcttatgacacctcatgaacaccgataccagaagaagatttatccactcacccgctgccggggtgtaagccatgctgaagaggcggtcccctatcagctggttgtggtactgtgagtgaaaggtgccgttgctcgagaggaagcactgtacgcgcccattctccctatcagctgcgcagagtaactgcaactccgggacgagagtcagagcgtggggaatcgcgaagaagttctggggcgcaacgtcgtaggatatgccggagaaggtgttctgtccccagaagaggatcaattcgccttttcgtgagtacttaaggatgcgagcattgcagtatccatccgccacgaagaagtccccattatccaacaccgccaccgaggtgggcttgcagaatttgcgtcctgaaccgggctggaaggcatcgcccagagtcaacgctggttttccatcgcctccacggggcgggaacttaaaaacctggtgcatggcgacgtctgttaaccaaacgttgtcttcggggtccacggtcaggccatgtggcatgtaaaaactgtgtgtgagatgggatttaattaggaagggcatacttataaggctgtagaagtacattgctattctagtgattacttaaatttagatatgccttcagaatttcacagccgaaattaaaatcttacaaaatacttttgactatgtgttagaacttttgaacttacaaatgcaaaatgcttttactaccgatttaatttaacttcaccagataatttaaacgaaaaatgaagtaggtattatacaaacacaaaacagcgcggccataaatgagtactgagaaaaataaagaacgatatcctagacaatcagttacccgatactcaactagtgggggttcggtggaattgtgggcagggcttaaatgtttgtggcatattgatcggacagacggaaatggccacatggactcggaagaaatgcttccttctacctgtgcctagattagatttcaacgaatgcaatacacactttgctaacctgcaaactagtatttgcaattaaataagcactggatagagctacctaaagtaccgaacaagggagttacaatttcttacaagttcttgccccagtcgtattgcactttgcctgttgcgggctccagtgccaggatggtgctctccctgatgggcccgcggtacttctcctggtactggttcctgttatcaaatgtggtctgtccccagacgcgattcacgcgatggaagattaccacgttgccggccttgtcgaaacttacagctgtcactgcacccagtttcacattgtttgccggccaggcgttctggtaaacgtaagctggggatcgagttttagtgaattacacggtgtgcatttgtaaaaatacgccaactcactgttgtttagcttggccagctcagtcttgacgttggggacagtttgcttcggaggctgtggccagttgagctgcgtggctcccgatcctgctccggatcccttgagtatctggtgcaggcgttcgttgttgttgctattgctgtccacattatgcagataacgctgtggactttgagtctgaaatgggggattgagattaagattaagcctctaggtgaagcaaaataattgccacggagcacggcgcccacgcacacatgcgaagtacacactactgcaaaatcaatatgctaaacatatgtgcgcgcactgcaaacatatgtttccttgggtcaagcagcgacttgggacttgtaaactcctcaacctggaaatgctttgtttatcgctcgggatttacctgcgacactgctggtctaatgcagagtaggaggtggaggagcaggcaacagattgccaaggacttgctgcccaggcacttggcgctgtcggtggatttcattgctttggtgtcccttcgaatgtatatatatagctgcccgaatgctggcggagatccagtccggcgtagttgtgctcgtaaacaaacgtctcgtctcgttttggaactacaaatcaacttatgacgcggccatctttgcttgcgattgagatgttatttgttcagcggcgcaggtagaatgtgtgtttacaggggctcaatgttatgcagttatgctgtgctataatgtaaccatatttggttacaagcgctctattgatattttgaatgaatgaattatcaatacgtcaaaactgattaaattgaaatgcaagcggtggtttcttacaataggaagaatattaacaggttaacagttaaatgtttcctcatacagttagcatgtaaaatgaatccctcttctatgatgcgcccctgatcgaacagctgtttaagaggcgttagtacgttttcgggtctcacttcttcacttttgtttacttccgtgtttttagcaaatctgtttgaagaaatatcatttgcaaaatgtcgcaaacagatctgaacaaaagtattgagataataaccaagaccgaggagttggccgacaaaattctggtcaacaagcaggaactgacggtaatggataaacgccgccaagaaacccggcaggcaatgcggctgatggagaagtcggaggacaagaaagtttggatcactattggcagtatgctagtcaaaatggagcgggaaaaggcattggaactgctcaaaaaaggtgggtaactgctcgtccactacatgctattattaactataatttctgacagatcaacagaaaatagaacagcaaatcaatctgatatactcagatcagaaagttctggtgaacaaacatcgcgatttggagttcaaatcgcccttctcgggtacacatcttaagcccttagaaaagaaggagttcgacgctctgaaagcaaatctcccattactgtgaaaatcttcatttaagtaaattttagtgacctaaaccttgaatgcaacatgacccaaaaaaagatccgcattagcgaggtatataaagtaaacaattttgtattaataaccttacatatgttgtttatttgctactaaattcattgcagtccaatacatatggtatacaaattggcagttaaatggctttagattccgcttagttgcctataaaaactagtgcatttgcctggaaattttttaaattaaagattttaattttttaagctggcgccaggaaagtatcgcataggaaccacaatcgatatatctccaaactgccatcgccaggtgtgaccatgctgctggctgagtgtgacccatccgctcaaagctcccgcagcacatttgttgtagcgctccgccgttgttgacttgtttcgtcgtaggctccgattggaccgatctgatcagactttgaatcgatcgcattgatttcgaaacgcagactcttaatcgcgaactagccgaatgcacaagatcaggtcgaaaacacgctgacaaattaattatatacactaaaaacctgcgaaaacgtgcgctcttacgtcggccgtgtgagtgcgtgtgtgtggtgcgctcttctctcaaccgccccccacccccttcgcccacgtttcgctcagcgcgcaaaagta

SEQ ID NO: 3875 - DNA, 2135 bp, DROSOPHILA
cctgccgggtttcttggcggcgtttatccattaccgtcagttcctgcttgttgaccagaattttgtcggccaactcctcggtcttgatttgctaaaaacacggaagtaaacaaaagtgaagaagtgagacccgaaaacgtactaacgcctcttaaacagctgttcgatcaggggcgcatcatagaagagggattcattttacatgctaactgtatgaggaaacatttaactgttaacctgttaatattcttcctattagcgcttgtaaccaaatatggttacattatagcacagcataactgcataacattgagcccctgtaaacacacattctacctgcgccgctgaacaaataacatctcaatcgcaagcaaagatggccgcgtcataagttgatttgtagttccaaaacgagacgagacgtttgtttacgagcacaactacgccggactggatctccgccagcattcgggcagctatatatatacattcgaagggacaccaaagcaatgaaatccaccgacagcgccaagtgcctgggcagcaagtccttggcaatctgttgcctgctcctccacctcctactctgcattagaccagcagtgtcgcagactcaaagtccacagcgttatctgcataatgtggacagcaatagcaacaacaacgaacgcctgcaccagatactcaagggatccggagcaggatcgggagccacgcagctcaactggccacagcctccgaagcaaactgtccccaacgtcaagactgagctggccaagctaaacaacacttacgtttaccagaacgcctggccggcaaacaatgtgaaactgggtgcagtgacagctgtaagtttcgacaaggccggcaacgtggtaatcttccatcgcgtgaatcgcgtctggggacagaccacatttgataacaggaaccagtaccaggagaagtaccgcgggcccatcagggagagcaccatcctggcactggagcccgcaacaggcaaagtgcaatacgactggggcaagaactttttttacatgccacatggcctgaccgtggaccccgaagacaacgtttggttaacagacgtcgccatgcaccaggtttttaagttcccgccccgtggaggcgatggaaaaccagcgttgactctgggcgatgccttccagcccggttcaggacgcaaattctgcaagcccacctcggtggcggtgttggataatggggacttcttcgtggcggatggatactgcaatgctcgcatccttaagtactcacgaaaaggcgaattgatcctcttctggggacagaacaccttctccggcatatcctacgacgttgcgccccagaacttcttcgcgattccccacgctctgactctcgtcccggagttgcagttactctgcgcagctgatagggagaatgggcgcgtacagtgcttcctctcgagcaacggcacctttcactcacagtaccacaaccagctgataggggaccgcctcttcagcatggcttacaccccggcagcgggtgggcagctggtcattgtcaacggaccaaccgccgagttaggcatccatcctgagcattataacgaggtgcacggtttcgtgctaagcatgcgcagcaagcaactggtgtctaagttcggccccaataacctgcagttccagaacccgcacgacgtggccgttacagccgacggcaatgagatctacgtggccgagctgaatccaatgcgtatccacaagttcgtccaccgatctctggccaagccaatgtccttgtcggccagcaaggactctagggacagcgctattagccaagctgtgggaggggaccaggttcccgcagtggctgtgcaccacccgagcggcaaagcaatcctggtggcttcgctcatgctccttttcgccggctctacctttgccttggctttgatctttgcgcggcggaggaaacgaggttgcctgcctttcggagcacgcggtcgtcgccacgcgtgggagaaaagcgatggcttcaagctgggcggacttctcgatcgggatcgcaacggattcgagaagctggaccagcaggccagcgacgaggagcaggagacgaagacactggcgagtgcccagtacgcctag

SEQ ID NO: 3876 - protein, 541 aa, DROSOPHILA
MKSTDSAKCLGSKSLAICCLLLHLLLCIRPAVSQTQSPQRYLHNVDSNSNNNERLHQILKGSGAGSGATQLNWPQPPKQTVPNVKTELAKLNNTYVYQNAWPANNVKLGAVTAVSFDKAGNVVIFHRVNRVWGQTTFDNRNQYQEKYRGPIRESTILALEPATGKVQYDWGKNFFYMPHGLTVDPEDNVWLTDVAMHQVFKFPPRGGDGKPALTLGDAFQPGSGRKFCKPTSVAVLDNGDFFVADGYCNARILKYSRKGELILFWGQNTFSGISYDVAPQNFFAIPHALTLVPELQLLCAADRENGRVQCFLSSNGTFHSQYHNQLIGDRLFSMAYTPAAGGQLVIVNGPTAELGIHPEHYNEVHGFVLSMRSKQLVSKFGPNNLQFQNPHDVAVTADGNEIYVAELNPMRIHKFVHRSLAKPMSLSASKDSRDSAISQAVGGDQVPAVAVHHPSGKAILVASLMLLFAGSTFALALIFARRRKRGCLPFGARGRRHAWEKSDGFKLGGLLDRDRNGFEKLDQQASDEEQETKTLASAQYA

SEQ ID NO: 3877 - DNA, 4123 bp, DROSOPHILA
tcttaggcactagacccgacttaggctaagactacttaaacgctagaagggcttgtaaatttctcataccgacaccggcggtggtaacaaatgcttcatctgtaatataacgacaagaatcatattatttcgatacaatactaaggcaggcaatactatgcattttaactgttaaacacacataaatagtagtgcgtatgatgcaactataggtggatatttccatgcattatgtacataatgttgtaagtgaaaagaaagaaagaaagaaaagcttaatcaactgcattgcgaatgaagcaacgaacaccttttgtgtgatcacacagagttctaccgaaatctcccaattaaatgtgcacactcttttcgagcaaatggaatcctttccgcgactaaactaccttcacacattaactaaagtaattgagaacgatagaaacaaggccacagatacaacagatgattatctctaattgacggtgttatgcaatttataaatgtgatgaatgtcaaagttaagcgtaaacaatttaaaagcaagcgaagaaaatacaaaaacacaaaaaaaaatacaaataaaaataaatataaatataaatataaatataaacaaacgattcatgagaaagagctgaatgtagcgagaacttaagtatctaagcatgcccacgattttagagctaagcaaatagatgaagatacaaatacaaatacaaatacccagaggcagaccataggttttaaagaacgaacgaagcatttgccccacatcctgacaggttaccgcagcttgtagaggccattgcagccggaggagtcgccacagagatcggacaaaatctcgcgataaacagaattaatgatatgagtatatgtatgtatatgtatgtacacctaagctaatcgtaagccaatgaaagttgaaatggactaaagatacatggaacagacaacattgaaagcgtctaaataaagaacatcaaattgcaagctcaccctatctgggcggacgtgtctccacggtgaactccacgtgcatcaacccgaactggctgcggggcaaaacatccggtgtccaggtgaccaggactccattgccgacgtagtcctgcggaatagaggtttactaacgagctcttttcatttcgattcccaactcacctttggtgccgcttcgaagagtatcttaaccatataaaggctgagtctcgggtagactatacgcttcttcggctgacccggcacctgtggttccatcggtggacgtacgtagggaacgaagtgaccttctgcatgccgctcgaaggcgcgatccaactgcagctgtacgttggaggtgctaaagatgcgcttcgcggtgtgcggactcgcaaagtgccaggtgtacttgctgaggcctttatgtttgcccgactctatcacagttagcttgtccaacggacgtcgcttgactccagtactgaagctcttgcaaaaatgcgaaaaggtttccttgtgcacatggaagttctgttgcaccaagcgcttggtaagcgtgttgctttccgtttccaatggctcgcaactgtcgtttagcagctcgatcacatgatccagccatgccgagtaggatagagccggctgaacggaagcgtccaagcaagcggatgcagctgacgctgcaccattcacgattaactcccttttggccggcagagagggctgcttcagggacttcacttcggtcactatttccgagaacttgaccggtgccttcttgaccatcgatatggtggccagctcaatgggcagctgatcggcgaccacagagggcgtggcctcggtgaaaatgggcggagcagctaggatgttgtagggttcactgatcaagggcagttctatatcctcgctgcatatatccagctggtcggtgggctggaactgatccatcagctcgatattgcagtcggttagctcgatgggctccgcatagacatcgaggttggacaagagctgcgagtcgttggcatagtggatcagggcatcgttggtgctcgaggcgctttggctagatgtggcggcctgcatggtgtccaggttaaagacgccatcggagagattcggcagagaaagctataaacacgaaaaggtttaaaactgctcgaggtggaaggtataacttacatctagttggtcgccaaagacaagtatgtccacctgcgggtcgagctcatccaccatgtccaggctgagccgcaaatcctcggtggccacgtcgcctagcggagtttccagctgcaagggcatccagaaggtctgcaaaccgctggtgaaatggccatagacgcgttttccctgcggcgaactaaggatgccagccaggacgagcagcaggtgatcgcagatctcgtcctgcatcaccagcgaattatctggctccacaatgatcttcagtttgcggcaggcgcaggcgtagctgctcttcttcttggacaggccattggccgagacggtgacgtgcagtcgagccgctggaaaggattcggagcgctcgcacttgacggcgaatgtggagtgattcaggcgctgcacacccggcaggtgctcctcctcctccgcgtacttgtacagctgccaaaggttctgcttctgctccaggctaatgttcaggttccacagcacctcgcgggacacgcggtagacctgcgccttcgcgaactcggcgcccagctcccggcaagctttcacatggacgcagtccgtcggctcgcctcccgttcgcttgcacgactccacgaagcactccgccttgctggacaccactgcagcgtccggctgcagcgacagcgtgacgtcctggatgaccacaaagttgcgcggctgctgctccttctccttggtcctcagcgagtagacagtggagcctggccgcagcgacaccagctgcacggcatcgagaacgttcctgcgctgcggacactcggaattcttgcagagcagcgcccggttgccattgatggcgccgcagtgaacacacttgcgaacgccgcgcatgactcttgcatcttaaattcccggaaaatggctataaaatgcgtttcttagttttcgcaaaagtttgccggcttttgatttgcgtggcgcagtgtgaccgtttcgcgcgctgatgccagcagggctggcacacacattctacatatgtgtgcattaaattaattttacttttgaattattgctacagtttttgcatacactacatatattttacatttatttttcataacatttgggctattccagccagcttgtgtaggcagtgctgcgcagccctggtcgcatcagccgcttgttatcgataaccaaattggctactttaataggaaatttgttatttcaatttaaaaagttgactttccgctaaaatgacgcatccgctggaggcgccgcagcgcagccgcaaataccccttcgtgcatatgcgcatcgcggaccacagcgcactggacaccatcgaggggcgccacaactgccgcctgtgcaaccgatcgcgcaagttcttctgctacagctgctgtgtgccggttggcgagctggaggagctgctgccacgtctggagctgccgctccaagtggacatcattaagcacaaaaaggaaatcgacggcaagagctcggcggtgcacgcggccgttctggcgccggcgcacgtgaggatccacacatttccggacattcccgactatcgcgaggaggcgggcgtagtgctcatattcccaagcgccactgcgcttgcggtgccgcagctcttcgcgcgcaatgtgcagcttcagatcggcgacaactacgggctgcccaagggccaccacatgggcaccatgctgcgcaggcgaatggacgaggtggaggtaaaggagctgcaggaggaggtagatgagccggagacggtgcgacgaacctggacgctagacaacctgcccgtccgccgagccgtcttcatagacagcacatggaaccagagtcgcgggatctacgcggacgccagggtgcgcggcctacgaacggtggtgctgcagaatcgactgtcgcaattctggcgccaccagcgcggcagtccgcgctggtatctggccaccatcgaggc

SEQ ID NO: 3878 - DNA, 2019 bp, DROSOPHILA
ccacgcaaatcaaaagccggcaaacttttgcgaaaactaagaaacgcattttatagccattttccgggaatttaagatgcaagagtcatgcgcggcgttcgcaagtgtgttcactgcggcgccatcaatggcaaccgggcgctgctctgcaagaattccgagtgtccgcagcgcaggaacgttctcgatgccgtgcagctggtgtcgctgcggccaggctccactgtctactcgctgaggaccaaggagaaggagcagcagccgcgcaactttgtggtcatccaggacgtcacgctgtcgctgcagccggacgctgcagtggtgtccagcaaggcggagtgcttcgtggagtcgtgcaagcgaacgggaggcgagccgacggactgcgtccatgtgaaagcttgccgggagctgggcgccgagttcgcgaaggcgcaggtctaccgcgtgtcccgcgaggtgctgtggaacctgaacattagcctggagcagaagcagaacctttggcagctgtacaagtacgcggaggaggaggagcacctgccgggtgtgcagcgcctgaatcactccacattcgccgtcaagtgcgagcgctccgaatcctttccagcggctcgactgcacgtcaccgtctcggccaatggcctgtccaagaagaagagcagctacgcctgcgcctgccgcaaactgaagatcattgtggagccagataattcgctggtgatgcaggacgagatctgcgatcacctgctgctcgtcctggctggcatccttagttcgccgcagggaaaacgcgtctatggccatttcaccagcggtttgcagaccttctggatgcccttgcagctggaaactccgctaggcgacgtggccaccgaggatttgcggctcagcctggacatggtggatgagctcgacccgcaggtggacatacttgtctttggcgaccaactagatctttctctgccgaatctctccgatggcgtctttaacctggacaccatgcaggccgccacatctagccaaagcgcctcgagcaccaacgatgccctgatccactatgccaacgactcgcagctcttgtccaacctcgatgtctatgcggagcccatcgagctaaccgactgcaatatcgagctgatggatcagttccagcccaccgaccagctggatatatgcagcgaggatatagaactgcccttgatcagtgaaccctacaacatcctagctgctccgcccattttcaccgaggccacgccctctgtggtcgccgatcagctgcccattgagctggccaccatatcgatggtcaagaaggcaccggtcaagttctcggaaatagtgaccgaagtgaagtccctgaagcagccctctctgccggccaaaagggagttaatcgtgaatggtgcagcgtcagctgcatccgcttgcttggacgcttccgttcagccggctctatcctactcggcatggctggatcatgtgatcgagctgctaaacgacagttgcgagccattggaaacggaaagcaacacgcttaccaagcgcttggtgcaacagaacttccatgtgcacaaggaaaccttttcgcatttttgcaagagcttcagtactggagtcaagcgacgtccgttggacaagctaactgtgatagagtcgggcaaacataaaggcctcagcaagtacacctggcactttgcgagtccgcacaccgcgaagcgcatctttagcacctccaacgtacagctgcagttggatcgcgccttcgagcggcatgcagaaggtcacttcgttccctacgtacgtccaccgatggaaccacaggtgccgggtcagccgaagaagcgtatagtctacccgagactcagcctttatatggttaagatactcttcgaagcggcaccaaaggactacgtcggcaatggagtcctggtcacctggacaccggatgttttgccccgcagccagttcgggttgatgcacgtggagttcaccgtggagacacgtccgcccagatag

SEQ ID NO: 3879 - protein, 643 aa, DROSOPHILA
MRGVRKCVHCGAINGNRALLCKNSECPQRRNVLDAVQLVSLRPGSTVYSLRTKEKEQQPRNFVVIQDVTLSLQPDAAVVSSKAECFVESCKRTGGEPTDCVHVKACRELGAEFAKAQVYRVSREVLWNLNISLEQKQNLWQLYKYAEEEEHLPGVQRLNHSTFAVKCERSESFPAARLHVTVSANGLSKKKSSYACACRKLKIIVEPDNSLVMQDEICDHLLLVLAGILSSPQGKRVYGHFTSGLQTFWMPLQLETPLGDVATEDLRLSLDMVDELDPQVDILVFGDQLDLSLPNLSDGVFNLDTMQAATSSQSASSTNDALIHYANDSQLLSNLDVYAEPIELTDCNIELMDQFQPTDQLDICSEDIELPLISEPYNILAAPPIFTEATPSVVADQLPIELATISMVKKAPVKFSEIVTEVKSLKQPSLPAKRELIVNGAASAASACLDASVQPALSYSAWLDHVIELLNDSCEPLETESNTLTKRLVQQNFHVHKETFSHFCKSFSTGVKRRPLDKLTVIESGKHKGLSKYTWHFASPHTAKRIFSTSNVQLQLDRAFERHAEGHFVPYVRPPMEPQVPGQPKKRIVYPRLSLYMVKILFEAAPKDYVGNGVLVTWTPDVLPRSQFGLMHVEFTVETRPPR

SEQ ID NO: 3880 - DNA, 3457 bp, DROSOPHILA
tgtcctcatcgccgatgtcttcctcgtcttccgagtccggaagcgcttccctcgcagcttctgcaggatgtacggattaatcaggccgtcttggcaggcttatagctaataaaaccttcgcaatatttgttaaagtcgctcattcttgtctatttttaatttgccgcacgtgcattaaatgacgacagtgctgactattcagctagatttaagctaacttgggctgaagacacattgaatacttaatagacgagttgaaagggataagagtgcacttcaaatgcgtcagcactctttcttttatgacgaaatccacttattcgacaactgaatttatttttaactacttcaataatatgattttgaagccaagtcacacaccacaccttgcgatgcttcttcttggctatgcaaacaaagccgttcacagtgaagcgccttcaaattacggcgcgcattgtgatcgttttaaataaattaaaaattatggttcctttgaaaagttcatggtaatggtaagataaaagcggctacctataattaactcaattgtcaatcatcaacagttccaccatcatacttgtacacccgtaccacacacccacccatacagcacaataagcaagatttctttgttttcgtttaatatcgatctgtagttttattctttatacaaaaatgaatttcacaagaagccgttccgaatacgacctacatacatgtgctgtcgccataagtcagttgcctaaatattctttcggtttggagttggatttgcgtgttcgttgaggtttcttgattgcctgacttgactatgtaactcgttttgtgttatgtatggttatataaatatatatttacatatttatataggttctgccattttatatttaacaaaggactcttattcctgcgcagcatctctaacaagaagaactcttcaacaagcaactatgcattcaataattagatatatgcgggctacatttatagatcctattcacatgaagtcgtcatagtcttcggtgaagtcatttccgtacttttggtaaccgtcaatgtcctgcaaaagagcggattaaataagttcattcgttgatctcgaacggcggcgattgaaacactcacgtcgttttcggtgcggagagtgaccttgcccttgccctttccagcgggctttttagcattggccttttccagcttcagcttttccgagtgcaagatttccacgttcatcttgacctttttgatgtcagcagcgctcactagataaggtgcgaaatcaaatcagataagccgtctttaattgtcagccagctaatcactcacgattcacgcataggctgcgcaccagatcctcaacaaattgggggaagtgctccgactcgcggaattggcccaccttccagctgagcgttgcgccaaattccttgaactcctccttggtctcggggttgaaggcgtcaagacctccgcacgtactcgtcacaccgaacgcttcctgggcatgcttgagatcagaggcctcctggattttttgcaatcgcagcttctcagccaacttttctgcaggcgataggttggccaaacgttttgcctccgcttcctcctctaggagctgttaataacagatgataacaatatagccaatgattgagaaatgcttttgagccttatctcaccgcctgctgttccagtttggcttttagcgccttatttggcttcggtttggctggtgcttctgttttcgtaggcttctcctcgtcctttttttcctcctcatcctcccagctgtcctgtgggcagcaaataaacaaatgattcgatcagtctgctgcaaaagtgcacacgtgtacagcgaaacgaaagtgaaaccgagtgcagaaaaacaagttttggcccatggcatttgttgttgggcacttggatagttggtttgaatgcggcactgctttcgatctcacttggatttcgttagtcgcaccttgatgtcctcatcctcgtcctcgccctcccacttgtttacgctggcggcggcagtcggccggatgaccacctcgctgtctgctgcggattctgccaggtaacagaatgagttccaggaacatggtgaataacaatgatttcaaacggttagttggcacagtggctaaaaatactcatcaaggctggttgcacggcactccaacaacaacagcaatagcagcagcaacaacaacaacaacgacggagaccacgtttattgtccgccgtgcagatgacgcaccgcccactcttccgcccaggccaatcgcaacttaccccaatcgtcggccatgttaatggttgcctatttgcttgcgggatttgtgcttctggatgggatggtgctgggatcgacttgtttccagcctcggcagcgatttcaggaattttccaaaaccaaatttctgtggatctgtagtgtgcccaaggcgcgactagcggaaaatgcgtgggtaacgtcgccgatagtctgttgccatcgaatattcgtagtgcggccaaggtgatatcaagttatcgacaatttgaaatttgttaccctacaatatttcatttttcatttttttcctttcttgattgtaagattgcttattttattttcaaacacaaatttgtcaactttgttaagaaatctttaagtttttaaagatttgagttaccctacaagtttttttcaaaaaaaattcgtgataaatctccctcttcgtggtgttctaagaaacttactcttagagttataaggaaaattgattcgactcgataaattatatatagtagagagtatatacatacataagcatgttcttgataagaagaactagctgtgtcgttatatacctcgaactccccaattgctgactaaggctatcttatagtcgaggaattctttcgattgagaggctaagtcatccttattggagttagaattggtctagttaagatctggatttgtttgcaaaatgtgaattatgtcaaacgtctgcaattctcaatggttacatctgtttttaacataatcatgttaaatgtggctttttgtcccaagaacggttttaaagataattgtgtactttctttacttgactgttttggcgattttgttaacaaagaacaacatccatttctgcatgcataaaaagtatcattttaataacgttaaattaaattggtattcttacagatttgtatttcattttacgttcatcttcagcgatatcattgattttcttctttatccactcataatatgaggaagttttcgtgtaaaccgctggcccatatccgtaactggagggtccccctccgtaggacgttattccggctaggtaataaaattgatcagcacccctgcccaccgaagccatcagcgggctaccggaatctcccagtccggtgtcggtgccatcccatcccatggcacatatctggatgt

SEQ ID NO: 3881 - DNA, 851 bp, DROSOPHILA
gcgccttgggcacactacagatccacagaaatttggttttggaaaattcctgaaatcgctgccgaggctggaaacaagtcgatcccagcaccatcccatccagaagcacaaatcccgcaagcaaataggcaaccattaacatggccgacgattgggaatccgcagcagacagcgaggtggtcatccggccgactgccgccgccagcgtaaacaagtgggagggcgaggacgaggatgaggacatcaaggacagctgggaggatgaggaggaaaaaaaggacgaggagaagcctacgaaaacagaagcaccagccaaaccgaagccaaataaggcgctaaaagccaaactggaacagcaggcgctcctagaggaggaagcggaggcaaaacgtttggccaacctatcgcctgcagaaaagttggctgagaagctgcgattgcaaaaaatccaggaggcctctgatctcaagcatgcccaggaagcgttcggtgtgacgagtacgtgcggaggtcttgacgccttcaaccccgagaccaaggaggagttcaaggaatttggcgcaacgctcagctggaaggtgggccaattccgcgagtcggagcacttcccccaatttgttgaggatctggtgcgcagcctatgcgtgaatctgagcgctgctgacatcaaaaaggtcaagatgaacgtggaaatcttgcactcggaaaagctgaagctggaaaaggccaatgctaaaaagcccgctggaaagggcaagggcaaggtcactctccgcaccgaaaacgacgacattgacggttaccaaaagtacggaaatgacttcaccgaagactatgacgacttcatgtga

SEQ ID NO: 3882 - protein, 236 aa, DROSOPHILA
MADDWESAADSEVVIRPTAAASVNKWEGEDEDEDIKDSWEDEEEKKDEEKPTKTEAPAKPKPNKALKAKLEQQALLEEEAEAKRLANLSPAEKLAEKLRLQKIQEASDLKHAQEAFGVTSTCGGLDAFNPETKEEFKEFGATLSWKVGQFRESEHFPQFVEDLVRSLCVNLSAADIKKVKMNVEILHSEKLKLEKANAKKPAGKGKGKVTLRTENDDIDGYQKYGNDFTEDYDDFM

SEQ ID NO: 3883 - DNA, 9367 bp, DROSOPHILA
gctcccagtgtctgaactgaaacggtggtcagatacaagggtgcgatttggggctgccccagatcaaagcagtcagtaacaggttggcggctgttgcagcttacagaccgcctgtataatgctgactacaaaaacaaaaaccggtaccaatgtactagttgatatttaacatattccgtttttgtatctccttgcagcttcggcggatgagaaggaaatcctgcccattgcagatctaaatgcttgtagcattgatgcgaatcgcacgcttgtcggtggtcccgcccagcagcttgcttgggatccgcatggcaattatctggtagtcacattcaaggcgaccaactgcatcgccgtcttccgcaccttcatacagaagttcgatctgcagatttcggcggcttactatctgagcggcgagacggcggcggagcacccgagcttcatctgcttccagccactctacgaggataacgatcgctccgtgctgacgatcgcctggtcgtcgggccgcatccagtactacgccttcgactgatcttaaagcttagtgattttcatagtaatacattttttgatttggtttttgtaagcgttaatacacagttaaacaggttaaccttaatttggaatccaacaatggtaggggattgagataaattcaaaggtgtgagtctgtggcacttgaaagtatatctgtaatgtggcaggtaattgacttttacaagcaaacagtaccattgccacacccccacatttatctcttttttacagatttgattgaaatggacaaagcgttttacacctttaaggtaattgaatcaattcgagaacaattcctaatttattatttttgcttaaaattggtccagcaattgttttgcaatttatataaagaatcaaataaaatatctgattacgcttataaggatttattaatatttttaataaaataccacttccttaatggaatacaatcaatttttgacaacgtatttttgctgtggaatcatagtagttatttttttctttaatttttatgaacctcaaaaagccaaggtaattttgaatagactcagtataatatgaagtaattattgtccgtaacaaagtcttcggtcgaatacgagttcctataacttccaactgtcttaaagctgcaaaacgctccgcattaacatggaaatataaatatataaataatgctatgtgtatacagatagtatataacgtgactttcgattacataacaaaacaaagagttaaatatcaaacataataagggaacgattgctgaggcaaagggatcacacttggagcaatactaagtcataatttacaaacacacacaacataactgcacatctaattaatcgagttggtcccttggatgctctagatgtccccaaagaagtaacccagagcagtggctgccctcatccgcaccagcgcctgttcgtccttgagcagcacggcaatcttgctggccacagtctccgtttggacgtttctctcgctgaggaagttgtgcagaatgcctaggcaaggagaacgattgaaattatttcaaggattcttgtggaccaccggaacacttaccaattacaatggctgcactacctcgcacctcgggccactgactacgcaactgcggcaggcacgaatcgatgaagtcctggatgtgatccgtcagctccagtgcctgaaagaataaatgaatgttagaaatattgttatgtcccgtttggaacattataaactcacaattgtcttgacaaattccagcacaaagctgctgtagttgagctggtgacctcgttcctcgcccaactgctgctccgccatctccacgacccttggagctgtcaggagacgacaaacccgctgaagtgttccacgacaggccgaggcaatagccacttcgctctcgctgagatgcagtagcagcgggaagagattggcgatgagctgctctctcagtgcctccatcgaggatgtgggtgaactgctgccgtcatcgtgcttgccctcgcatatatcgccaaacagttggatagccgcctctcgcatctctagtgcatagttgccgagaaacggtcgaatccggatggcgagggagacgtggaagggctctacccgctcgctgggcaatgctcgcagtattccagacaggccgcgcatgctctccagcggaatgttgattaggcaatcgcccaccggatcgtcgactcccttcaacagagcaccgatggcagtttccgagtagcgcttcgcctccttttctcccaactggcccacgtaacccatgccctggatgctgagacctcgcactaccgcattgggatcggatagtgcggctccgaggtggagcagtatggacgcagctagctcaccggtgggtttcagtggcaccaatcgtgagaaaatacccacggcggccactctttgaccatcgtatggtgaagccacatatttgctcagcgagttgaccagttgcctcatctgcggacttcccagctgcagctgttgacctagaccgatggccatcggtgtcagcaattcgatgtagttgtgccagtccgcgctgctcgccagttgcgtattcacagtcagcacgctggcaatctgctccatttctagattggtcaggaaggcctaaaaattaaggcaataggctattatagagaattatagagtatttaatggtgttggaacctacctggaaagtttccagtgctatttggcagggattgagcttgatcagctccttgttgggcacgaaaccgaatttggttttgcccgattgcgtctggttgggacttagagaggcattgtttataggattcggtgcagctaagttggtgtagctgcttagcgaagtgagcagcatgcagaacatgtccgcaaaccttgtttccagttgctaaaaagacaaagccattagtttaagtgtgaaaattcaacggaaccctttcaagcactcacccccttgatatccttgcacggcagcatctcatgcagagcgcagaaaatggcaaacggctggccgctggctaatttctgacgttcggaaagagatgcatcctgaccgccttcctggagggaggcaccacttagcagctgcagaaagttgtccagcgtgaggcccgtcaactccgggtcgttgcacaccaggtgccagtactccaccagattggggtcgtacggcagcggctgcgacagcatttcggcacacaccaacttgggatggtgcttggtgagggccaccaaagcttttagcactccggacttcgccctgggcacctcgcacacgcgcaaggccagcaaactgtcgcgaaccaggtcgggaatggcgtggaacagctcagagcctttctgctggataaagaacttgagcacaacactggcgccaatggtggaactctgctcaggatcacgcagcgaatgaagtagagttttgctgtaaagaaatttaaaccgtactaatctaaccgatttaatgtagaccgtactaatccttaccagaactgcaggtactgaaagctggagatacgcagtgcaataatcttggcaatgtcgccggccagattgtagatttgcttgggctcgtcggtgattatgtgctccttgatggtctcgatctccttcagccagtcggcagtgctgtcgatgctggctatcgtcagggtttcgtagatacacgcgatctccagcgtcttctgcaggatctccacggacacctgccgcaccgtgccattcgaatcgatgcacctgggcacaatcttgcccagcatttgaccagtctgattgaacttcgacggggcctcgcagccaattttcatggacttgatgtagacatcgagggtgttgttaaacacatggctggcacagattcgcacctcagagttgcgatcccttgtccagccctctagaatgccaataatcagatccagtgtggccggcgaggcgtccagttcaacgatggccctcacaagcgcattcaactgcggcagcgattcgttgaggtgcttggccaggaagctgttgcgctcatcctcctcctgagagtcgaacttcatcttgagctgctgggcacagccgaagaagttgcggcacgcgatctcgaagatcaccccgccgtccacacactcctcggtatcgggtccacctacaaatagtgaaaggattaggataagatttacatttagttaatagaaattccttacctatgcgtatgaagtccgtgcccagtttgagaatggtgggcagaaggggaaggtcgtggaacggcgcctcgatggggatgttgaagaccgtctccatgatctgcttgcgatgacgcagaggagccggcagctgctccttggtggctatcaactggttgcagatgctgagcagcgtctgcaggatcgccgacataattgtttggtccttgtgcacggccagctgttggatgaggaagcccagcaatgtgtcatcttcgtccaggtgttgaatggattgcaacggatcggcttcgtccatgatgcgaccaaaagccttgaccacgagcaggttgctcttgtagttctctagctccttgtgcgtatccttgataaagtgcagattgctaaagaaaccggtggagtgctttcgcccaccgacttgggccagttcggttagctttttgatcagatgccccaagtgttggcgggaaatgtagcccaaggctctggcacagggttcaatgcgcttttcgtagtccgcatgcttaacgtgcttgtccaatctttcctgcctggcagtcgtcacaatgagatcgatcttggtgtggatgcaggccacatcggtcacctgaagcagggtgagggccaccgcctgcaggagcatgcctcgctcggcgctaaggtcaggcaaatgccactcggagtggggcagttgcatgggatacaagtacatctggtccgccagcttactggccagccgctgggcaaagttctcatccaatccgcccagaaattcattcgtttcaagcacaaaatcgtggagtagctggcgataggcactctccctgttgatttgcagcagaagatcgggaatttttcgctcccacagctcctccagggcgggattcacctgaggatggtagtagcgcagaaaactgagaatattcgagcatcgtttaatgcactgctgattgcccaggagtgccagacatcttgcgtaaatcgtctcggctccagggaccataacctttccgcgcttgatcacactgcgatcctcgccagcagcgcccatactctccggtgtggcttgctccgtggcggcatcgtctcccgcaatatcgtactctatgtgcggagatttggcaaacaaactagccaggcacttggcgagattcccgcaaatatccgtgtagtccagtaggatcaagtagttcagcagctccctcttgagcagctcatccaaggtgcccaccgtagaggccagcatgtacagggtgttctcacagctcagcaccaaattggcgtgctcctcctggctgccgtgctcctgacttggctttgagaatcggcaactatgccgcaccacgaaccacacaaactccttgtcccggatgtgggacttttgggcgagagccacaatggtttttagcagcgttagcttcattttgatccctctttcgctgaggatcagttgctttaggcactcaatggtggctggaatccggttttctatattccctgcacaggagttgagtaggtgcgtgagtatcagcagggacttcatcctctcgcgttcgctattgttccgcaggtggatcagcagggtgtccataatgcgcgtggagtagggttgatgaccggccagaaggtggaagcaacgcagcacctcgtagtgacccttcaccgtctgcggtttctcatagtccggataaacgcagaccaggtcgaacaaatgggtgaccaacacgtcaattatgccatccaagactgtggcatttagtgccagattcgttttcaacacggagcagaggaactgcgtcacggcattcctgtccacgctgcgtcgatagagcgccaggatctggggaaccaatcgggcggcctgatcctgaatccggtctttgggcagcagtggatacatgctggacagggcctgcagtatctccacgcaaacctttggctcccgggagtgcagccattgattgaagagcacatcgtaggccacactgatctccgtggagcagttctcctcctcctttttgccgctctcctccagtagagcctcactgaatctaccgatggcataggcatgtgcctgcttgatgtgatcctggcgtatcccgactagatgcggctgactacggctcaatatggcctttatgtggggcacaacccctgccggattctcagtggccagcagaccgaggcactgcatcagcataaagtgagccacaccttctgtacttgttcccttctcctggagcgcctccattacctgctcacaactctctgggctgctccgtccgatggctaccaggatgcgctgggcgggattctgtatgagtggcaaatgctcgggattcttggtgagctcctgcagcgcaagatcaataagtttctgatttgcagccggcggcagaggagtttccgctcccaccacgcgacgaatgcagctgaaatatagaaaggtagggattagaacagcttttaattgctgatgtcaaagggaaacctactccaacaacatggccactgtttgatcggtcatcttcggctgctgcgatcgatgttcgctgaggatctccgcagcccgttccggatgggtctccaagatcttcacgatcgcctgctgcatggcaatccgcacctgctcctccttgtccatcagcccatcgaagatgttgtggagaacgcctgcaaaagggcaacaaatgttttaaatttgatttcttaaatcagatcatatggaatataatccaaaatttagttggcttgtgttaagtcaaagctaagatatcgtttaaaacaaatgactaatttcagctagagctagcaaatagcagaacaatggactacactcagtaacacgagtaactagatcaaagtcaagttaacactacatagagccgtatttacataaggtgcacaaactgcaaagatagcagaagtggcaaaaaccacattgattcacggatttaaatggatgataggttgatttcgaattaaattatatgagccattttacaacattgaaaaatgcatacccctatttcattgaacacaactgtgggcactttcagtacttatattctgataagaattcaaattgtctgacgcattcgcataaattaaagagcttcacatcatataagcatctatcaataaaatgaaaaaggctagaaaatggcaaaaaccaaacgaaatgctggaatcagctgattgggatggtcaaaaatacacgtcatcccagagatacaaaagtccaattggactggacaagcgatactctagaggacttttcgcattgcaatgttatttttgttcttattccaacaattagctgtaaaacaaaaaaaaacacacacttacgcatgcagatgattaatcaaatcgaattgagtgcaatttgtgggtgtaattgtgaaatgttgttgtattgatttgtcttgctcataaacgtgttctagatgattttttagggcttcacacactcaacaggtccccataatacacacgtacatagatacgaaaatagagttatttagctgctctcctttcgctaaaaggattccccgttacttttgggcgctcatgtgtgcgttgtgcctaatgcgtagttctatttttagaacaggacaaaagactgcgcttcgcctaatcacaaatcccaattggagtgggtggggtggacgggcaaaacgcccatttcacgctaaatcgctctcagcacttgtgcttgtgtgtgtgtgcgctttctaataaaagattccatgggtccatctttatctttatctttatctatgggattaggcagtgttccctttgttttcattttcatttgcattttcgtttgcttaccttccagaatcgttggcttatcattgggcgccgctgtggcggtagatgcatcggcatttccagtggcggcgctatttccagcagctgatttgttgttggcggatcctccccctgtggcagcaccactaccaccgccgccaacccctcggccgtccatcttcttggtggaattgcgcgttctcttccacttctccagcttaacgggatttcagacagcgattaactttaacgcgcacttcgcgatcgcggaaaaactcggaaaaacaagagattcactgcgttgcgaaattgtttgtgtttaaaacgggtggctgcactcacataggggaaaaacggctgtggaaattttagtacgttttttatcaacaccatggactagttgggcttccgaacatggtgtgtgccctcactgttcagtggtggcgcaaaccatagatgaccataaaaatgaaattcaaatgtactgtgtataaaataatagttatgcatacagtctcgttttattatacggaattagcaattaagtaaattttaaattttaagctacacaggcagtacagcatactaatacaatattaaaggaaaaaacgcttttgaggtagttttgaaagtatttgagagcaattgaaatgcttaattttaatcacttgatagcacttctgaaattaaatagcatagacatttgattttctcgcaatttctgccctcgcagataagctgacgttcttctcacgctattatattcccagcgataagaactatttcccttcgatgtgataagtcggaggtaaatttaaaataaacactttttaaaatcataagaactctgcgttgttattttaattcgatatcagtatttcgaccacaaaccaaggctgaaccacaaaatatggcccaatgatagtctcttatcacgcctttccttcgctaaaaagaacacatgtcatttggaatccttgttttctttgcgctagcaacaacacacagtttttaattaacactttttgcgataatagcagatttgataagcatgttaagtatcagttttaaagtagattctctgattttcatctctaatatccaaaatgtatctatatgaatacaattttccataagtgcgttttaaatacatgtatgttaaattttaaataaaataataaaaaaaaaaacacaacttatttattttctcatgaaaatctaatcatatccagctcctaaatattttcgaaatttcccggctgaacaagagcgccgctcttaagtcgtcacgctctcagctgattaaagagagcgcgcttaaatgc

SEQ ID NO: 3884 - DNA, 5771 bp, DROSOPHILA
ttttaaacacaaacaatttcgcaacgcagtgaatctcttgtttttccgagtttttccgcgatcgcgaagtgcgcgttaaagttaatcgctgtctgaaatcccgttaagctggagaagtggaagagaacgcgcaattccaccaagaagatggacggccgaggggttggcggcggtggtagtggtgctgccacagggggaggatccgccaacaacaaatcagctgctggaaatagcgccgccactggaaatgccgatgcatctaccgccacagcggcgcccaatgataagccaacgattctggaaggcgttctccacaacatcttcgatgggctgatggacaaggaggagcaggtgcggattgccatgcagcaggcgatcgtgaagatcttggagacccatccggaacgggctgcggagatcctcagcgaacatcgatcgcagcagccgaagatgaccgatcaaacagtggccatgttgttggactgcattcgtcgcgtggtgggagcggaaactcctctgccgccggctgcaaatcagaaacttattgatcttgcgctgcaggagctcaccaagaatcccgagcatttgccactcatacagaatcccgcccagcgcatcctggtagccatcggacggagcagcccagagagttgtgagcaggtaatggaggcgctccaggagaagggaacaagtacagaaggtgtggctcactttatgctgatgcagtgcctcggtctgctggccactgagaatccggcaggggttgtgccccacataaaggccatattgagccgtagtcagccgcatctagtcgggatacgccaggatcacatcaagcaggcacatgcctatgccatcggtagattcagtgaggctctactggaggagagcggcaaaaaggaggaggagaactgctccacggagatcagtgtggcctacgatgtgctcttcaatcaatggctgcactcccgggagccaaaggtttgcgtggagatactgcaggccctgtccagcatgtatccactgctgcccaaagaccggattcaggatcaggccgcccgattggttccccagatcctggcgctctatcgacgcagcgtggacaggaatgccgtgacgcagttcctctgctccgtgttgaaaacgaatctggcactaaatgccacagtcttggatggcataattgacgtgttggtcacccatttgttcgacctggtctgcgtttatccggactatgagaaaccgcagacggtgaagggtcactacgaggtgctgcgttgcttccaccttctggccggtcatcaaccctactccacgcgcattatggacaccctgctgatccacctgcggaacaatagcgaacgcgagaggatgaagtccctgctgatactcacgcacctactcaactcctgtgcagggaatatagaaaaccggattccagccaccattgagtgcctaaagcaactgatcctcagcgaaagagggatcaaaatgaagctaacgctgctaaaaaccattgtggctctcgcccaaaagtcccacatccgggacaaggagtttgtgtggttcgtggtgcggcatagttgccgattctcaaagccaagtcaggagcacggcagccaggaggagcacgccaatttggtgctgagctgtgagaacaccctgtacatgctggcctctacggtgggcaccttggatgagctgctcaagagggagctgctgaactacttgatcctactggactacacggatatttgcgggaatctcgccaagtgcctggctagtttgtttgccaaatctccgcacatagagtacgatattgcgggagacgatgccgccacggagcaagccacaccggagagtatgggcgctgctggcgaggatcgcagtgtgatcaagcgcggaaaggttatggtccctggagccgagacgatttacgcaagatgtctggcactcctgggcaatcagcagtgcattaaacgatgctcgaatattctcagttttctgcgctactaccatcctcaggtgaatcccgccctggaggagctgtgggagcgaaaaattcccgatcttctgctgcaaatcaacagggagagtgcctatcgccagctactccacgattttgtgcttgaaacgaatgaatttctgggcggattggatgagaactttgcccagcggctggccagtaagctggcggaccagatgtacttgtatcccatgcaactgccccactccgagtggcatttgcctgaccttagcgccgagcgaggcatgctcctgcaggcggtggccctcaccctgcttcaggtgaccgatgtggcctgcatccacaccaagatcgatctcattgtgacgactgccaggcaggaaagattggacaagcacgttaagcatgcggactacgaaaagcgcattgaaccctgtgccagagccttgggctacatttcccgccaacacttggggcatctgatcaaaaagctaaccgaactggcccaagtcggtgggcgaaagcactccaccggtttctttagcaatctgcactttatcaaggatacgcacaaggagctagagaactacaagagcaacctgctcgtggtcaaggcttttggtcgcatcatggacgaagccgatccgttgcaatccattcaacacctggacgaagatgacacattgctgggcttcctcatccaacagctggccgtgcacaaggaccaaacaattatgtcggcgatcctgcagacgctgctcagcatctgcaaccagttgatagccaccaaggagcagctgccggctcctctgcgtcatcgcaagcagatcatggagacggtcttcaacatccccatcgaggcgccgttccacgaccttccccttctgcccaccattctcaaactgggcacggacttcatacgcataggtggacccgataccgaggagtgtgtggacggcggggtgatcttcgagatcgcgtgccgcaacttcttcggctgtgcccagcagctcaagatgaagttcgactctcaggaggaggatgagcgcaacagcttcctggccaagcacctcaacgaatcgctgccgcagttgaatgcgcttgtgagggccatcgttgaactggacgcctcgccggccacactggatctgattattggcattctagagggctggacaagggatcgcaactctgaggtgcgaatctgtgccagccatgtgtttaacaacaccctcgatgtctacatcaagtccatgaaaattggctgcgaggccccgtcgaagttcaatcagactggtcaaatgctgggcaagattgtgcccaggtgcatcgattcgaatggcacggtgcggcaggtgtccgtggagatcctgcagaagacgctggagatcgcgtgtatctacgaaaccctgacgatagccagcatcgacagcactgccgactggctgaaggagatcgagaccatcaaggagcacataatcaccgacgagcccaagcaaatctacaatctggccggcgacattgccaagattattgcactgcgtatctccagctttcagtacctgcagttctgcaaaactctacttcattcgctgcgtgatcctgagcagagttccaccattggcgccagtgttgtgctcaagttctttatccagcagaaaggctctgagctgttccacgccattcccgacctggttcgcgacagtttgctggccttgcgcgtgtgcgaggtgcccagggcgaagtccggagtgctaaaagctttggtggccctcaccaagcaccatcccaagttggtgtgtgccgaaatgctgtcgcagccgctgccgtacgaccccaatctggtggagtactggcacctggtgtgcaacgacccggagttgacgggcctcacgctggacaactttctgcagctgctaagtggtgcctccctccaggaaggcggtcaggatgcatctctttccgaacgtcagaaattagccagcggccagccgtttgccattttctgcgctctgcatgagatgctgccgtgcaaggatatcaaggggcaactggaaacaaggtttgcggacatgttctgcatgctgctcacttcgctaagcagctacaccaacttagctgcaccgaatcctataaacaatgcctctctaagtcccaaccagacgcaatcgggcaaaaccaaattcggtttcgtgcccaacaaggagctgatcaagctcaatccctgccaaatagcactggaaactttccaggccttcctgaccaatctagaaatggagcagattgccagcgtgctgactgtgaatacgcaactggcgagcagcgcggactggcacaactacatcgaattgctgacaccgatggccatcggtctaggtcaacagctgcagctgggaagtccgcagatgaggcaactggtcaactcgctgagcaaatatgtggcttcaccatacgatggtcaaagagtggccgccgtgggtattttctcacgattggtgccactgaaacccaccggtgagctagctgcgtccatactgctccacctcggagccgcactatccgatcccaatgcggtagtgcgaggtctcagcatccagggcatgggttacgtgggccagttgggagaaaaggaggcgaagcgctactcggaaactgccatcggtgctctgttgaagggagtcgacgatccggtgggcgattgcctaatcaacattccgctggagagcatgcgcggcctgtctggaatactgcgagcattgcccagcgagcgggtagagcccttccacgtctccctcgccatccggattcgaccgtttctcggcaactatgcactagagatgcgagaggcggctatccaactgtttggcgatatatgcgagggcaagcacgatgacggcagcagttcacccacatcctcgatggaggcactgagagagcagctcatcgccaatctcttcccgctgctactgcatctcagcgagagcgaagtggctattgcctcggcctgtcgtggaacacttcagcgggtttgtcgtctcctgacagctccaagggtcgtggagatggcggagcagcagttgggcgaggaacgaggtcaccagctcaactacagcagctttgtgctggaatttgtcaagacaattgcactggagctgacggatcacatccaggacttcatcgattcgtgcctgccgcagttgcgtagtcagtggcccgaggtgcgaggtagtgcagccattgtaattggcattctgcacaacttcctcagcgagagaaacgtccaaacggagactgtggccagcaagattgccgtgctgctcaaggacgaacaggcgctggtgcggatgagggcagccactgctctgggttacttctttggggacatctagagcatccaagggaccaactcgattaattagatgtgcagttatgttgtgtgtgtttgtaaattatgacttagtattgctccaagtgtgatccctttgcctcagcaatcgttcccttattatgtttgatatttaactctttgttttgttatgtaatcgaaagtcacgttatatactatctgtatacacatagcattatttatatatttatatttccatgttaatgcggagcgttttgcagctttaagacagttggaagttataggaactcgtattcgaccgaagactttgttacggacaataattacttcatattatactgagtctattcaaaattaccttggctttttgaggttcataaaaattaaagaaaaaaataactactatgattccacagc

SEQ ID NO: 3885 - protein, 1742 aa, DROSOPHILA
MDGRGVGGGGSGAATGGGSANNKSAAGNSAATGNADASTATAAPNDKPTILEGVLHNIFDGLMDKEEQVRIAMQQAIVKILETHPERAAEILSEHRSQQPKMTDQTVAMLLDCIRRVVGAETPLPPAANQKLIDLALQELTKNPEHLPLIQNPAQRILVAIGRSSPESCEQVMEALQEKGTSTEGVAHFMLMQCLGLLATENPAGVVPHIKAILSRSQPHLVGIRQDHIKQAHAYAIGRFSEALLEESGKKEEENCSTEISVAYDVLFNQWLHSREPKVCVEILQALSSMYPLLPKDRIQDQAARLVPQILALYRRSVDRNAVTQFLCSVLKTNLALNATVLDGIIDVLVTHLFDLVCVYPDYEKPQTVKGHYEVLRCFHLLAGHQPYSTRIMDTLLIHLRNNSERERMKSLLILTHLLNSCAGNIENRIPATIECLKQLILSERGIKMKLTLLKTIVALAQKSHIRDKEFVWFVVRHSCRFSKPSQEHGSQEEHANLVLSCENTLYMLASTVGTLDELLKRELLNYLILLDYTDICGNLAKCLASLFAKSPHIEYDIAGDDAATEQATPESMGAAGEDRSVIKRGKVMVPGAETIYARCLALLGNQQCIKRCSNILSFLRYYHPQVNPALEELWERKIPDLLLQINRESAYRQLLHDFVLETNEFLGGLDENFAQRLASKLADQMYLYPMQLPHSEWHLPDLSAERGMLLQAVALTLLQVTDVACIHTKIDLIVTTARQERLDKHVKHADYEKRIEPCARALGYISRQHLGHLIKKLTELAQVGGRKHSTGFFSNLHFIKDTHKELENYKSNLLVVKAFGRIMDEADPLQSIQHLDEDDTLLGFLIQQLAVHKDQTIMSAILQTLLSICNQLIATKEQLPAPLRHRKQIMETVFNIPIEAPFHDLPLLPTILKLGTDFIRIGGPDTEECVDGGVIFEIACRNFFGCAQQLKMKFDSQEEDERNSFLAKHLNESLPQLNALVRAIVELDASPATLDLIIGILEGWTRDRNSEVRICASHVFNNTLDVYIKSMKIGCEAPSKFNQTGQMLGKIVPRCIDSNGTVRQVSVEILQKTLEIACIYETLTIASIDSTADWLKEIETIKEHIITDEPKQIYNLAGDIAKIIALRISSFQYLQFCKTLLHSLRDPEQSSTIGASVVLKFFIQQKGSELFHAIPDLVRDSLLALRVCEVPRAKSGVLKALVALTKHHPKLVCAEMLSQPLPYDPNLVEYWHLVCNDPELTGLTLDNFLQLLSGASLQEGGQDASLSERQKLASGQPFAIFCALHEMLPCKDIKGQLETRFADMFCMLLTSLSSYTNLAAPNPINNASLSPNQTQSGKTKFGFVPNKELIKLNPCQIALETFQAFLTNLEMEQIASVLTVNTQLASSADWHNYIELLTPMAIGLGQQLQLGSPQMRQLVNSLSKYVASPYDGQRVAAVGIFSRLVPLKPTGELAASILLHLGAALSDPNAVVRGLSIQGMGYVGQLGEKEAKRYSETAIGALLKGVDDPVGDCLINIPLESMRGLSGILRALPSERVEPFHVSLAIRIRPFLGNYALEMREAAIQLFGDICEGKHDDGSSSPTSSMEALREQLIANLFPLLLHLSESEVAIASACRGTLQRVCRLLTAPRVVEMAEQQLGEERGHQLNYSSFVLEFVKTIALELTDHIQDFIDSCLPQLRSQWPEVRGSAAIVIGILHNFLSERNVQTETVASKIAVLLKDEQALVRMRAATALGYFFGDI

SEQ ID NO: 3886 - DNA, 3205 bp, DROSOPHILA
aggaacatggtgaataacaatgatttcaaacggttagttggcacagtggctaaaaatactcatcaaggctggttgcacggcactccaacaacaacagcaatagcagcagcaacaacaacaacaacgacggagaccacgtttattgtccgccgtgcagatgacgcaccgcccactcttccgcccaggccaatcgcaacttaccccaatcgtcggccatgttaatggttgcctatttgcttgcgggatttgtgcttctggatgggatggtgctgggatcgacttgtttccagcctcggcagcgatttcaggaattttccaaaaccaaatttctgtggatctgtagtgtgcccaaggcgcgactagcggaaaatgcgtgggtaacgtcgccgatagtctgttgccatcgaatattcgtagtgcggccaaggtgatatcaagttatcgacaatttgaaatttgttaccctacaatatttcatttttcatttttttcctttcttgattgtaagattgcttattttattttcaaacacaaatttgtcaactttgttaagaaatctttaagtttttaaagatttgagttaccctacaagtttttttcaaaaaaaattcgtgataaatctccctcttcgtggtgttctaagaaacttactcttagagttataaggaaaattgattcgactcgataaattatatatagtagagagtatatacatacataagcatgttcttgataagaagaactagctgtgtcgttatatacctcgaactccccaattgctgactaaggctatcttatagtcgaggaattctttcgattgagaggctaagtcatccttattggagttagaattggtctagttaagatctggatttgtttgcaaaatgtgaattatgtcaaacgtctgcaattctcaatggttacatctgtttttaacataatcatgttaaatgtggctttttgtcccaagaacggttttaaagataattgtgtactttctttacttgactgttttggcgattttgttaacaaagaacaacatccatttctgcatgcataaaaagtatcattttaataacgttaaattaaattggtattcttacagatttgtatttcattttacgttcatcttcagcgatatcattgattttcttctttatccactcataatatgaggaagttttcgtgtaaaccgctggcccatatccgtaactggagggtccccctccgtaggacgttattccggctaggtaataaaattgatcagcacccctgcccaccgaagccatcagcgggctaccggaatctcccagtccggtgtcggtgccatcccatcccatggcacatatctggatgtccttatcgacgagcagtgttggataccgattcaagcattcatccggactcattccactgatggtgccttggcgaagtacggtgcttttttgctgcagacccgaatcgccccagccggcaatttgaaaagggaagtttttgaaggaggaagttgacaattcaatgccaggccaaatgcaaatgggtctgatctgaagagtgtatctgaaagagaggacatcgatgggaaaatgtgaaaagagggaaccccaaagagcacactacttacttcacccgactcttcagacgcaacagagcaatgtcgttgtagtgtcttccatttctcgtgtagtactgctcgtgcggaaccctcagatccacatcgatgtccacgtgcgctggagcccatatcttggctccattcggcagccaggtgtagtcgggatcgttctcggtgtcatgctcgcccaggcgcacacgtgccacgtagaagtcattcacattcaaacaatgggctgccgtcagcacatagcgactggcgatcaaggagcccgcacacatgggagacggtcgctgctttgctgtgtaggcttcgtaacccagcaggactgtccagggaaactggttggactgtgcctccatgccgcctacgatatatgacgaaggaggactctgtccgcagaccctgctatctggtagtttatcccctgcaaccatcgggcagcaggtaaaaaccatgtgcactagctcgtgggcaaaaggattaatgttgcatagtttgttccggtactgtgatttttgatcgtttgtcatgttccggggatgtagaatcttcataagaggttcacatttgctcagtgggatgcaaatctcgtctagtcggcaaaaattgaattttgctaaggggggtaacaaaaattgaccaattaatggagctcaaaatggccgaaaatagcatttgtaacactgtatgaaatcctattaaagattgcattttcctggtaagactatagttttgtgtagcgaaatcaacccaatgaagttccaattttgtaattataaggtattaattattgttgagaccaaaaatagatccgtgagctgccaaagtatatatttaacactgacactgatccgatgaaattgtagatatgtatattgtattgtagttgccactatttaccaaattggaaagaattcgccaaggaaatcgcttgaagcaaaagtgccaaataaaaatggatcgagaccatcttgaaatgtcaaagcctaaccgaatactgaattcaaaagccagttggtcttaaaagttcaagcttatctcgattgctaaaatgattcatggcacgatgtccaatccacaactttccttgggttaattataatggcctgcctgtccgtccgtatgaatgtcgagatgtcggaaacattaagagtaaggaagcatgtaagttttctttaaaaccgtgccacgcccctgttacgccctaaactcctaaaacgctcacatcctaaaagtcttctggataccaggaaacgttcaaatcctactacttttaaacatatcaaaactgtagtaatagattgatcagagctatatccttgctacacgccaaattattcaaattctacatatccatatgttgcaggttcataaactgagtaacaggtatctaacagtcgcaacactcgaatacattcacaggttttttggaaatgaaggacaccatcaccctgataccgcgtgactagaacgagatttattttttactttctccacaatcccaaaataccgttgaacaaaaagatgataatcaatttccatctccgtaaacaaatataaatccattctgaatatttcaagacacaa

SEQ ID NO: 3887 - DNA, 1086 bp, DROSOPHILA
atttgcatcccactgagcaaatgtgaacctcttatgaagattctacatccccggaacatgacaaacgatcaaaaatcacagtaccggaacaaactatgcaacattaatccttttgcccacgagctagtgcacatggtttttacctgctgcccgatggttgcaggggataaactaccagatagcagggtctgcggacagagtcctccttcgtcatatatcgtaggcggcatggaggcacagtccaaccagtttccctggacagtcctgctgggttacgaagcctacacagcaaagcagcgaccgtctcccatgtgtgcgggctccttgatcgccagtcgctatgtgctgacggcagcccattgtttgaatgtgaatgacttctacgtggcacgtgtgcgcctgggcgagcatgacaccgagaacgatcccgactacacctggctgccgaatggagccaagatatgggctccagcgcacgtggacatcgatgtggatctgagggttccgcacgagcagtactacacgagaaatggaagacactacaacgacattgctctgttgcgtctgaagagtcgggtgaaatacactcttcagatcagacccatttgcatttggcctggcattgaattgtcaacttcctccttcaaaaacttcccttttcaaattgccggctggggcgattcgggtctgcagcaaaaaagcaccgtacttcgccaaggcaccatcagtggaatgagtccggatgaatgcttgaatcggtatccaacactgctcgtcgataaggacatccagatatgtgccatgggatgggatggcaccgacaccggactgggagattccggtagcccgctgatggcttcggtgggcaggggtgctgatcaattttattacctagccggaataacgtcctacggagggggaccctccagttacggatatgggccagcggtttacacgaaaacttcctcatattatgagtggataaagaagaaaatcaatgatatcgctgaagatgaacgtaaaatgaaatacaaatctaaatggatgttgttctttgttaacaaaatcgccaaaacagtcaagtaa

SEQ ID NO: 3888 - protein, 350 aa, DROSOPHILA
MKILHPRNMTNDQKSQYRNKLCNINPFAHELVHMVFTCCPMVAGDKLPDSRVCGQSPPSSYIVGGMEAQSNQFPWTVLLGYEAYTAKQRPSPMCAGSLIASRYVLTAAHCLNVNDFYVARVRLGEHDTENDPDYTWLPNGAKIWAPAHVDIDVDLRVPHEQYYTRNGRHYNDIALLRLKSRVKYTLQIRPICIWPGIELSTSSFKNFPFQIAGWGDSGLQQKSTVLRQGTISGMSPDECLNRYPTLLVDKDIQICAMGWDGTDTGLGDSGSPLMASVGRGADQFYYLAGITSYGGGPSSYGYGPAVYTKTSSYYEWIKKKINDIAEDERKMKYKSKWMLFFVNKIAKTVK

SEQ ID NO: 3889 - DNA, 5284 bp, DROSOPHILA
cccctgccttattaaaggagagtccctgaacacgaacgtagatttattccgagaaaagataaagtcattgggagtggatagcatcctctgcctgtacactaccaccagttgttttgctccacgaaacagcgatgacattgccgaagtatccaagttgtccaaacaatggcagattccccatctggtcaataatgcctatggattgcaggcaaaggaaatcgttaatcagttggagtgcgccaatcgagtcggacgcattgattacttcgttcagagcagcgacaagaatttgctggtgccagtgggtagtgccattgtggccagcttcaatgagagtgtgctccacgatgtggccagtacttatgctgggagagctagtggttcccagtcactagatgtcttgatgacgctactctcacttgggcgcaatggctttcgattgcttttcgatcagcggggcgagaacttcaattacctgagagagaaccttaggaaatttgcagagccacgcggagagattgttatagacagcaggtttaactccatatccttggccataacattggccactttggctggggatcagatgaagagcatcaccaagcttggctccatgctacacatgcgtggagtttccggagcaagagtgatagttcctggccaaaataaaactatagacgggcatgagtttctaggcaagtaatattcactatcgtctttgttttccgactaaaatttagaatatttcgcttagatttcggctcccaccgcagcaacctgcaagttccgtacctgactgtagcggcaggaattggaataacccgagaggagattgacaaattcttcgacattttcaacaagtgctggaaccagatttttcaaactaaaaatgaaaaaattatgagcctactagaaacaacaatcaaataaaaaacctattttttaatattaatgataaactttcacttttttagctgatttttataagcacaattttgttaggaatgtacagcgacttttatttgtttagacaatttggcagtgcatgcagtaacgatatcccactaaagagacctacatatacatatatatattttcctaagtcttagctgtgaccattgcctttgggctttctatttgagttggtgattgggtcgctgctgctattgctgggcacgttctctttgtcgcggtgcttctcccgactccgccgctccaggtgctggttcatggtcgcctcgatcttggcgagtgatagctcgtactcgtgcttaatgcgctcatactcgcgtttcatgtgcgcctccttgtcctcggcatacaacttgtaattgtgggcggtacgcttggcactttgatatcgctgctgtgcggatcgcatcgcctcttcgtgggtggaacgcaagctttccagctgctggcgccagtggtgttccacctggtcgactgactggcgctgtttctcccactgagccatcacagccttcatagattgcctttcggagtcgatgctggcgtgctgctcctccacttctcggagcagttcggcaattcgctggttcttcgcttgcagctcctggcggcacttctgcagcatttccttttgcttttcttccctgccggccagaatttcatcgatattctcgcgttctgccaggatagtttgctttagaagatccacctccgtttgccgctgttgcagctctgcacacaccgtttggtattccctttggaggcactggctcctctcctcagatttttgcagccggttagtaaacctcttgagttctgctgcaaaaagtttggccatctcatcacgaacacgttgttcgatcaaccttatccgattctgggtgagctctttgggcgatggatcagacggggaaactgagtttgatttcggactgggcgtacacttattctgctgcttatgctcctcttgctgcctaatgtacgcctcgaattgcttggccctctccttaagatcgctaatgagctcgtcctgcttgtttgaaagctcgatcttttcctgcatctcggcttgcaaatttttagactgctccagcgcgtgttccaattctttcagttccttggcctgcattgagttcacattctggagtttcaacaactgaatttccgcctaaaaaccgtggtgatatataagattatttagtttactagcatgtctgaaaggttatcgcttaccttggtaatttctgctatgctttcaatgcacttgctgcagttttcggaactttctttggccaccgcaactgcttcttcgcgcttttcccgctcgctcctttggcgcaaggcctgcagatcacgttcgtggctgagtttctccgtttccagaagcttttttagctcctctgatttcatctccgccagctgcaagtttcgctgaacagtggccaagttttggcgttgatcctgcaactccttaagcgtgtccgattctctcagctttctcaattcatagcctaatgactctttgtctgtggcgatgtcagaatagagtttcttaagccgctcgacctcgctctgggaatccctcaacagaatcttgtggcgttccagctccaagcgcaggttgtctgcagtttctcgagttcgcaactgccgattttcctgcgaaagctgatcgtaatttctttgaaggctctcgttctgctgctttagttgctccagatcttcttcaatctgctgccgtttttcccttagtgcatccctctcggccacaatggaattcagctgtgagtgcacatctgactcctgctgtgatctgtgtttttgctcttccaactcctgctgcattgccttcactttgttttccaaccgcattttgccttcgtttagggtttccagctgaaccagggattggttctcctggtcgcgcagcacgcgcagttcctggttgcgttcctccaggagcttctctaggcgtcgcacttcttcccgcttgttcttcaggttgcccagagctcgatacaactcctgcttaatgtgaccgactctgtctagaggattcagcggtgtgctaccaacaaggcgcgatccacccatttgacttagccgactagtaggcgattcgtccgcctgatgctgttgaataaccgaatctatcaggtcaagttccgtggtggtttcgtttaggcgctcatggagcgaagcgactgtttgctccaaataggcaatgcgggctttcaagtcaacgatgcactgttgctgccgacgattttcagcctgcaaatcgggtcttgcacttagttggttgcagcgcatttgggcctcatccaaagcttgactgagctcgttaatcttggcagccttatctacgagcattgtttcgtgaccagactgcagagcattgtagcgcgagtttatctgatccaactcattttgcttgcgatcaagctgatccttcatctgacagagttgctgctgcaaaagatcggactgggctcggtgcgcttcctccatttgctttaaacgtaggtcggcgttccgctcctcccacttctgcttactggcctgcaccatgtcgtatttgctttggacgtccgtaagcaaggtcttggcggcctctaattgaccaactaatcgcgtgttatcttcttccaactgcttcttttccgaccgcagcttgtccagatcgctgtccttattggagcacgtctctttggtctccaccaacagctcgtgagtgttctgcttctcgcgaatggcgcggtctagctcagcctgcatgatggataggtgcttttgtaagtcatccagttttttgtgcgcagcgttggccacctggttgacattctgcagctcattattcttagactccagcaggatctggaggcgatgcatctcgatctcgttggctcgctgagcatcgtcctgcagcggtttatggtgcggatgtgatgggtagttgggtagaactggcggctgttccagttccgactggtaattcgtcgtcgagtcgattgtgttctcttcatcgagcagatcgtcgaaggcattcaccataatccgtccaagcttgcgtagaattggaatcggtgacattgtttaccaggaattcccagatcgcttacctcttcctcgcgtcgtttctgatcctgcagcgcctcttcctcctcctgccggtccagtgtagaatttatgttaagggcatccgccccctgaaagaggcttatacctggcgtgttcatattcggctaaggggacgccacaagcatcaaattcaaataaattccgaggcgcaggcgctattttcgtaggcaactctaattttcttcctcttgcttctgttgacactttgacattaacatagtaacgcgtgctgttaagtgcagtaagcgcttctgtagcgaaaacattgcgttcacactacatacagtctagaagggaattaggtttttattctatacttgtacataaactgtaattgttaaatttaaaaataaatattttcccaaaaagttgccgatatgtcgaaaagattgtggccccgacaatagacctgccaggcatacacaagcttgaagatgatattgtatgtatgtattatcatgccaactatggttccgtcgtatcattgatagggggagctgttgtgcattgcagaatgcagtagatttgctattggaatatacatacatatgtatgtcgtgttagtccagatgacaggtatgtattttcagacacggccagtaattttttataggatcactttatagaaagaatttcttctacctttcaaatacatttcaacgaatcgaaaaaatataacttgctttttaatttaatgggagtccgctcatttcataatatcgaacagctaaaaaatgttacatttcaaagatattctaaaaatatgaataccaactagactccagcaggataaaaataaatcgctttaaattgttaaccggcaatttgtaccagaatttgcacatacatacatatgcatatatgtatgtatatatatcctaacaccgttttagaagaaaaactcaaatggattgtttttaatttttataataaaacttattattcagttagtgttgagtgtccttgttgcaatgcaaaaacaacagcatactttctttttcaatttttttcatttttattaattttatacagactgtccattcataaacgcacttatattgggacatttatctaatttctcgggatctatttggaaaaccttggacaaacgtttccaactttgcgcatcaaagtagtagaaggtgccgcgctcttttgtaccatttttttc

SEQ ID NO: 3890 - DNA, 3163 bp, DROSOPHILA
ttgcctacgaaaatagcgcctgcgcctcggaatttatttgaatttgatgcttgtggcgtccccttagccgaatatgaacacgccaggtataagcctctttcagggggcggatgcccttaacataaattctacactggaccggcaggaggaggaagaggcgctgcaggatcagaaacgacgcgaggaagagcttggacggattatggtgaatgccttcgacgatctgctcgatgaagagaacacaatcgactcgacgacgaattaccagtcggaactggaacagccgccagttctacccaactacccatcacatccgcaccataaaccgctgcaggacgatgctcagcgagccaacgagatcgagatgcatcgcctccagatcctgctggagtctaagaataatgagctgcagaatgtcaaccaggtggccaacgctgcgcacaaaaaactggatgacttacaaaagcacctatccatcatgcaggctgagctagaccgcgccattcgcgagaagcagaacactcacgagctgttggtggagaccaaagagacgtgctccaataaggacagcgatctggacaagctgcggtcggaaaagaagcagttggaagaagataacacgcgattagttggtcaattagaggccgccaagaccttgcttacggacgtccaaagcaaatacgacatggtgcaggccagtaagcagaagtgggaggagcggaacgccgacctacgtttaaagcaaatggaggaagcgcaccgagcccagtccgatcttttgcagcagcaactctgtcagatgaaggatcagcttgatcgcaagcaaaatgagttggatcagataaactcgcgctacaatgctctgcagtctggtcacgaaacaatgctcgtagataaggctgccaagattaacgagctcagtcaagctttggatgaggcccaaatgcgctgcaaccaactaagtgcaagacccgatttgcaggctgaaaatcgtcggcagcaacagtgcatcgttgacttgaaagcccgcattgcctatttggagcaaacagtcgcttcgctccatgagcgcctaaacgaaaccaccacggaacttgacctgatagattcggttattcaacagcatcaggcggacgaatcgcctactagtcggctaagtcaaatgggtggatcgcgccttgttggtagcacaccgctgaatcctctagacagagtcggtcacattaagcaggagttgtatcgagctctgggcaacctgaagaacaagcgggaagaagtgcgacgcctagagaagctcctggaggaacgcaaccaggaactgcgcgtgctgcgcgaccaggagaaccaatccctggttcagctggaaaccctaaacgaaggcaaaatgcggttggaaaacaaagtgaaggcaatgcagcaggagttggaagagcaaaaacacagatcacagcaggagtcagatgtgcactcacagctgaattccattgtggccgagagggatgcactaagggaaaaacggcagcagattgaagaagatctggagcaactaaagcagcagaacgagagccttcaaagaaattacgatcagctttcgcaggaaaatcggcagttgcgaactcgagaaactgcagacaacctgcgcttggagctggaacgccacaagattctgttgagggattcccagagcgaggtcgagcggcttaagaaactctattctgacatcgccacagacaaagagtcattaggctatgaattgagaaagctgagagaatcggacacgcttaaggagttgcaggatcaacgccaaaacttggccactgttcagcgaaacttgcagctggcggagatgaaatcagaggagctaaaaaagcttctggaaacggagaaactcagccacgaacgtgatctgcaggccttgcgccaaaggagcgagcgggaaaagcgcgaagaagcagttgcggtggccaaagaaagttccgaaaactgcagcaagtgcattgaaagcatagcagaaattaccaaggcggaaattcagttgttgaaactccagaatgtgaactcaatgcaggccaaggaactgaaagaattggaacacgcgctggagcagtctaaaaatttgcaagccgagatgcaggaaaagatcgagctttcaaacaagcaggacgagctcattagcgatcttaaggagagggccaagcaattcgaggcgtacattaggcagcaagaggagcataagcagcagaataagtgtacgcccagtccgaaatcaaactcagtttccccgtctgatccatcgcccaaagagctcacccagaatcggataaggttgatcgaacaacgtgttcgtgatgagatggccaaactttttgcagcagaactcaagaggtttactaaccggctgcaaaaatctgaggagaggagccagtgcctccaaagggaataccaaacggtgtgtgcagagctgcaacagcggcaaacggaggtggatcttctaaagcaaactatcctggcagaacgcgagaatatcgatgaaattctggccggcagggaagaaaagcaaaaggaaatgctgcagaagtgccgccaggagctgcaagcgaagaaccagcgaattgccgaactgctccgagaagtggaggagcagcacgccagcatcgactccgaaaggcaatctatgaaggctgtgatggctcagtgggagaaacagcgccagtcagtcgaccaggtggaacaccactggcgccagcagctggaaagcttgcgttccacccacgaagaggcgatgcgatccgcacagcagcgatatcaaagtgccaagcgtaccgcccacaattacaagttgtatgccgaggacaaggaggcgcacatgaaacgcgagtatgagcgcattaagcacgagtacgagctatcactcgccaagatcgaggcgaccatgaaccagcacctggagcggcggagtcgggagaagcaccgcgacaaagagaacgtgcccagcaatagcagcagcgacccaatcaccaactcaaatagaaagcccaaaggcaatggtcacagctaagacttaggaaaatatatatatgtatatgtaggtctctttagtgggatatcgttactgcatgcactgccaaattgtctaaacaaataaaagtcgctgtacattcct

SEQ ID NO: 3891 - protein, 951 aa, DROSOPHILA
MVNAFDDLLDEENTIDSTTNYQSELEQPPVLPNYPSHPHHKPLQDDAQRANEIEMHRLQILLESKNNELQNVNQVANAAHKKLDDLQKHLSIMQAELDRAIREKQNTHELLVETKETCSNKDSDLDKLRSEKKQLEEDNTRLVGQLEAAKTLLTDVQSKYDMVQASKQKWEERNADLRLKQMEEAHRAQSDLLQQQLCQMKDQLDRKQNELDQINSRYNALQSGHETMLVDKAAKINELSQALDEAQMRCNQLSARPDLQAENRRQQQCIVDLKARIAYLEQTVASLHERLNETTTELDLIDSVIQQHQADESPTSRLSQMGGSRLVGSTPLNPLDRVGHIKQELYRALGNLKNKREEVRRLEKLLEERNQELRVLRDQENQSLVQLETLNEGKMRLENKVKAMQQELEEQKHRSQQESDVHSQLNSIVAERDALREKRQQIEEDLEQLKQQNESLQRNYDQLSQENRQLRTRETADNLRLELERHKILLRDSQSEVERLKKLYSDIATDKESLGYELRKLRESDTLKELQDQRQNLATVQRNLQLAEMKSEELKKLLETEKLSHERDLQALRQRSEREKREEAVAVAKESSENCSKCIESIAEITKAEIQLLKLQNVNSMQAKELKELEHALEQSKNLQAEMQEKIELSNKQDELISDLKERAKQFEAYIRQQEEHKQQNKCTPSPKSNSVSPSDPSPKELTQNRIRLIEQRVRDEMAKLFAAELKRFTNRLQKSEERSQCLQREYQTVCAELQQRQTEVDLLKQTILAERENIDEILAGREEKQKEMLQKCRQELQAKNQRIAELLREVEEQHASIDSERQSMKAVMAQWEKQRQSVDQVEHHWRQQLESLRSTHEEAMRSAQQRYQSAKRTAHNYKLYAEDKEAHMKREYERIKHEYELSLAKIEATMNQHLERRSREKHRDKENVPSNSSSDPITNSNRKPKGNGHS

SEQ ID NO: 3892 - DNA, 3534 bp, DROSOPHILA
cggcgtcgagatatcttcctgtgtttccatcaccatcaccattcccattcctatgtcatcgtctgtttctgtaaatttgagaaaattaagtcgttccggttgtgcccgtttttaggtggtacttctgtagcaattttatttgtatcgtaggtgttgtatttgtcaacatttagactctgcgactcggaaatctggacattgcacacaggacttttggactctgggccggcaggcagtggcagcggattagccgatttgtgggtacggattcgaaatgcctactgcagcactaattgggccgctctctgtgcgaagggatgcggatgcaggatgaacggatggatggatggctagcttgtgggatggccagggggtgttttaaggatgcgtttatctgcgctgaggatgtgctaattttttactcagcagaccttgctgcgagcagaaattgagcactgagtgcgcagggtgggggtgaattgaatcaactttgaatgactttggttccttcggattttttcaatagattaggatggacttttaccattcaaaatacaatactattaatcttaaaagttacttatgttacttaagcaaattaagcggttaagtggagtccaaatggcggtcaacatttatatgtagaaataaattcgtaaattcgtaaattcgataaacttataaggtgttttgattatttctaatatttgttagataagatgaataatttatactctattttatatacagtgaacccaatttttatttacatatgtgtatgcccgactcatgtgggaaaaatgtaagtaacgtagctcaaacgcaatctcaaaagtatgcaacactttctcaaattacgtaagcagctctcgtagacatacgctcacatcagtgagctcctgtcagccagtaaacatgtccctttatctggcaacgctgctacccattaaatttgaaatttcgtatttagaaaacctttatttaaaacataaatacacatttaatatggcgcttgcttgcgtgatttcttctccttcctggccttcagtttttcactgctgaacgccgttccacttgcgtcctgtgcccaaaccgtaacaatgccggattctccgcctgtaaaaagtaaacttctctttgaatcgaaaagactatctctgacgatctgcttgtttccctggaaattggccaatggctggaggctgttcttcgaggtaacgctaacggagcgcaggatctcgctgaaagaaggttattcagttgcttgggtattaggccaaagtcagttaataacgaaccccttgttgaagttggtgcccgccaacagaaagactcctccgtcttcctgattgtgggcatttatcaggttgaagtttgcggctttttttctccttattgccgccgtaacatccggccgctcgaaggatgccacctcgtcgccctcctcgcactcgtagctcttgaaatcgccagtggtcgtgacgcaggatatgatgtccttgtcgtagacgtttctgtgccacgccaaccgggccacactgctctccgtgttgaaggtgttaagcagtgcttcatcctcgtccggctccttcacatcgaacacgtttactagcccgtccacactgcccgtggccagaaggtctggattctgggcatggaaccgcaacgaggtgatatcgtcctcatggctttcgaagtagacgcccatttgctggcgctcccgaacatcgaagaacacgaggaacgcgttgctgtgaaactgttcggtgccgcagcaaataatccgaccgttggcgtttctgtcgaagcacgaaagcgatttgggcaccggaggcacattagggtgctgcgtgtacttgaaccgcgcctgttcgcctcttagccgcagatcgtagaggcgcacgtagccatcggtggtgccgaccaggatgttgtgtggtccttcgtcgaggaaacgaacgccacagatgcttacgctctgcggcgaatctgtgggcggcagatagctaaagttctccagtttcccggcgcccgaatccaaattatagatatgcactgctgaattggacagtccggcggccatccgtgagaatccttgatctgcggccaggctaagaacatattcacgctgcaaggacacactgacttcgtcctgcggcttgtacttcagctggaattcggcggcaagatcctgtgcgctacaagtgtcctcatcgccgatgtcttcctcgtcttccgagtccggaagcgcttccctcgcagcttctgcaggatgtacggattaatcaggccgtcttggcaggcttatagctaataaaaccttcgcaatatttgttaaagtcgctcattcttgtctatttttaatttgccgcacgtgcattaaatgacgacagtgctgactattcagctagatttaagctaacttgggctgaagacacattgaatacttaatagacgagttgaaagggataagagtgcacttcaaatgcgtcagcactctttcttttatgacgaaatccacttattcgacaactgaatttatttttaactacttcaataatatgattttgaagccaagtcacacaccacaccttgcgatgcttcttcttggctatgcaaacaaagccgttcacagtgaagcgccttcaaattacggcgcgcattgtgatcgttttaaataaattaaaaattatggttcctttgaaaagttcatggtaatggtaagataaaagcggctacctataattaactcaattgtcaatcatcaacagttccaccatcatacttgtacacccgtaccacacacccacccatacagcacaataagcaagatttctttgttttcgtttaatatcgatctgtagttttattctttatacaaaaatgaatttcacaagaagccgttccgaatacgacctacatacatgtgctgtcgccataagtcagttgcctaaatattctttcggtttggagttggatttgcgtgttcgttgaggtttcttgattgcctgacttgactatgtaactcgttttgtgttatgtatggttatataaatatatatttacatatttatataggttctgccattttatatttaacaaaggactcttattcctgcgcagcatctctaacaagaagaactcttcaacaagcaactatgcattcaataattagatatatgcgggctacatttatagatcctattcacatgaagtcgtcatagtcttcggtgaagtcatttccgtacttttggtaaccgtcaatgtcctgcaaaagagcggattaaataagttcattcgttgatctcgaacggcggcgattgaaacactcacgtcgttttcggtgcggagagtgaccttgcccttgccctttccagcgggctttttagcattggccttttccagcttcagcttttccgagtgcaagatttccacgttcatcttgacctttttgatgtcagcagcgctcactagataaggtgcgaaatcaaatcagataagccgtctttaattgtcagccagctaatcactcac

SEQ ID NO: 3893 - DNA, 1422 bp, DROSOPHILA
agttgtcgaataagtggatttcgtcataaaagaaagagtgctgacgcatttgaagtgcactcttatccctttcaactcgtctattaagtattcaatgtgtcttcagcccaagttagcttaaatctagctgaatagtcagcactgtcgtcatttaatgcacgtgcggcaaattaaaaatagacaagaatgagcgactttaacaaatattgcgaagaagctgcgagggaagcgcttccggactcggaagacgaggaagacatcggcgatgaggacacttgtagcgcacaggatcttgccgccgaattccagctgaagtacaagccgcaggacgaagtcagtgtgtccttgcagcgtgaatatgttcttagcctggccgcagatcaaggattctcacggatggccgccggactgtccaattcagcagtgcatatctataatttggattcgggcgccgggaaactggagaactttagctatctgccgcccacagattcgccgcagagcgtaagcatctgtggcgttcgtttcctcgacgaaggaccacacaacatcctggtcggcaccaccgatggctacgtgcgcctctacgatctgcggctaagaggcgaacaggcgcggttcaagtacacgcagcaccctaatgtgcctccggtgcccaaatcgctttcgtgcttcgacagaaacgccaacggtcggattatttgctgcggcaccgaacagtttcacagcaacgcgttcctcgtgttcttcgatgttcgggagcgccagcaaatgggcgtctacttcgaaagccatgaggacgatatcacctcgttgcggttccatgcccagaatccagaccttctggccacgggcagtgtggacgggctagtaaacgtgttcgatgtgaaggagccggacgaggatgaagcactgcttaacaccttcaacacggagagcagtgtggcccggttggcgtggcacagaaacgtctacgacaaggacatcatatcctgcgtcacgaccactggcgatttcaagagctacgagtgcgaggagggcgacgaggtggcatccttcgagcggccggatgttacggcggcaataaggagaaaaaaagccgcaaacttcaacctgataaatgcccacaatcaggaagacggaggagtctttctgttggcgggcaccaacttcaacaagggcgagatcctgcgctccgttagcgttacctcgaagaacagcctccagccattggccaatttccagggaaacaagcagatcgtcagagatagtcttttcgattcaaagagaagtttactttttacaggcggagaatccggcattgttacggtttgggcacaggacgcaagtggaacggcgttcagcagtgaaaaactgaaggccaggaaggagaagaaatcacgcaagcaagcgccatattaa

SEQ ID NO: 3894 - protein, 411 aa, DROSOPHILA
MSDFNKYCEEAAREALPDSEDEEDIGDEDTCSAQDLAAEFQLKYKPQDEVSVSLQREYVLSLAADQGFSRMAAGLSNSAVHIYNLDSGAGKLENFSYLPPTDSPQSVSICGVRFLDEGPHNILVGTTDGYVRLYDLRLRGEQARFKYTQHPNVPPVPKSLSCFDRNANGRIICCGTEQFHSNAFLVFFDVRERQQMGVYFESHEDDITSLRFHAQNPDLLATGSVDGLVNVFDVKEPDEDEALLNTFNTESSVARLAWHRNVYDKDIISCVTTTGDFKSYECEEGDEVASFERPDVTAAIRRKKAANFNLINAHNQEDGGVFLLAGTNFNKGEILRSVSVTSKNSLQPLANFQGNKQIVRDSLFDSKRSLLFTGGESGIVTVWAQDASGTAFSSEKLKARKEKKSRKQAPY

SEQ ID NO: 3895 - DNA, 3539 bp, DROSOPHILA
ggaccattttttatgcccatttggctcggctggcaagtgtcaaaacatgttttgatgccaggcgctcaattagatattagacacagccgggatcaggggtggctggctgggtgtatcagcatccgtggctggtatctacatccttgtgcctcgctcgcatcgtttacccatcgtttatcctgcctttgggttgactctcgttttttagctgtgggattatgagcaattgacacccctttacaccacggctgagcaattgaaacacatgttttgcacggtaattaaattgggatttgattcgagaaggactctaccaccagccctctctctctctctctctgtctctttctcgcactggctcgtccttccgatgatttctcaattatgacaattgcctggcgatggagaagagaaagcaaacataaggccaggaccaacaaacaaaaaagtcactcaacgggtgaggtgacaattaattagccgagcccaatgcaatccgaggacaccgaaattgattccattggcaatgcaacctgacgcgtggcagggagtgggcccaactcctcgccaaggtcgccgcccagcggggtggctctgcatttgcaatgggccctcccgcttggatccgttcggatcgcattaataagccattggcttgtgccaatcccccgtggatgttgttcccttccccgccggtgccgcatcgggaacccttactcctgattgtgggtggccactccgaaggacactcggcacgctctgcggctctgccgctctgccgctcttccgttcgatttgccacagtttccctgggaaggtcagcagtcagcagcgcagctgtcccgccaggtttctccacagctaatccagagagccaggtccataaaagcgattcagctcaggtatatgaatatatgttgatatatatgtagataataccaggtaccaggtagttcaaataaacagtgtgtgtcgtataattttcaatgttattttcgcatttatttcttaatttgattttgcgccttaattatgactacaattagctactctacaatctgtacaatcttcgggaataaatagatgaggctgactaagactagtttgtacaatcttttgggggagcatgggggggggggagagagtgtgtgtggatcgcgggcttacgcctcagtcttgtagggcttgaagagcttcggcttgggctccgcaatcacagttgtcgtcggcggcggcgacatgtcggaggcaggccgcttggcactgggcatcaggaggcctggagcgggcagcgggctggtggtggtcagtggagcgggagcaggaactgatggagcggattgagccactggactgcggtcgaacaccttggcgtgatcggatcccactggcgagagcgacagcgtggaggagtgcggcgatgacgacgactgcagatccagcggcggcgtctgggtcttgggcacacccacacccagtccggtatagcaggtggcggagggcagagcgcccaaaaggccggcggcaccggcggagtacgacgatcccgttgcgctggatcccatcatgtgcggatgatgcatatgaggaccagcgggatgtggcggcgccgggcgggcggggatgtggtagggcgtgtagcggtactgtccgtagggcgatggatggccggcatgtcccgagtgtccgggcatctgcattgtgggcatctggggcatgcccatcgggggcattccggtggccatcatcggattggtggccacggcagcggcggcggcagcagcggcggcagcagcgggggcgtagggcggatagggcatgcccacgctgttggcggcggcctggaggatggaggcggcgaaggcgggatcggagtagacggctgcgtagggccaggcgacggcgatcctctgacgcttgtccttcatgcggcggttctggaaccacaccttgatcgtgctctccgggaggttcagctgggcggccagttcgcagcgacggggacgggacacgtagttctccttgtagaactccttctccaagcgacccagctggtcacgggtgaaggcggtgcgatagcggcgtaccgacgggtcggcgggaatctccgagccgcggctgccgttcaaggagttatccggactggataggcattctgttttggacagaggaaagattgggtgtaagtaactcgtcacgtttgctcggctttatctttaaacttaccatttggcgagggaggcggtgtctggggcttgccgtactgggtggccaagaggtccacaaccaggggcttctggtccacgggactggcgtcgtgatgggcatggtggctctccatgttgtaggttcggtatccgtgcatgtttggtatgcgtcttgtgattcaaagttggcttattcagaggatattaacgaaggcagttagttgttgactgtgcggcggtcacagctcgagtgtgctgctctcagccaccccgcgcccttttataccgctgcgctctgcaggcaaatggccgccgtcgctgggagcggccaatcgcagcgacccaggcaggtgcgagcgggacagcctgagcggaacggtgctaatcgtgcggtgctgagagtggatgcgctgctgtgctctcggtgctgagcggcgataacgaggcgggacaaagcggaggagcaggacccggagcagcgggatggagccgcgttctctgctcggcaggaccatgaggaggtcctggccatgctggccatggcactcccgagctggagagagagagagttccgatttggtattcatagcggatgagcgaatcttttgtctcgcccgcccgcaggcggttgctccgcaggagcgagcgggacgggcgggcccccttaataatgggattttatcggcttcatcaagaatgatatggcattatgccgctcagtcgggtcgggtggtgtgtgtttgccggcagagagtgtgtgtatcccactatatatttgtatgtatgtattatcgatcgcctgccagcgaattatttgcgcttttatgaagtcttaatattatgccgcacgtttaacagccccacactgccatggctgccatgactttcgggttttgggggcttcatccaccccgttggagcggcggcaggggtgtccagccataaccatttgggaactgctgtagcgagataatggccgcccctgcccgcagaacatggaaaatggaaaatgggaacccagttgccgggacttaatttgaaaagttttcggtttcgttgggcaaaacatttattatgatgatataatcattcccagcgtaccaactgtaccaggaccgggatagtgcctcctcttttgggccagcaaaccggccacttgccacttgcgcaagttagcttggaggtttggccaaaaaaatcgtggggtccacccacaactacctgctgcccggctcaaaacgggttaagctcgcggatcagggctaagtcggcgcaaaaaaataacccagttcgctagtccgttaattgcgttgcctggacctgcgcgcccct

SEQ ID NO: 3896 - DNA, 1468 bp, DROSOPHILA
ttggccgctcccagcgacggcggccatttgcctgcagagcgcagcggtataaaagggcgcggggtggctgagagcagcacactcgagctgtgaccgccgcacagtcaacaactaactgccttcgttaatatcctctgaataagccaactttgaatcacaagacgcataccaaacatgcacggataccgaacctacaacatggagagccaccatgcccatcacgacgccagtcccgtggaccagaagcccctggttgtggacctcttggccacccagtacggcaagccccagacaccgcctccctcgccaaatgaatgcctatccagtccggataactccttgaacggcagccgcggctcggagattcccgccgacccgtcggtacgccgctatcgcaccgccttcacccgtgaccagctgggtcgcttggagaaggagttctacaaggagaactacgtgtcccgtccccgtcgctgcgaactggccgcccagctgaacctcccggagagcacgatcaaggtgtggttccagaaccgccgcatgaaggacaagcgtcagaggatcgccgtcgcctggccctacgcagccgtctactccgatcccgccttcgccgcctccatcctccaggccgccgccaacagcgtgggcatgccctatccgccctacgcccccgctgctgccgccgctgctgccgccgccgctgccgtggccaccaatccgatgatggccaccggaatgcccccgatgggcatgccccagatgcccacaatgcagatgcccggacactcgggacatgccggccatccatcgccctacggacagtaccgctacacgccctaccacatccccgcccgcccggcgccgccacatcccgctggtcctcatatgcatcatccgcacatgatgggatccagcgcaacgggatcgtcgtactccgccggtgccgccggccttttgggcgctctgccctccgccacctgctataccggactgggtgtgggtgtgcccaagacccagacgccgccgctggatctgcagtcgtcgtcatcgccgcactcctccacgctgtcgctctcgccagtgggatccgatcacgccaaggtgttcgaccgcagtccagtggctcaatccgctccatcagttcctgctcccgctccactgaccaccaccagcccgctgcccgctccaggcctcctgatgcccagtgccaagcggcctgcctccgacatgtcgccgccgccgacgacaactgtgattgcggagcccaagccgaagctcttcaagccctacaagactgaggcgtaagcccgcgatccacacacactctctcccccccccccatgctcccccaaaagattgtacaaactagtcttagtcagcctcatctatttattcccgaagattgtacagattgtagagtagctaattgtagtcataattaaggcgcaaaatcaaattaagaaataaa

SEQ ID NO: 3897 - protein, 376 aa, DROSOPHILA
MHGYRTYNMESHHAHHDASPVDQKPLVVDLLATQYGKPQTPPPSPNECLSSPDNSLNGSRGSEIPADPSVRRYRTAFTRDQLGRLEKEFYKENYVSRPRRCELAAQLNLPESTIKVWFQNRRMKDKRQRIAVAWPYAAVYSDPAFAASILQAAANSVGMPYPPYAPAAAAAAAAAAAVATNPMMATGMPPMGMPQMPTMQMPGHSGHAGHPSPYGQYRYTPYHIPARPAPPHPAGPHMHHPHMMGSSATGSSYSAGAAGLLGALPSATCYTGLGVGVPKTQTPPLDLQSSSSPHSSTLSLSPVGSDHAKVFDRSPVAQSAPSVPAPAPLTTTSPLPAPGLLMPSAKRPASDMSPPPTTTVIAEPKPKLFKPYKTEA

SEQ ID NO: 3898 - DNA, 2926 bp, DROSOPHILA
cttgcgcattgcccatctaagcatttttcaatcaaatttgatggatattatgcagctgctgtaaaattaatttttaatgttttacctgcatttcgagcagtgtagctctcggcgtaattgaccaagttattctgcgcttgcttggcccggctccttggggcaaattgattttgcttcgtgcctcatcagcagcgacaattgcccttgccctgatcgccatgatgattgggcttcctgcgcttcttgggcacttcttcgtgcgctcacgtagcagctacccctctcgcccctctttccagcgcttacccttttccctgaccctgaccccccttgacatcctggcccgccgcctctggtggctgctgctgttgtccctcgaccggctaccgatgttttttgcggtttcacactttggttaaggttcctgcccttcgcactcggacttccactcgcggtcagccgccagtcattgggtcacagcccgcagaaggaagatggcccaaagtgcctattcgtcaaataaagtcgacctcaatacgaattgctaaataatatgagtgtatgagtaggttcttatttggatttttaaccaaacacaaagtatacaaagcaataaaccaatcgcctatggaactattctggctagcattccatttaattattccaaaaattaattacataagaaagatcttatacatactaaaaaatatgtttctcgtttaaagaaatttatcattcactgttcaaaagaaaactgaaaaacttaaaaagcaaatgccttacaaaatggtcagtttgctacgtacgaaaccaatcggtatttagcttagaaagattgtttatgattattggatatcagagttatcttacaaaatacgaaatttaatgaacagcttgtggggggaggggtgaaaggacaaagagggttgacaattgttttacttaaactattacaaaaaaagagcgcggctgaaacttgagagcgagtcccagatgctgcctacttaatgtacttgtccatgaacttcttgtggaaatcggagcgcagggcgtcattgacgaagtgcgtcttcttatcgggcgcagatctggcgcaattcttaaagaccacatcatcgtcccagcggcgctttatctttagatcaccgcccagtccagaggcacgtcccgctgccgaggcggcggtgccgggctcatagttcatcagtggattgccggacaggatgttctccatgcgtatgcgttcgtcctcctgcttcttttccgactcgcgacgcgccgtctcctgcagacgttcctgcttgatcttctgcagctcggccagcagggcggcatcatcgtcatcggaatcgctgtccgaatcggagctatcgttgtccagcggctcatcggcgtccatattggcggcctgctgctgagccgcctgctgcgcttgctgctgccctgcgtccggcttggaacgctttgcggcactgctgccaccgccggcgttgttcgcctcaatcgccttgcgtacaatggagggcagtgccttgcccgacgacgacgaagtggctcccgttccggagcgcgcctcacgttcgcgctcctccagctccttgcggaagtcacggttgcggttctcatcgctggtgccctggccagtctccctgcgcaaacacaagttctcgttagacaaggaaattgttatgtgggctactattaatccttacctgtatttcagtttcgtgtggcctggcaaatcgcgactggagtactgcttgctcagtgcactcagatccttttcgccgcgaccggatcctccgcgggctggatcgaaggtcggacgcgctgctgtggtcattttcaactagctagttatgcgtttaattgttaaattgatgaaaagtgaaatgaatttccgaactgcgtgctttgtttgatgtatcaacagtaccaataatcgagccgtaccacggtcacactgaccgataggcctttcgatacacgcttagtgcggactttaaccgtgataagggcggctattgctgggcatcactggaacatcagctgtgcgcaccaatgggcagcattgttacggtaaacacgcgcggagcaccgccgttttatccgacaaacaaaaaaacgctgaaaaacaaaacttttcggcaacttgaagcgattttaagtttagtttagccaaccccctgctatccatcccccaccgacggccatgctggccaatttgcgcgcctgcagcggccacctgttgcatcacagcctccgaaatgcaagaattccacgacgaagctgggcgagcacgactgctggcaaggatcagccggaggaggacagcctgaccatcggcgatgtgagcgtgcggctgcgcaagcccaaggatccgcaactggtgccgcagcaatacggtgagcagggggatgccgggaagtgggaagccaagatctctggacagtgcaaaggtcaacataaagatcttggtgccgcagaattatttcatcattatcattatatcatgtcattatatcatctttgagtagcagacacatcaaggattaaagagaccacggatctaaagcgaaggaatgaatgtaaaactcatggtcatcgagaaaagaccactataatctcaagaaaattcctatgtgaaaacaagctacatgctatatttcataattggccaaatcgacaaattatatgaggcacaagctatccgaactcgagacttaataaactctgtatttggaggaccaaatgatttatgttttaacacgaacctttcgttcttgtatccatccaatccgatagtgaaatacgcatcggatggcacccttcagctgtcgcaatcagcactgcaccacctgcgctggatgctgcagaaggatgcactgcgtcaggacatgtttctactggggcaaccgggtccgct

SEQ ID NO: 3899 - DNA, 863 bp, DROSOPHILA
tacatcaaacaaagcacgcagttcggaaattcatttcacttttcatcaatttaacaattaaacgcataactagctagttgaaaatgaccacagcagcgcgtccgaccttcgatccagcccgcggaggatccggtcgcggcgaaaaggatctgagtgcactgagcaagcagtactccagtcgcgatttgccaggccacacgaaactgaaatacagggagactggccagggcaccagcgatgagaaccgcaaccgtgacttccgcaaggagctggaggagcgcgaacgtgaggcgcgctccggaacgggagccacttcgtcgtcgtcgggcaaggcactgccctccattgtacgcaaggcgattgaggcgaacaacgccggcggtggcagcagtgccgcaaagcgttccaagccggacgcagggcagcagcaagcgcagcaggcggctcagcagcaggccgccaatatggacgccgatgagccgctggacaacgatagctccgattcggacagcgattccgatgacgatgatgccgccctgctggccgagctgcagaagatcaagcaggaacgtctgcaggagacggcgcgtcgcgagtcggaaaagaagcaggaggacgaacgcatacgcatggagaacatcctgtccggcaatccactgatgaactatgagcccggcaccgccgcctcggcagcgggacgtgcctctggactgggcggtgatctaaagataaagcgccgctgggacgatgatgtggtctttaagaattgcgccagatctgcgcccgataagaagacgcacttcgtcaatgacgccctgcgctccgatttccacaagaagttcatggacaagtacattaagtag

SEQ ID NO: 3900 - protein, 259 aa, DROSOPHILA
MTTAARPTFDPARGGSGRGEKDLSALSKQYSSRDLPGHTKLKYRETGQGTSDENRNRDFRKELEEREREARSGTGATSSSSGKALPSIVRKAIEANNAGGGSSAAKRSKPDAGQQQAQQAAQQQAANMDADEPLDNDSSDSDSDSDDDDAALLAELQKIKQERLQETARRESEKKQEDERIRMENILSGNPLMNYEPGTAASAAGRASGLGGDLKIKRRWDDDVVFKNCARSAPDKKTHFVNDALRSDFHKKFMDKYIK

SEQ ID NO: 3901 - DNA, 4287 bp, DROSOPHILA
ggtaaacttaatttgaaagtagtttaatgaaggatgtgcacttccttattactgcaggctgaaatcaactaaattggaaaaaaaactcttgctaattaaaaagcctttcacgttgattaaagccttcaaaatgtcagaagcagtgattttggggaaaataaacaaatattcaaccgtgttttgatagtttgcaatatctaatttaattaactgtgctcagctaataaagcccgttctaataaactaaaatgctttcattttaattactttactgaaaaaataaaaactcgcgtacgaagtttattaccgaaatcgatgttttccttcaatgtttaattttgcaaaattatgttggtttatctgcatatctcatcccacggcacaaagggcatgttgtcctccgaaatgttacatgcatttcccgctccacaattgttgaccaaaaaagttgtcacttcacgtcagcacattattaattcgccgcttccgttccattccgatgcgaacaaaaagtttagctgcatgtttttaattaaatttcacttattattagtattattttcggtcagcctttgcactcgtcatcgttgtttaacgctagtgttttattttcactccgcagcatatcgtatatatacgaatgtgacgtgttttggccgtaccatattgcttttgttcgaaaataaagcgaacaacaagaatgaaaacaagcaaaagtttcaactaattccgctgagttggcccgaacaaacgaaaacgagaacgaatgaatggcaaaacattttgatgagagaagccaaaactgaaaaacgaaatttatatccggatgtgtttttaaaattggtttattatttttttttttataaatttaggtatttagtcattaaaatagagcatataaaatagaatataatccatacaaaatattttccatttttcgctggcgcacaaatcacacacaaaaaatgcctctagagaaacagtgagtgccttgcttggcttagtcgccgaagagcttcttgcccagatccatcatcctgtgattgcggcagacccgcagagcatcggccttcttgagcacggcctggacatcgccgttcacgtccaccagttgggacaggaagtcctcgtacgcggatttaacgttagccggcagggtgccgatcttgacctttttcagggtcttcacaatgccctctgcccagccggactccagggcgaactcggagagccatggcaccaggggtagcacgccgcacatggtctgcattcccaggaaccagagctccgacagatccgaccagtagcccttgtaggcaatggacaccaccagagcggtgggatcgttgctctcatcgatgttgtaggcatcccagaggaagcggatggtggcctggatgtagcgacagatggagaagtcattctgcttcaccttcttggactgctgcttaagcagtagaaggcccagcacagccaggtttccgtggatgaccaggttatcgggcgtatccttcagttcgggtagattctccaccacgaacttcagcagattggcgaaagtcggtccatcctcagccttcttcggctccaagacggtgaagttcatcaaaatgttgcagagcgccactatggcacttctggccaccttcatctccgcctgctgctccggagtcggaaccggatcgggctcattcatgcgcttcaaacgctcagcgcgcggtattggcggcctcttccaatgggcaatgctgaagtagaactccaaggattccagcagcacttcatcctgcttatgggtgaagagcactctcctggcctcctcctccactgcgaaatggcagagagccggaagcatgatccgcagaacatcgatgggtggttcgccctccctagttcctgccctccaggtctttagctcctggaaactctcgttggccaccttgagcatgaagggcagaagcttgtagatggccggtctcatggccgttgtctcctgggctagccaggcggacagaactttcacgatggcaaacacaaacttcttatctttgggattagagctttccctgatcttgtcctggctaacacgggtcaaaaccgccagaacctggttgaaggcgcccttgagagcggtgtaagtggtctgtttctccttgggctctagatccagctgatccgtagccatatactcaatgcaatgctccagaatggagaagcagcaggtgagcagctccgcctgcttgaaggtggtttccagttttttctcatccatttgcatgcgcacctcgatagctcccagttggaggagctgcaggaagaaagtcttctgctcgtccatgaaggcccattggatgcccagcacatgcaaggtggtggctattagatgcagtgcaggatccctttgcttggggccaatcttggccttcagaatatctccacagcccttgaacaagctctccggccagatctgaccctccagagaattaatcacaatctcacgacggcaggtaataaggatatcagccaagatacggcagagctcgtactttctctccgtgtcatcggtttccatgtccaaagcgatcctctggatcagagcatggaaggcagtgggatcctcgggccatgataccactccaaactgcttaacaagcagcacgatcaggtgcaaggcctcatcggtctggaaactctgggcggagtatatctgcgacatcttggggatggctccggtggccagaagggcctgctggcctggctcatggctggcgatgctcttgaggcaactatacgcctcgctgaccacgattaggttatcctcgtagtcctcgtcatcggcctgctcaacgatttccaggagcgtgggtatggcgtcgatgatgtccttatgggtggctaactcctcctcctggcaaaagcacgtgaggatcgagagagctacactcttgtaaactaacggcggacaatcgttgggcagatccttggacactagcagcttcttgaggaagggaaaccctatggcctcgaacagcagcttcttgcccgccgcattgcagtccttgcccttgaccagcttggtgaccataaagagggcggcgaatttttcagtgtcgctcttcgtgcccttcaacaggctggcgcacttgcgcacgggctccggcacgtccgtcatcctggtttccgtctctcctccgggtgtgtatctcacggaccgcctatgaacggtctgtatatttatccgctgctcggatatatgtgtgcgacgtggccttctattaatatctccccacactttcacttggctgcagctttcccgttggttcttctcccgccggatacgttttccgctgattttcttggcttctggttctgtgtcctcgctcgtcgacgcactctcgcacactgatcgtcgccagcggaaaactcgcgagtggctttcccaattttccaaaagctatgcagctgttgccgttcaaacgggaaaacctacacacaatttatttatacacggattctacaccctactactcaggcagggatcatggattggggaatgtctacaagtcttgtgacctaattgaagattgtttatataaaatggtttgactgtccattagataatgatgtttgtatttggttaaatttattacaattttcatggtcaagtgtggtgatttgggtttttaattagatttagatttttatcgatagtagtgatcaattaaaatgaattcatattgcttaggaagggtattcaattcttagcaaaagcttttttatgacttcagcctatagaatttgaaaatcacttgaaatcaaacgaatgaccaatgcattgctctttgttctcggcttttcacaccgcttttccactctcgctcattttcctcccgcattgcgctcttcggagcaccgttgtatatatttagaaaatgattttccttttttccgacttcttcgtgtttacattttagtcaactgtgaaatgttcgctgccggctgcatttcttccagaatattttgaatacgtgttcgcattctccgcacgcgtatgtggccacaaatatccattgaaatatatgtatttatttcatatatatatatatatatatatgtgtgtatctgaaataaatataggtgtgtcggcatcaatgtccagacatttaaataaaccactccgtggagcgtgctacagcaaacaaaatacacatatttttatacgcataatttatacattaacttagttatatagacacattgttttacgcgtatgtggatcgaaaattt

SEQ ID NO: 3902 - DNA, 2287 bp, DROSOPHILA
gggagatattaatagaaggccacgtcgcacacatatatccgagcagcggataaatatacagaccgttcataggcggtccgtgagatacacacccggaggagagacggaaaccaggatgacggacgtgccggagcccgtgcgcaagtgcgccagcctgttgaagggcacgaagagcgacactgaaaaattcgccgccctctttatggtcaccaagctggtcaagggcaaggactgcaatgcggcgggcaagaagctgctgttcgaggccatagggtttcccttcctcaagaagctgctagtgtccaaggatctgcccaacgattgtccgccgttagtttacaagagtgtagctctctcgatcctcacgtgcttttgccaggaggaggagttagccacccataaggacatcatcgacgccatacccacgctcctggaaatcgttgagcaggccgatgacgaggactacgaggataacctaatcgtggtcagcgaggcgtatagttgcctcaagagcatcgccagccatgagccaggccagcaggcccttctggccaccggagccatccccaagatgtcgcagatatactccgcccagagtttccagaccgatgaggccttgcacctgatcgtgctgcttgttaagcagtttggagtggtatcatggcccgaggatcccactgccttccatgctctgatccagaggatcgctttggacatggaaaccgatgacacggagagaaagtacgagctctgccgtatcttggctgatatccttattacctgccgtcgtgagattgtgattaattctctggagggtcagatctggccggagagcttgttcaagggctgtggagatattctgaaggccaagattggccccaagcaaagggatcctgcactgcatctaatagccaccaccttgcatgtgctgggcatccaatgggccttcatggacgagcagaagactttcttcctgcagctcctccaactgggagctatcgaggtgcgcatgcaaatggatgagaaaaaactggaaaccaccttcaagcaggcggagctgctcacctgctgcttctccattctggagcattgcattgagtatatggctacggatcagctggatctagagcccaaggagaaacagaccacttacaccgctctcaagggcgccttcaaccaggttctggcggttttgacccgtgttagccaggacaagatcagggaaagctctaatcccaaagataagaagtttgtgtttgccatcgtgaaagttctgtccgcctggctagcccaggagacaacggccatgagaccggccatctacaagcttctgcccttcatgctcaaggtggccaacgagagtttccaggagctaaagacctggagggcaggaactagggagggcgaaccacccatcgatgttctgcggatcatgcttccggctctctgccatttcgcagtggaggaggaggccaggagagtgctcttcacccataagcaggatgaagtgctgctggaatccttggagttctacttcagcattgcccattggaagaggccgccaataccgcgcgctgagcgtttgaagcgcatgaatgagcccgatccggttccgactccggagcagcaggcggagatgaaggtggccagaagtgccatagtggcgctctgcaacattttgatgaacttcaccgtcttggagccgaagaaggctgaggatggaccgactttcgccaatctgctgaagttcgtggtggagaatctacccgaactgaaggatacgcccgataacctggtcatccacggaaacctggctgtgctgggccttctactgcttaagcagcagtccaagaaggtgaagcagaatgacttctccatctgtcgctacatccaggccaccatccgcttcctctgggatgcctacaacatcgatgagagcaacgatcccaccgctctggtggtgtccattgcctacaagggctactggtcggatctgtcggagctctggttcctgggaatgcagaccatgtgcggcgtgctacccctggtgccatggctctccgagttcgccctggagtccggctgggcagagggcattgtgaagaccctgaaaaaggtcaagatcggcaccctgccggctaacgttaaatccgcgtacgaggacttcctgtcccaactggtggacgtgaacggcgatgtccaggccgtgctcaagaaggccgatgctctgcgggtctgccgcaatcacaggatgatggatctgggcaagaagctcttcggcgactaa

SEQ ID NO: 3903 - protein, 723 aa, DROSOPHILA
MTDVPEPVRKCASLLKGTKSDTEKFAALFMVTKLVKGKDCNAAGKKLLFEAIGFPFLKKLLVSKDLPNDCPPLVYKSVALSILTCFCQEEELATHKDIIDAIPTLLEIVEQADDEDYEDNLIVVSEAYSCLKSIASHEPGQQALLATGAIPKMSQIYSAQSFQTDEALHLIVLLVKQFGVVSWPEDPTAFHALIQRIALDMETDDTERKYELCRILADILITCRREIVINSLEGQIWPESLFKGCGDILKAKIGPKQRDPALHLIATTLHVLGIQWAFMDEQKTFFLQLLQLGAIEVRMQMDEKKLETTFKQAELLTCCFSILEHCIEYMATDQLDLEPKEKQTTYTALKGAFNQVLAVLTRVSQDKIRESSNPKDKKFVFAIVKVLSAWLAQETTAMRPAIYKLLPFMLKVANESFQELKTWRAGTREGEPPIDVLRIMLPALCHFAVEEEARRVLFTHKQDEVLLESLEFYFSIAHWKRPPIPRAERLKRMNEPDPVPTPEQQAEMKVARSAIVALCNILMNFTVLEPKKAEDGPTFANLLKFVVENLPELKDTPDNLVIHGNLAVLGLLLLKQQSKKVKQNDFSICRYIQATIRFLWDAYNIDESNDPTALVVSIAYKGYWSDLSELWFLGMQTMCGVLPLVPWLSEFALESGWAEGIVKTLKKVKIGTLPANVKSAYEDFLSQLVDVNGDVQAVLKKADALRVCRNHRMMDLGKKLFGD

SEQ ID NO: 3904 - DNA, 6366 bp, DROSOPHILA
aaaaataaaagaatatttaaaaaatcgttgaaatcaccgatgacaagctctaaatgcgcaaacttcaaattaaagtcacagatgaaagagttcattaaatacaaaaatagtaaagcctattcgtattttaactgttgtgttgtaattatgcataaagcgtattaattatgtatgtgtaacaaaaatataagagaaaaacaaatacaaacgaaaagaaaagaaaaacaaataaagagtatgtattactaaacaaaacaaaagcatatttgcagaattgaaggtgtagacactgagagaaaaggaagcacacatttcatttaaattaagcgccgaagaagctgcaataacgcattaaaaagccaatcaaattcaaagtttcctgcttttgccattaacattattattaatattatttcccttattatcatttaccgatgccaaaacattgatttaattaacgagcggttaaaagaatggcaaagaaagtttatttataagaccgaagcgataatgattatttaaatatgaaagaattcaactaacttcatattaagatgtccttgttatgtcgcaaagaattaataaaaataaaagtgaaaaaacaattgaaaaccagaaaaagcaaacatgacgaattaatacaagtttaataaatgcgataaaacaaatgaaatgatattttcaaatgggaacagtatggatttggttagtactcttgatgactaaattggacttgcagaaatcgaggcacgaagacatattttttcactgcactcatacgagtaccgaccaatttaatttattacgcattttattgcactgtggccaatgatcagttaaaataaagcaacgttccactttgctagtgaaccttatcaaaaataaataattgattatgtaactcttgctctttaatctcaacacccaattacctcgttgcgtctatttttcaatatttcttcaatttaaagcacatgattttgttgaatttataatttttattcacttaaaaatgtagctccaaatacacttataattttacggtgtttaatatatgtatttatctttaaatgtatgtgtgtatgtgtatcgttaataattatgtttatagaaactcatatatcggagccactctaccgacaatgcacgaatgattagtgtgaggcgcggaatagttcgccaattaaaatggtttcggattaggcgagcccaaatccaaatgggaaccttctcctactgcacgtatccgcgaccaagagtaaggatggtatcaaagaagtgaatattgaatcgggtatgtcatctgatttcgccatcggctggatgtcttagccaatggttgctgtagtaagttaccgcgtccaggatgcgaatgtgattggttttgcttgctcggttttacggaaaaaattcatttaaaaagttccattttgtggttttgttttgcggtgtaaaactagaaatctaactgtaaagatcatcgtcgccgttgtcgccgggcgagttaactggcaagttgttaccagatcctgaggtgttgccggtttgaccggggaatctgcaataacatatacactatcatcagtaacctggattccaacaagaaatgcctttcaattctcacctgaagttctgtccgaatccacgggactgctgcaaagtctgggcaaacatctcgtacttcctgatgtcattatcggacaccgaacggcgagcgaacttcatggcctcctcgaagtgggcgctagtaatctccggcactggatcgtcctcgtccatctgattatatgggtaaatagtcaaacataaacattcttattttttgcgctaagctaaatgacttacgtccatcgcggagttctgattttcggcgcgctccttctcgcgacgaatttcagcctcgatggcctgtcggatggccagcttgcaagcccgctggcagatctcggtcagatcggcgccagagaagccctgcgtcaccttggcgatgtaggtaaggtctacttccttggccagcggcgacttgcgcaagttagccttcaggatagcctcacgcgatttgtcgtcgggcagcggaatatagatcaactgatccagacggcccggacggaggatggccggatcgataatgtccgggcgattggtggctccgatgatgaacacattcttcttggctcccatgccatccatttcggtaaggatctgattgatcacacgatcagcggcgccgccagcatcgccgacattaccgccacgggctttggcgatcgagtccagctcgtcgaagaagagcacacaaggagccgccgagcgggccttatcgaagatgtcgcgcacgttggcctcagactcgccgaaccacatggtcagcagttcgggacccttgactgagatgaagttcgcctggcactcgttggcaatggccttggccagcagcgtcttaccgcaaccagggggtccgtagaaaaggacaccgcgactgggctgcatgccaaacttcaagaacttgtccggatgctccactgggtattgcaccagctcctgcaattccttcttgacgctctccagacctccgatgtctgtccaggtggtgttgggcacctcaacaacagtttcacgcagcgccgatggactggacttggtcatagcgtagcggaagttctccattgtcacggccagcgacgccagcacctcggcatcgatcttatcgtcttccaaatcgatgaggtccatcttctcacggatttgctgaagggcagcctcagagcagagtgaagccagatcagcgcccacatgtccgtgggattcggcagcaatctgctccaggtcaacatcatcatgcagcttcatgttcttggtgtgaatgcgcagcacctccagccgtccagtggcatctggaatgccgatgtcaatctcacgatcaaaacgtccaaagcgacgcagggccgggtcaatggagttgggcctgttggtagcagccataacgatcagatgggagctcttcttcatgccatccatcagggtcaaaagctgcgacacaatgcgacgctccacctcaccgtgggtcttgtcacgcttgggggcaatagcgtcgatctcatcgatgaagatgatagccggcgagtttttctcggcttcctcgaaggccttgcgcagattcgattccgactctccggccagtttggacatgatctccggtccgttaatcaggaagaaaaaggctccggtctcgttggccacagccctggcaatcagggtcttaccggtacccgggggaccgtacataagaataccacgcggtggcttcacaccaatggccttgaagagcgatggatgccgcaaaggcaactcaaccatctccttgatctgggccagctgcttgcggcaaccaccgatatcatcgtagccaacggcgtttagggactcctcctcctcctcgcgcttaattggatcaccgtcgcagaagattaccgtctcgggagctacgatgcagtagggctccgggtcggtcagcaccaccttgaactcaataggacgcatggcggcgcgcacaataaagttgtcgcccatgtggattggccgataggcctctaggaagtacggcttcagatagatctcgaacaggttgccggtaacgccttcggtgctttcgtcgatgggcaggatgcgcacccgtttgccgtacttgacgtccgggcaggactgcacggaaaccacatctgaaagatggacgcacaggttgttgcgcaccacgcggttcatgcggatcttctcgtcgggacaggtgtcgtccgagagcacgatgcacaccgtctcctttcggcgcttgcccttcagaatcacggtgtcgccacggaagagctgcagctcatccatcttcgcctgatatagtttaagggggaaaaagaacagccaagtcatgtgaattagccatgcgatgacgtggcctttgggagagtgaatcttacctgcgatagcgacaccacagagttgtcgtcattctgcgcctcttccacaatcagtcggttgggacggtccttgcgcttcaggatcgccgtagccagatcttcactgtagggtagaagaaaaaagcatcgcgtaagactcgtcgctaaagaaatatcttatgtcttatatataatttggcctaaccgcttatcgaacgagtctttcggcttcattttctcatcctgctcgctgtgatatccccgcataaagtccctcgtatccccatcatgatccatcttatcgttcttgccgccagacattgttttttttgtttttttttttgtttttttggattgccttttttgttagttttgataaatttatggaaactactttcactagtaatacggaatggaactaagcatctggataattaggcctgccgaatcatttttcgttgctaacgtgatgatgtcgatcaatctttattgatagatttttgaacataaaaggttatcaccctatatcgttcataaaaatctatattaatcggaataatagtacaattgtttattgtctttagttataaaagtatgtttgtatttcttgtattcgatgccaacttttttggcgccatttgttataataatttctaaactttgaggtaaattatgcatttattgttacttaaacgatatgtttttttttacttctggcgagttgagggagcacaaagacttttctagaattaatgcaatatcaaaaaaggtattactaataggtagcattgaaataagtggtttcggcatatagtttaggattttcgcgatttattatagaaatagctgccatatatgtatgcagtattgtttttcgtatccaaagttataactacaacaaccggaaaattgtatcctccagcaaaggatgacttgtatttttgggacaacaaagggaaatcgtaagttttcaagcggcaacaacaactgcaagggcagtaacaccaacaacaacaacaacgtactgcaaatggcgattctcgctggcgtttttttttcttcggtttttaggtttgccctagtttcgcaacattttgcaaccgagcagtggaaaagtcgcggtaaatgtctttgtctcgcggaaatcggcgaaagcctttcacaattaaataatagtatgtctgcgatgtggcccttgcgtatttttttcggctcaatgactgagcgaaatttgtgaatttcgacttggaccgacacagtcggcgcctatttcggcgtccagttcacttaccccttggaatctgccatgataaactagttgacgttgaactttttaacttaattgtacaattcggcgcgacttggactattcgttgagctggaaatcggcacttttagtcaaattcaaagatgaggcagcagaaacagattggtgatgtgcgttaccggacattcatcgattgggcttagaaaatatcgattacacgctgcgatggtttgtaaaagaaattgaagtggcaacgctaaaggaaagagtggcaatgtgtgcaggtgcctaacttggctatgctcgctggcagatgatcgctgctatgaagccatgcgtgataacgtagctgcttacgtttttattgaaaaagtgcagcatacttttcggctatgtctatatctaaaatatatgtaggaagtatgtagaactcaatccgtctatttcacttagttgtagaagttttggtagtaagaaaaaatcttcattcattcatttccctagaacactcggccatcaacctgtccctacaataactgctcaatcgcagcttatgctcgtaaaaactttttagtattcatggttttggcattaacgatgccaattatggcagcgttttatttagctttactttcagttttattttttagtacttaagagagtgacagcgacgtcggcagagaggagagcagcgtcattgggcgtggtcgctgcccccaaaagaatgggagcaaactccatagaaacgcagaacgaattcaaccaatcgcctgcaagtctcttgtcttcgaagagcgcctgcgcagagagcaaaagaaagtggcgagcggaaaccagtttttgtgacgatgagggtgacgatgaagaggagtggggagtcggggtggctgataaagatggccgtcgccttccgcggcgcaggaagcagcgaagagcggggggcagggcagcggaaccgcctcagacccaaagtcacaattatggggcactcattcattgcggtgtatgatgcaaacagcgctctcctcgcttttctctcttttccaccaaactctgctgtacagtccgacgtctttagctctgatttattcacacgattttttgttttattttactatcttgattctgtattatacttattgtgaagatact

SEQ ID NO: 3905 - DNA, 2981 bp, DROSOPHILA
ctgcctcatctttgaatttgactaaaagtgccgatttccagctcaacgaatagtccaagtcgcgccgaattgtacaattaagttaaaaagttcaacgtcaactagtttatcatggcagattccaagggtgaagatctggctacggcgatcctgaagcgcaaggaccgtcccaaccgactgattgtggaagaggcgcagaatgacgacaactctgtggtgtcgctatcgcaggcgaagatggatgagctgcagctcttccgtggcgacaccgtgattctgaagggcaagcgccgaaaggagacggtgtgcatcgtgctctcggacgacacctgtcccgacgagaagatccgcatgaaccgcgtggtgcgcaacaacctgtgcgtccatctttcagatgtggtttccgtgcagtcctgcccggacgtcaagtacggcaaacgggtgcgcatcctgcccatcgacgaaagcaccgaaggcgttaccggcaacctgttcgagatctatctgaagccgtacttcctagaggcctatcggccaatccacatgggcgacaactttattgtgcgcgccgccatgcgtcctattgagttcaaggtggtgctgaccgacccggagccctactgcatcgtagctcccgagacggtaatcttctgcgacggtgatccaattaagcgcgaggaggaggaggagtccctaaacgccgttggctacgatgatatcggtggttgccgcaagcagctggcccagatcaaggagatggttgagttgcctttgcggcatccatcgctcttcaaggccattggtgtgaagccaccgcgtggtattcttatgtacggtcccccgggtaccggtaagaccctgattgccagggctgtggccaacgagaccggagcctttttcttcctgattaacggaccggagatcatgtccaaactggccggagagtcggaatcgaatctgcgcaaggccttcgaggaagccgagaaaaactcgccggctatcatcttcatcgatgagatcgacgctattgcccccaagcgtgacaagacccacggtgaggtggagcgtcgcattgtgtcgcagcttttgaccctgatggatggcatgaagaagagctcccatctgatcgttatggctgctaccaacaggcccaactccattgacccggccctgcgtcgctttggacgttttgatcgtgagattgacatcggcattccagatgccactggacggctggaggtgctgcgcattcacaccaagaacatgaagctgcatgatgatgttgacctggagcagattgctgccgaatcccacggacatgtgggcgctgatctggcttcactctgctctgaggctgcccttcagcaaatccgtgagaagatggacctcatcgatttggaagacgataagatcgatgccgaggtgctggcgtcgctggccgtgacaatggagaacttccgctacgctatgaccaagtccagtccatcggcgctgcgtgaaactgttgttgaggtgcccaacaccacctggacagacatcggaggtctggagagcgtcaagaaggaattgcaggagctggtgcaatacccagtggagcatccggacaagttcttgaagtttggcatgcagcccagtcgcggtgtccttttctacggaccccctggttgcggtaagacgctgctggccaaggccattgccaacgagtgccaggcgaacttcatctcagtcaagggtcccgaactgctgaccatgtggttcggcgagtctgaggccaacgtgcgcgacatcttcgataaggcccgctcggcggctccttgtgtgctcttcttcgacgagctggactcgatcgccaaagcccgtggcggtaatgtcggcgatgctggcggcgccgctgatcgtgtgatcaatcagatccttaccgaaatggatggcatgggagccaagaagaatgtgttcatcatcggagccaccaatcgcccggacattatcgatccggccatcctccgtccgggccgtctggatcagttgatctatattccgctgcccgacgacaaatcgcgtgaggctatcctgaaggctaacttgcgcaagtcgccgctggccaaggaagtagaccttacctacatcgccaaggtgacgcagggcttctctggcgccgatctgaccgagatctgccagcgggcttgcaagctggccatccgacaggccatcgaggctgaaattcgtcgcgagaaggagcgcgccgaaaatcagaactccgcgatggacatggacgaggacgatccagtgccggagattactagcgcccacttcgaggaggccatgaagttcgctcgccgttcggtgtccgataatgacatcaggaagtacgagatgtttgcccagactttgcagcagtcccgtggattcggacagaacttcagattccccggtcaaaccggcaacacctcaggatctggtaacaacttgccagttaactcgcccggcgacaacggcgacgatgatctttacagttagatttctagttttacaccgcaaaacaaaaccacaaaatggaactttttaaatgaattttttccgtaaaaccgagcaagcaaaaccaatcacattcgcatcctggacgcggtaacttactacagcaaccattggctaagacatccagccgatggcgaaatcagatgacatacccgattcaatattcacttctttgataccatccttactcttggtcgcggatacgtgcagtaggagaaggttcccatttggatttgggctcgcctaatccgaaaccattttaattggcgaactattccgcgcctcacactaatcattcgtgcattgtcggtagagtggctccgatatatgagtttctataaacataattattaacgatacacatacacacatacatttaaagataaatacatatattaaacaccgtaaaattataagtgtatttggagctacatttttaagtgaat

SEQ ID NO: 3906 - protein, 801 aa, DROSOPHILA
MADSKGEDLATAILKRKDRPNRLIVEEAQNDDNSVVSLSQAKMDELQLFRGDTVILKGKRRKETVCIVLSDDTCPDEKIRMNRVVRNNLCVHLSDVVSVQSCPDVKYGKRVRILPIDESTEGVTGNLFEIYLKPYFLEAYRPIHMGDNFIVRAAMRPIEFKVVLTDPEPYCIVAPETVIFCDGDPIKREEEEESLNAVGYDDIGGCRKQLAQIKEMVELPLRHPSLFKAIGVKPPRGILMYGPPGTGKTLIARAVANETGAFFFLINGPEIMSKLAGESESNLRKAFEEAEKNSPAIIFIDEIDAIAPKRDKTHGEVERRIVSQLLTLMDGMKKSSHLIVMAATNRPNSIDPALRRFGRFDREIDIGIPDATGRLEVLRIHTKNMKLHDDVDLEQIAAESHGHVGADLASLCSEAALQQIREKMDLIDLEDDKIDAEVLASLAVTMENFRYAMTKSSPSALRETVVEVPNTTWTDIGGLESVKKELQELVQYPVEHPDKFLKFGMQPSRGVLFYGPPGCGKTLLAKAIANECQANFISVKGPELLTMWFGESEANVRDIFDKARSAAPCVLFFDELDSIAKARGGNVGDAGGAADRVINQILTEMDGMGAKKNVFIIGATNRPDIIDPAILRPGRLDQLIYIPLPDDKSREAILKANLRKSPLAKEVDLTYIAKVTQGFSGADLTEICQRACKLAIRQAIEAEIRREKERAENQNSAMDMDEDDPVPEITSAHFEEAMKFARRSVSDNDIRKYEMFAQTLQQSRGFGQNFRFPGQTGNTSGSGNNLPVNSPGDNGDDDLYS

SEQ ID NO: 3907 - DNA, 6336 bp, DROSOPHILA
aaaaataaaagaatatttaaaaaatcgttgaaatcaccgatgacaagctctaaatgcgcaaacttcaaattaaagtcacagatgaaagagttcattaaatacaaaaatagtaaagcctattcgtattttaactgttgtgttgtaattatgcataaagcgtattaattatgtatgtgtaacaaaaatataagagaaaaacaaatacaaacgaaaagaaaagaaaaacaaataaagagtatgtattactaaacaaaacaaaagcatatttgcagaattgaaggtgtagacactgagagaaaaggaagcacacatttcatttaaattaagcgccgaagaagctgcaataacgcattaaaaagccaatcaaattcaaagtttcctgcttttgccattaacattattattaatattatttcccttattatcatttaccgatgccaaaacattgatttaattaacgagcggttaaaagaatggcaaagaaagtttatttataagaccgaagcgataatgattatttaaatatgaaagaattcaactaacttcatattaagatgtccttgttatgtcgcaaagaattaataaaaataaaagtgaaaaaacaattgaaaaccagaaaaagcaaacatgacgaattaatacaagtttaataaatgcgataaaacaaatgaaatgatattttcaaatgggaacagtatggatttggttagtactcttgatgactaaattggacttgcagaaatcgaggcacgaagacatattttttcactgcactcatacgagtaccgaccaatttaatttattacgcattttattgcactgtggccaatgatcagttaaaataaagcaacgttccactttgctagtgaaccttatcaaaaataaataattgattatgtaactcttgctctttaatctcaacacccaattacctcgttgcgtctatttttcaatatttcttcaatttaaagcacatgattttgttgaatttataatttttattcacttaaaaatgtagctccaaatacacttataattttacggtgtttaatatatgtatttatctttaaatgtatgtgtgtatgtgtatcgttaataattatgtttatagaaactcatatatcggagccactctaccgacaatgcacgaatgattagtgtgaggcgcggaatagttcgccaattaaaatggtttcggattaggcgagcccaaatccaaatgggaaccttctcctactgcacgtatccgcgaccaagagtaaggatggtatcaaagaagtgaatattgaatcgggtatgtcatctgatttcgccatcggctggatgtcttagccaatggttgctgtagtaagttaccgcgtccaggatgcgaatgtgattggttttgcttgctcggttttacggaaaaaattcatttaaaaagttccattttgtggttttgttttgcggtgtaaaactagaaatctaactgtaaagatcatcgtcgccgttgtcgccgggcgagttaactggcaagttgttaccagatcctgaggtgttgccggtttgaccggggaatctgcaataacatatacactatcatcagtaacctggattccaacaagaaatgcctttcaattctcacctgaagttctgtccgaatccacgggactgctgcaaagtctgggcaaacatctcgtacttcctgatgtcattatcggacaccgaacggcgagcgaacttcatggcctcctcgaagtgggcgctagtaatctccggcactggatcgtcctcgtccatctgattatatgggtaaatagtcaaacataaacattcttattttttgcgctaagctaaatgacttacgtccatcgcggagttctgattttcggcgcgctccttctcgcgacgaatttcagcctcgatggcctgtcggatggccagcttgcaagcccgctggcagatctcggtcagatcggcgccagagaagccctgcgtcaccttggcgatgtaggtaaggtctacttccttggccagcggcgacttgcgcaagttagccttcaggatagcctcacgcgatttgtcgtcgggcagcggaatatagatcaactgatccagacggcccggacggaggatggccggatcgataatgtccgggcgattggtggctccgatgatgaacacattcttcttggctcccatgccatccatttcggtaaggatctgattgatcacacgatcagcggcgccgccagcatcgccgacattaccgccacgggctttggcgatcgagtccagctcgtcgaagaagagcacacaaggagccgccgagcgggccttatcgaagatgtcgcgcacgttggcctcagactcgccgaaccacatggtcagcagttcgggacccttgactgagatgaagttcgcctggcactcgttggcaatggccttggccagcagcgtcttaccgcaaccagggggtccgtagaaaaggacaccgcgactgggctgcatgccaaacttcaagaacttgtccggatgctccactgggtattgcaccagctcctgcaattccttcttgacgctctccagacctccgatgtctgtccaggtggtgttgggcacctcaacaacagtttcacgcagcgccgatggactggacttggtcatagcgtagcggaagttctccattgtcacggccagcgacgccagcacctcggcatcgatcttatcgtcttccaaatcgatgaggtccatcttctcacggatttgctgaagggcagcctcagagcagagtgaagccagatcagcgcccacatgtccgtgggattcggcagcaatctgctccaggtcaacatcatcatgcagcttcatgttcttggtgtgaatgcgcagcacctccagccgtccagtggcatctggaatgccgatgtcaatctcacgatcaaaacgtccaaagcgacgcagggccgggtcaatggagttgggcctgttggtagcagccataacgatcagatgggagctcttcttcatgccatccatcagggtcaaaagctgcgacacaatgcgacgctccacctcaccgtgggtcttgtcacgcttgggggcaatagcgtcgatctcatcgatgaagatgatagccggcgagtttttctcggcttcctcgaaggccttgcgcagattcgattccgactctccggccagtttggacatgatctccggtccgttaatcaggaagaaaaaggctccggtctcgttggccacagccctggcaatcagggtcttaccggtacccgggggaccgtacataagaataccacgcggtggcttcacaccaatggccttgaagagcgatggatgccgcaaaggcaactcaaccatctccttgatctgggccagctgcttgcggcaaccaccgatatcatcgtagccaacggcgtttagggactcctcctcctcctcgcgcttaattggatcaccgtcgcagaagattaccgtctcgggagctacgatgcagtagggctccgggtcggtcagcaccaccttgaactcaataggacgcatggcggcgcgcacaataaagttgtcgcccatgtggattggccgataggcctctaggaagtacggcttcagatagatctcgaacaggttgccggtaacgccttcggtgctttcgtcgatgggcaggatgcgcacccgtttgccgtacttgacgtccgggcaggactgcacggaaaccacatctgaaagatggacgcacaggttgttgcgcaccacgcggttcatgcggatcttctcgtcgggacaggtgtcgtccgagagcacgatgcacaccgtctcctttcggcgcttgcccttcagaatcacggtgtcgccacggaagagctgcagctcatccatcttcgcctgatatagtttaagggggaaaaagaacagccaagtcatgtgaattagccatgcgatgacgtggcctttgggagagtgaatcttacctgcgatagcgacaccacagagttgtcgtcattctgcgcctcttccacaatcagtcggttgggacggtccttgcgcttcaggatcgccgtagccagatcttcactgtagggtagaagaaaaaagcatcgcgtaagactcgtcgctaaagaaatatcttatgtcttatatataatttggcctaaccgcttatcgaacgagtctttcggcttcattttctcatcctgctcgctgtgatatccccgcataaagtccctcgtatccccatcatgatccatcttatcgttcttgccgccagacattgttttttttgtttttttttttgtttttttggattgccttttttgttagttttgataaatttatggaaactactttcactagtaatacggaatggaactaagcatctggataattaggcctgccgaatcatttttcgttgctaacgtgatgatgtcgatcaatctttattgatagatttttgaacataaaaggttatcaccctatatcgttcataaaaatctatattaatcggaataatagtacaattgtttattgtctttagttataaaagtatgtttgtatttcttgtattcgatgccaacttttttggcgccatttgttataataatttctaaactttgaggtaaattatgcatttattgttacttaaacgatatgtttttttttacttctggcgagttgagggagcacaaagacttttctagaattaatgcaatatcaaaaaaggtattactaataggtagcattgaaataagtggtttcggcatatagtttaggattttcgcgatttattatagaaatagctgccatatatgtatgcagtattgtttttcgtatccaaagttataactacaacaaccggaaaattgtatcctccagcaaaggatgacttgtatttttgggacaacaaagggaaatcgtaagttttcaagcggcaacaacaactgcaagggcagtaacaccaacaacaacaacaacgtactgcaaatggcgattctcgctggcgtttttttttcttcggtttttaggtttgccctagtttcgcaacattttgcaaccgagcagtggaaaagtcgcggtaaatgtctttgtctcgcggaaatcggcgaaagcctttcacaattaaataatagtatgtctgcgatgtggcccttgcgtatttttttcggctcaatgactgagcgaaatttgtgaatttcgacttggaccgacacagtcggcgcctatttcggcgtccagttcacttaccccttggaatctgccatgataaactagttgacgttgaactttttaacttaattgtacaattcggcgcgacttggactattcgttgagctggaaatcggcacttttagtcaaattcaaagatgaggcagcagaaacagattggtgatgtgcgttaccggacattcatcgattgggcttagaaaatatcgattacacgctgcgatggtttgtaaaagaaattgaagtggcaacgctaaaggaaagagtggcaatgtgtgcaggtgcctaacttggctatgctcgctggcagatgatcgctgctatgaagccatgcgtgataacgtagctgcttacgtttttattgaaaaagtgcagcatacttttcggctatgtctatatctaaaatatatgtaggaagtatgtagaactcaatccgtctatttcacttagttgtagaagttttggtagtaagaaaaaatcttcattcattcatttccctagaacactcggccatcaacctgtccctacaataactgctcaatcgcagcttatgctcgtaaaaactttttagtattcatggttttggcattaacgatgccaattatggcagcgttttatttagctttactttcagttttattttttagtacttaagagagtgacagcgacgtcggcagagaggagagcagcgtcattgggcgtggtcgctgcccccaaaagaatgggagcaaactccatagaaacgcagaacgaattcaaccaatcgcctgcaagtctcttgtcttcgaagagcgcctgcgcagagagcaaaagaaagtggcgagcggaaaccagtttttgtgacgatgagggtgacgatgaagaggagtggggagtcggggtggctgataaagatggccgtcgccttccgcggcgcaggaagcagcgaagagcggggggcagggcagcggaaccgcctcagacccaaagtcacaattatggggcactcattcattgcggtgtatgatgcaaacagcgctctcctcgcttttctctcttttccaccaaactctgctgtacagtccgacgtctttagctctgatttattcacacgattttttgttttattttactatcttg

SEQ ID NO: 3908 - DNA, 1433 bp, DROSOPHILA
ccgatttccagctcaacgaatagtccaagtcgcgccgaattgtacaattaagttaaaaagttcttgaagtttggcatgcagcccagtcgcggtgtccttttctacggaccccctggttgcggtaagacgctgctggccaaggccattgccaacgagtgccaggcgaacttcatctcagtcaagggtcccgaactgctgaccatgtggttcggcgagtctgaggccaacgtgcgcgacatcttcgataaggcccgctcggcggctccttgtgtgctcttcttcgacgagctggactcgatcgccaaagcccgtggcggtaatgtcggcgatgctggcggcgccgctgatcgtgtgatcaatcagatccttaccgaaatggatggcatgggagccaagaagaatgtgttcatcatcggagccaccaatcgcccggacattatcgatccggccatcctccgtccgggccgtctggatcagttgatctatattccgctgcccgacgacaaatcgcgtgaggctatcctgaaggctaacttgcgcaagtcgccgctggccaaggaagtagaccttacctacatcgccaaggtgacgcagggcttctctggcgccgatctgaccgagatctgccagcgggcttgcaagctggccatccgacaggccatcgaggctgaaattcgtcgcgagaaggagcgcgccgaaaatcagaactccgcgatggacatggacgaggacgatccagtgccggagattactagcgcccacttcgaggaggccatgaagttcgctcgccgttcggtgtccgataatgacatcaggaagtacgagatgtttgcccagactttgcagcagtcccgtggattcggacagaacttcagattccccggtcaaaccggcaacacctcaggatctggtaacaacttgccagttaactcgcccggcgacaacggcgacgatgatctttacagttagatttctagttttacaccgcaaaacaaaaccacaaaatggaactttttaaatgaattttttccgtaaaaccgagcaagcaaaaccaatcacattcgcatcctggacgcggtaacttactacagcaaccattggctaagacatccagccgatggcgaaatcagatgacatacccgattcaatattcacttctttgataccatccttactcttggtcgcggatacgtgcagtaggagaaggttcccatttggatttgggctcgcctaatccgaaaccattttaattggcgaactattccgcgcctcacactaatcattcgtgcattgtcggtagagtggctccgatatatgagtttctataaacataattattaacgatacacatacacacatacatttaaagataaatacatatattaaacaccgtaaaattataagtgtatttggagctacatttttaagtgaat

SEQ ID NO: 3909 - protein, 297 aa, DROSOPHILA
MQPSRGVLFYGPPGCGKTLLAKAIANECQANFISVKGPELLTMWFGESEANVRDIFDKARSAAPCVLFFDELDSIAKARGGNVGDAGGAADRVINQILTEMDGMGAKKNVFIIGATNRPDIIDPAILRPGRLDQLIYIPLPDDKSREAILKANLRKSPLAKEVDLTYIAKVTQGFSGADLTEICQRACKLAIRQAIEAEIRREKERAENQNSAMDMDEDDPVPEITSAHFEEAMKFARRSVSDNDIRKYEMFAQTLQQSRGFGQNFRFPGQTGNTSGSGNNLPVNSPGDNGDDDLYS

SEQ ID NO: 3910 - DNA, 3162 bp, DROSOPHILA
ccgacatgctttactatgccacagcgggccggaaccctggtagccaacagaattctgctggatttcacgcaaatcttatttgcccatagccactggacccaccctcagccggagtccgtggccaggactcccgactctggtggacagaaattccacggttttgttttcactgcctgcgttgcatatttcgctctgctccgcaccgcttccattccatgccccttggcatgtgctggttttttaaatttgcccaattccaggcatgatatgtgtgtggtttggggctgggcgaaaaattcgagccttatttgcctttcaacttgcccgggatctgcgtcggtggccgtgttatttatgcaaatgtcaaatattttgatattccgctgccatgtgaatgaaagcaaacggaagtacattataaagttgcccagcccccgtttgccaaagtcattcccattcccgtattatttggccaaccaacaagccgaaatgtgccactaatatgaccgcccagtggcccctctgcacgatcgaccctcagcagcgaccaagtggagtaattatggcatattcgaaattccacccgccatccagccacttcccacccactcacctggcagcctcaacattttgttgccaacacgaaccgccttttgttgcctttgttctgcagagcggggaaatcggggaaggtgccaatggggcaaagttaatttttgaaattattggcacgttaggtgaattacttcgcagaaagaatttttaatatcgcaatacaaagtcactcataatttccattaggccggggaaacggcctgttgagtttccccggaaaatatgtaggccaaaactcttgggacgggcagacgttttgtagcaattaaattggtaattgagttgcccaaccggaaagtcaattagccagaggccctagatcaatgactagtaatttaaattggctgtcaaaagaagttcgagtgcgaccccccgatgggagagatcagtactggacgagtgcctcgcgggccaactttgcccagatggtgccaactggatggacaaccactttgcgctttcccttaaaggtcaatgactcgtagtggtagccgtcgataatctttgcggagttaaagttgcaaacgaagggcagagtgatttcgttcagattaacgtagtaacaattaatcgtgaagatcagcggacttaatcgggccaccagttcgtaggcggctgccagtttttcgttccaaatgcacacagaggtaaagttaagtggttccttagcctgcagctcaacggcctccttcatggttcgaaaggtgtgcagggttatgaccccggtgggtccatcagccaagtaacgatggctaaggtcgtagaccagcatgggactagcattttctggaacagtcttgggatttccaactattctctttgcctgtaagtgacctattctctccagtgtcattatataaaccggatgcccggagatatccgtgctcaacggttccaggcgatcccttatgcgatccacgaactcctccaatatggattcctgcaagaaaagagtggccaccgcattgcaggcgaagggatcgtgaagagactcaacgagatagtgcaaagcgcaattgatgtctccatcttcgcagagaatcatcagccgcggcgagttccactggtatttaacttgcacttccggttccggttcatcttcactcattgaactcgatcgggaatggtatgaaagcctaggcaccttctttggcttctcaggagcactgtctttggacttgaactctgtctcaatttctaggatcaacggcacactgacatcccgaggcttgttgcaaaccagattgtagataaatccataatcaatcagtggagtcggcagcaaagggtacttatagatatattgaacctcctcttctagactgatactgtttaaaaagaaaaatattaaaatactcagatctggatagtaacttatatcgatacctacgccgtgggtcggttgctgtgaatgaaaacggaaatatgcatattagcgatagcaatagacaccataatattttttttacttacttgtacatcattaaaatcggaaatattacaaacttaatagatttaaatatttaaaaggtaaacttaaccgttactgaaaagcctattaagctcgtcccaaaaacaaacacactcagaatttttttaacactttaggcttaggatagttacataatctattcgaaatctgaagtctttataaaagtgagctccaagccgtacttcctaatcaactggaaatgcctgtccgcctcggtatctaagtttcagatacgttgagccttgttatatcgcagtgatttatcaaatcacactcattcacacttgacttgtgcagttgaccgcccatcgaaggctgcccccaacgaccttattgtgggcagagggatttacagttgatttaaccgtttaagcatggctaatgcataataatcgtttggccgcaaacttttcaaccacttctgtgggcatttgtgtttgagttcagtgtgtatgtagggcgatttcccgtcctgttttgccccttgcccagactcccgtccaacctatttgagatagaaatcatgtgcagtcattagattgtttttcgattgacgtgacatgataatgaaagattttctttcgctcgttcctttgtttcccttcgctttcttggctcggctattctttccgcttgctttttcttgggtcgcaacttttgtggcgcccaacgtgcaatttgtgcgaaaagtgggtgtgcaaagtggcgacgtggacaatggaaggcggcaggtggcaggtggctgccactttgtttgctgatttgtttatggctgaccataatgaccgatgaagtggcagctggccgcctcaagtggttgttaaacccagtttcgccggcgaaattaacacgaattgcaattaaagtgggcacgaaaatcattctcatgcactcagccgaaaaacgttaaatgtaaaatctatatatccatttatatatatatgcttgcagttaaaatatatttaaaatagaaaaatgcttataccgaattagaacactttataattaaaaaccacgatgatatgatttctttcctatatgatagagtgtttata

SEQ ID NO: 3911 - DNA, 1032 bp, DROSOPHILA
gtaacggttaagtttaccttttaaatatttaaatctattaagtttgtaatatttccgattttaatgatgtacaacaaccgacccacggctatcagtctagaagaggaggttcaatatatctataagtaccctttgctgccgactccactgattgattatggatttatctacaatctggtttgcaacaagcctcgggatgtcagtgtgccgttgatcctagaaattgagacagagttcaagtccaaagacagtgctcctgagaagccaaagaaggtgcctaggctttcataccattcccgatcgagttcaatgagtgaagatgaaccggaaccggaagtgcaagttaaataccagtggaactcgccgcggctgatgattctctgcgaagatggagacatcaattgcgctttgcactatctcgttgagtctcttcacgatcccttcgcctgcaatgcggtggccactcttttcttgcaggaatccatattggaggagttcgtggatcgcataagggatcgcctggaaccgttgagcacggatatctccgggcatccggtttatataatgacactggagagaataggtcacttacaggcaaagagaatagttggaaatcccaagactgttccagaaaatgctagtcccatgctggtctacgaccttagccatcgttacttggctgatggacccaccggggtcataaccctgcacacctttcgaaccatgaaggaggccgttgagctgcaggctaaggaaccacttaactttacctctgtgtgcatttggaacgaaaaactggcagccgcctacgaactggtggcccgattaagtccgctgatcttcacgattaattgttactacgttaatctgaacgaaatcactctgcccttcgtttgcaactttaactccgcaaagattatcgacggctaccactacgagtcattgacctttaagggaaagcgcaaagtggttgtccatccagttggcaccatctgggcaaagttggcccgcgaggcactcgtccagtactga

SEQ ID NO: 3912 - protein, 322 aa, DROSOPHILA
MMYNNRPTAISLEEEVQYIYKYPLLPTPLIDYGFIYNLVCNKPRDVSVPLILEIETEFKSKDSAPEKPKKVPRLSYHSRSSSMSEDEPEPEVQVKYQWNSPRLMILCEDGDINCALHYLVESLHDPFACNAVATLFLQESILEEFVDRIRDRLEPLSTDISGHPVYIMTLERIGHLQAKRIVGNPKTVPENASPMLVYDLSHRYLADGPTGVITLHTFRTMKEAVELQAKEPLNFTSVCIWNEKLAAAYELVARLSPLIFTINCYYVNLNEITLPFVCNFNSAKIIDGYHYESLTFKGKRKVVVHPVGTIWAKLAREALVQY

SEQ ID NO: 3913 - DNA, 2685 bp, DROSOPHILA
agagttcacctgttatcagtagaagacttgatcacaactcgaaagaaattaaaagactgcccaatcttaagagatgtaaaggatttggtaagatggattgtaaaaaatttgctggaaaatactttatcgtaagcattgccataagatcaggtatcgataaactctatggaatggaatggaatggaatgccgtggttttgacgtctattataaaaacttatttgcaaaaccttacacaaaatggtagttacttatgaaggtcactgcatctcagcagtcaaaaaaccgaactcattcataaaactaagctgtttgcgtttgcttgaacattttgaaaagtttgaacaatcacagcaagtttcatagatacatcatttctatttaataattctaattagtatgattctatacgagttttttggaagtgtactatttgtagtcagtctattctattgtttaaatacaaaaaattaatggtaataggtacgagcaaagaggggaatgggaaagccggtcactgaagttccatttagcaaaatcaaatcgaaatccggcaaacgaaaaaatcgtttatattatatatccgttaattgcttttataagcacacatgaatatttcacaccgatctgattatgatttattattcgttgataggattggccaacgtccagacccgaatcgaacatcatagatatctcaatggaatggagcgattgaaagaaaaaattcaatttgactttaaaactttggaattttggaatttggaatttcaatgtcgcagcctaattcaattaattggccacacagccactctaatttagccctcacgaagcaaaagtaattacaataaattgtattgcttcgtgaatcgaattgagccccaggaaatacatatcctttggataggatacagtgatataacctttttaaatgtgaaatatatttttatatatatagaagtcgttcgtaaaactataacaataaagagctgggcaatgtggaatgtcagttctcaggggtggtaggcaacagcgggggcggcgtagtgggtgggagcagcataggtggcatatgcagcgggggcagcatagtgagccactggggccacagtcttgaccacagcaggagcagcgtagtgggcaactggagccacggtcttgaccacagcgggagcagcgtagtgggcgacagcaggggcggcgtattgggcaacgggagcggcgacggtcttcacaacgggggcaacggcgacggccttgaccaggggctcacggttgacaacggcgttgaatccgttgatgggatcggcggtgtactggacgatcctcttgtagccgtcagcgtcgatcagggagtactctccgcgtaccacatctccatcgcgctcctccacctgtcccttgttgtcaccggttagcttgtcatcgactccgtaggagaagcggtactgggggtgggggtcgtactcctcggcggccttgaccacgaccttctgggcgacggccacgggggcgtgggcgtaggtggccaccgctggggcagcgtggtacacctgtggggcggcgatgggggcataaccggcgctggccacggcgacgaaggcgagggcgaagacaaactggggaacatattcgttagagaaacgggttctggtgggataccacaggactcaccttgaatgccattttatagggtttttggattcgtgggttagttctttgcggaaacggtgctgatggctgaatgatacggtttctggccggccagcggttttatagctcccgcttgcagtttctgctcaggtgaagcaaggtgcttacgcttggccttctgaatatcatgctccaaattagcgcgaagtcaccgctctgcgaagtcaacggcaaagtcggcagagacgccggcagagaaccaagagaggagaagggatttgcgaatgcgagatgcagtccaattatttagaaaggattcggcggattcgcgcggtgcccacgttaaaattggtagttgggaatggattgcatctgctaatagcgtttcgattatccaagatattttaaggatgggatcgtggatgtctggtgggtggccttgattcccacagacttcgcaaaagggcatttattttgaatgaagcagcgattttctatatattgtacaaaaataatgcattgtgtaatatatttttaacgtttatgttctaagacccataaatgccaaactcttaaatgtgtatctgataaattattatctgagtgtaaatagaatgttaggtatttagatgtagctaagtagttgtgttccttaggacactaacgcagacccaacttagcttttagtttttagaaccacagtttttgtagtgtcaaccaatttcaaaaaatattaatcttttttcaagagttttttcttatccagcacagtgtaaagttcattcaactctttaagattgcaaatccgttcgtataattataatcatatatgtatagagtatttaaagaatatcaatcagattgcacagtgaactctaaagattcgaaaatctttaaaaaaacctaatcaaaattttgcgatttgctttgtaagaaaaaaatatatgatcagtatatcttcttaaagcgatcttatacagcgttatataacaaagtaattagccacacattgcggccggcaaagccctttcgg

SEQ ID NO: 3914 - DNA, 630 bp, DROSOPHILA
atggcattcaagtttgtcttcgccctcgccttcgtcgccgtggccagcgccggttatgcccccatcgccgccccacaggtgtaccacgctgccccagcggtggccacctacgcccacgcccccgtggccgtcgcccagaaggtcgtggtcaaggccgccgaggagtacgacccccacccccagtaccgcttctcctacggagtcgatgacaagctaaccggtgacaacaagggacaggtggaggagcgcgatggagatgtggtacgcggagagtactccctgatcgacgctgacggctacaagaggatcgtccagtacaccgccgatcccatcaacggattcaacgccgttgtcaaccgtgagcccctggtcaaggccgtcgccgttgcccccgttgtgaagaccgtcgccgctcccgttgcccaatacgccgcccctgctgtcgcccactacgctgctcccgctgtggtcaagaccgtggctccagttgcccactacgctgctcctgctgtggtcaagactgtggccccagtggctcactatgctgcccccgctgcatatgccacctatgctgctcccacccactacgccgcccccgctgttgcctaccacccctgagaactgacattc

SEQ ID NO: 3915 - protein, 205 aa, DROSOPHILA
MAFKFVFALAFVAVASAGYAPIAAPQVYHAAPAVATYAHAPVAVAQKVVVKAAEEYDPHPQYRFSYGVDDKLTGDNKGQVEERDGDVVRGEYSLIDADGYKRIVQYTADPINGFNAVVNREPLVKAVAVAPVVKTVAAPVAQYAAPAVAHYAAPAVVKTVAPVAHYAAPAVVKTVAPVAHYAAPAAYATYAAPTHYAAPAVAYHP

SEQ ID NO: 3916 - DNA, 3991 bp, DROSOPHILA
ataattcataaaaatgattacaatttatataattttataaatatattaagccatctaaaacttgttaaggattgagatagtagaagggtataaacagccaaccgagacagtatacctaattcttttccgccactttgttgacaccggcatagtcaatggggaattcctttcggctgatgctgattgccaaaaaagataaaaataaatgcggaaagaaaaaggccagaacaacccgcgcctagtgaaaaaaaaaaactgaatatccctatcgcacgaattcaaattaacccaacatactcacacgcccaccagtgctgtgtcgtcttagattggatttctatagctgtagtaatagctgtttcaaataatataaattttaacacattttatacccgttactcgtagaattaagtagaatacactagattcgttaaaaagtatgtcaaggaagtatgtagaaggaagagtttctgaccgtataaagtatatttattcttgatcaggatcatgtccgtctgtctggtcgttcgtatgaccgtcgaaatttcaggaattatataagctataaggttaagataaagcatacagattctaaagcacaagtttgttcatccatgcagccacgccttcccattaaattctccaatatctatcgatatgccagaaaattatgaaatatcacgttctcactgccagcagctgagtaacgggtattagatagtcggggaactcgactataacattctctcttttttttaattcaaaatatttcatgcatttaaatagtttttgtaaatgccaaacaccccagtgttaaggcagcactccccagtttcgatcattaaatatcgtgtgctgttttaatatcttcctggtgaactacaagttgcaagcaactagatagaatggttttacataactaacaatggcatattcaccaaacttccaaaaagtgaaatttattattgggtacagagtagtttcaaatatcagtaattggtttttcaaattgcttaactacaaatttacaagaactgcggcacaaaaacttcaaagtgataatgaccctcaatttgtgaattgccagcataaccaaagcatgactatgatgggaatattgtcaacttgaaatctattcaaattgccttgaccattttcatcaccttccctgcaatgaaataaaatgaaagaaaaaactacagatgtaattaatttgcttaccctttgatcggcggaagaacattttcttcgaactgcccgttcacattgactggtggataatatcttgctaccacccagtagtaaccctttttgtccttggcttgcccaatacccatttttttcgcattcttccaaacgagggcggtgaaatgacccgttgacattgcaaactgtggcttttcaaagtcgtagtccgcgatttcgtcgtaccagtcttgaacacattgcagaggggtttgtgaccgcatgcacaagttttcaccatagttttgaccggcagaacttgaatgctctaacttttcattattggctagcacctgttcgagggtattaaaagtgtaaaaaggtaacattgttattaaccaacgaaatactttagcatattcttcgcatccctttgtgagttcatcgtccaaggtcagaggcggacttccatgcttctccctcaaccgattgtgttcatttagatggtcctcctgaagatcagctataaccaacaccaactagaatacaggagaataaatcagatttcatttaaaattactaaatatttaattataccaaacatagagccaaaacaatcaatatgttcaccaaaaacatgtttttttgagaataactatagcacgaaaactttgacaaacttatctaggattctgattgctttaaagacctcgaaattctggtgacgtaatttaaaagttacttaaattgtaattagtttggtgtacctataaagcgtatggaggatcccttaattaatacagtttttagtccgtgcacttctcatgcagtttgtatcatttgtacatgagtatcgttccaaaaatctactaaaatatgaagttgactttagattcggacataatgcatggaaagctgagtatcaaaaccaatctcaaaagaaacacaaattagacgagggttaaattttgtttgtctacttagaagtctaactttgtgttaaaggagctgattatttttaaaaataaacctatagttctagtgactcttactgataggggtttttccatatcaaaaaagtctagttgcctcaaaactgatgcttccgcggcaatttgcttgttgtgttgacagctggcctgaggtttcatgctttttgcattagggtactgacagatgacttcacagagacactgaaaaccagaacgaggaaaagcacaatattttttcggacattttttaatatattttgtatggcgtatgttttaaaacttatatgcagttttatttttgtacaccacttttgtttgggaaatgcgaatagaaatttctctgtatcaaacgggcgaacagacttattgggggtgcagtgtgcaattattttgagcgagtaaccgccaccaggccaaaggataatgcgatgagttctgatcgccagcaacaacggaccagctccaatggagccacgccccagccagatattaaattttcgctgttgctccatggagctgtggcaataaaggtttggctttgccaaccatgtgcgagggcactttgaggagggacgagctctggctcccacacatgtggctgatgccttgggccatcatcgttgacaacaatatcagtggctttcgaaacagcggcagccgcaggagcaaaaaagcagctggaacacggactagtggaacttactttgtcctctgcgtggctttggtttctggtttttggctgtaaaatgtcaatttgggcccgtgacgaagatttattgtgcgcgtgtttgataggcgcgcttaaatatcccattcagcacacatatttccactatcaatttcgatggcaccagcatgagcataatctggttcgtcactggtgatggcacctctgctgttttcaaaacttaggaatggaaatgatcagcgtgaaatctaggttttgtacgcaacacaaaatcattcacaaaaataaggtttttggtactatgggtattacagatgatttcactgcactgcaatttatgcaatttaaaaattaaatttattcagggcttaacaaataagaatactagttttgtatacatttagacctaaatccaacaacaatttcagtacattccgcaggatatatacgattgctgcttatgaatgcagaacagtcgctaaaaagccaacgagttgactcgctgccaagagcagcatttaaatgaaaatggcaaattcatgccacataatggttaaacgacatcagaagagcaacacgcaaagcgtttattttttctgaaattccaggcacgcaaggacaagcagcacacactcaaaattgtaagggaaaacttgcaatttatccatccgagttgcctcctgtcaccggcaccaagttgtcccactcctgcctggccgataactcaatagcgtagcccggggagcattggcataactaaactaatttcttttaattcaaacacagcaactccggcccaacggctctgttggacactgatggccaaatggctgggtgtgaaacttttatgtcgccccctgcatggacctccgcccaggtggtcttacccacctccgggctcctgcttcccattgcccagtgcccattgcccaatccatttctccctggcggcagccctgaccgacattcgatgaattgaccaacgcagcttgttatttttcgtgtgcaacagcgcgttttattcgctcctggaggttatgtgcccctcaccccgtggcatctagattcaaatcagagatggcacttacctatcctaagaaatcttaaaaaaaaaggtgagccagct

SEQ ID NO: 3917 - DNA, 1160 bp, DROSOPHILA
atgggatatttaagcgcgcctatcaaacacgcgcacaataaatcttcgtcacgggcccaaattgacattttacagccaaaaaccagaaaccaaagccacgcagaggacaaagtaagttccactagtccgtgttccagctgcttttttgctcctgcggctgccgctgtttcgaaagccactgatattgttgtcaacgatgatggcccaaggcatcagccacatgtgtgggagccagagctcgtccctcctcaaagtgccctcgcacatggttggcaaagccaaacctttattgccacagctccatggagcaacagcgaaaatttaatatctggctggggcgtggctccattggagctggtccgttgttgctggcgatcagaactcatcgcattatcctttggcctgtgtctctgtgaagtcatctgtcagtaccctaatgcaaaaagcatgaaacctcaggccagctgtcaacacaacaagcaaattgccgcggaagcatcagttttgaggcaactagacttttttgatatggaaaaacccctatcattggtgttggttatagctgatcttcaggaggaccatctaaatgaacacaatcggttgagggagaagcatggaagtccgcctctgaccttggacgatgaactcacaaagggatgcgaagaatatgctaaagtgctagccaataatgaaaagttagagcattcaagttctgccggtcaaaactatggtgaaaacttgtgcatgcggtcacaaacccctctgcaatgtgttcaagactggtacgacgaaatcgcggactacgactttgaaaagccacagtttgcaatgtcaacgggtcatttcaccgccctcgtttggaagaatgcgaaaaaaatgggtattgggcaagccaaggacaaaaagggttactactgggtggtagcaagatattatccaccagtcaatgtgaacgggcagttcgaagaaaatgttcttccgccgatcaaaggggaaggtgatgaaaatggtcaaggcaatttgaatagatttcaagttgacaatattcccatcatagtcatgctttggttatgctggcaattcacaaattgagggtcattatcactttgaagtttttgtgccgcagttcttgtaaatttgtagttaagcaatttgaaaaa

SEQ ID NO: 3918 - protein, 363 aa, DROSOPHILA
MGYLSAPIKHAHNKSSSRAQIDILQPKTRNQSHAEDKVSSTSPCSSCFFAPAAAAVSKATDIVVNDDGPRHQPHVWEPELVPPQSALAHGWQSQTFIATAPWSNSENLISGWGVAPLELVRCCWRSELIALSFGLCLCEVICQYPNAKSMKPQASCQHNKQIAAEASVLRQLDFFDMEKPLSLVLVIADLQEDHLNEHNRLREKHGSPPLTLDDELTKGCEEYAKVLANNEKLEHSSSAGQNYGENLCMRSQTPLQCVQDWYDEIADYDFEKPQFAMSTGHFTALVWKNAKKMGIGQAKDKKGYYWVVARYYPPVNVNGQFEENVLPPIKGEGDENGQGNLNRFQVDNIPIIVMLWLCWQFTN

SEQ ID NO: 3919 - DNA, 8974 bp, DROSOPHILA
tggcataaatagatataaatttataaagactaatgttaaacacacacatgacagacacacagacagacagacagacagtcaggcacacgcacacaaacacgtacaaattttggcgattttcatgttgattgcaaaaggtttccatatatgtgtgtactatatgtataatagatatagcagatcggcagggcgaatacagtgcgtggcattagctcggtgaattgctccgcaaattgctttattcgccaattactatacctgcacccatgaaacgcactgtatctgtatccacatgctcgtgtttaatttatctcatattcttatctccatcttcactctaatttctcgttatcgatcaatttatatatagaaagcattaaacgtataaataatttctttcgatatcggatcgtgtaaaacgtcttccaaagtgcattaaaaaaaatttaaatcataataacaaagcgtaaaaattacataataaaattacttaaagtttagcaatagctacaacagcagtgcaacttatatacacacacatctggtgtaaatagctctagttagatagatacacccttacatgctctccactccaaataatttcgtaaaaaaaaggtcacgaactagggctagttcccttagttccctaaaagaaggttgaaaatttgcgtttgttctggttctggttctggttctggttctgaatctggttgtgattgtggatgttctggtgcggacgttggtgatgatgatgctgctgctgttggtgatgatgatgatggtgctgatgactattggttcccactccattgcttatcggtttgaggggcaagacaggaacacaggcataggcagccggctccagttgggcattgtaaaactgcccctgcggctgtggaccggcgatggcagctggagcaacggcagcggttggagcagcgactgctgtccccggagcttggctggcgggtggcatcaggagcacaggcaccaccacgggttatacggagatctcgtagttcatgtcgtagatgctggctctatccggagtgcccgaattggaggcgttgctctgcattaggtgaccaccgccaccgccgcccgcctgttgattgtttcccactgacccgctgccgggaatgccaccgttttgctgctgttccagtgactgcatctccatggagtcggccatctccagcgctcgcacaaagctcatgggtcgcgttggcgtctgtttccgcttgatctgtggcgagggctgcgtctgcagattgccaccgccctgatttcccataggattgggcggaaatacggccactccgccgcgcaatgccggctgatagccgccgcctccagtggcgggattactggctgtcacgctagctaaactgccactgctgccggctgctccaaccgctccgccgcctccgtagcgcagtatatagctctggccagctccggacacctgtggcatggtggtgggactcgtgggattggagcgatgatatgaggctgctgccgcagccgccgcctgttgttgctgctgctgctgctgctgctggatggtgtagtcctggagtcgcgagtgcgtcataatcagcggatgtgctcctccgcccgccgtcatgtactgggcatgcggcatcactccggcggcggctccgctgctggacagcgtgcccgcactgctgccaatcccgctgctgaccacctgttgtgcctgctgctgttgctgctgctgctgtccggcgttgttggtgaatcccggcgacgtatccttccacatgtaaacgccgcgctgcggactgccggcgagctctcgtatattatccaccgtattgttggatcgtgcgtaggacaactctccgccggcaacgcctcctccagcaccctggcgcaccagttcgccctcggagaggaagcgtctctgtgggctgccaccgtacgccgcctgcgctaaagcggcatgttgcggatgtgccgcatgtaccgccgcctgttgctgctgctgctgctgctgctgcagagctgtgaaggtacaaggggagatgcataaggatttcagttggcactctaaataaagctaccactcaccttgctgctgttgctggtgctgcatgaggacacgctgctgctggagaagcagctgttgctgctgctgttgaatgctgggcgcctgcggatgttgcggcggcagaccactggtgtattcgtaataggcagctgctgcagccgccgcagcctgctgttgctgttgctgctgctgcgccaccgcctgtgcgttcagtccgatgaaatcgggtcgtcttggttgagtgggcgtgcccgggttagatctgttggggatacaggattttcaaaaattagtcaacgacttgctgagtagctggaagcaatcttagtagtagtaaagcatgctgagagcgcgagcacaaaagctgctgcagagttaacatctggatgttaaaacttaacttctcggttaactgacggttagaaaaacgatagcgatcgatgagcgagggacagatataaagtggttgtcctgatccgatctgatgtgagtgtgagataatggcctttagaaggggttaaaacaacagcttggtgttaggttcgtttagtagccagaggacagttattggcacacaaaaaaaacgttggcagacttttccagttaacccaatatgctttttaaagcccaaaaatccaatggcatgtaagtattattaaccactactttaataaaaattaactatattgtaccaaaattgttcttttattatgaaaccaccagcacatggcaaatgataagcgaggtaccctcggcggactggtgactagaattatcgcatcacttgattgtggcgtcctcgaatgtctgcattgcctccgccaccggccagtcccatggtaatggtgcccaggagtccactgttcgccacccgctggacaaacacaaccactgtgcgcggcacatccgatcgcaccacctgcaccaccaggtgcagcagattgaccacacagtagagcagaccgcacaggaggatcagcggcgccattaccagtttggtctgcactgagtaccgggtggtgtcctctaagtcgaagaactcccagagattggcgttgcccagaaagcgttttcgtagcccgatcgcctggttctttagccaactgaagtaccagcacaggaagaagagggcgtgggagaccacgcagccgagtaccaatccggccagagtaatgtagtccattttggaggaagctccgtcaccggtggaagtttggaccagtccgcttccgtaggccttaagcagcgtctgggccaacatccagctctgctgagcggtcaggtcacactgatccggtgaggacatcctctcctgcaattccattgaatgcggcctgcgtcgatgcttcttctctcgtctgagggcttctctatcctggataagtcccgaagcatccttacgctccaccttcttgtcctgcttttctgctttgatggaaaattgagaggatgaccttttcgctgtgggttttgttttcgggaagtccagctcgctgctcctgggcatgcgcacccctccgttcatcagcaaggctcggtcacccaatgtcacatgcttgggcaagactccctttcgatccggccgtgatgcaccaccatctccgccggctgtctcagcaatagttttggcattcagcgaatggctggagccactagcctgcttcttcacctgggagccaccacctccgccacctgcactgagcctcgagagctgcacctgcggcgtggccggcggtggcggcaatggtagcagcccattcatctcgtaccgcaggccattgaaactgaattggcggcgagatcgcaactgtggtgcggtgaccaccgatatgggcagcgctttgtccagcagattcagagattttctgtgatttgagtcctgacccggtgccttgtccatggtggcttcgatcggtgatcttctatcaacaccaggaatttatagatggctctcgattccctacacgttttcgatatgttcctaaatttcttcagacttcacagatttcgataaattttctcttgatttatatttgattcgaactcctgagtctagcttacttcttggaacttagaggaacaaagttagagagccgaatgccgaaaaagaacaaaacgtatacgacaaattttctgaaattttctccaatatcgaatgtgtttcagagagctatattctgagttccgtcctaagtgtacaataccttatgtttgagaactttaaattcaaggcctaccgattattaatcttacatcttactaattaataaatatttcctcaattacccattatcaattgtgagttagacagatcagaaaattagttaagagtaacttaatcaaaatgtagaccatagaccgaagaagacaccatactttaatcaaacgagaaaccacatatatgagaaaatgtcgaagaatgtaatcgtgtggaataagaacacctgaaccaaggggttaaatgcgaatatgagggggtgagagagggttaaaggcggacgcaaaacaaaaacggcaaccaaaatgaacggaaacggaaacgaaagtatgatagcgaaaacggaacggaacgaaagaaacgaaagaaagaaagtaaaactcacctcgcgcgtcagaaagaaagtagaagtaggtgctttagtagaagtatgtaggtctacggataacgacttatcggatcggatcggtttacagggtgcacttgcagagtggttcgagtggttcaagtggttgccagtggatcagtgtggttcgggtgaaggtcgaaagaagagcgaagagcgagcgaaaggaagaaacgacgacgacaaagtgggtttatctcagatgtgcaaaacggttcggaacggttcggtttttggttcaatttccggttcagttaacttttctcttgttcccctctgtatttcgatatcatttgatcctgtttcgggcttaacttacagacttctttgcttattaagtattgttttttttcttttatttattctctctcttttaataaacttataaggtattcgtattttttagttttgtttcttgggttctttcggttgtttcttgttggacttcattgttttggtttcttttttttttctttaagctaagcctaggaattagtactgttctcagaatttgagtattgactacatcgaccgaatcaatcaatagataacgcgtaaaaaaggaaaagaaaaagtgggaaaaaataattaattagtttataagatgggagtaaaaaggagccggctgcgaaatgagtggtaaaacaaccaaattgatgagcgatacgcataggtgcaacagataaatacatagatatagagaggtgttgtatatacatatgtatgtagtatatagcaacggggttattgacccacagggcatctctttctttttcgccctctatatctatcccttttctttctacttttcacgagtgcgaaagggaaggcgacagagtggaagtatccaaatatacagattacaatcccagcgaatacacatatagttttagttttaatagaagtccttggaatttacaagcctacaaggaaactacaataggcgataagcccataaagcaaataaacaaactaacggtaaaggaaacgcttgaggtgtcggcttatcaaaagcgttgaaactaaacgcgcactaatacaactataggaaaacttgctcacatacacaaattgcttaaccctttaaaatgcttaagttttacatttttaaccttgaaatataaataacttatctaatatatttctatgctttgaaaatctataatatagggttaaatatagtgttaaacattttaaaacagaaaaaaaaaactaaaatgtagcgcaaccttttggtgaaaaactaaagataaatcaatcaattaaactagtattttttaacttttgatatatccaactaagcttgagctttaaacggccatttggccgacaaggggttaagctataaaagcaggaagatcaacaagagctataaacaacaacaacaacaacaacagcggtgggccgggggggggggggtgaactcggtggaggggtggaaattgggggccgtgaaaacgtatggcgcataattgaatctggaggcgcacactcaccttcgcactggactcgccatcacgaggggcgtggccacgcccagcggcttaatccgctgctgcatggtgggcgtggccgtggtcgtcgcgctgcgttgattttgtgctgccaccgccgccgccgctgctgccgccgccagcgcctgctgctgttgctgctgcgatccattgacgccaacgccatagccaacgggatggtccggcgatagggcgtcgctcgtgtagccccgctgcggatcaagacccctgcggatataaacgagatgaagtggcattagcatccttggctttaagcatcttggaaaacgcaactcaaaacaatagaaatatgacccaatattggtaataagttcataacctatggccaatgtagtctacacactagctattcatctcttcatatcagatttcattatttgaaaaagcttgtgttgcttcaaataaatgcaaatgcaaaatacttctgtgcaacgggtcgtatacgcaacatatttgaagggtttaaatgagcatacaaatgtatgtatgtacatctatatttcgtttcccatggatactttaatattgaaaatcaatactactatccaaattaatagtatgacagccagtggtgattatttccaaacaagcatatgtttatttagttcacctcgttgtgaagcattcaattacttttgggtgcaagtaatgggtgcaccatcaactaactaccccaaaaggaagtacaccgaaaagaaaattcacagcattatgaacattatagatatagatatacatgtatattgtatattatgataagtacaattttctatgagttcaagttcccaaccaagacttttctatctacattttgacaagactagctccatttcttgcagtgtaacttcctgctaatggggctaaggctatcgctatggctaattagctcacctgggcctcgcatgcggactgtgacgcggatggtagagacgcatgtggcgcggcgagtcgccgcctcctccgccgcccgtggaaacactgccgttaaggccgccagaatcgctcacctgcggcagatagaagctgctggagttgtgccgctgcagcggtggcgtcggttcacagtcctgactctgggatgcgggcggcggctccaggtctgtatcggagcactctcgtccgggcgatagctgcgatatcgaagatcaaacgattagttttcgactagaagggcttgggtgaacaggcgaaaaagagatgagatcgacacagacttaggcctacatttagttgcgatcatttccaaaataacaacaaaaaaaaaaaaaagtatataaatgaaaacattgaacaatggaaagttgagaaaaactggactggttaaagtttcattttcacacatttcaatcggggttcgattaagaaaagttcaacgaactgcaggatttcaacacgcataagatacatttaagaaaattgcacacacaactgtgttcttctgggaatgattagtttgtagagtaatatcaaattcgaaatattaataaaacctgtgaaaatgaaaaccgtaacggataatgaacgaaatataaataaatgaattaaattaaaattgaggaactgagaaggtttcttgtattttttttttttgggtggggaaacgaggatcgtggggtgagtggagtgggtggtgtgcctcctccttctggcccctcgccaccgccctgctataattaattgtagcttaacgcatactgtggcctaagtgaaaagcccaaagtggaagtactttccgcagcataattaacttcacaatcaggagtcggtagggggaaaaaaaaaagtgtggaaaagtcagagatgaaagagaggaaaactcgataaaaagcactgcgtaacgacataaattttcccaaaacgaaaagaaagtttcttatcctaatgaaaatcgacaagttggagtttcagattgaagttcattatcctgataatgatttaaacggatttacttgtgaaatagagaaaaataaataaatgcttactgaacgtcaaattgagctgtgcaaaagtactaattaaatattttccaatcatttgtaatcattcgaatttgtttgtgtggcagacaggtggagagaaagggaaaattggacagatgaagattcagtaaagagaaaattgtacggaaaatgggtggaaataaaacatttggtccgaaaaccggagagaaaattataataatgggacaataaattaaaatcaatgatttccagggcaatttaagatcaattggtaaataatgaattcgtaacaaaaaaataattccatttttttgtagagtttttaatatcgtttttaaaagtcttttacctttctcggtgcttgcagtaagtgtagtttttggttttgttttctttagcttttgctggtttatttggagatgcgaccaattcttttcgatataagtatgtatgctatatacttctatatatatatactgatataacgacagctctgggcggcatatacaaacggaaatcgaagggtttaaggtgcccagcaaggtgagagaaacgagtcaactaaatagcaattatagtggcaataatgcagcgcaaatcatagcggaaaattcataggggaaaatttagcaactcaaaacgccaactaaacaaatccagccagccagccagccaaccagccgcatgcatgcaagtgtggggttaatgcgaagataattccagattccagaaagtgggcgaaataaaaaactaaggtggtgaaaactaggagaacagtgg

SEQ ID NO: 3920 - DNA, 3027 bp, DROSOPHILA
atgctgcggaaactatcgcccggacgagagtgctccgatacagacctggagccgccgcccgcatcccagagtcaggactgtgaaccgacgccaccgctgcagcggcacaactccagcagcttctatctgccgcaggtgagcgattctggcggccttaacggcagtgtttccacgggcggcggaggaggcggcgactcgccgcgccacatgcgtctctaccatccgcgtcacagtccgcatgcgaggcccaggggtcttgatccgcagcggggctacacgagcgacgccctatcgccggaccatcccgttggctatggcgttggcgtcaatggatcgcagcagcaacagcagcaggcgctggcggcggcagcagcggcggcggcggtggcagcacaaaatcaacgcagcgcgacgaccacggccacgcccaccatgcagcagcggattaagccgctgggcgtggccacgcccctcgtgatggcgagtccagtgcgaagaagatcaccgatcgaagccaccatggacaaggcaccgggtcaggactcaaatcacagaaaatctctgaatctgctggacaaagcgctgcccatatcggtggtcaccgcaccacagttgcgatctcgccgccaattcagtttcaatggcctgcggtacgagatgaatgggctgctaccattgccgccaccgccggccacgccgcaggtgcagctctcgaggctcagtgcaggtggcggaggtggtggctcccaggtgaagaagcaggctagtggctccagccattcgctgaatgccaaaactattgctgagacagccggcggagatggtggtgcatcacggccggatcgaaagggagtcttgcccaagcatgtgacattgggtgaccgagccttgctgatgaacggaggggtgcgcatgcccaggagcagcgagctggacttcccgaaaacaaaacccacagcgaaaaggtcatcctctcaattttccatcaaagcagaaaagcaggacaagaaggtggagcgtaaggatgcttcgggacttatccaggatagagaagccctcagacgagagaagaagcatcgacgcaggccgcattcaatggaattgcaggagaggatgtcctcaccggatcagtgtgacctgaccgctcagcagagctggatgttggcccagacgctgcttaaggcctacggaagcggactggtccaaacttccaccggtgacggagcttcctccaaaatggactacattactctggccggattggtactcggctgcgtggtctcccacgccctcttcttcctgtgctggtacttcagttggctaaagaaccaggcgatcgggctacgaaaacgctttctgggcaacgccaatctctgggagttcttcgacttagaggacaccacccggtactcagtgcagaccaaactggtaatggcgccgctgatcctcctgtgcggtctgctctactgtgtggtcaatctgctgcacctggtggtgcaggtggtgcgatcggatgtgccgcgcacagtggttgtgtttgtccagcgggtggcgaacagtggactcctgggcaccattaccatgggactggccggtggcggaggcaatgcagacattcgaggacgccacaatcaaatcggatcaggacaaccactttatatctgtccctcgctcatcgatcgctatcgtttttctaaccgtcagttaaccgagaagttaagttttaacatccagatgttaactctgcagcagcttttatctaacccgggcacgcccactcaaccaagacgacccgatttcatcggactgaacgcacaggcggtggcgcagcagcagcaacagcaacagcaggctgcggcggctgcagcagctgcctattacgaatacaccagtggtctgccgccgcaacatccgcaggcgcccagcattcaacagcagcagcaacagctgcttctccagcagcagcgtgtcctcatgcagcaccagcaacagcagcaagctctgcagcagcagcagcagcagcagcaacaggcggcggtacatgcggcacatccgcaacatgccgctttagcgcaggcggcgtacggtggcagcccacagagacgcttcctctccgagggcgaactggtgcgccagggtgctggaggaggcgttgccggcggagagttgtcctacgcacgatccaacaatacggtggataatatacgagagctcgccggcagtccgcagcgcggcgtttacatgtggaaggatacgtcgccgggattcaccaacaacgccggacagcagcagcagcaacagcagcaggcacaacaggtggtcagcagcgggattggcagcagtgcgggcacgctgtccagcagcggagccgccgccggagtgatgccgcatgcccagtacatgacggcgggcggaggagcacatccgctgattatgacgcactcgcgactccaggactacaccatccagcagcagcagcagcagcagcaacaacaggcggcggctgcggcagcagcctcatatcatcgctccaatcccacgagtcccaccaccatgccacaggtgtccggagctggccagagctatatactgcgctacggaggcggcggagcggttggagcagccggcagcagtggcagtttagctagcgtgacagccagtaatcccgccactggaggcggcggctatcagccggcattgcgcggcggagtggccgtatttccgcccaatcctatgggaaatcagggcggtggcaatctgcagacgcagccctcgccacagatcaagcggaaacagacgccaacgcgacccatgagctttgtgcgagcgctggagatggccgactccatggagatgcagtcactggaacagcagcaaaacggtggcattcccggcagcgggtcagtgggaaacaatcaacaggcgggcggcggtggcggtggtcacctaatgcagagcaacgcctccaattcgggcactccggatagagccagcatctacgacatgaactacgagatctccgtataa

SEQ ID NO: 3921 - protein, 1008 aa, DROSOPHILA
MLRKLSPGRECSDTDLEPPPASQSQDCEPTPPLQRHNSSSFYLPQVSDSGGLNGSVSTGGGGGGDSPRHMRLYHPRHSPHARPRGLDPQRGYTSDALSPDHPVGYGVGVNGSQQQQQQALAAAAAAAAVAAQNQRSATTTATPTMQQRIKPLGVATPLVMASPVRRRSPIEATMDKAPGQDSNHRKSLNLLDKALPISVVTAPQLRSRRQFSFNGLRYEMNGLLPLPPPPATPQVQLSRLSAGGGGGGSQVKKQASGSSHSLNAKTIAETAGGDGGASRPDRKGVLPKHVTLGDRALLMNGGVRMPRSSELDFPKTKPTAKRSSSQFSIKAEKQDKKVERKDASGLIQDREALRREKKHRRRPHSMELQERMSSPDQCDLTAQQSWMLAQTLLKAYGSGLVQTSTGDGASSKMDYITLAGLVLGCVVSHALFFLCWYFSWLKNQAIGLRKRFLGNANLWEFFDLEDTTRYSVQTKLVMAPLILLCGLLYCVVNLLHLVVQVVRSDVPRTVVVFVQRVANSGLLGTITMGLAGGGGNADIRGRHNQIGSGQPLYICPSLIDRYRFSNRQLTEKLSFNIQMLTLQQLLSNPGTPTQPRRPDFIGLNAQAVAQQQQQQQQAAAAAAAAYYEYTSGLPPQHPQAPSIQQQQQQLLLQQQRVLMQHQQQQQALQQQQQQQQQAAVHAAHPQHAALAQAAYGGSPQRRFLSEGELVRQGAGGGVAGGELSYARSNNTVDNIRELAGSPQRGVYMWKDTSPGFTNNAGQQQQQQQQAQQVVSSGIGSSAGTLSSSGAAAGVMPHAQYMTAGGGAHPLIMTHSRLQDYTIQQQQQQQQQQAAAAAAASYHRSNPTSPTTMPQVSGAGQSYILRYGGGGAVGAAGSSGSLASVTASNPATGGGGYQPALRGGVAVFPPNPMGNQGGGNLQTQPSPQIKRKQTPTRPMSFVRALEMADSMEMQSLEQQQNGGIPGSGSVGNNQQAGGGGGGHLMQSNASNSGTPDRASIYDMNYEISV

SEQ ID NO: 3922 - DNA, 2671 bp, DROSOPHILA
caacaaataatttgctccacatttcccacacaaaggtctagcgcaaccacattagccagacctcttggcctttcgctcctctttgttggccagctgggttgctcgacttgggcttggctttggcaacggttgagtgccggcacacgggggataataatcgacagcctcggcactggccaatgcccaccttggatcccattgaaatcacaacatgtgatattttgttaaatacgctcaaaaattatggtatacttttttaaagcttaaagaatctaccttaggtgaacctaattagcttgaattatgctctggttatttgcgaatgaaagcgttccggaaactataagatttgtgtaattttcatcaggatccggctccctgtgtgtcagtctgctcatatgaactacgagatatcgaacttataaaacttgctgatgatatctaaagcgtatctgatagtctattatcaactgcatattttattaagcttagtttgattagatagacgcgcagggtataaacatatcatacatttttaaaaaaatatttaaaataatattgttatatctataactctcaagaattaacttttttatgttgactctgttagttttaatcataacttcatcaataccctatcaatataaaaatatctaatgcaatcaaaaatataagctgatggttttaaaattgcacatattatttaaacaaaatatttgagattttttttttatttttgtaaagattttgcagtattttttataggtattaaatatggctaacacatctaattgaaacacattagaatgtcattaatgaagacgctatctccttgactcaattttatccggataaaacaaatccgaaattgtttcagctgccgttgatgaaaatagatgatcaatagatgaaaataaaaaaaaaaattttttttaatatttgtgtgtatttgtaggaggcaattgtaaaactataacagtaatgggttgagaaacgtaaaatgacagttcttagtggtggtaggcaacagcgggggcggcgtaggaggtgtaggtagcaggagcggcgtagtgggcaactggagccacggtcttgaccacggcgggagcagcgtagtgggcaaccggagccacggtcttgaccacagcgggagcagcgtaatgggcgacagcaggggcggcgtagtgggcaacgggagcggcgacggtcttcacaacgggggcaacggcgacggccttgaccaggggctcacggttgacaacggcgttgaatccgttgatgggatcggcggtgtactggacggttctcttgtagccatcggcgtcgatcagggagtactctccgcggaccacgtcgccatcgcgctcctccacctggctcttggagtctccggagagggagtcctgaacatcgtaggcgtacttgtactggggatggggatcgtactcctcggcggccttggcaagaaccggctgggcgtgagcaacggcgacaggtgcttgggcgtaggtggccacggcgggggcggcgtggtacacctgctggacgggcagaacaccggcgctggcggcggcgatcagggcgaagagggcgatgaactgaaagagggaaagcagttaggatgtgggtctttggcggggctaagtcctcggggcgaaccttgaatgccattttgatttggattgatttggctgctgctgctgctgctgttggttgttggaaggcaaaatgaactgtgagggctactgggccaacacttggcttatataccgagatggagctatttcttcagctgctgctaccattgaatggccgaactcgcttttgccggcgggccacgctcttggcgtaattagtgcaattcatttatgctaaacgtgtgtggagagggaaaagtgaagcttgaaggcgtgctcaatctttgtatctctgtgttttgtcatcaaataacttcaatttatccgagagaaacggagagcgtgcgctgtgacatcactgcttactaaatccagttagcttacaagacagttaatattgtggcaaaaaggtcgcttaaaaagatattaactcaaaacatctaaattatcgtagctttattaaattaaaattattattttttatcacccacctttggtttccaaaatttgaagatagttcacaggcgaacagctttttaacatgcttaaaacttttttttgtaacatatttgtaatattttatgtaggttaataaaattatacaactttgtaggaaatgtgttttaaatacataataatcaaattatgatcccaacataaaatattcattatacctcaccaagacaaacctatggatacaaactcaaaacgtatttaataatttgactagcaaatatttaaacaaataagatcagaacttttattccctttttataaaaaatgggttcaattatacacacttactttgttgtactttccaaaagaaaaacaacaaaattgaataagaagactccaagtttaaggaaaatagtaattaaaattggcttggcgtaatcaattaagtgcagctggttatttcgaccgatcgaaattggcagaactgaagaaggtgcgtgacaatttttacatgccaccggcgccgctcgaggtgatgcgccaaaaatgaattccaattaggtgtcatcaatgtcacc

SEQ ID NO: 3923 - DNA, 610 bp, DROSOPHILA
atggcattcaagttcatcgccctcttcgccctgatcgccgccgccagcgccggtgttctgcccgtccagcaggtgtaccacgccgcccccgccgtggccacctacgcccaagcacctgtcgccgttgctcacgcccagccggttcttgccaaggccgccgaggagtacgatccccatccccagtacaagtacgcctacgatgttcaggactccctctccggagactccaagagccaggtggaggagcgcgatggcgacgtggtccgcggagagtactccctgatcgacgccgatggctacaagagaaccgtccagtacaccgccgatcccatcaacggattcaacgccgttgtcaaccgtgagcccctggtcaaggccgtcgccgttgcccccgttgtgaagaccgtcgccgctcccgttgcccactacgccgcccctgctgtcgcccattacgctgctcccgctgtggtcaagaccgtggctccggttgcccactacgctgctcccgccgtggtcaagaccgtggctccagttgcccactacgccgctcctgctacctacacctcctacgccgcccccgctgttgcctaccaccactaagaactgtcat

SEQ ID NO: 3924 - protein, 199 aa, DROSOPHILA
MAFKFIALFALIAAASAGVLPVQQVYHAAPAVATYAQAPVAVAHAQPVLAKAAEEYDPHPQYKYAYDVQDSLSGDSKSQVEERDGDVVRGEYSLIDADGYKRTVQYTADPINGFNAVVNREPLVKAVAVAPVVKTVAAPVAHYAAPAVAHYAAPAVVKTVAPVAHYAAPAVVKTVAPVAHYAAPATYTSYAAPAVAYHH

SEQ ID NO: 3925 - DNA, 2862 bp, DROSOPHILA
cgcttacactggctccatgaatgagtaaacgactttggggcttccctctttcaatttcaatttatatgcgctggaaccactttatggaccttacttctgccgttgttttgttgcgcatttgtttgcgttctttgacgtgttgaactgcggtttcgctgtccacttatgcgacattacttcattgtttctttattgcggcagtgagtgctattttgtcagtatctttcgcttaacacgcgttctttctttcagcgacgaccttgaaaatggtcgtgggagagtgaaagtgaaagtttcggttgtagccgaccagaagtgaattaaatgaggattttatctgattgtaatgttgtgaatgtggcagagaataacacaatttatatgatgggaaacaaaagaccgtattattttcacttcttttcaagagtattaatttgtgagggcattatagaacaattttagaaagtatatatgacagtatatatgacagtatatatgaacaagcttatatgtatgttaaaaatgctcatatcaaataatttgtatcaaatggtccaagtaaatgagtaatttagttaaacgtttttatttgtctaagaaacacaaaaattagtattttcaacaaaaaatgtttcctaaaaatcgtcgaaaatattccaaatcttttatccaagcttttaaagtcaatttttttctttaatgtttccataatcttatgtgttatgtaaatttgcgcccctacagataagaatttaaatgtagattgggacattcagtcgattgtcatacttataggtggttctaatatctttcgtttgtgtcaaaataatggttacggacagcaaaactgcagggttgattaattgcagtattaacactctaacccgacagatctatatcctgtataggttataggtaatgaagcacacgcattgccaaacataatagaagccaactcgatattcattcaattagatcacatcctttatttcagtaacaactaacggcaattatcgggtcgtggtggcctattcctgagcatttcaataggcgtacgagataagaggcgaagcgaactgggtcttgacgatggcgggtccagcggcgaccagaggagcggccttgacgacgggcgcgggggcggcgtaggcgaggggagctggggcggcggcgtaggcgagaggggctggggcggcggcgtaggtggtggtcaggggggcggcacggaccacgggggcagcgacggcggcacggacaactggggctggagcggcaacgacggcagcaggagcggcggcaacggcggccaccaggggctcacggcgcaccactgcgttgaatccgttgatgggatcggcggtgtagtccacaatgcgacggtagccatcggcgtcgttcagcgagtactggccctggacaacgtcgccctcgcgggtctccacctgggtcttcgagtcaccagagatggcgtccttgacgtcatagccgtaggtgtactgaggatggggatcgtactcctcaacctgggccacggcggccagtggagcggcggcgggaatgatgccagcgctggccacggcgatgcaggcggcgaaaagaatggtgaactgcaattgttcaaaagagtttctctaattagtttgactatctaataccgagggttgttcttttcaactaatgaagcatttgttcaagcattagttgcagctccaaaaatgtaataaaagtgggcaaatcgatttcattgaactgatttaatagtcctctatgttttcgtcactgattcatcactgtctccaacactttagaactgtgtccttactttgaatgccatttttggttgtttgggttgctctagataccgaatttggtgttgaactgatttgaacagcgtccaactggggcttttataccgcctcgatggcactctgcccgggttcggtgtcagcgacgtgcacttgcgtcacagagccacgccgctcatatcaaatgcgagacgctcaagactagaagcggctcttgctggtgcggttaaggggagcattgtgggggacgagcgggccataatttgaggtaggacggcggtgggcggcacgctgccaaggctgcgcggtgacaaagccgcggcgagcataatgtcttcttgattgaattggacttgagcgggcagcccagccgaattaatattggcctcagaagtcgcatacccgaacgtgcacttggggtacgggtccacgtccacgtcccctgccccagaaacccccaccaccaatcgatccagcagtaatgatgatcggctgccatttgcttgcgctttcgaaaagtgatcgctcgctaatagccaccatatcgtatgcagcgcatgcgcaaatgcataacaacggtttttcaaattggctgtgcacttgccggccgaggcacccataccgatttccaatcccagtcccctggccagcagatttcgagtaaccccaccgccccaccgacgaccttaaacgtttgtttacgctggctgtcgctccagttgaacgctaattggatttcgagcttaactttagtgcgacacctcacttccgaatgcccacccaaaaataacagaagtgattgcggatgttttggcggcatttggaatgcccatgacacgacttttaatgttcttacatgttgctttggaatcactattgttaccctctataggataaccatactcgttatgtagaagcttatgttgttataaatggaaaatatatataagctataagttctataccatatagtatatatttttttttcttctctctttttatttacaatctgtcttaaaaaagtataagaagtaaattgtataattaatcttaaatt

SEQ ID NO: 3926 - DNA, 647 bp, DROSOPHILA
gtatctagagcaacccaaacaaccaaaaatggcattcaaattcaccattcttttcgccgcctgcatcgccgtggccagcgctggcatcattcccgccgccgctccactggccgccgtggcccaggttgaggagtacgatccccatcctcagtacacctacggctatgacgtcaaggacgccatctctggtgactcgaagacccaggtggagacccgcgagggcgacgttgtccagggccagtactcgctgaacgacgccgatggctaccgtcgcattgtggactacaccgccgatcccatcaacggattcaacgcagtggtgcgccgtgagcccctggtggccgccgttgccgccgctcctgctgccgtcgttgccgctccagccccagttgtccgtgccgccgtcgctgcccccgtggtccgtgccgcccccctgaccaccacctacgccgccgccccagcccctctcgcctacgccgccgccccagctcccctcgcctacgccgcccccgcgcccgtcgtcaaggccgctcctctggtcgccgctggacccgccatcgtcaagacccagttcgcttcgcctcttatctcgtacgcctattgaaatgctcaggaataggccaccacgacccgataattgccgttag

SEQ ID NO: 3927 - protein, 191 aa, DROSOPHILA
MAFKFTILFAACIAVASAGIIPAAAPLAAVAQVEEYDPHPQYTYGYDVKDAISGDSKTQVETREGDVVQGQYSLNDADGYRRIVDYTADPINGFNAVVRREPLVAAVAAAPAAVVAAPAPVVRAAVAAPVVRAAPLTTTYAAAPAPLAYAAAPAPLAYAAPAPVVKAAPLVAAGPAIVKTQFASPLISYAY

SEQ ID NO: 3928 - DNA, 3662 bp, DROSOPHILA
tcgcgttgctcagccgagaaactggaaataaaaggcgtacttaagcattatgttcccttattactttatttataaattattatttaaaattatttaacaagttgttttaaaataatatatttcttaatttaaataaacagcggattatgacccgtttgaaatattttaaagaacgaaaaatgcctttcgtactgcaagtactaatattacaaaaatagtaaatgtttcgggttagaatgatatgttataaattataacgcatttatagttaggacaaatatgataaagatgaaaaagaatatggataagtgaataatatgtttacacatacatccaaattctttattatttagatctctggcctgctgagaaaattgttatattttaactcgatgcaaaaaacatgtgtacgtcaaatatcttttgctcttaaagggactatcagcaaaatataaacggggggtcggctttccactttaggtacttcgggtaaccggagaatacccactgcgaagagcctccatttttaagggactgaaggacacttagtaaaaaataaaaaatcacagtttttatgggttttgcttgggcgtttctttatttccattttatgtacaaaacttatgacagaaacggacgaatttgagcgtccgagtgcttaaaatgtattgcaatgctcagcgtttttagtttctttattatgacaagaagtttggggctttgggacttcgacgtcgagatccagatccaaagtgctgaggctacagaataaatcgcttgcgagtgcgatatgtatccatgctattatgtatgtacatcgtacatagtcagaagctccatgaaacgaagtgatattttataagtaaaaataacaagggcgctattggctatcttattagctcgaatatttgataccccaagcttcttaaaatccagccaagttcaacctataagtatgaatcgcagtccagccatagatccctaaaaaacagtcgaaaattcagaggtgttgtatgacgatgatgaaaactatctgaacatacggattgaagtagggcgaacgaagtggatatgtccgtttggacgtgatcgtaaaacccgattccaactgctcggtttgctgacgtggcgcaaccagatacttgtccgcccgctcgctggccggttgatactttgctgccgccacagcgttgaatattcgtgtgctccatatctcctttttcggtgcctcgttcggcgacgacattggggagacaggaaccttcgcggatacaggcgaatctacagattttggatattcgggatcagcatttactctgcccgggaaagcaatcccgtgtttgaccttcatgtgcatcaggaggaaggtccgccgcttgtagcgtttcttgcatgtgaggcacttatgctgcttggtcaaattcttctctaaccgattcacagccagctctttattcccgtggaagtggctctcgtggtatttcagcgactggcgggagctcaatcgctttccgcaccaattgcactcgaactgaccttgattgaaagccaaggatttggcatttgggggcttgggttcgatcagaaccgccgatcgggacttccctgcacccgcatcctgaatcggatcttgtgcttggggtcggggattttccaagaccggtggttcctccacccttgtgagaattccttccggcacacaaaggttttgcatttcaagcgaagtatgttggttacttggaatcgcgcttgccattggatgaccagaaggctccagaggagattgcggtgacattggaagtttttggcgcagttcgagtggccgatgacctaaaaactgcactggtggctcataagccgtatgctgagcggtcatatacatgggtggtatctgaatcggatgttgatgaaccgcaggcatttgaaatggaatttctggttcgagcggcggtgagtaaaaatccatgggtggcggacagccaaactccatccgattgcggtagtgggcattgtgatggtgatccatgtcaccatgatcaatggaatgaaataagtgctgatctgtgggatgcacgaatggtttattcatggactgaacaaagggtgttatcgtcggcggaggtgtctgctcctgcgcacgcgtgttattccaggcgttaatttccgccgcatgttgggtgaggtgctccttgaaggattcaatatcattgaagggctgtttgcacaggtagcacggaacacagagcacggttccttcgggaacatttatatgttcactgcgagccagaatctccttgaccagcggcatatccgtaggatcagtgggtgaaaatggtggggagggtatggcggatggaatttgcgggtacatctttgcgggatgcctctttggttccgtctggcgatggtggtgatgatggttcatgagttccgtctctatgatctccacatcgctatcactttcagcgtccatgacactcttcggttggtggaattataaataacaactgttctgtaggatcgctttcacgttaaattcactagggtggccggccatgctttttaacagttacactcgatctaagtacatatgcatatatacatatgtgtaaataaaatataaagttccaacgcccagctcacaactgcgcagctcgacgtttctctgcggactaaaagaagaaaaggcgatcgcattctgtaaaatcccaaataagaagactttactcgttgagtttttgtaagaaactgattttatttggaaatatcttcggtttaaataggtgacatgagaatcgcatcttaaagtaaatggcctacgcagaggcctaagtaaatagtccccgccttatcgaggtcccacgctcgggcacatctgcctatcttgagcggcgaggaccttatctgtggtctcccactaagggactattttaggaggcggggaacgatctcaagtgactgactcatgtagtgtgcacttaaattacatgtttttgagcaatgcacccatgtcgccttagataacaaaatcctaaatataatttatcgctctcgattcatttacataagatatgaacggagcccaaaattgtaagtctttaaatatatttcggtgttcatgtgtgaacacattctattttatgcgatctacgctgtcttctcgtttgtttagaagtacgtttaagaatcagaataacagctagacttatttgagataaggctaaacaaaaaagcattttatttttgcaccatcttatggcaggcattcacagttccttcaatcgttttaaagtgcttagaatagtactgataagcctttttactgataagcctttaatattttttaaattgtcattagtgttcaacggttttatgatgcccacttcgagttatgggaacgtaggtacaataaaaggacaccaatagaaaagaacaagaacatttcttaaatacgtatgtatgtacatatgtatttacgccagaaattataaaagagatgaaaaaggatatggtatacccgtttcttgtggagcacggacttgcattgttaaaaatatgtacatatgttgtttaaatatgtgtttagacatgataagaaggcaaactataaatatgtcctatttatgggctggaataaacatgtcactggacagcataagtgg

SEQ ID NO: 3929 - DNA, 1662 bp, DROSOPHILA
aacgtcgagctgcgcagttgtgagctgggcgttggaactttatattttatttacacatatgtatatatgcatatgtacttagatcgagtgtaactgttaaaaagcatggccggccaccctagtgaatttaacgtgaaagcgatcctacagaacagttgttatttataattccaccaaccgaagagtgtcatggacgctgaaagtgatagcgatgtggagatcatagagacggaactcatgaaccatcatcaccaccatcgccagacggaaccaaagaggcatcccgcaaagatgtacccgcaaattccatccgccataccctccccaccattttcacccactgatcctacggatatgccgctggtcaaggagattctggctcgcagtgaacatataaatgttcccgaaggaaccgtgctctgtgttccgtgctacctgtgcaaacagcccttcaatgatattgaatccttcaaggagcacctcacccaacatgcggcggaaattaacgcctggaataacacgcgtgcgcaggagcagacacctccgccgacgataacaccctttgttcagtccatgaataaaccattcgtgcatcccacagatcagcacttatttcattccattgatcatggtgacatggatcaccatcacaatgcccactaccgcaatcggatggagtttggctgtccgccacccatggatttttactcaccgccgctcgaaccagaaattccatttcaaatgcctgcggttcatcaacatccgattcagataccacccatgtatatgaccgctcagcatacggcttatgagccaccagtgcagtttttaggtcatcggccactcgaactgcgccaaaaacttccaatgtcaccgcaatctcctctggagccttctggtcatccaatggcaagcgcgattccaagtaaccaacatacttcgcttgaaatgcaaaacctttgtgtgccggaaggaattctcacaagggtggaggaaccaccggtcttggaaaatccccgaccccaagcacaagatccgattcaggatgcgggtgcagggaagtcccgatcggcggttctgatcgaacccaagcccccaaatgccaaatccttggctttcaatcaaggtcagttcgagtgcaattggtgcggaaagcgattgagctcccgccagtcgctgaaataccacgagagccacttccacgggaataaagagctggctgtgaatcggttagagaagaatttgaccaagcagcataagtgcctcacatgcaagaaacgctacaagcggcggaccttcctcctgatgcacatgaaggtcaaacacgggattgctttcccgggcagagtaaatgctgatcccgaatatccaaaatctgtagattcgcctgtatccgcgaaggttcctgtctccccaatgtcgtcgccgaacgaggcaccgaaaaaggagatatggagcacacgaatattcaacgctgtggcggcagcaaagtatcaaccggccagcgagcgggcggacaagtatctggttgcgccacgtcagcaaaccgagcagttggaatcgggttttacgatcacgtccaaacggacatatccacttcgttcgccctacttcaatccgtatgttcagatagttttcatcatcgtcatacaacacctctga

SEQ ID NO: 3930 - protein, 490 aa, DROSOPHILA
MDAESDSDVEIIETELMNHHHHHRQTEPKRHPAKMYPQIPSAIPSPPFSPTDPTDMPLVKEILARSEHINVPEGTVLCVPCYLCKQPFNDIESFKEHLTQHAAEINAWNNTRAQEQTPPPTITPFVQSMNKPFVHPTDQHLFHSIDHGDMDHHHNAHYRNRMEFGCPPPMDFYSPPLEPEIPFQMPAVHQHPIQIPPMYMTAQHTAYEPPVQFLGHRPLELRQKLPMSPQSPLEPSGHPMASAIPSNQHTSLEMQNLCVPEGILTRVEEPPVLENPRPQAQDPIQDAGAGKSRSAVLIEPKPPNAKSLAFNQGQFECNWCGKRLSSRQSLKYHESHFHGNKELAVNRLEKNLTKQHKCLTCKKRYKRRTFLLMHMKVKHGIAFPGRVNADPEYPKSVDSPVSAKVPVSPMSSPNEAPKKEIWSTRIFNAVAAAKYQPASERADKYLVAPRQQTEQLESGFTITSKRTYPLRSPYFNPYVQIVFIIVIQHL

SEQ ID NO: 3931 - DNA, 2928 bp, DROSOPHILA
taaagggacacgagcacggccaagggccagttcaccgagagattaaccgacgatcgcagtgaatctagtttgtcatactatgaatttttgcaacacattcgggctcaggttaaatagtatataagcaggatatcctaccactattgtatgcagcataaatacgagtttctaagaacctaaaaactcagactctggtgactagaagcacgaagcgaatgcaggtgacactggtgcgaaacaatggagaccagttcgggacagacatacacttgatacaccttaaccacccatcccctacccactctctcggcttaggtaattttaaagtgcatgtatttatttatttgttgatttgttgcactaaaaataaaataaaataattgaagatcatagtaaatgcgaaagagccaacttgtcacaacagaaactaagatatcgttgccagttcgtttagggcgaacattagtcaaaagttcagctaaccagtcagtagagctcccgaagaagtggatggctccgttatttattatagaaactatgcaataaaccaacgaaactgttgtacattatgctttagctcgatttttgttcgttccaactgcttcaaacattctgcaaacttctcagccccacaaattgttatcgcttaccccaattgtttgctgttttcagtagtatttattttccggaatccagagaaatctatatttatttataagtgtaaggaaaggcgttttgttgcactgtagttagcgaacttatttcaaacgtatgtacggatttggtattgtgtattgcattcattggactgctaggcagtgaatgtcttaagcttagaaggaatattatactgtatcaataaagagaccccatccctgtacctcaggtggcgcagttgtcgttctttgagtgggctaactaatcgaaaaaccatatacaaatactgtaccatactttatacacatacgagtacatcaagatataaagcgaaataaattttaattaaatcataaggcaatgcgttttattttcatatgtacaggcacatctgttgttcccaatatatcccaatttagttttgggaaagaccttaattaaattaacaatcatttacaatggatagatgatggcgcataagactcaataaatcggtcagcccttcgcaagacatatcctggttctatgttcctctacataaaacagttgtcagcgcctagccagagattcctgcaaaaatatcaactttaataatggacaaatataaattgggtatctggacttacggattgaagaagggggagcgcggcggatacttcctctttggtggaggacacaagatgggatccagcttataatcgtttgttgtgtctagacttctgggagagtagtgctgccaatctaaggacttctcatctggttggtagccatcggtcgcgtgctcaatcttcacgtgtaccttgagatgatcctggaggaggaataccttgtcgcagagctggcattgaaagtgtccctctgtgttgggcacatgggcttcatggtatcttttatagtgctggtgcagttccagcgaggatcgcatcgtgcgcccgcatatatcgcatgtttgaccagtgctcacaggctgcggaaagtgggtggggaggtgttcgtccagcttctcagtggcatcaaaagtctgctcgcacagcagacaggaaagttgcacttcagccaacgccgtttccattatctatttatttcacatgcaacttgtttatttttatgttagcttaagaatatacgaatggaaactctctatattttcaattcatcaacatatgaactactcgcattacggttcctcgctctcgttcttttactccgttatttacacgtctttcttttcattcaacatccagtctattcgatgcgcacttaaaagtcacaagtgttccattcggttacaagaaatcaactgttcttttcgttctcctcatactcattgtgaaaacaggagagagcgaagtgtcatatcagtgttgcatgtttagcctcttttagctataacaaaaattagctattgtgggaagtgtgagttagggcagatatcgatcagcgctggctcgacaagttctcgaaaaaagggcgcagtctaaaacaacagcacacacacttttcttttgatatgaaattggttcaattctggtggtacagttagcataatattcttttctttttaaacctacccagcattatgtaatcgatttaggagtatttatagtaaaacgaatataaggcttgcaacttagccgaaaaatgtgcgatcatatttaaaccgcttccaaatctgaaaagaagaaacgtgaacaataaatatttttatgtacatacatatgaacatatttatatatgtatgtatgtgtataataattctgtatatgtatgtataataattctttgatttcttagtttattttttcaaagtgaattacctctttaaattagtggatattttatgagatatcgcggtgcacatgtacacatatgtatgtatatacataaaaatcccaatacatatgtacttaaattattcatttcttgaccaggattaataaccgagtctaactggccatgtccgaataaacgcctcgatctcaggaactataaaagctagtatgttgagattaagcatggggcttccagagagccacccaaaactgcgacttccacatttttgaaaaatgtattactagtttttcatatattatgaagaactagctgagtaacgggtatccaatagtcgggaaactcgactatagcattctctcttggttttaaactaaacctgaatacaatactgaatacaatacatatgatttcacaccccttgagtttaaagatgatattttttatgcatggcctgaagaatgtttgaatttattttgg

SEQ ID NO: 3932 - DNA, 872 bp, DROSOPHILA
gtgacttttaagtgcgcatcgaatagactggatgttgaatgaaaagaaagacgtgtaaataacggagtaaaagaacgagagcgaggaaccgtaatgcgagtagttcatatgttgatgaattgaaaatatagagagtttccattcgtatattcttaagctaacataaaaataaacaagttgcatgtgaaataaatagataatggaaacggcgttggctgaagtgcaactttcctgtctgctgtgcgagcagacttttgatgccactgagaagctggacgaacacctccccacccactttccgcagcctgtgagcactggtcaaacatgcgatatatgcgggcgcacgatgcgatcctcgctggaactgcaccagcactataaaagataccatgaagcccatgtgcccaacacagagggacactttcaatgccagctctgcgacaaggtattcctcctccaggatcatctcaaggtacacgtgaagattgagcacgcgaccgatggctaccaaccagatgagaagtccttagattggcagcactactctcccagaagtctagacacaacaaacgattataagctggatcccatcttgtgtcctccaccaaagaggaagtatccgccgcgctcccccttcttcaatccgaatctctggctaggcgctgacaactgttttatgtagaggaacatagaaccaggatatgtcttgcgaagggctgaccgatttattgagtcttatgcgccatcatctatccattgtaaatgattgttaatttaattaaggtctttcccaaaactaaattgggatatattgggaacaacagatgtgcctgtacatatgaaaataaaacgcattgccttatgatttaatt

SEQ ID NO: 3933 - protein, 160 aa, DROSOPHILA
METALAEVQLSCLLCEQTFDATEKLDEHLPTHFPQPVSTGQTCDICGRTMRSSLELHQHYKRYHEAHVPNTEGHFQCQLCDKVFLLQDHLKVHVKIEHATDGYQPDEKSLDWQHYSPRSLDTTNDYKLDPILCPPPKRKYPPRSPFFNPNLWLGADNCFM

SEQ ID NO: 3934 - DNA, 7777 bp, DROSOPHILA
aaccggctccacctctccgagttcagcattaagtgtctcattagcgatctgtggagctcgtggtaaccactggttgtgagcccaacagcaggcgtatagtttctctctctcttgacacaattttaccacatcctcaatttcctcgccagtgcgatggatgtactcctgtgcaacaatttgatcgaaatccgaataggtacccaattcccaagggctaaaaattttcggagatattttggacagatttaacctatccagctgcactcccttactgtggagtaggtgctttaaacgtggcaataagacgcatagatttacaggccaattgccatggtccacgacgtgcctaaagcaaaggtgtaagttgtcttcgcttttgtacaagtcctcgccatcgtgaatacttgtgtaataggagaattcttgaagatctaattggtagagtatgcgccaaatggttctcatcaacccttcacttgtgcagatcaaatacttaagattgtgatcctatttgaaatgagatttgggtcattcaagctttgcattccttacttatatttaattgcttaccttgcttccttctgcaaaaaatatttccttcgctctttcgagaagaaattgattttcttttttctctactgaactgttttcattttcggaatttccttcggtcgtaacccttgctccatcttccagaatttttgtcgatccagcttcaatttcagtgtttggtctgttcgtagagtttcttgaattattagatgattcagcatggatcattttaatcttagccggactttccaggttattatttaaattaactgaactgctttctttcgttggctctgaactctgatccaacgctttcggaattgtatgcatttcagttgcttgtgtgtcagttgctgttgtttgagctgtgcagacactttctatgtcaaccgaattcgaagacaattgtggctcattttcttcagcagcaatggtattggcaacaatatgcccggtagatacggaataccttttatattgttcttctagaaatgcttgtgttactgggcagttgattcctttaaataatttatcgagaaagttatgggccgtataattccacccgatcttcagtttgctaaatataatcgtgttgtataaatgtgcttgctaatcctttaaacattattttttttacctcgataattcataaagcctctcagcatttagttgaatataatcttttatgggttccgtaacttctagttcatgctgcaattccagtggctgtgtgccttggttggtagtgacgtcttctgggacaactaatgcgtcttcgggaaaaggctctggttgaaattgagacgtgttttgtgtagtcatcggcttactgctgatcgcttcctttgcgactttagtcctttttctgctgcaattataaggtttattacacatccggaaaaaaagtaaaaatgtatgtggtataccttttcattaagatttctaaagcatttctgcgaacaggtaacgacatttcgcttttggactgaaggcaactttccttgagcggtgttctagtggtgcacgtcgccaggcaatcagtttcctgtagacaatcattcacatttttccctggataactaagcaattgttgtagtatatggccggtacatggcttgaatcgacatgcgaacttttccctcatctctggtccagaatagaagcctttgtagtagtcgcgaataacctcatccttggattttcctctatactcaacgcacttctgcatattattagcaatatcatctagattgctcacatgacttttgaacagctctaaggatacagggtatggtggacactcttctccgggcttgtcgtcattagaactaggcgtccttgtggatggtatactttcatgttcagctattggtctgctggagtcatgacttattactattatatctgaaaacaaatatatgtttaacttacttctcttcggtgatattttgcgtttctcgtactacatttctggatgactgcagacaactttcatcgcttaggttttctgtggtacaagccacctggcaatttggattctttgggggtagctccttgtttttcggtggaaaacttaacaattgtcttatttttttgctgggacacggtttaaatcggcactcgaacttctccctcatgtctggtccagaatagaagccctcgtagtagtcctgaattacctcctccttgcttttttctttgtactcatcgcatttttgcatctcattaacaatatcatcgagattgctcacatgacgtttgaacatctctaaagaaatgggatttggtggacaattttctgttgttgttttaggagtgaaaggtacctgggacttggattcgtttactgcttttgcattatctgttcgattcattgtaaaaagagccttttcatcaagtggcttagctttttgttttagcttagccagcatcttaggattggggcaattgaatttgtacttgaatctttgacgaacatcattgcgtgcataaaatttattgtaaaactggcggaaaaattttttgcattgtgggtgcgaaggatcagaaattaattttgacagttgatgttcgtctttaatgtgattatttactagaattgctcggataatctcgtcatagttaatatattgccgaaaagtttcaagtgatacgggaaaaataaagcgcccatgtctaaaaaattttttttgaaaattgttacttaaaaatttaaaaaaatggtaatttatatttttcttactttttaaggtccacttcaacatccgtcacaaaggaagtcctaaaattgtggttttaaaattatgaaaacaattcaggttacgctaacttactcatatacatcggtagaatctgtgatctcttcaggtttggctggggtctcgtccgaagctctggtttttgaagcaggactctctggtgtcttggacatgggcacttcgaaacctgacggaggaatctctaactggggcgctctatctgattgttcttcggcaacctccttgctctgatggggtttaacttggggacttaagacttcagatgacttctcaggggctttcgaactgtgcagatggcgttctggcgaagctaatgccggcatacatctgcttagtttgttggcatcgttcctgagattagcttggttttcgaaagtttctaaagtattatgtgaactcgatagcccttcagtcgtgctaatagctcccgcagcacaattctctggcgaaagagtagctaactgggacagaccttcactcggttcgtgggcaacctccatgctgggactggtttggatttgtgaagagccactggtattctgcgaccctaatgaccctttgctctcagtaatatatgaagtgttgggcctgcgcgaatcaagtcctggcgagggattagctaactgagggaggcttttcctaagcttttcggcaatatctttgccgagaatggacagcatgcaggccttgaaagtcgacgtgcaaggttttaatttgtatgcgtatttatatcggatcctcggagtaatgtaaaacgccaggtaatagtcaagggcacattcctggacatccttgctcgcataattagcatccagttgcctcatttgctccacaatgtccgataagtttgccatatttttcttaaatacctcgaagctgacgatggaactgtgaaatatttatagtaaacaacgagtatttggaaagtgtcccaaacttactttttcgtaagggatttcattgcagtaagctccgccacagtcttgaccgcttttttgtccagtggtttcccagattcaagcaacttttccaaagggatttctgtagttgcattgaagatattcgtaggggatcgcttttctggatacatgtaaaagcggttgtagaacctttgtagtgtaagaagacgacgctcatcgtcggacaagaggaccaggcagtgttctatgctcctgacaatttttttgaacagtaacatcttattgatgcactgtaggaatacatcaaaggataccggaaagatgaaggcgccacatctgaaatgagtcaaaattggttaatctgctctgctcgaaaataatattacccacctctccacattaacaattacgtctggagattccgatcctgatggtttacattcaactgcaacgccttcaactgcatcatgggacttcgcggtttcagcgagcgtcgtcaactggctgccttcaactaagacttcgggttgctctacttgagatggtcctgcagctgctacgtttgcaacatcgttttgtgaaattcctcctggctccggtactttaagcaagttgtcgcgtgtccgcctgggacacggcgccaccttgacagggaaccttgcccgtatgctgggattccggtagaactctttgtagtaccatctgctccactcgaccaacgttctattgtctccattggcagttttcaactcacttgcaatttcagacaaattaacgattaacttttgaaatgccgcaaaggacactggatacatgttgctcctgaaatcaaacaatatttaatgttaagatgtaaaagattcacagtaaccttacgacttgttctatgcaagtaacgttatttgttgtttatcataaacatcacatttcaataccgcgaaataaactaggctgaatatcacagtgtgactgtgctgcaaaatgacaatatttatcgatagcgaacgactaaatattttcactacgagaactcgaacttacttaaaattttacaagccagttaatacttttgtgctttattgtttattgtttatttatttattgtgctgatttaaacagggttataatttcatagctagctaattttacatgttatgattttccaaatgactccaaatttgtaaggtgtgctaggtatagtaggtggtatattccagcggtcgccgcacggtcacactcgagctgcgattcggagggctagaaaatcatcgatgtttacgtacatcgatagttggcagggctttgctttgttttgcaaattccaagcggagttgaggctgtgacagattgcgggtgcgagttgtgaagcaacattgcgtcatcatcagctcctggacagaaaagagctcagggaacgaggcaggtccgcgcccggggacaaggaaagcctttagccacgaggacgcagagggatcaaaggcggaggaggaggcggtggccgtgtcacgggagctggatcaaatggccagcaccactggaagtgcccccagcctgggacccccccagagcgggagtggtggctctggcacattggagggcacgctaagcaagtggacgaatgtgatgaagggctggcagtaccgcttcttcgttctggacgagaatgctggactgctgtcctattacacggtgagtggctgcagtgcacctcctgactgaaacccatatcgcacccagaacgaactcctcatggcccgcagccttatcttatctgctatagatacatttggatacacatacacacttgttggtacccctttattgcgtgatttgttgacaggagattacttttttgagtctgactgaggggtctgactcttgcgccgctgcgaggcttgataggcactattatagaagtcgtaaaagccgtagaacatgccaagaatgacggtggtgaagtagagaagcactaagggcggcatgccgcacaataccagctggaaagcaacctgcgtgaggataagaacgaactgcgtcatctgaatcactgtgatgcacttcttcactggagttagggcctgcaccaaggtcttatccgccactgccgccacaaagtagtacgagtacatgataacgtgaacgatagaattcaagaacacgcagaagtaagcagcagaacctgtacaattgaacgcatttatgaaaatagtcggtcacccagcagccggctagcttaccattttcgttgaagttgatcagtgcgtagaccagcgttaccgtggagaagtgatgaaagatgtgcagcttggacacctggttttgtttcttgcgaagcacaaagatcacggtttcaatcagctcagagatcttcagccagaagagaaagtaggccaagttgtagtaccgcctcacgagctctgggctgctcccgatgtcgcggcacttccaaaagatgtatatggtgttgtccgtaatgtacaggacctgcgagagaaaagcaattagccgatgctgctgctgctgtacaatttataaatatccacctctttgatagcatatatgcaggaaaccacctggatgaaattatgtagcaagataagtcgcttgagctcgtaaggtttgcgccattccatgaaactataagcgaggtattaaaggtcttctttcttatataagtaagccagcgaacccgctgaattgctaatgtcaagtccactgacccacatgcaaacaagcgacgctgacattagcatgtgaacttactgcggacccgctttggtgacgaagtacagatagaggaccagcactgtgatcatgtaccagggatccttataaatcgtaggaacgttcaccaccggctgcaaatttatacctacaattttattgaaaccatcagacagttttttgacaaatccaagaggagctcacttgctgacgcctccatttcgcttctttgtgttgagcttccgctggcctgtatcctttaggtggcgtgggactggtggactgcagctctaccgccttgaccgctggcgaacatttaagcgtgaacagcacgccgaacactgtttttatattccccaagcattgattagaatacattaatttatagcaggcgtaatagccctttgacagtatgagctgcgatttaatgaactttcctaattccgactgcatttctgttacagtcgaaggataagatgataaagggcgtgaggcgcggttgtgttcgtttaaaggatgcgctaatcggaatcgacgaccaggaggacaacacattcacaatcactgtggaccataagaccttccactttcaggtaagtgtctccttagtaaatggaaataaagattgtctaaggaaagcttgatcaatgttttgcagtttcactaatagttcataattcaccgtaatagtttaagtacgacgttgtttgttttatgaactgaagaaccaactcattttaaattccacacttgcattgattttttatgacgtctagtggtatacgtaagcaaaaactatgtagatcaagagggcagcacgtttctttttgcaattcgcgttttcgtcccaaaagatataaagcaagcatgatggcctatccgctttgcttgccaagagttttcgtcctcttaccggaaaagggtatccgggcatcgacccagaaaccactgtctggtcctcacgttccaccttttgtttgactttgttgccttgatgtaacgataaaactttttccaatacccatacacaagcaaaggagcccactaaacttgccaactttccaaacgcttgcaggcgcgacacaacgaggagcgggagcagtgggtgcgccgcctggaggacaccattcgacgccacgcgaaccggtcgcgtctgtgggacagccaaagcgctttctacatcgccggtggctacacgaaggaagggggcgggagcggaacaggcggcagaagacccaaccacctggagttggtggcgcgccgtgtttccgaggcagatgcctacctccagctgatgattga

SEQ ID NO: 3935 - DNA, 4110 bp, DROSOPHILA
tcaaggcggtagagctgcagtccaccagtcccacgccacctaaaggatacaggccagcggaagctcaacacaaagaagcgaaatggaggcgtcagcaagtataaatttgcagccggtggtgaacgttcctacgatttataaggatccctggtacatgatcacagtgctggtcctctatctgtacttcgtcaccaaagcgggtccgcatttcatggaatggcgcaaaccttacgagctcaagcgacttatcttgctacataatttcatccaggtggtttcctgcatatatgctatcaaagaggtcctgtacattacggacaacaccatatacatcttttggaagtgccgcgacatcgggagcagcccagagctcgtgaggcggtactacaacttggcctactttctcttctggctgaagatctctgagctgattgaaaccgtgatctttgtgcttcgcaagaaacaaaaccaggtgtccaagctgcacatctttcatcacttctccacggtaacgctggtctacgcactgatcaacttcaacgaaaatggttctgctgcttacttctgcgtgttcttgaattctatcgttcacgttatcatgtactcgtactactttgtggcggcagtggcggataagaccttggtgcaggccctaactccagtgaagaagtgcatcacagtgattcagatgacgcagttcgttcttatcctcacgcaggttgctttccagctggtattgtgcggcatgccgcccttagtgcttctctacttcaccaccgtcattcttggcatgttctacggcttttacgacttctataatagtgcctatcaagcctcgcagcggcgcaagagtcagacccctcagtcagactcaaaaaagagcaacatgtatccagtgtcctttgcggcatttcaaaagttaatcgttaatttgtctgaaattgcaagtgagttgaaaactgccaatggagacaatagaacgttggtcgagtggagcagatggtactacaaagagttctaccggaatcccagcatacgggcaaggttccctgtcaaggtggcgccgtgtcccaggcggacacgcgacaacttgcttaaagtaccggagccaggaggaatttcacaaaacgatgttgcaaacgtagcagctgcaggaccatctcaagtagagcaacccgaagtcttagttgaaggcagccagttgacgacgctcgctgaaaccgcgaagtcccatgatgcagttgaaggcgttgcagttgaatgtaaaccatcaggatcggaatctccagacgtaattgttaatgtggagagatgtggcgccttcatctttccggtatcctttgatgtattcctacagtgcatcaataagatgttactgttcaaaaaaattgtcaggagcatagaacactgcctggtcctcttgtccgacgatgagcgtcgtcttcttacactacaaaggttctacaaccgcttttacatgtatccagaaaagcgatcccctacgaatatcttcaatgcaactacagaaatccctttggaaaagttgcttgaatctgggaaaccactggacaaaaaagcggtcaagactgtggcggagcttactgcaatgaaatcccttacgaaaaattccatcgtcagcttcgaggtatttaagaaaaatatggcaaacttatcggacattgtggagcaaatgaggcaactggatgctaattatgcgagcaaggatgtccaggaatgtgcccttgactattacctggcgttttacattactccgaggatccgatataaatacgcatacaaattaaaaccttgcacgtcgactttcaaggcctgcatgctgtccattctcggcaaagatattgccgaaaagcttaggaaaagcctccctcagttagctaatccctcgccaggacttgattcgcgcaggcccaacacttcatatattactgagagcaaagggtcattagggtcgcagaataccagtggctcttcacaaatccaaaccagtcccagcatggaggttgcccacgaaccgagtgaaggtctgtcccagttagctactctttcgccagagaattgtgctgcgggagctattagcacgactgaagggctatcgagttcacataatactttagaaactttcgaaaaccaagctaatctcaggaacgatgccaacaaactaagcagatgtatgccggcattagcttcgccagaacgccatctgcacagttcgaaagcccctgagaagtcatctgaagtcttaagtccccaagttaaaccccatcagagcaaggaggttgccgaagaacaatcagatagagcgccccagttagagattcctccgtcaggtttcgaagtgcccatgtccaagacaccagagagtcctgcttcaaaaaccagagcttcggacgagaccccagccaaacctgaagagatcacagattctaccgatgtatatgagacttcctttgtgacggatgttgaagtggaccttaaaaaacatgggcgctttatttttcccgtatcacttgaaacttttcggcaatatattaactatgacgagattatccgagcaattctagtaaataatcacattaaagacgaacatcaactgtcaaaattaatttctgatccttcgcacccacaatgcaaaaaatttttccgccagttttacaataaattttatgcacgcaatgatgttcgtcaaagattcaagtacaaattcaattgccccaatcctaagatgctggctaagctaaaacaaaaagctaagccacttgatgaaaaggctctttttacaatgaatcgaacagataatgcaaaagcagtaaacgaatccaagtcccaggtacctttcactcctaaaacaacaacagaaaattgtccaccaaatcccatttctttagagatgttcaaacgtcatgtgagcaatctcgatgatattgttaatgagatgcaaaaatgcgatgagtacaaagaaaaaagcaaggaggaggtaattcaggactactacgagggcttctattctggaccagacatgagggagaagttcgagtgccgatttaaaccgtgtcccagcaaaaaaataagacaattgttaagttttccaccgaaaaacaaggagctacccccaaagaatccaaattgccaggtggcttgtaccacagaaaacctaagcgatgaaagttgtctgcagtcatccagaaatgtagtacgagaaacgcaaaatatcaccgaagagaaaccaatagctgaacatgaaagtataccatccacaaggacgcctagttctaatgacgacaagcccggagaagagtgtccaccataccctgtatccttagagctgttcaaaagtcatgtgagcaatctagatgatattgctaataatatgcagaagtgcgttgagtatagaggaaaatccaaggatgaggttattcgcgactactacaaaggcttctattctggaccagagatgagggaaaagttcgcatgtcgattcaagccatgtaccggccatatactacaacaattgcttagttatccagggaaaaatgtgaatgattgtctacaggaaactgattgcctggcgacgtgcaccactagaacaccgctcaaggaaagttgccttcagtccaaaagcgaaatgtcgttacctgttcgcagaaatgctttagaaatcttaatgaaaagcagaaaaaggactaaagtcgcaaaggaagcgatcagcagtaagccgatgactacacaaaacacgtctcaatttcaaccagagccttttcccgaagacgcattagttgtcccagaagacgtcactaccaaccaaggcacacagccactggaattgcagcatgaactagaagttacggaacccataaaagattatattcaactaaatgctgagaggctttatgaattatcgaggtaaaaaaaataatgtttaaaggattagcaagcacatttatacaacacgattatatttagcaaactgaagatcgggtggaattatacggcccataactttctcgataaattatttaaaggaatcaactgcccagtaacacaagcatttctagaagaacaatataaaaggtattccgtatctaccgggca

SEQ ID NO: 3936 - protein, 1280 aa, DROSOPHILA
MEASASINLQPVVNVPTIYKDPWYMITVLVLYLYFVTKAGPHFMEWRKPYELKRLILLHNFIQVVSCIYAIKEVLYITDNTIYIFWKCRDIGSSPELVRRYYNLAYFLFWLKISELIETVIFVLRKKQNQVSKLHIFHHFSTVTLVYALINFNENGSAAYFCVFLNSIVHVIMYSYYFVAAVADKTLVQALTPVKKCITVIQMTQFVLILTQVAFQLVLCGMPPLVLLYFTTVILGMFYGFYDFYNSAYQASQRRKSQTPQSDSKKSNMYPVSFAAFQKLIVNLSEIASELKTANGDNRTLVEWSRWYYKEFYRNPSIRARFPVKVAPCPRRTRDNLLKVPEPGGISQNDVANVAAAGPSQVEQPEVLVEGSQLTTLAETAKSHDAVEGVAVECKPSGSESPDVIVNVERCGAFIFPVSFDVFLQCINKMLLFKKIVRSIEHCLVLLSDDERRLLTLQRFYNRFYMYPEKRSPTNIFNATTEIPLEKLLESGKPLDKKAVKTVAELTAMKSLTKNSIVSFEVFKKNMANLSDIVEQMRQLDANYASKDVQECALDYYLAFYITPRIRYKYAYKLKPCTSTFKACMLSILGKDIAEKLRKSLPQLANPSPGLDSRRPNTSYITESKGSLGSQNTSGSSQIQTSPSMEVAHEPSEGLSQLATLSPENCAAGAISTTEGLSSSHNTLETFENQANLRNDANKLSRCMPALASPERHLHSSKAPEKSSEVLSPQVKPHQSKEVAEEQSDRAPQLEIPPSGFEVPMSKTPESPASKTRASDETPAKPEEITDSTDVYETSFVTDVEVDLKKHGRFIFPVSLETFRQYINYDEIIRAILVNNHIKDEHQLSKLISDPSHPQCKKFFRQFYNKFYARNDVRQRFKYKFNCPNPKMLAKLKQKAKPLDEKALFTMNRTDNAKAVNESKSQVPFTPKTTTENCPPNPISLEMFKRHVSNLDDIVNEMQKCDEYKEKSKEEVIQDYYEGFYSGPDMREKFECRFKPCPSKKIRQLLSFPPKNKELPPKNPNCQVACTTENLSDESCLQSSRNVVRETQNITEEKPIAEHESIPSTRTPSSNDDKPGEECPPYPVSLELFKSHVSNLDDIANNMQKCVEYRGKSKDEVIRDYYKGFYSGPEMREKFACRFKPCTGHILQQLLSYPGKNVNDCLQETDCLATCTTRTPLKESCLQSKSEMSLPVRRNALEILMKSRKRTKVAKEAISSKPMTTQNTSQFQPEPFPEDALVVPEDVTTNQGTQPLELQHELEVTEPIKDYIQLNAERLYELSR

SEQ ID NO: 3937 - DNA, 2628 bp, DROSOPHILA
ccgccccaccgacgaccttaaacgtttgtttacgctggctgtcgctccagttgaacgctaattggatttcgagcttaactttagtgcgacacctcacttccgaatgcccacccaaaaataacagaagtgattgcggatgttttggcggcatttggaatgcccatgacacgacttttaatgttcttacatgttgctttggaatcactattgttaccctctataggataaccatactcgttatgtagaagcttatgttgttataaatggaaaatatatataagctataagttctataccatatagtatatatttttttttcttctctctttttatttacaatctgtcttaaaaaagtataagaagtaaattgtataattaatcttaaattaacagaggcagtagttatccattaaaccctactacataccctactcatattatgttttaatacttaaaacctgtcggggagatctagcacgtgaaatcttttaaatcttctgacgttgttattattatttagtctgtctatatattttttattcctaagactttatggatacttgcatttgaaatataaaatggagcattaacaatttgtcttaatattttcgattggtagagttgtagaatctcaatatttgagttgctggcagtaccccaaagctgtatgccataagtccacacgggctttagtatagctttgtataaacggactttattttccagagtggttgcttggattttcggccaagcaaccaggtcatcttcaaacttttttgatttagttgctggcgctttgcttttatgtgtttttcccacgttagtctgcgatcgaggtgcaagccaaggtactttatgcaattactttgtgggattgctgatccattaaatgacacttctgggcagtcacctcttcttaatgcaaaacttatatatcgtatatgaagagaagaaacaaagaatataatccacagttattttaaagagttttattcgggttctagaacacatatgaaatggcatggggatgatgggcgtggtgcacggtagtcttcagcacgggaacgtggtgagagacgaaagaatgcgccggagctgcgtggtgcacgacatgggtcactggggcatggtggaccaccggtgcaaaggatcggtgcaccacagccgatgcctgagaaagcggcttcagggctggcaacttcttcagaggctttaactgaacttttggaacgactgctgtagcctgtggcttcacaaccaccgcggcactggaaagtggttcacgacgcaccacggcgttgaatccacggacatcatcggccgtgtagtccacggttcgtctgtaaccatcggcatcattcacgctgtactgaccgtggactacatcgccatcccgagactccgactgggacttaacatctcctgtctctggatcctgaacatcatagttaaatgagtactgcggatgagaatcataggtgtcctcacttccagatgatttcgctggcagtggaccagcttgagccaagccgatgagggtcacaaatagcgcagtctgtacgtggttaaaggattaggataaaggcaagccaacttgtaaataacacatgatataccttaaccaacatgctgatcgaatttttaggttgatgaattaggtttgctcctgtcggtagttgattttacacaagttcactacggtactcacatcggcttttataggcggcttccttgccgtccacccagtgccacagtggcctgtttctgcatctggatcttaacaaggtcatcgcggggacctccagcccagtcactttgtagaccgcttaattggcgttgagatgccccaacaagtttatcgggcaatcggcaggttttcagaccgttttttacttgctgtccgggatatgggctccgtccataatttcgcggagtcattcctcaccaaaatttgataatttgtatgttttttttattaacttccttatttaaggacaacttgcaaatataataataatcgccttgctcaatttcaaattgatgatattgtaactaagacaggaaacatttttataaaattttgccgattgtttgcagactgctcaaatatgtcgcccaaaatataagccctaatgcaaagacatacttcgaatttataatgtactgctatggctcattagttgtagtattagaccgaaataaaaaaccattaccttttgggagcaattttttgaatattcatagtcagcccaaaagtatgcaagaatattttttcttgctgaccaacaggtggtgctaaatttcctgatttcgctttccttagaaataaatcaaacaaatacatatatacaggtaacaaaacggtttacaaaaatgttttatatgtatgtatattaaaatatgttttatttaaaaaaaatgtaactttaaaattaataaaaaagaattcacgaaatgcttaaaaattaccttacgagactaaaataaaagcgtcgcaattgtttttccttatctgatttcttcgttatatttcaatgctttgacatttctaaatgttccaaaagtattttactttcaccacgagactcactcaattgcctgcctgccaatcaacaaataaatcctatg

SEQ ID NO: 3938 - DNA, 573 bp, DROSOPHILA
atgttggttaaggtacagactgcgctatttgtgaccctcatcggcttggctcaagctggtccactgccagcgaaatcatctggaagtgaggacacctatgattctcatccgcagtactcatttaactatgatgttcaggatccagagacaggagatgttaagtcccagtcggagtctcgggatggcgatgtagtccacggtcagtacagcgtgaatgatgccgatggttacagacgaaccgtggactacacggccgatgatgtccgtggattcaacgccgtggtgcgtcgtgaaccactttccagtgccgcggtggttgtgaagccacaggctacagcagtcgttccaaaagttcagttaaagcctctgaagaagttgccagccctgaagccgctttctcaggcatcggctgtggtgcaccgatcctttgcaccggtggtccaccatgccccagtgacccatgtcgtgcaccacgcagctccggcgcattctttcgtctctcaccacgttcccgtgctgaagactaccgtgcaccacgcccatcatccccatgccatttcatatgtgttctag

SEQ ID NO: 3939 - protein, 190 aa, DROSOPHILA
MLVKVQTALFVTLIGLAQAGPLPAKSSGSEDTYDSHPQYSFNYDVQDPETGDVKSQSESRDGDVVHGQYSVNDADGYRRTVDYTADDVRGFNAVVRREPLSSAAVVVKPQATAVVPKVQLKPLKKLPALKPLSQASAVVHRSFAPVVHHAPVTHVVHHAAPAHSFVSHHVPVLKTTVHHAHHPHAISYVF

SEQ ID NO: 3940 - DNA, 10165 bp, DROSOPHILA
aaagccgaacacaaagatcaaactaataaactttaccaaaagatagaattgcatctttttatttccaatcgaaagccaatagggaaaactcatgaatatatattccggttttatgaactgaaataaacgaataacagcaagaaagacgacatgaactagttattgatcgcttttatttatatagatatttacaaatcgatttagcacaatttccagatgtatatatactgttatcaatcgtgttgcaaaaaggtatgactggcgcacgatgcgaaatcaagtgcctaatagatgaactgcattagctaaattgcccttccagttattcgtatgaatacataattacaattgttcaattacaattcgttcaagaaaaatatttgaccgccttatttggtgcaagccaatttgtcgtggctataaatcaatcatttttcgcagatgtgttttaatttaaatgtttaaattatcagaggtaaaatacgaattgggtttgccttcgcttaactacttacaattggttagtgcgctcatccgacacaattataatattatcattacaggtgtcgtataaattaacaatctaatgaactagtcttgatataaataaaaagttttgcagtgctttgggtaaccgaaaaatgggtggtgaacctgcttttgcgtattatttaaaaatattcacttctaccttttttgcttacgttctaaaaatcattcgtaatcatgtgacctaaaattgacttaacaactaaattccattagataatgacagtttatgagtttttcttttattttcccatagttttgcgttggttgctggtgattattgttggtttcatctgatggtagattgtaggaatgcatgcgagcgcaaattctattgatcttcctattcaacgctgaaagtagatagcatgattattattactttactttattgcatctagcgattgtgggattggacttactgtctgatactatgcgatcgcttgctcgcttacagtttctttaaataggcggcacacttaaccgcactgctaacttgtcctgtgttaaggagactcaacttcttgtgcttggcccggaattttctcacgtaggcgtcaataagattcttaatcttgtgcggattgatctcacctgaccgactgtggcagatctgcaatttatattaaatgaattaaattatatgcttacaatgtttataattgtaatgattaaactatggaacatacctttggaacggctctccgcatgatgtccttgtagtcatccttggtaattgctttcttgttaaagtagggcttcaacaccagtttcacctcctcaacaacgcgttcctgccgatttagcttccgtaaaagctaaataataaataattagttttattttctgtacttattgggtgtctctgaaatggactcactctatccttattttgtagatctgtcgccgagttcggcacgtcgtcataaaaatcaggattccgtgcacctaaacatagaagagaaatacattagaaatatttgaccagcccaattttacgtaagataaattaaactcggtcacatacgcaccttttacttttgattttcggtcggccttggtgcgatttgactttttgcccaccgctgtgttgtaccgggaagtcatccggatgttactaatgggcgaactgcttccgaacaggttgtcgaaaatttctaccttgcctccggttgctccaccctttgctcgcctgctggcttccaatggaatgggtggctcgaacagatcttcgtagtccgccgagcccggcgagtaaggactctcgatttccatgctgaaggagtcgtctaaagcattgctggatcctccggcatttccgaggccacttccgtttcgggtgccacctattccgctactcgtggtggggatgttgccgaccccactgctgctgctggccacactgcctccggccttgggcaatggagtgagcttcttagaaggaggtgtgggactggaaattgaaggtatgtgctgcgaactcgacaccacgctgctgctcgtgagcagcacgttagaaagaacggttatggtcttcccatcggctgtcttgtcatggttgtcgcctccgccagcacctcctccgccgccgcccgtgctagacccaacgcccagggacaggctgagggaactactgctgatgtactgggcggagctcacctcactctcttgctgaatggacccgctctggttcggtttgttcatcagcgccatcaccagatcaaccggattaagggcgttcccctgtgcctgagtgttggtgctcgcatttgacccggttacatgggcgccatcactctctcccttgtcgccagatcccggtccgattgcgccactcgctggcatactaactgtttgctgatctaggttttgactcggagttagtgtcggcgaacgtggcgaaagtgagggcgacttggtgggctcgaagggatcataggcatctggtgagcacggtcccgactctggcggtgtattagggccaatcttctgaccgccatcgtgactggcatggccgtgctggggagtctgctccgcaggcgccatagaacatgacgcctccagctcgtccgcagagttaatatcgtcaacgtcttcgtgaagagggttgttgcgcaccttgtgctggatctttttggtaggcaggttgaacttgacgagaggtggttcaggtggtgtcttaggacccgttgactgcgtcatgttctcatacgaggtctccatgattgcgtccaaggatccgacctggggagtcttctctctttgcccattttccctcattagctcgtgatccctgtcgcgctccctctcccttcttgatgagagtggctctgtcgcatcctcgctgtctgtgagcacaatgacatctgccggctcctgatgaacttgaaagggcgagcgttccagatcgatgatagccactggcttagcctccaactttttacgcttgcgcttcgtcttctttactgctcccacagcactgcaaatgttgctattggatgccatggacgccatggacgtcatggacgtcatgcgattgcttagcagatcctccctgccgggtgggattgtaactacagactgctgctgggagctcagcgtggcgctagcattgtttgtgttcgactctttgttgaaacttacgctaaccagaatattgttgcccgaagcaaatacctccttcgatggcagaggttctggtgtctgggtacgacgtttacgcttcttttctttgcgtggcttctccaactgatgctgttttcttttctttttgctcttgtcccgcttacgcttggtttttttgggtgttagcccgccatcgttattataatggccacccttgggcgttccaagtgggggcgtccaagacgagtttttgtcctgaagggcgctgtcgtgcaggaaatcgcagcgaccgggtgatggcgatggtgaccactgaccagtcgttattcctgccttctttcgttttctctggggagcgaggaagtcgtcggcatcctcgaagggatcacgttgccgcgagatgcgacgcatccgcgctgctgtcgtcggactgctgctgcccgtcctcttcctccttttctttttatctgacttcttttttttcttcttgtgcatatccttgggactcttggaacgacttctgctgcggctgcgacttatccgtggcgtgtagtgtggcgagcccatatatagggatgatctattaccatctccgttgatgcggttgggagtgtgcgagcgcgatcttctggagtgaactgattgaactggactagtcgccctttcattgcggggagacggtgccggtgagggtgagcgtgcatagcgtctgttcgtagaggtttgacggcccctaccatgtttatgaggaggaggtgacgttcctggcggtggcgtgggcgacatgctaaagctgcgtcgcttgggggaaccagatcgggagcgcagggagacccgcgagtcacgagaaacactacgtgagaaactgcgtgagtttcgccttcccgaacgacttctgtgcgaccgcattgcgtcgcgtccatagcgatccttggcctgtgtctgatgtctcgatgtgcccaccacatttcgaacatcatagcgaggtagttcccttcgtttgggacgttgaaagtactgctgatgctggccatgctgattgggtggaaagtaattttggtgctgattgtgctgatggtggtagttttggttctggtgataattttggccgtaatgctggaacggcctgttgtggaactgctggttgcggtagtttaaacggaggcctccacggccacggaaaaagccgcgctggtggtcccttccgcgaaaggaaaatctctggcggctatgcgagttcgaacgcgatcgagacctagaatgagagcgggagtaggacttggaacggctgttacgtcgacgcctgttcctactgcgacttggggaacgacttctgcttctactaaaactcttgctcttacatctgctcctgcttccactcctactgcgactaatgctcttgctgactctcgggctcttagaacgcatctttggagtgagactcctggagtctggacgcgggctccgatctggctccgacttgtctccacgatagttgcgatccttttgccgcttgccgacctttttgaaagtctcgcccttgttgcgttttgaacgcgactttgacttgtcttttttattgttagccgtgccacggcttcgactgcgtcgcggtgactcgttttcgttgttcaattcgtcctctgactgaatatccgtaccgacagctttctctggctcatcctcgtcgccggaaactttagaggatcgagtcttgggactcgtacttacattgttttgatgcgttgtcccagcctcttcctcctctgccaaatttttttcgtccagacagggcgtgtacgagcgatcctgctcgtgctcgctaccgctttcgttgacatctctctctaagcttgtatccttttttgatggtggtcgcttagacggagctctcttggggctgacctgtgcctccgtttccgtaagcagtgccttctcgaactctttcggtttgtcaatgtctaactcctcccagtcgctatcatcataaagctcgagtactcccttggcccgatctcgatccgcagcgcgatcctctttgaccagtgggctgggagtgctgcgcgtcctagcttcctcagcatcgttttcctctggggctgcagcttgcacgttggagttgcttggctcgtgatctgaggactcggacttctccgttggaacagcgtcacaggactcttcgaacatttcgggttcttcaggttcttcggttggattctctggctcgtagaggtcatcatcactacttttcgggactttttcgggaacgggttcgggctcaggccccaaaggcaatggtatatccgtatcctcatcatcatcatctaattgtactaaatcttcattcatatcgtcatcatcctgtcccagaggaaaggattaaatgaagatgaaaagagaagattagagattagtaagcgttgaagaagaattggtctgaaaaactatcaaacgtgacttacttaactaattatattgcttgctttggtttcaataacattatatttggttttaaaaactgaaaattaaaatgttatacatttgtgtatctttttgtttcggaagattatggcgagaataatgatgtacccattacttacctatataattttaaatatgcttttttgtttgcataattttgccttttattactggtaataaagttaataactacccacttcaaacatttttcatcaccaaagctgatatcaaaatcacttttttctttacctcgcttaatttgtttgataattacctaaatcaacattaaaatcttcggttccgtatactaaatactcctactattattcatgttaaatatctctagattctgaaaaccccatagatatcataccttatcagatgcatccgctggtccgtgtggaacccctgacggcatcgccgaggcattagcaaccgcctgcgactcctgcgagtaaattgagaagtttgggcagttgtcaacatcgtcgttttggttgccatcgttggatttggccggtgcttgctggagtggggttatcttgaagagaggactgttccatggaaggctggcaggtggcataggcggaggtggtatggacagcacaactggcatacccatcactggtgcaggatgatgattgaggggagctgcaaacattggagtctgtcccgaaaaattgtttgatgacgacgctactggggctggaggcggtgcacttccagggaaaggcggggtgggttggttagctggcagcacgttttgctgtcgtggttgctgctggcgggtgggcgtgttgaatcgcagatggaacggaataaagcttgacatattagtgttgttgttggagccggagctgctaaagttttggttgccaaagccaccgcctccttggccgtctccttcaccggtcaagtgtcgcgaggaagcttccccgctactgctgggcacaccactaccaccgctagatcctccagcgccgcctccaccacctccgcggtaactggtattgccgctgtaacgattgttgtaactatcacttgagcctgctcctccgcctctgttgtagttaggtcctcctcctccctgttggtaaagcggtgcctgggttaaatgcttctcggtcttagaagtacctgctttcggtaaaggcgcttccgtcgctgtaggtgcaggtctctggggaatattgagggtaccgtccgccctaatatgcacttcgcctaggttacgtgaagcatcgtgccagcgatcctgcaaatccaaaatgctagacagtatgtctgcagcgggagctgaagtcggagctgtgggcggcgctgctatgcgcgccttgccttggagcaaggctttacggatgcgcggtgctccaatgcttccaatgcgcactgaggtttgcactgcagtcgatccgagtccagcagaactgatctggctcactgcgtctggctcactatcggagaaatactccaggtcgttcgcattgccaaatagcgagaaactggaggctgttccaccacttagatgagaactttgaaatccttccgattttactcccatctgctctgcaagtcgcttgctggctgaaagacgtcgaccaggcccctcactagaggcagtggcgactccacgacgacgccgacgcctacgccgtcttatcactttcttgctggttttaagggcgaacttttcgtcaaagttgtttagatcgtactcgaccacgtaggtgcgatagcgagtccttctccgtcgccgccgctgaacaggtctttttttcgtgcttgtggttgtgcgccgagtagttgtagtagtggttgttgttgtggtggtggtgcgggtacgagtccgggtcagtgtggaatcttccgccgacgtagcgcccgagcgagtacgtcgcagtacagcagcccttatgcgttcgttttgacgggtgcgcaggattcttggcggttcctgcacctcacgtaccctgagacgagtctccggcaagcccatacctctaatatcctcgtatagctgatccaagtcgtcagccagctccagctgctcattatcatcctcgtcgtcggagtcaatacagttgtcgcaataccacgacccagctgggatctcgtacagcggcgggtctaggcagtccatgtggtatccctgattgcagctatcgcacaacaacattacatcctcccgatccggactttcgcagatttcgcagttggtgacctcctcttcggaaagcgcagcggtgtctgcctcgtcatctaccaccaattcagtattggacttactcaggtccaacctcacttctctcaccacccggcgactagcgtacgagtcccgcacgataatccggtcaaattcaatgcgatcaatgggacaagtttggacatttcgggaccaggcgtcgatgcaggccgcgcagaatatgtgctcgcatgttgctggcgtaccaatctcctgctgccggaaagtgagcaagcaaatggggcacttctccagcagatcgttactgctgatgtcggaactgaagccgtcgtcggggtcagcgggcatgggttggattcttccaaccgcgttgggcgtccgctcgggctcctcctcatcggaggactctaccttctttcgttttctggttctcgtcggcagttgatcgatctggaatgaatgaagtagtgcattaataggtgatgccgctgggaagtggttacaactttaatgccttacatcgctgccgctggatgagcaatcgctccgcggcccgtagcgattgcgcagcttccgcgtagacttccggggcacggagtcggaatccgaatgcgaagccacctcctgtcgacgggtgctgcgtctcaggcgcgtcgccgcggagcaggaggggcggtcatcccggtcttgatccgacgccgaatcctccgagtccttgaactcgatccgcattatgatgcgccggttccgctgcccgcgctgctgactcaggcgaggaccagcgtcggatacggcatcggaatcacggtcggacatgctgatgcaactgcgtatgtgtgtatcaagccgatatattgttgtgtgtacactgtcggcagggcaggcgcgtgtgtattacatatatattacatatagggagtgctatttgcacgatttgcatctagttattcgttcttgctagtctctgctctcggcctggtagccacattttcgatacgatgcccagccggagtccgcgtagtcgcctttcggcctggcttgtctgtaattgcaggccgctgtgaccgaaaagtgcagggtgcagggtgccgagtgccgatttccgtgagtggcatcaattgccaattttcgggaactccgcctggcgtttatcgctcaacagcttccgtgatgactcgtttaaagggcagatgctgtggccagtgggcaatgctcctgtattttgtagccccaacgtcggtatttccaaattggtaacaaactcaaatttttcacacacagtttcctttacacacacacttggatttcagccattttttcagctagaggtgggttaacgtcagcgagcgctttcgatatttttgtgccacagacgatttcatttagacggcgataggcgccttatgttgtttaaatcgaaagggtatagattattcggtttcaataagaattgtattggtttctctactccaaatgtcacttctttaaattctgtttaaactgaatcttactacaaaatgctcctggacagtacgcaaaataattatgattgcaaaaaagtactaaaataatgaaaaactaaaagatttaaatataaacataaatcaatttctttatgttaccttcttaaagtttttgaaataataaacagataacgttgaaaatatcgattgttaaaatgtcgatttgaatgaccaaacagatgcaattagtttgatacatttaataatttataattttatatatcaacggtttaatttacgaatatggctttcgagaaatagaaaagcaatttaaaaaagataatctgtgtaatctagtaacctatgatgtcgcgccatatcgattcattgttttttttagtgaaccacccctaatgaacggagcttaaatctaaaaaataaacaatcatctgtgaacttagttgcgcttgcttgcgaaatgcaggcggagattaaggccgacatcatcgtggaggcgatggaggtgctagtgaatcacattctatacgtgcgcggtatatacccctcgcacatttttaaaatgaagcggatgtacaactcgcccatctatgtgtccatatttccaccgcttaataactacctggccggcgtcctaaaatccgcacaagaacttcttcgccgccgggagctgcagtgcctggagctaatagtgtatcagaaggagaatgagaagttggagagctataaaatgcaactagaaacccagaggagtggcctaccggcagaggatcatttgatggagttcgagcagaacatgcgctctgtcatctacaaaatctctcag

SEQ ID NO: 3941 - DNA, 7382 bp, DROSOPHILA
aaatccaagtgtgtgtgtaaaggaaactgtgtgtgaaaaatttgagtttgttaccaatttggaaataccgacgttggggctacaaaatacaggagcattgcccactggccacagcatctgccctttaaacgagtcatcacggaagctgttgagcgataaacgccaggcggagttcccgaaaattggcaattgatgccactcacggaaatcggcactcggcaccctgcaccctgcacttttcggtcacagcggcctgcaattacagacaagccaggccgaaaggcgactacgcggactccggctgggcatcgtatcgaaaatgtggctaccaggccgagagcagagactagcaagaacgaataactagatgcaaatcgtgcaaatagcactccctatatgtaatatatatgtaatacacacgcgcctgccctgccgacagtgtacacacaacaatatatcggcttgatacacacatacgcagttgcatcagcatgtccgaccgtgattccgatgccgtatccgacgctggtcctcgcctgagtcagcagcgcgggcagcggaaccggcgcatcataatgcggatcgagttcaaggactcggaggattcggcgtcggatcaagaccgggatgaccgcccctcctgctccgcggcgacgcgcctgagacgcagcacccgtcgacaggaggtggcttcgcattcggattccgactccgtgccccggaagtctacgcggaagctgcgcaatcgctacgggccgcggagcgattgctcatccagcggcagcgatatcgatcaactgccgacgagaaccagaaaacgaaagaaggtagagtcctccgatgaggaggagcccgagcggacgcccaacgcggttggaagaatccaacccatgcccgctgaccccgacgacggcttcagttccgacatcagcagtaacgatctgctggagaagtgccccatttgcttgctcactttccggcagcaggagattggtacgccagcaacatgcgagcacatattctgcgcggcctgcatcgacgcctggtcccgaaatgtccaaacttgtcccattgatcgcattgaatttgaccggattatcgtgcgggactcgtacgctagtcgccgggtggtgagagaagtgaggttggacctgagtaagtccaatactgaattggtggtagatgacgaggcagacaccgctgcgctttccgaagaggaggtcaccaactgcgaaatctgcgaaagtccggatcgggaggatgtaatgttgttgtgcgatagctgcaatcagggataccacatggactgcctagacccgccgctgtacgagatcccagctgggtcgtggtattgcgacaactgtattgactccgacgacgaggatgataatgagcagctggagctggctgacgacttggatcagctatacgaggatattagaggtatgggcttgccggagactcgtctcagggtacgtgaggtgcaggaaccgccaagaatcctgcgcacccgtcaaaacgaacgcataagggctgctgtactgcgacgtactcgctcgggcgctacgtcggcggaagattccacactgacccggactcgtacccgcaccaccaccacaacaacaaccactactacaactactcggcgcacaaccacaagcacgaaaaaaagacctgttcagcggcggcgacggagaaggactcgctatcgcacctacgtggtcgagtacgatctaaacaactttgacgaaaagttcgcccttaaaaccagcaagaaagtgataagacggcgtaggcgtcggcgtcgtcgtggagtcgccactgcctctagtgaggggcctggtcgacgtctttcagccagcaagcgacttgcagagcagatgggagtaaaatcggaaggatttcaaagttctcatctaagtggtggaacagcctccagtttctcgctatttggcaatgcgaacgacctggagtatttctccgatagtgagccagacgcagtgagccagatcagttctgctggactcggatcgactgcagtgcaaacctcagtgcgcattggaagcattggagcaccgcgcatccgtaaagccttgctccaaggcaaggcgcgcatagcagcgccgcccacagctccgacttcagctcccgctgcagacatactgtctagcattttggatttgcaggatcgctggcacgatgcttcacgtaacctaggcgaagtgcatattagggcggacggtaccctcaatattccccagagacctgcacctacagcgacggaagcgcctttaccgaaagcaggtacttctaagaccgagaagcatttaacccaggcaccgctttaccaacagggaggaggaggacctaactacaacagaggcggaggagcaggctcaagtgatagttacaacaatcgttacagcggcaataccagttaccgcggaggtggtggaggcggcgctggaggatctagcggtggtagtggtgtgcccagcagtagcggggaagcttcctcgcgacacttgaccggtgaaggagacggccaaggaggcggtggctttggcaaccaaaactttagcagctccggctccaacaacaacactaatatgtcaagctttattccgttccatctgcgattcaacacgcccacccgccagcagcaaccacgacagcaaaacgtgctgccagctaaccaacccaccccgcctttccctggaagtgcaccgcctccagccccagtagcgtcgtcatcaaacaatttttcgggacagactccaatgtttgcagctcccctcaatcatcatcctgcaccagtgatgggtatgccagttgtgctgtccataccacctccgcctatgccacctgccagccttccatggaacagtcctctcttcaagataaccccactccagcaagcaccggccaaatccaacgatggcaaccaaaacgacgatgttgacaactgcccaaacttctcaatttactcgcaggagtcgcaggcggttgctaatgcctcggcgatgccgtcaggggttccacacggaccagcggatgcatctgataaggatgatgacgatatgaatgaagatttagtacaattagatgatgatgatgaggatacggatataccattgcctttggggcctgagcccgaacccgttcccgaaaaagtcccgaaaagtagtgatgatgacctctacgagccagagaatccaaccgaagaacctgaagaacccgaaatgttcgaagagtcctgtgacgctgttccaacggagaagtccgagtcctcagatcacgagccaagcaactccaacgtgcaagctgcagccccagaggaaaacgatgctgaggaagctaggacgcgcagcactcccagcccactggtcaaagaggatcgcgctgcggatcgagatcgggccaagggagtactcgagctttatgatgatagcgactgggaggagttagacattgacaaaccgaaagagttcgagaaggcactgcttacggaaacggaggcacaggtcagccccaagagagctccgtctaagcgaccaccatcaaaaaaggatacaagcttagagagagatgtcaacgaaagcggtagcgagcacgagcaggatcgctcgtacacgccctgtctggacgaaaaaaatttggcagaggaggaagaggctgggacaacgcatcaaaacaatgtaagtacgagtcccaagactcgatcctctaaagtttccggcgacgaggatgagccagagaaagctgtcggtacggatattcagtcagaggacgaattgaacaacgaaaacgagtcaccgcgacgcagtcgaagccgtggcacggctaacaataaaaaagacaagtcaaagtcgcgttcaaaacgcaacaagggcgagactttcaaaaaggtcggcaagcggcaaaaggatcgcaactatcgtggagacaagtcggagccagatcggagcccgcgtccagactccaggagtctcactccaaagatgcgttctaagagcccgagagtcagcaagagcattagtcgcagtaggagtggaagcaggagcagatgtaagagcaagagttttagtagaagcagaagtcgttccccaagtcgcagtaggaacaggcgtcgacgtaacagccgttccaagtcctactcccgctctcattctaggtctcgatcgcgttcgaactcgcatagccgccagagattttcctttcgcggaagggaccaccagcgcggctttttccgtggccgtggaggcctccgtttaaactaccgcaaccagcagttccacaacaggccgttccagcattacggccaaaattatcaccagaaccaaaactaccaccatcagcacaatcagcaccaaaattactttccacccaatcagcatggccagcatcagcagtactttcaacgtcccaaacgaagggaactacctcgctatgatgttcgaaatgtggtgggcacatcgagacatcagacacaggccaaggatcgctatggacgcgacgcaatgcggtcgcacagaagtcgttcgggaaggcgaaactcacgcagtttctcacgtagtgtttctcgtgactcgcgggtctccctgcgctcccgatctggttcccccaagcgacgcagctttagcatgtcgcccacgccaccgccaggaacgtcacctcctcctcataaacatggtaggggccgtcaaacctctacgaacagacgctatgcacgctcaccctcaccggcaccgtctccccgcaatgaaagggcgactagtccagttcaatcagttcactccagaagatcgcgctcgcacactcccaaccgcatcaacggagatggtaatagatcatccctatatatgggctcgccacactacacgccacggataagtcgcagccgcagcagaagtcgttccaagagtcccaaggatatgcacaagaagaaaaaaaagaagtcagataaaaagaaaaggaggaagaggacgggcagcagcagtccgacgacagcagcgcggatgcgtcgcatctcgcggcaacgtgatcccttcgaggatgccgacgacttcctcgctccccagagaaaacgaaagaaggcaggaataacgactggtcagtggtcaccatcgccatcacccggtcgctgcgatttcctgcacgacagcgcccttcaggacaaaaactcgtcttggacgcccccacttggaacgcccaagggtggccattataataacgatggcgggctaacacccaaaaaaaccaagcgtaagcgggacaagagcaaaaagaaaagaaaacagcatcagttggagaagccacgcaaagaaaagaagcgtaaacgtcgtacccagacaccagaacctctgccatcgaaggaggtatttgcttcgggcaacaatattctggttagcgtaagtttcaacaaagagtcgaacacaaacaatgctagcgccacgctgagctcccagcagcagtctgtagttacaatcccacccggcagggaggatctgctaagcaatcgcatgacgtccatgacgtccatggcgtccatggcatccaatagcaacatttgcagtgctgtgggagcagtaaagaagacgaagcgcaagcgtaaaaagttggaggctaagccagtggctatcatcgatctggaacgctcgccctttcaagttcatcaggagccggcagatgtcattgtgctcacagacagcgaggatgcgacagagccactctcatcaagaagggagagggagcgcgacagggatcacgagctaatgagggaaaatgggcaaagagagaagactccccaggtcggatccttggacgcaatcatggagacctcgtatgagaacatgacgcagtcaacgggtcctaagacaccacctgaaccacctctcgtcaagttcaacctgcctaccaaaaagatccagcacaaggtgcgcaacaaccctcttcacgaagacgttgacgatattaactctgcggacgagctggaggcgtcatgttctatggcgcctgcggagcagactccccagcacggccatgccagtcacgatggcggtcagaagattggccctaatacaccgccagagtcgggaccgtgctcaccagatgcctatgatcccttcgagcccaccaagtcgccctcactttcgccacgttcgccgacactaactccgagtcaaaacctagatcagcaaacagttagtatgccagcgagtggcgcaatcggaccgggatctggcgacaagggagagagtgatggcgcccatgtaaccgggtcaaatgcgagcaccaacactcaggcacaggggaacgcccttaatccggttgatctggtgatggcgctgatgaacaaaccgaaccagagcgggtccattcagcaagagagtgaggtgagctccgcccagtacatcagcagtagttccctcagcctgtccctgggcgttgggtctagcacgggcggcggcggaggaggtgctggcggaggcgacaaccatgacaagacagccgatgggaagaccataaccgttctttctaacgtgctgctcacgagcagcagcgtggtgtcgagttcgcagcacataccttcaatttccagtcccacacctccttctaagaagctcactccattgcccaaggccggaggcagtgtggccagcagcagcagtggggtcggcaacatccccaccacgagtagcggaataggtggcacccgaaacggaagtggcctcggaaatgccggaggatccagcaatgctttagacgactccttcagcatggaaatcgagagtccttactcgccgggctcggcggactacgaagatctgttcgagccacccattccattggaagccagcaggcgagcaaagggtggagcaaccggaggcaaggtagaaattttcgacaacctgttcggaagcagttcgcccattagtaacatccggatgacttcccggtacaacacagcggtgggcaaaaagtcaaatcgcaccaaggccgaccgaaaatcaaaagtaaaaggtgcacggaatcctgatttttatgacgacgtgccgaactcggcgacagatctacaaaataaggatagacttttacggaagctaaatcggcaggaacgcgttgttgaggaggtgaaactggtgttgaagccctactttaacaagaaagcaattaccaaggatgactacaaggacatcatgcggagagccgttccaaagatctgccacagtcggtcaggtgagatcaatccgcacaagattaagaatcttattgacgcctacgtgagaaaattccgggccaagcacaagaagttgagtctccttaacacaggacaagttagcagtgcggttaagtgtgccgcctatttaaagaaactgtaa

SEQ ID NO: 3942 - protein, 2296 aa, DROSOPHILA
MSDRDSDAVSDAGPRLSQQRGQRNRRIIMRIEFKDSEDSASDQDRDDRPSCSAATRLRRSTRRQEVASHSDSDSVPRKSTRKLRNRYGPRSDCSSSGSDIDQLPTRTRKRKKVESSDEEEPERTPNAVGRIQPMPADPDDGFSSDISSNDLLEKCPICLLTFRQQEIGTPATCEHIFCAACIDAWSRNVQTCPIDRIEFDRIIVRDSYASRRVVREVRLDLSKSNTELVVDDEADTAALSEEEVTNCEICESPDREDVMLLCDSCNQGYHMDCLDPPLYEIPAGSWYCDNCIDSDDEDDNEQLELADDLDQLYEDIRGMGLPETRLRVREVQEPPRILRTRQNERIRAAVLRRTRSGATSAEDSTLTRTRTRTTTTTTTTTTTTRRTTTSTKKRPVQRRRRRRTRYRTYVVEYDLNNFDEKFALKTSKKVIRRRRRRRRRGVATASSEGPGRRLSASKRLAEQMGVKSEGFQSSHLSGGTASSFSLFGNANDLEYFSDSEPDAVSQISSAGLGSTAVQTSVRIGSIGAPRIRKALLQGKARIAAPPTAPTSAPAADILSSILDLQDRWHDASRNLGEVHIRADGTLNIPQRPAPTATEAPLPKAGTSKTEKHLTQAPLYQQGGGGPNYNRGGGAGSSDSYNNRYSGNTSYRGGGGGGAGGSSGGSGVPSSSGEASSRHLTGEGDGQGGGGFGNQNFSSSGSNNNTNMSSFIPFHLRFNTPTRQQQPRQQNVLPANQPTPPFPGSAPPPAPVASSSNNFSGQTPMFAAPLNHHPAPVMGMPVVLSIPPPPMPPASLPWNSPLFKITPLQQAPAKSNDGNQNDDVDNCPNFSIYSQESQAVANASAMPSGVPHGPADASDKDDDDMNEDLVQLDDDDEDTDIPLPLGPEPEPVPEKVPKSSDDDLYEPENPTEEPEEPEMFEESCDAVPTEKSESSDHEPSNSNVQAAAPEENDAEEARTRSTPSPLVKEDRAADRDRAKGVLELYDDSDWEELDIDKPKEFEKALLTETEAQVSPKRAPSKRPPSKKDTSLERDVNESGSEHEQDRSYTPCLDEKNLAEEEEAGTTHQNNVSTSPKTRSSKVSGDEDEPEKAVGTDIQSEDELNNENESPRRSRSRGTANNKKDKSKSRSKRNKGETFKKVGKRQKDRNYRGDKSEPDRSPRPDSRSLTPKMRSKSPRVSKSISRSRSGSRSRCKSKSFSRSRSRSPSRSRNRRRRNSRSKSYSRSHSRSRSRSNSHSRQRFSFRGRDHQRGFFRGRGGLRLNYRNQQFHNRPFQHYGQNYHQNQNYHHQHNQHQNYFPPNQHGQHQQYFQRPKRRELPRYDVRNVVGTSRHQTQAKDRYGRDAMRSHRSRSGRRNSRSFSRSVSRDSRVSLRSRSGSPKRRSFSMSPTPPPGTSPPPHKHGRGRQTSTNRRYARSPSPAPSPRNERATSPVQSVHSRRSRSHTPNRINGDGNRSSLYMGSPHYTPRISRSRSRSRSKSPKDMHKKKKKKSDKKKRRKRTGSSSPTTAARMRRISRQRDPFEDADDFLAPQRKRKKAGITTGQWSPSPSPGRCDFLHDSALQDKNSSWTPPLGTPKGGHYNNDGGLTPKKTKRKRDKSKKKRKQHQLEKPRKEKKRKRRTQTPEPLPSKEVFASGNNILVSVSFNKESNTNNASATLSSQQQSVVTIPPGREDLLSNRMTSMTSMASMASNSNICSAVGAVKKTKRKRKKLEAKPVAIIDLERSPFQVHQEPADVIVLTDSEDATEPLSSRRERERDRDHELMRENGQREKTPQVGSLDAIMETSYENMTQSTGPKTPPEPPLVKFNLPTKKIQHKVRNNPLHEDVDDINSADELEASCSMAPAEQTPQHGHASHDGGQKIGPNTPPESGPCSPDAYDPFEPTKSPSLSPRSPTLTPSQNLDQQTVSMPASGAIGPGSGDKGESDGAHVTGSNASTNTQAQGNALNPVDLVMALMNKPNQSGSIQQESEVSSAQYISSSSLSLSLGVGSSTGGGGGGAGGGDNHDKTADGKTITVLSNVLLTSSSVVSSSQHIPSISSPTPPSKKLTPLPKAGGSVASSSSGVGNIPTTSSGIGGTRNGSGLGNAGGSSNALDDSFSMEIESPYSPGSADYEDLFEPPIPLEASRRAKGGATGGKVEIFDNLFGSSSPISNIRMTSRYNTAVGKKSNRTKADRKSKVKGARNPDFYDDVPNSATDLQNKDRLLRKLNRQERVVEEVKLVLKPYFNKKAITKDDYKDIMRRAVPKICHSRSGEINPHKIKNLIDAYVRKFRAKHKKLSLLNTGQVSSAVKCAAYLKKL

SEQ ID NO: 3943 - DNA, 17549 bp, DROSOPHILA
tgcttgttttctatcctggatttagcacaaaagtttttgctctttcgctcgatacatttaggttcacacatatatatatatatatacatacatatataatttgttgttgtatattttttagctcgcttttttttgtttgttattttttagaaaaatatatagaaatcctagctgggaatcgtcccctaattgccttgtgtatacatatagatattttgttttccgatttacatacatatatagttaatattgtcatttagctttcaaaaaaatatacttcttgccttaattttgtttcgtttatcatttttgcttgctttttacaatcctcctgttttgcgcaaaagtatctcgattagcaaaaaacattagtttcgcacaaaaattacaaaaaaacaaaaaaaagaacagtgggctacaaaaattggctttacaaaagttgctgtgttgctctcttagtgttttgtgtacatttatagttttgtttttagtaattatttaataataattgcaacagtttttttttttttgtttttagttggtttctcctgtggggggttgcatatgtttatcaatttttggatatgtttgcttattggcgtccccagtccccgaggacttgctactcctccttctgctgatccttctcctcctcctcctgcatcttctcctcctgatcgtgttgctactctctgtgggtggtgtgtgttttctgttggggtcacggctagaccttggtggtgaccttgccagcggtggctacctgccaggatttgtgatgtttactactagaacgtccctgtccctgctgctgatgttgctgctgttgctgatgctgctgcttctgatgctgctccctcctctgcttgaccagtatgtgttatgtctgcagcggatagctgttctcgggatgctgctgctgctgatgctgccggcgctgttggcggcaactggccatcgcaactgccgccgcaacgacagccgattgacgggcttgatatcagcactcggacttatcctcctccaccaggaactgcgtgtccttgccggtgtccgccgaaggatctagctccctggtgcgcagctgcagctgcggcgacgccttgtgcgtaatgctgctgggcgcgatgatcgccgaggcgggttccgtgaacgaaccgcccgcatggtggcccatggacttgaccttggccgacggctcgccgggcacatcataaatgcctatgggagaaagaaagcgatataccgattagctacaatccatggtattactccgttaagcgaaaactcacccgaaccattgcccatgcccggatcggcggtggtgcccgattggactgcatcgtacatgggattggcaaagtcgcgcgccttgttcgcgttcaccgtctgcaggttgtagccctcgatgggcgccacatcgccagctcccggcgcagatgctcctgggaagccgctctcgttgaactccacattcgaaccgtgacggaaggtcacgctctgcgacgaggtcatcgccggcatgcgagccagcttgccactgaaaggattcgaatgaaaaatgttggtaattagtatatatgatgcggatatccaggtgatccttaggaggtacttacaatggtcgcttgcggatgacataccaggcgccagcggcggccatcatcaccagcaggatgaccatgatgggcaccacgacggcggtgacattagcgtcaccatggccaaaggctcccatcgtgcttgtctcgcagtgctcgccaacgaactgggttcggcactcgcacagcagttcaccctgggcgtcctccttgcagagtccaccattctggcaggggcagattcgcggagccgggcgcggatgctcggcggcagcattgcagatgacctcggcggtgctgcggtgcgagggcggcggtccagaggcgtctggacaggcacaacgatggccgcccggcaccagcaggcacaggtgggagcaggtggagttgtcgcacggattgggcagcgaggtgttgtaccgcttgtcgtggtacaccttcaggccggacggattgacgatatagcgatgcagcaccacctgcactccgcgcccgaacttatcctggcgcaccagctcacccgtatcgcgggtcatccagaacatgttcgactcgaagagatccagagacaccggatgcctcagttgatcgccccgcacaatggcctttcggcgcgagccgtcggctctcatcgattcgatggcattcagcttggtgtccacccagtatatgatgtgatcctgcgagtagtcgatggtcaggccggcgggatgtcgtatcatctcggtgatcagtgggcggcgcttagagccatccatccaggatacctcgattttgggagctgatcccgcatccgaccagtatattctgcccagctgcggattcacagcaatcgaggtgggtacctcgagtccagcattcacgatcgagcgacgatagcgaccatcggtcttggccaccatgacacgtccacgcggcttcgagcccgtcctgtccatttcggtccagtagagattcgaggccagccagtccacagccacagcagtgggcttcgagccgcccttcatgttcaggtcctgggcgaatccgatcttggccctgccatcgatggcattgaccatgtaggatcgcttgatggtcttgtcatagctatccgcccagaagacgatctgttgctgcgcatcgtagtccagtgcctcgatcctcttctccgccgctatcacagcgaactcctcgctcttatgccaattcagacctctgatctcctgaccattaacaaacaggagaatgacatcctccttttcggcacggcatacgccgctggcgccgtccgtcagatggaatccttcgcgacaactgcacgagtaggtgccattcagattgtggcattggtgggagcacgtgtgctgtcgcgtcaggcattcgtccacgtcggagcacttcttcttgttgtcggcggctatgatgtagcccggatagcaggtgcaaatgtatccaccatccgttagattgtggcaatgctgctggcatccaccccgattcgcttcggagcaactgctcgtgtggtggcatcctaactcatcactagcatcgccacaatcgtcggagaaatcacacacctgggaccgctcgatgcaatgcttgttggcacactggtactgcgtgtacagatcgcagggcttctgtttgctggcacatagggtcatgttgttctcatcgctgccatcgccgcagttgtccacgccatcgcagatctgatagcgggccacgcagcgctcattggagcactggaatcgtcgcagggtatcgcagttaaagtcactgcaaacgctgggatcctcgtcactgccatcgccgcaatcatcggtgccgtcgcacaaatcggacagcgaaacgcacaggttgttgttgcactggaaacgcgattcaggacaatagcgaccgccggggaatctgggcggacagcccacctcatcggacatgtcgcggcagtcgcgatcgccatcgcaccggaagtaggaggcaatacagtgaccggaagcgcactggaaggtgccattcttgcactggtatccctcgcagtgcatctcgtccgagttatcgccacagtcgtcctcgtggtcacactgccagcgggatgatatgcacttgccattgccgcaacggaactccgattcggagcactcccgatagcgtcctttgcacactgcctcattctcgtcactggcatcgccacaatcgtccgcgaaatcgcacatccattgcctggaaagatgattagattagaatctggaatccggctcgaaagatcatttcaagtactcacttgggtatgcatcggttgttgccgcacttgaagtccgtttccggattgcacttgggacagttctcgggcagctcatcgctgttgtcgcgacaatcgtccttgccatcgcagaacagccacttcggaatgcagcgatagttggactggccgggacacctctgccagccggtggtgcagttcctttgacggcacatatacgccggctcatcggagtcgtcgccacaatcgttgtcgaaatcgcacatccacaattgcggaatgcagcggccattcttgcaggagaactcggttttcggatcacatgttcgcttgactgaaattgtggatataacaggataaaaaatgtcgaaaaattaaggaaacatttaatacgtacagcagacggctggatcctcatcgctgccatccttgcagtcggcatctccatcgcagcgccaactatcgaggatgcatctgccgctggacttgcacttgaaatcggatagtggacagggtagatcgcaattttgttcatcgctgcgatcgccacagtcatccactccatcgcaaatggtcgccgatggtgtgcagttggtgttcttgcactggaacgttccagcacggcagtgtcgaggagcgcaggtagcgggctcatcggagccatccttgcagtccttctcaccgtcgcacttccagaaccatgggatgcacttctcatctcgtccgccacacaaatgctgtccggccgtacagttggccacgcaggtcttcatgtctctggccaaatagaattgattgggacaggcacacttgaagattggtgcaccctcctcgatatatccctcgatgttcagataggtggattccggcggcggagcaatcaggcagagatgtgagcaaccgccattgtttgtgccacacggattggtgtagggcaactgtctcagcggatgattgatgtgcaggtcatacggtcgatgggtggtattcctcagcaccgtatagttcgcaccatggaacttgttggccctcacgatcgcctttaaattccagtcactccagtagatgtagtcgtcgaagagactcagtgcgaacacatgaggcaccttgcttcctgagagcaccgtatgacgatgtctgccctccagatcagcatatgctatgtagtccaagtgagcatctgcccagtaaattcgatccgtgaagtaatcaatggacagagcattcggccaggcgatgccatcgttccagtttagaattctcgagaagttcgaaccatccatgcccattttggcaatataggcttgcagatgccaggaggtgaagtacaggtaaccgataccaggatgcacgacgatggcacgcggatcgacgacgccacttctcagtgtcttgcgcttgctgccgtccaattcggagacatccaggttcttggagtgcctgtccagccagtacagtttgcgacccacccaatcgatggcgatgccctccaggccatgggaatcgtgcctgatgacagcctccctctccggcggcatctcgtcatcggcctctccatacttcgctctgaagatggtcttggccgtgacatcacagaagtacatgtattcctcgcgtatatcgaagtcgagagccaccacattcatcagatcctggtgcataagattgtactgatgtccatccaccgacatattgcgcacatagtacttgttggtgaagatcagccacggtgggatcttgtccttacgcttgcacgtgtgctcatcgttctgcctttcgtagtaggtctcgtcgcacttgcagtagaatccacccggggtattggaacagtgctgagaacaagcgcccggctgctctaggcactcatccacatccgcacaggctttgccatcggctagcagtctatatggaataaattcggtatgaggtatatattttttaaaatccaatcaagaaaggatcttacttgtagccctcattgcagtcgcagtagtaacctgtcagcgtgtccacgcacttgtggccacactgattgatctccaccttggcgcactcatccacgttgcaatgggcaggttcgtcggactcgtcggcacaatccggatacttgttgcacaccagattgtagtcgatgcactgaccattcgtacaggcgaactgaccctgtggacaggttatgttctccttggcacagcccacctcatccgagtgatcaccgcagtcgtcttcgccatcgcaccgggattgatttcggatgcacttgaagttctggcaggtgaactcctgggccgaacaggtcttgtacttggagttacagaatttgccttcatcggtaccatcgccgcaatcgttgtcatggtcacagatccatcccttcaaaatgatatttgttaatattaacattgggatatatgtaggttctttaagctcaccttattgatgcaacgtccattgccacaggtgaacatatcctcgccacagggctgctgggtggcacaattgtgcagagtagtattctcatcggctccgtcaacgcaatccggatcaccatcgcagatccattttttgggtatgcactgggcacgctgccaggatttgttctccacacaagtgaactccgtttcctcatcacacttacggtcatctgagaaagcaagttgttgatatataagatgggttataaggttgttttataagggacttagccaagaaactcactgcactggtgccggttatcctcgtcactgttgtccaaacaatcgttgtcgccatcgcagatgtagatccttggtatgcagttgccattgtcgcaggtgaacagatccccgaagcatgtgcgtccttccgatttgcagtaatctggtggttcatcggctccatcgccacagtcatcgtcaccatcacagtaccaggtagctggaatgcatcggtggttgggacaccggaaactgttggttggacaagttcgttggccacaatgcagtggatcctcgtcggagttgtcaccacaatcgttgtcgccatcgcacaaccaatagggttccacgcagatgttggtcttctcgcacttcagatgattcgccggacaagtggtgttcatgggacaccgttcgtgcgtttcatccgatgtggcattatccttgcagtcattcacaccattgcacacctgagcctgtggaatacaccgtccattggcgcaagtgaactcaccatccacacatggtggatagacgcagcccagctcatcggaaccatccttgcagtcgttctcgtgatcacacttccacgacttaaagatgcagcgtccgttgttgcagcggaactcgttgggggagcaggagtgataggcacaatagttgggatcctcgtcggagttgtcgccacagtcgtcgtcgccatcgcaggaccacattctcgaaatgcatctgccgttcttgcagtagaatttgctggcctcgcaagtattgtttcgcggggcacacatccttccctcgttcaccaccttggtgctatcgtcgcacttgcactcggccttgccattcggggcaggatgacagctctgggcacatccgccgttgttgatcctgcacggattcacattgcacttttggcgatcggaactgtagatgcgaatatctcgcggagaatcctccaatcgcttcaccatctccaccatgttggctccagtgtgcttctcagccctatagacacctctcagctgaagatccgtccagtagatgtagttcctgaacacggttatggcgaacggataaatggtggctgccaccagaagctctcgattctgaccgtccagatcggatctctcgatcttctctctcaccgcatccgtccagtataggcgtctctcatcataatcgatagccaagccacttggctgcgaaagatccttgtcgacaatggctctcttcagggaacccgccatggtggtgcggaaaatcttgccagacgtaccgaacctgccccaatccgtaaagaatagcgtgccattgcagggatcgaggacaatagctcgcggtctttcaacgcgggcaatcataaccagttcgctaccatccaaattcatggcatagatcgagttgttcgagctatcagtccagtagattttctgctgggtccaatcgtaggcaatgccctcgggattaatgcccttgttcaggaccacagtgatgtcatcgtgccccggcttattcgccttggtgtacgcaatcttggcccacggacggatttgggtatacagcattcggttgtgggcaaaatcaaagtccagacccacgacatttgtgagatttgtcagtggagtgaagggaacttccgtggaatggggatcaagattgacagctcgaatttcagttcttgtggcgaagactaggtactcgttgaccacctcacactttctttcatcggcgctcagttttccagtggcacattcgcaacggaaattccttcctcctgaggtaccggaggctccgccatccggtgggaaactgaaacacaactgatcacagccaccgtttcctaaatgcgcacatggatttgtatcgtcctgcggctgattgttgatgttgtatatggcgatgtccctaagcttttccagattcgttctcacgctggtggcagtttcattggcactatgcttggaggccttgaacacggtcatcagattcctatccacccagtagacatcgttcagatagacagcaatgcccatggggttgggcagatctctgcggattatcttgcgattggcgccattatacgaaatcttctgaatggtgtccagtttcgagtccacccagtagatgtcatgggtctgcatgtcaatggttagatcgcgaggcaacgaaatgcccgatgtcaccagtggtgtccatttgctgccatccaagagggcttttccaatcctaggatgctggccatagtcgatccaatagagtagcctcttaatgggattcacggccagttcacgtggtgcatctgtggttgtcttcaccaacactttcctattgctaccatccagccagcaaacttccacataattctcatggggatagacgttggtgaagtacatattgccggccacccaatcgatggtcaaacccctgatgccattactgccgatgccatccttgaccacatgctgcagatcggtgccattgggtcgcgatctgaaaatgccattccagtagccacgattgtactccgcccagtagatccattgctcgcgatacatcacatccacatggagaatgtggtggccaggtccgcttatcggtaccatcgcctcggagctatcgctcaagctatagcccctgatcatgtccagttgggagaccacggcaaagatcttatacgccacgcagttgatctcgttttcctttctgtatccaatgccgcaggcacacgttctggttgcaccaggtccgggaatgcaaaggtgcttgcagccaccgttgttcgtctggcagggatgttgcatcagggcgcgcttcttgtagatcatcatcgaccgcagatcggactcgttgtcgacaatggtcttgggattatcaccgtgcggcagatcaatcctcacaatacgctcgtacaacggatccaggtagtaaagcctatggtctaggatgcccaagctcctgggcttggccatcggatgcgagtccttcatcaagatcagtgtatgatcgtcaccattgtagtccatgacaccgatcaccgctggattgctagcactgtagtacaccattttcttctccgtgtccacggccaacgattcgggatgggcaaactcctggaagactacaatgggattctgtccattcatatcaactctgccaattttaatgggcacttccagaactccttcgtcgatccagaagagcttaccttcggtgggatctagtgcaatttgtttgggccgcgacacggagttgggataaccatcgttggccaggattatggtgcgatacttttgcttgccatccacgcgcacggcttcaatgttgctggccacccggttgccaatgtaaagatttctgcccagccaatcgaatgcaatggtgtagggtgcacccacaattccattttcgatacccaggaagagtgtcttattgccaccaccatagggtgtcgtatagatggtgcagttctcatcatcatcctccctgccctgcacccagtagagcgtctctcctttgcgatcaaagtccaagcccgtgctgctttcgattccaataactggggccagagctccggctctcgcatcgccaccattcaaaggaagatccacaatttgtgtacccttgacgaccatgaggaagggattctcctcctcgatgcaacgaccttcgctcaggagcttaaagcccggcctgcacttacaggagtaaccctccggggcactgggactcagcagacacaagtgctggcagcgtgatccggcgcagggattcggagtcatgggctgcagggaagcgtgatgaacgtggatggacaagggttgacttatcaggtgggaaacgacggtctgattcttgccacggaacttattggcggacaacactcgattcaattgcctgtcggtccagtagagcgtatcctcgaacaaggacaacgagtgaggatgcagcagatagtgactactggccaggacttgctgtctaccggtgccgttgtagtagcagaaatcaataaagtccagcttggagtcggcaaagtaaaccctctttgttgctatatccaaagttaagccattgggccagtagatcttggtattgatgatcgtttttctcatagtaccatccatgccaattctctccactcttgggttctctccccagtcagtccagaagatccatcttgctccgggactgggatcgatgcacatgcctcttggttgggtgatgttttccctgaccaaaaccagacgattggaaccgttctccgcggacacttcgatggtgttcagtttgctgtccagccagtagagattctgggcaatccaatcataggccaggccctcgaccaagtctaggcccgtgttaatgatttcctgtggctccataccgcgatctaatcgggagatcttctttagtttcatgtcgctccagaaaatagtgcctgtgtgcatattggaagcagtggccaccacattttccactatgatgggcaccctctcgagtccctgttccttgagatctgccacaagaatggagtgacgatttgagatgattaggaaggcggcggtgtggtttactgccttgcaagtgtgcttattcggctcgagaacatagccatctgtgcaggagcagaagtaggagcccttggtgttggtacattgctgagagcagagacccggtggatcgcactcgttgctatctatgcaggtgtagccatcttcgccgatctccgaaccaggtggacacacacacaacgcaccgttgggggtcttctgacagaagctagagcactgacccgcctgatgttcgcactcggccaaatcgcagccctcaccctcatccgaaccattgggacaatcgggcgtatcatcacagacagatgtgatgttcacgcatctctcggaaacgccaggacactgccactgaccatggggacacttgaacgggggtgggacacatgcgtgttcagctccctcatccgaattatcaccgcaatcgtccttgccatcgcatatgtatgccttaaatacacagttcgtgttgttgcacttgaagaagttctgggcacaggtgatctgaccacaatcctgctcatccgaatgatctgaacaatcattggagccatcacagtgccaggcgatgggaatacagaagccagtggacttgcaacggaagtgcttctccaggttacactgatttggtcccatggaaggacagcccacctcatcggagccatcattacagtccggtatgccatcacatttgtaggactcctctacacattgccttagatccgcgcatttgaattgattcgccagacaggatatcggtggacaatccttctcgtcctgtttgtcaaagcaatcatcgtcgccgtcacaaacccaactctgtggaatacagtgacccgttcgcgggcacgtgaactggaaataggcgcaggtcttttcggcacagaagtcaccctcatcactgctatccccacaatcgttctcgctatcgcatttccacatattgggaatacagcgtccattggcacaggcaaactgggacgttccacaggtcacattgccgcactcctgctcatcggagttgtcaccgcaatcgttctcctggtcacaacggaagttctgcggaatacagcgacccgatcgacactggaactcgttggatccgcaagtgggctctttaaatgaagagaaaagagaaacatggtattatagtgggaagttccaggacttgatcgtacttgatcctagtacttacttgtgcagttctgctcctcatcactgttatccagacagtcatcatcaccgtcgcatagccacgacttgggaatacacctctgattgttgcacgtaaagtcccatgagttcgggcagggttgcactggtggctcggcactgggatcgggaatgcagctcacctggtcgtcggccaatcgttcgccatagggacacgagcagcgcgactgtaggcgaccgaacgagggcgacgaagtggtcaccccatcggtaccatttgatgctccgatgggaacagcgaaacagatcttctggcagccaccattgttcctgtgacaaggttgcgtgtccgcgatcctctggacctcatgactgtacaccttaacgccgtacagtctattggtctgcggctctctgaccatcatctcctcctgctcgcccgtaagcttgtgcaaacgtataatggcatccaggcgccagtccgtgatatacatccaatcgttgtgaatgacaatggagaacggatgtcgcaccagtcgtgagttcaccgtcttaatatccgtgccatccaggttggcatgctgaacgtgatccaatagagcatcgcaccagtagacacgatcctccttgaagtcgatggatagtccatttggccagccgagggttacatttttgaacaccaacaaaccactaccatctgtgtttgctctggtgatattcgcaggacggtcccattcggagaagaagatgaaaccacgattgggatggaccacaatggccctgggacgtttcaggtttttcagtagggttcttctgtgtgtcacatttcgggtggataggacgttcaaggtgcccttgcgcgaatcgatgtagtacagattcttggaggcccaatcgacggccagtccctcaacgccttcattctgagaggccaagacgatctcccggccagttccgtttcggtgcaccctgtagatcacatcctgcagcacatccgagtagtagatgaactcatcgcgtgcatcgaaatccagaccgacgaaacgagcacgcctcgaaaccaccggcatgatggcatcactaaatccttcaattaccggttccaatacctttcccttgatgaatctctgctgcgagtacatgaggaattcactgactggcttgcatagtttcagatccgtttccagctggtagcccgtggagcaggcacaacggaatcccaggccagtgggtgctccctttacggcggtcacaatgcacatgtgattgcagccaccgttgttgttgccacagggattcgatactctgggctggctgagcgcatgaacagcaatgatgcccttcggctccctgatgtccttggccttgtacgtaacctgaatggaggtgggaccctcgaacttgtccaccgacatgatgccctgcttggtggcatccgtccagtagatacgattctcgaacagagccaatcgcgagggactcggaacctgttgacccctgagcaccatcacccgatgagcaccctcatagtccacggattcaatgtagtccagcagggagtcgcaccagaagacacgcttgctgataatgtccaccgtcacaccgctggccttgtaggccgcctccgagacaatcgatctggcatgtgtgccatccatatgggcacggagcacctgaccgccatccgcaacgaacattagaccagccgtgggatccagtgccagatcggcgggtgaggtgagattagagcccagaacaaccgcatgccattgaccactcagctcgaagacatcgatcttctgacccaccaaatccgccacatatatcttatcgcccacccagtcgacggccagagcgacgggcgcccaggtgccgggaagggtctgatcgaagggcgagacggccttgttctgcgcatccagcggcagtgattgaaccttcctcgtcttgatgtccgaccagtacagtgtgttccgggcataatggaaggtcacacccgccgcggcagttgcattggccaaaatcttgggctcactgccatgcggcagcattcgcatgatggcacgatcgtgggcgaatatcagttgcaagttattcgcatccggagctatgcacttggagtcgttgatgagcgtgtagccctgggcgcattggcatgtatacgatcccagtgtgttggtgcacagctggtcgcagtgaccccattccgcgcactcgtccaggtcgacacaggtccggttgtcaggagccagcgattggcccggcttacagtagcacactccacccgtcagcgagggtccgcatttgaactcacagctcagggcggggcatgaggcaatagctggagatgggcgaaaaaatggatatcgtgggtcaggtaatgcaaatatgtacattaatgtgtgtgtaaacaggaaaattgttctttttttaagggttaattaacataaagtggctaaaaatggtcatatcaataaatatataactgtttcaagcagctaattacccatactaacgacccctatcactttttggcggattttgggaacttaaattttgagcaagattttccattttttaacatcgtcaaaacttgcaaaaaatggccaaaaaattaattttaaatttttgaacacaatttgattggaaattttattacgagctcaacgagatatgacattctatattcaggcaattatttttaaagttatggcaaaaaaactgattatttgaagaccgaaattcggaaaaacggattttgggaaaaagttgatatttacaaccggaattttcgtcataacttggctaaaaattctcatatagatgtaagaataacagttttgagcagctaattaccagtactaacgatccctatcactttttgaagtttttaggaaaattaatttttgggtaaattttcgcattttttgtaaggggtaacatcatcaaaatttgcaaaaaatggcaaaaaaatttaatttaaatttttgaacacagttcgattggaaattttattacgagctcaacgaggtatgacttttcatattcagacaattatttttcaagttgttgcaaaaaaactgattttttgacgtctgaaattcggaaaaacgtcttttgcaaaaaatttgtaatttagaaggggtattttcaccataacttggctaaaaatcgtcgtatttttaagttaatttttgcatttttccaaatggttaatttgcaaaaattggcaaagaaataaagttgcaaaattcggacccaaatcgatttggaattcgattgcgagttcgacgagttatgccattccatatttggaccattatttcacatggcttgctcaaaaaaaaaaaacggtggtaagcagtaatgttgtagaagatttggatggaaactacatggatactcacagcagttggtctcctcatcgcttccatcctcgcagtcccgcttgccgtcgcagagttgcgacttcaggatgcacttgggcgtgccgctggcgccgccacgtggacagaggtgcttgttgtccggacaggcgatggccgtgcagttggcctcgtcgctcttgtcggcgcagtcgtggtagccatcgcaatgaaagttgtacggtatgcacagtgcgttcgtgcaacggaactgggcgtggtggcatggcgggaagtctaaagtaaacatggcaagtaaataagtataagagtatgtataaataatctagtaaaaaaaaaaaggaacgtggatttctatcattgcgattacttactgcatccctgctcgtcagagttgtcgccacaatcatcgcggtgattgcacttcagggcggcgtcgatgcacttgagtccgttggcacagcggaactggtcgaggcgacaggctacgccactgcagccgacctcatcccgcccggtgcggcagtccaagtagccgtcgcagcgcttctccttgggcacacagggtccggtgaggcgggcgccctccgccggtgctccagtgggcgtgttgcaaaacaagtccgtgtgctggcacttgcggtacgctagataagatcaagacaattacaaaattaattaattcatcatacatgaaattagcatacattttatattcaaagaagtgttggaatatttccttaagattaaatgccatattacctattattacctattactacctattactacctattactactttaattatataaatattcggcgacctgctgttacgaatttctgtcaagttaatgcccaaagttaataatctgtacatgactgcactcaattatggctcattttgtgcacctctattgtgattaattgcatttgcattgagtgtacggctcgggaccgatccatagatgttttgcaggcggctactgaatggctcagtggggtttccctgaatgctcgacccctattgtccaagacagaaaccggttctcggctcatcaaccattcactattttaatgggtagacgacggaggtggtccttaaaaatggcaggccaaaactatttgtgctgccaaagacattaaattttgatgccagacattgcgggcggagtgctggctttcggggttttggggttttggggcttcgggctgggcacgcatggcgtatacataatgcatggtcgctgtaccagtgccgggcgtgattgtctgtccgcttgactcgtccgtccaaccgtccgtttatctgtccgtccgtttgtccgcccgtccatctgccccggattgtgcacttgagttgtgtgtgtgtcggcaggcaaaagtgctataaattatcgagtagttggttgcagagtcccccaccccgaaagccatacaaaaatggaacgcttacggcaggaagaagggtaccaagaatacccagtacttgtaaaaactgggtataaaaactaattgaaatgtatgtatgtagctttaagcataagttcgataaattaattattcataattaaactgtatattccaatatttattttgttctatttaataacttattttcgctgtaatatctgagtaacccatcccctttccaaatatgaatatacagggtatcggtaggaaacggagggtgtgtgtctgtcaagggttccgttaacaagaaagaggtagcaggcaaagtcgtgcatttgaatgactaaattagagcaactgctggcgaatcggagctttaagatgatatatgtccctttgacggggacatatgtccacggacattaggatgaacttgtggcatgcaaaaaatattgtataatacacca

SEQ ID NO: 3944 - DNA, 13644 bp, DROSOPHILA
atgtacagattattaactttgggcattaacttgacagaaattccgtaccgcaagtgccagcacacggacttgttttgcaacacgcccactggagcaccggcggagggcgcccgcctcaccggaccctgtgtgcccaaggagaagcgctgcgacggctacttggactgccgcaccgggcgggatgaggtcggctgcagtggcgtagcctgtcgcctcgaccagttccgctgtgccaacggactcaagtgcatcgacgccgccctgaagtgcaatcaccgcgatgattgtggcgacaactctgacgagcagggatgcaacttcccgccatgccaccacgcccagttccgttgcacgaacgcactgtgcataccgtacaactttcattgcgatggctaccacgactgcgccgacaagagcgacgaggccaactgcacggccatcgcctgtccggacaacaagcacctctgtccacgtggcggcgccagcggcacgcccaagtgcatcctgaagtcgcaactctgcgacggcaagcgggactgcgaggatggaagcgatgaggagaccaactgctctattgcctcatgccccgccctgagctgtgagttcaaatgcggaccctcgctgacgggtggagtgtgctactgtaagccgggccaatcgctggctcctgacaaccggacctgtgtcgacctggacgagtgcgcggaatggggtcactgcgaccagctgtgcaccaacacactgggatcgtatacatgccaatgcgcccagggctacacgctcatcaacgactccaagtgcatagctccggatgcgaataacttgcaactgatattcgcccacgatcgtgccatcatgcgaatgctgccgcatggcagtgagcccaagattttggccaatgcaactgccgcggcgggtgtgaccttccattatgcccggaacacactgtactggtcggacatcaagacgaggaaggttcaatcactgccgctggatgcgcagaacaaggccgtctcgcccttcgatcagacccttcccggcacctgggcgcccgtcgctctggccgtcgactgggtgggcgataagatatatgtggcggatttggtgggtcagaagatcgatgtcttcgagctgagtggtcaatggcatgcggttgttctgggctctaatctcacctcacccgccgatctggcactggatcccacggctggtctaatgttcgttgcggatggcggtcaggtgctccgtgcccatatggatggcacacatgccagatcgattgtctcggaggcggcctacaaggccagcggtgtgacggtggacattatcagcaagcgtgtcttctggtgcgactccctgctggactacattgaatccgtggactatgagggtgctcatcgggtgatggtgctcaggggtcaacaggttccgagtccctcgcgattggctctgttcgagaatcgtatctactggacggatgccaccaagcagggcatcatgtcggtggacaagttcgagggtcccacctccattcaggttacgtacaaggccaaggacatcagggagccgaagggcatcattgctgttcatgcgctcagccagcccagagtatcgaatccctgtggcaacaacaacggtggctgcaatcacatgtgcattgtgaccgccgtaaagggagcacccactggcctgggattccgttgtgcctgctccacgggctaccagctggaaacggatctgaaactatgcaagccagtcagtgaattcctcatgtactcgcagcagagattcatcaagggaaaggtattggaaccggtaattgaaggatttagtgatgccatcatgccggtggtttcgaggcgtgctcgtttcgtcggtctggatttcgatgcacgcgatgagttcatctactactcggatgtgctgcaggatgtgatctacagggtgcaccgaaacggaactggccgggagatcgtcttggcctctcagaatgaaggcgttgagggactggccgtcgattgggcctccaagaatctgtactacatcgattcgcgcaagggcaccttgaacgtcctatccacccgaaatgtgacacacagaagaaccctactgaaaaacctgaaacgtcccagggccattgtggtccatcccaatcgtggtttcatcttcttctccgaatgggaccgtcctgcgaatatcaccagagcaaacacagatggtagtggtttgttggtgttcaaaaatgtaaccctcggctggccaaatggactatccatcgacttcaaggaggatcgtgtctactggtgcgatgctctattggatcacgttcagcatgccaacctggatggcacggatattaagacggtgaactcacgactggtgcgacatccgttctccattgtcattcacaacgattggatgtatatcacggactggcgcctggatgccattatacgtttgcacaagcttacgggcgagcaggaggagatgatggtcagagagccgcagaccaatagactgtacggcgttaaggtgtacagtcatgaggtccagaggatcgcggacacgcaaccttgtcacaggaacaatggtggctgccagaagatctgtttcgctgttcccatcggagcatcaaatggtaccgatggggtgaccacttcgtcgccctcgttcggtcgcctacagtcgcgctgctcgtgtccctatggcgaacgattggccgacgaccaggtgagctgcattcccgatcccagtgccgagccaccagtgcaaccctgcccgaactcatgggactttacgtgcaacaatcagaggtgtattcccaagtcgtggctatgcgacggtgatgatgactgtctggataacagtgatgaggagcagaactgcacaaagcccacttgcggatccaacgagttccagtgtcgatcgggtcgctgtattccgcagaacttccgttgtgaccaggagaacgattgcggtgacaactccgatgagcaggagtgcggcaatgtgacctgtggaacgtcccagtttgcctgtgccaatggacgctgtattcccaatatgtggaaatgcgatagcgagaacgattgtggggatagcagtgatgagggtgacttctgtgccgaaaagacctgcgcctatttccagttcacgtgcccgcgaacgggtcactgtattccacagagttgggtttgtgacggcgacgatgattgctttgacaaacaggacgagaaggattgtccaccgatatcctgtctggcgaatcaattcaaatgcgcggatctaaggcaatgtgtagaggagtcctacaaatgtgatggcataccggactgtaatgatggctccgatgaggtgggctgtccttccatgggaccaaatcagtgtaacctggagaagcacttccgttgcaagtccactggcttctgtattcccatcgcctggcactgtgatggctccaatgattgttcagatcattcggatgagcaggattgtggtcagatcacctgtgcccagaacttcttcaagtgcaacaacacgaactgtgtatttaaggcatacatatgcgatggcaaggacgattgcggtgataattcggatgagggagctgaacacgcatgtgtcccacccccgttcaagtgtccccatggtcagtggcagtgtcctggcgtttccgagagatgcgtgaacatcacatctgtctgtgatgatacgcccgattgtcccaatggttcggatgagggtgagggctgcgatttggccgagtgcgaacatcaggcgggtcagtgctctagcttctgtcagaagacccccaacggtgcgttgtgtgtgtgtccacctggttcggagatcggcgaagatggctacacctgcatagatagcaacgagtgcgatccaccgggtctctgctctcagcaatgtaccaacaccaagggctcctacttctgctcctgcacagatggctatgttctcgagccgaataagcacacttgcaaggcagtaaaccacaccgccgccttcctaatcatctcaaatcgtcactccattcttgtggcagatctcaaggaacagggactcgagagggtgcccatcatagtggaaaatgtggtggccactgcttccaatatgcacacaggcactattttctggagcgacatgaaactaaagaagatctcccgattagatcgcggtatggagccacaggaaatcattaacacgggcctagacttggtcgagggcctggcctatgattggattgcccagaatctctactggctggacagcaaactgaacaccatcgaagtgtccgcggagaacggttccaatcgtctggttttggtcagggaaaacatcacccaaccaagaggcatgtgcatcgatcccagtcccggagcaagatggatcttctggactgactggggagagaacccaagagtggagagaattggcatggatggtactatgagaaaaacgatcatcaataccaagatctactggcccaatggcttaactttggatatagcaacaaagagggtttactttgccgactccaagctggactttattgatttctgctactacaacggcaccggtagacagcaagtcctggccagtagtcactatctgctgcatcctcactcgttgtccttgttcgaggatacgctctactggaccgacaggcaattgaatcgagtgttgtccgccaataagttccgtggcaagaatcagaccgtcgtttcccacctgataagtcaacccttgtccatccacgttcatcacgcttccctgcagcccatgactccgaatccctgcgccggatcacgctgccagcacttgtgtctgctgagtcccagtgccccggagggttactcctgtaagtgcaggccgggctttaagctcctgagcgaaggtcgttgcatcgaggaggagaatcccttcctcatggtcgtcaagggtacacaaattgtggatcttcctttgaatggtggcgatgcgagagccggagctctggccccagttattggaatcgaaagcagcacgggcttggactttgatcgcaaaggagagacgctctactgggtgcagggcagggaggatgatgatgagaactgcaccatctatacgacaccctatggtggtggcaataagacactcttcctgggtatcgaaaatggaattgtgggtgcaccctacaccattgcattcgattggctgggcagaaatctttacattggcaaccgggtggccagcaacattgaagccgtgcgcgtggatggcaagcaaaagtatcgcaccataatcctggccaacgatggttatcccaactccgtgtcgcggcccaaacaaattgcactagatcccaccgaaggtaagctcttctggatcgacgaaggagttctggaagtgcccattaaaattggcagagttgatatgaatggacagaatcccattgtagtcttccaggagtttgcccatcccgaatcgttggccgtggacacggagaagaaaatggtgtactacagtgctagcaatccagcggtgatcggtgtcatggactacaatggtgacgatcatacactgatcttgatgaaggactcgcatccgatggccaagcccaggagcttgggcatcctagaccataggctttactacctggatccgttgtacgagcgtattgtgaggattgatctgccgcacggtgataatcccaagaccattgtcgacaacgagtccgatctgcggtcgatgatgatctacaagaagcgcgccctgatgcaacatccctgccagacgaacaacggtggctgcaagcacctttgcattcccggacctggtgcaaccagaacgtgtgcctgcggcattggatacagaaaggaaaacgagatcaactgcgtggcgtataagatctttgccgtggtctcccaactggacatgatcaggggctatagcttgagcgatagctccgaggcgatggtaccgataagcggacctggccaccacattctccatgtggatgtgatgtatcgcgagcaatggatctactgggcggagtacaatcgtggctactggaatggcattttcagatcgcgacccaatggcaccgatctgcagcatgtggtcaaggatggcatcggcagtaatggcatcaggggtttgaccatcgattgggtggccggcaatatgtacttcaccaacgtctatccccatgagaattatgtggaagtttgctggctggatggtagcaataggaaagtgttggtgaagacaaccacagatgcaccacgtgaactggccgtgaatcccattaagaggctactctattggatcgactatggccagcatcctaggattggaaaagccctcttggatggcagcaaatggacaccactggtgacatcgggcatttcgttgcctcgcgatctaaccattgacatgcagacccatgacatctactgggtggactcgaaactggacaccattcagaagatttcgtataatggcgccaatcgcaagataatccgcagagatctgcccaaccccatgggcattgctgtctatctgaacgatgtctactgggtggataggaatctgatgaccgtgttcaaggcctccaagcatagtgccaatgaaactgccaccagcgtgagaacgaatctggaaaagcttagggacatcgccatatacaacatcaacaatcagccgcaggacgatacaaatccatgtgcgcatttaggaaacggtggctgtgatcagttgtgtttcagtttcccaccggatggcggagcctccggtacctcaggaggaaggaatttccgttgcgaatgtgccactggaaaactgagcgccgatgaaagaaagtgtgaggtggtcaacgagtacctagtcttcgccacaagaactgaaattcgagctgtcaatcttgatccccattccacggaagttcccttcactccactgacaaatctcacaaatgtcgtgggtctggactttgattttgcccacaaccgaatgctgtatacccaaatccgtccgtgggccaagattgcgtacaccaaggcgaataagccggggcacgatgacatcactgtggtcctgaacaagggcattaatcccgagggcattgcctacgattggacccagcagaaaatctactggactgatagctcgaacaactcgatctatgccatgaatttggatggtagcgaactggttatgattgcccgcgttgaaagaccgcgagctattgtcctcgatccctgcaatggcacgctattctttacggattggggcaggttcggtacgtctggcaagattttccgcaccaccatggcgggttccctgaagagagccattgtcgacaaggatctttcgcagccaagtggcttggctatcgattatgatgagagacgcctatactggacggatgcggtgagagagaagatcgagagatccgatctggacggtcagaatcgagagcttctggtggcagccaccatttatccgttcgccataaccgtgttcaggaactacatctactggacggatcttcagctgagaggtgtctatagggctgagaagcacactggagccaacatggtggagatggtgaagcgattggaggattctccgcgagatattcgcatctacagttccgatcgccaaaagtgcaatgtgaatccgtgcaggatcaacaacggcggatgtgcccagagctgtcatcctgccccgaatggcaaggccgagtgcaagtgcgacgatagcaccaaggtggtgaacgagggaaggatgtgtgccccgcgaaacaatacttgcgaggccagcaaattctactgcaagaacggcagatgcatttcgagaatgtggtcctgcgatggcgacgacgactgtggcgacaactccgacgaggatcccaactattgtgcctatcactcctgctcccccaacgagttccgctgcaacaacggacgctgcatctttaagtcgtggaagtgtgatcacgagaacgactgcaaggatggttccgatgagctgggctgcgtctatccaccatgtgtggatggtgagttcacttgcgccaatggacggtgtattccacaggctcaggtgtgcaatggtgtgaatgactgcaaggataatgccacatcggatgaaacgcacgaacggtgtcccatgaacaccacttgtccggcgaatcatctgaagtgcgagaagaccaacatctgcgtggaaccctattggttgtgcgatggcgacaacgattgtggtgacaactccgacgaggatccactgcattgtggccaacgaacttgtccaaccaacagtttccggtgtcccaaccaccgatgcattccagctacctggtactgtgatggtgacgatgactgtggcgatggagccgatgaaccaccagattactgcaaatcggaaggacgcacatgcttcggggatctgttcacctgcgacaatggcaactgcataccaaggatctacatctgcgatggcgacaacgattgtttggacaacagtgacgaggataaccggcaccagtgcaatgaccgtaagtgtgatgaggaaacggagttcacttgtgtggagaacaaatcctggcagcgtgcccagtgcatacccaaaaaatggatctgcgatggtgatccggattgcgttgacggagccgatgagaatactactctgcacaattgtgccacccagcagccctgtggcgaggatatgttcacctgtggcaatggacgttgcatcaataagggatggatctgtgaccatgacaacgattgcggcgatggtaccgatgaaggcaaattctgtaactccaagtacaagacctgttcggcccaggagttcacctgccagaacttcaagtgcatccgaaatcaatcccggtgcgatggcgaagacgactgcggtgatcactcggatgaggtgggctgtgccaaggagaacataacctgtccacagggtcagttcgcctgtacgaatggtcagtgcatcgactacaatctggtgtgcaacaagtatccggattgtgccgacgagtccgacgaacctgcccattgcaacgtggatgagtgcgccaaggtggagatcaatcagtgtggccacaagtgcgtggacacgctgacaggttactactgcgactgcaatgagggctacaaactgctagccgatggcaaagcctgtgcggatgtggatgagtgcctagagcagccgggcgcttgttctcagcactgttccaataccccgggtggattctactgcaagtgcgacgagacctactacgaaaggcagaacgatgagcacacgtgcaagcgtaaggacaagatcccaccgtggctgatcttcaccaacaagtactatgtgcgcaatatgtcggtggatggacatcagtacaatcttatgcaccaggatctgatgaatgtggtggctctcgacttcgatatacgcgaggaatacatgtacttctgtgatgtcacggccaagaccatcttcagagcgaagtatggagaggccgatgacgagatgccgccggagagggaggctgtcatcaggcacgattcccatggcctggagggcatcgccatcgattgggtgggtcgcaaactgtactggctggacaggcactccaagaacctggatgtctccgaattggacggcagcaagcgcaagacactgagaagtggcgtcgtcgatccgcgtgccatcgtcgtgcatcctggtatcggttacctgtacttcacctcctggcatctgcaagcctatattgccaaaatgggcatggatggttcgaacttctcgagaattctaaactggaacgatggcatcgcctggccgaatgctctgtccattgattacttcacggatcgaatttactgggcagatgctcacttggactacatagcatatgctgatctggagggcagacatcgtcatacggtgctctcaggaagcaaggtgcctcatgtgttcgcactgagtctcttcgacgactacatctactggagtgactggaatttaaaggcgatcgtgagggccaacaagttccatggtgcgaactatacggtgctgaggaataccacccatcgaccgtatgacctgcacatcaatcatccgctgagacagttgccctacaccaatccgtgtggcacaaacaatggcggttgctcacatctctgcctgattgctccgccgccggaatccacctatctgaacatcgagggatatatcgaggagggtgcaccaatcttcaagtgtgcctgtcccaatcaattctatttggccagagacatgaagacctgcgtggccaactgtacggccggacagcatttgtgtggcggacgagatgagaagtgcatcccatggttctggaagtgcgacggtgagaaggactgcaaggatggctccgatgagcccgctacctgcgctcctcgacactgccgtgctggaacgttccagtgcaagaacaccaactgcacaccatcggcgaccatttgcgatggagtggatgactgtggcgatcgcagcgatgaacaaaattgcgatctaccctgtccactatccgatttcaagtgcaagtccagcggcagatgcatcctcgatagttggcgctgcgatggagatgccgactgcaaggatggcagcgatgaggatccagccgtctgcttcaagcgaacatgtgatccgaaaaccgagttctcctgcaagaatggccgctgcattccgcaattgtggatgtgcgatttcgacaacgattgtggcgacgactccgatgagccggcgtatatgtgccgtcaaaggaactgcaccaccggctggcagaggtgtcccggccagtccaactatcgctgcattccgaagtggctgttctgcgatggcaaggacgattgtcgcgacaacagcgatgagctgcccgagaactgtcccaagtgcaatccggaaacggacttcaagtgcggcaacaaccgatgcatacccaagcaatggatgtgcgatttcgcggacgattgtggcgatgccagtgacgagaatgaggcagtgtgcaaaggacgctatcgggagtgctccgaatcggagttccgttgcggcaatggcaagtgcatatcatcccgctggcagtgtgaccacgaggacgactgtggcgataactcggacgagatgcactgcgagggataccagtgcaagaatggcaccttccagtgcgcttccggtcactgtattgcctcctacttccggtgcgatggcgatcgcgactgccgcgacatgtccgatgaggtgggctgtccgcccagattccccggcggtcgctattgtcctgaatcgcgtttccagtgcaacaacaacctgtgcgtttcgctgtccgatttgtgcgacggcaccgatgattgcggcgatggcagtgacgaggatcccagcgtttgcagtgactttaactgcgataccctgcgacgattccagtgctccaatgagcgctgcgtggcccgctatcagatctgcgatggcgtggacaactgcggcgatggcagcgatgagaacaacatgaccctatgtgccagcaaacagaagccctgcgatctgtacacgcagtaccagtgtgccaacaagcattgcatcgagcggtcccaggtgtgtgatttctccgacgattgtggcgatgctagtgatgagttaggatgccaccacacgagcagttgctccgaagcgaatcggggtggatgccagcagcattgccacaatctaacggatggtggatacatttgcacctgctatccgggctacatcatagccgccgacaacaagaagaagtgctccgacgtggacgaatgcctgacgcgacagcacacgtgctcccaccaatgccacaatctgaatggcacctactcgtgcagttgtcgcgaaggattccatctgacggacggcgccagcggcgtatgccgtgccgaaaaggaggatgtcattctcctgtttgttaatggtcaggagatcagaggtctgaattggcataagagcgaggagttcgctgtgatagcggcggagaagaggatcgaggcactggactacgatgcgcagcaacagatcgtcttctgggcggatagctatgacaagaccatcaagcgatcctacatggtcaatgccatcgatggcagggccaagatcggattcgcccaggacctgaacatgaagggcggctcgaagcccactgctgtggctgtggactggctggcctcgaatctctactggaccgaaatggacaggacgggctcgaagccgcgtggacgtgtcatggtggccaagaccgatggtcgctatcgtcgctcgatcgtgaatgctggactcgaggtacccacctcgattgctgtgaatccgcagctgggcagaatatactggtcggatgcgggatcagctcccaaaatcgaggtatcctggatggatggctctaagcgccgcccactgatcaccgagatgatacgacatcccgccggcctgaccatcgactactcgcaggatcacatcatatactgggtggacaccaagctgaatgccatcgaatcgatgagagccgacggctcgcgccgaaaggccattgtgcggggcgatcaactgaggcatccggtgtctctggatctcttcgagtcgaacatgttctggatgacccgcgatacgggtgagctggtgcgccaggataagttcgggcgcggagtgcaggtggtgctgcatcgctatatcgtcaatccgtccggcctgaaggtgtaccacgacaagcggtacaacacctcgctgcccaatccgtgcgacaactccacctgctcccacctgtgcctgctggtgccgggcggccatcgttgtgcctgtccagacgcctctggaccgccgccctcgcaccgcagcaccgccgaggtcatctgcaatgctgccgccgagcatccgcgcccggctccgcgaatctgcccctgccagaatggtggactctgcaaggaggacgcccagggtgaactgctgtgcgagtgccgaacccagttcgttggcgagcactgcgagacaagcacgatgggagcctttggccatggtgacgctaatgtcaccgccgtcgtggtgcccatcatggtcatcctgctggtgatgatggccgccgctggcgcctggtatgtcatccgcaagcgaccatttggcaagctggctcgcatgccggcgatgacctcgtcgcagagcgtgaccttccgtcacggttcgaatgtggagttcaacgagagcggcttcccaggagcatctgcgccgggagctggcgatgtggcgcccatcgagggctacaacctgcagacggtgaacgcgaacaaggcgcgcgactttgccaatcccatgtacgatgcagtccaatcgggcaccaccgccgatccgggcatgggcaatggttcgggcatttatgatgtgcccggcgagccgtcggccaaggtcaagtccatgggccaccatgcgggcggttcgttcacggaacccgcctcggcgatcatcgcgcccagcagcattacgcacaaggcgtcgccgcagctgcagctgcgcaccagggagctagatccttcggcggacaccggcaaggacacgcagttcctggtggaggaggataagtccgagtgctga

SEQ ID NO: 3945 - protein, 4547 aa, DROSOPHILA
MYRLLTLGINLTEIPYRKCQHTDLFCNTPTGAPAEGARLTGPCVPKEKRCDGYLDCRTGRDEVGCSGVACRLDQFRCANGLKCIDAALKCNHRDDCGDNSDEQGCNFPPCHHAQFRCTNALCIPYNFHCDGYHDCADKSDEANCTAIACPDNKHLCPRGGASGTPKCILKSQLCDGKRDCEDGSDEETNCSIASCPALSCEFKCGPSLTGGVCYCKPGQSLAPDNRTCVDLDECAEWGHCDQLCTNTLGSYTCQCAQGYTLINDSKCIAPDANNLQLIFAHDRAIMRMLPHGSEPKILANATAAAGVTFHYARNTLYWSDIKTRKVQSLPLDAQNKAVSPFDQTLPGTWAPVALAVDWVGDKIYVADLVGQKIDVFELSGQWHAVVLGSNLTSPADLALDPTAGLMFVADGGQVLRAHMDGTHARSIVSEAAYKASGVTVDIISKRVFWCDSLLDYIESVDYEGAHRVMVLRGQQVPSPSRLALFENRIYWTDATKQGIMSVDKFEGPTSIQVTYKAKDIREPKGIIAVHALSQPRVSNPCGNNNGGCNHMCIVTAVKGAPTGLGFRCACSTGYQLETDLKLCKPVSEFLMYSQQRFIKGKVLEPVIEGFSDAIMPVVSRRARFVGLDFDARDEFIYYSDVLQDVIYRVHRNGTGREIVLASQNEGVEGLAVDWASKNLYYIDSRKGTLNVLSTRNVTHRRTLLKNLKRPRAIVVHPNRGFIFFSEWDRPANITRANTDGSGLLVFKNVTLGWPNGLSIDFKEDRVYWCDALLDHVQHANLDGTDIKTVNSRLVRHPFSIVIHNDWMYITDWRLDAIIRLHKLTGEQEEMMVREPQTNRLYGVKVYSHEVQRIADTQPCHRNNGGCQKICFAVPIGASNGTDGVTTSSPSFGRLQSRCSCPYGERLADDQVSCIPDPSAEPPVQPCPNSWDFTCNNQRCIPKSWLCDGDDDCLDNSDEEQNCTKPTCGSNEFQCRSGRCIPQNFRCDQENDCGDNSDEQECGNVTCGTSQFACANGRCIPNMWKCDSENDCGDSSDEGDFCAEKTCAYFQFTCPRTGHCIPQSWVCDGDDDCFDKQDEKDCPPISCLANQFKCADLRQCVEESYKCDGIPDCNDGSDEVGCPSMGPNQCNLEKHFRCKSTGFCIPIAWHCDGSNDCSDHSDEQDCGQITCAQNFFKCNNTNCVFKAYICDGKDDCGDNSDEGAEHACVPPPFKCPHGQWQCPGVSERCVNITSVCDDTPDCPNGSDEGEGCDLAECEHQAGQCSSFCQKTPNGALCVCPPGSEIGEDGYTCIDSNECDPPGLCSQQCTNTKGSYFCSCTDGYVLEPNKHTCKAVNHTAAFLIISNRHSILVADLKEQGLERVPIIVENVVATASNMHTGTIFWSDMKLKKISRLDRGMEPQEIINTGLDLVEGLAYDWIAQNLYWLDSKLNTIEVSAENGSNRLVLVRENITQPRGMCIDPSPGARWIFWTDWGENPRVERIGMDGTMRKTIINTKIYWPNGLTLDIATKRVYFADSKLDFIDFCYYNGTGRQQVLASSHYLLHPHSLSLFEDTLYWTDRQLNRVLSANKFRGKNQTVVSHLISQPLSIHVHHASLQPMTPNPCAGSRCQHLCLLSPSAPEGYSCKCRPGFKLLSEGRCIEEENPFLMVVKGTQIVDLPLNGGDARAGALAPVIGIESSTGLDFDRKGETLYWVQGREDDDENCTIYTTPYGGGNKTLFLGIENGIVGAPYTIAFDWLGRNLYIGNRVASNIEAVRVDGKQKYRTIILANDGYPNSVSRPKQIALDPTEGKLFWIDEGVLEVPIKIGRVDMNGQNPIVVFQEFAHPESLAVDTEKKMVYYSASNPAVIGVMDYNGDDHTLILMKDSHPMAKPRSLGILDHRLYYLDPLYERIVRIDLPHGDNPKTIVDNESDLRSMMIYKKRALMQHPCQTNNGGCKHLCIPGPGATRTCACGIGYRKENEINCVAYKIFAVVSQLDMIRGYSLSDSSEAMVPISGPGHHILHVDVMYREQWIYWAEYNRGYWNGIFRSRPNGTDLQHVVKDGIGSNGIRGLTIDWVAGNMYFTNVYPHENYVEVCWLDGSNRKVLVKTTTDAPRELAVNPIKRLLYWIDYGQHPRIGKALLDGSKWTPLVTSGISLPRDLTIDMQTHDIYWVDSKLDTIQKISYNGANRKIIRRDLPNPMGIAVYLNDVYWVDRNLMTVFKASKHSANETATSVRTNLEKLRDIAIYNINNQPQDDTNPCAHLGNGGCDQLCFSFPPDGGASGTSGGRNFRCECATGKLSADERKCEVVNEYLVFATRTEIRAVNLDPHSTEVPFTPLTNLTNVVGLDFDFAHNRMLYTQIRPWAKIAYTKANKPGHDDITVVLNKGINPEGIAYDWTQQKIYWTDSSNNSIYAMNLDGSELVMIARVERPRAIVLDPCNGTLFFTDWGRFGTSGKIFRTTMAGSLKRAIVDKDLSQPSGLAIDYDERRLYWTDAVREKIERSDLDGQNRELLVAATIYPFAITVFRNYIYWTDLQLRGVYRAEKHTGANMVEMVKRLEDSPRDIRIYSSDRQKCNVNPCRINNGGCAQSCHPAPNGKAECKCDDSTKVVNEGRMCAPRNNTCEASKFYCKNGRCISRMWSCDGDDDCGDNSDEDPNYCAYHSCSPNEFRCNNGRCIFKSWKCDHENDCKDGSDELGCVYPPCVDGEFTCANGRCIPQAQVCNGVNDCKDNATSDETHERCPMNTTCPANHLKCEKTNICVEPYWLCDGDNDCGDNSDEDPLHCGQRTCPTNSFRCPNHRCIPATWYCDGDDDCGDGADEPPDYCKSEGRTCFGDLFTCDNGNCIPRIYICDGDNDCLDNSDEDNRHQCNDRKCDEETEFTCVENKSWQRAQCIPKKWICDGDPDCVDGADENTTLHNCATQQPCGEDMFTCGNGRCINKGWICDHDNDCGDGTDEGKFCNSKYKTCSAQEFTCQNFKCIRNQSRCDGEDDCGDHSDEVGCAKENITCPQGQFACTNGQCIDYNLVCNKYPDCADESDEPAHCNVDECAKVEINQCGHKCVDTLTGYYCDCNEGYKLLADGKACADVDECLEQPGACSQHCSNTPGGFYCKCDETYYERQNDEHTCKRKDKIPPWLIFTNKYYVRNMSVDGHQYNLMHQDLMNVVALDFDIREEYMYFCDVTAKTIFRAKYGEADDEMPPEREAVIRHDSHGLEGIAIDWVGRKLYWLDRHSKNLDVSELDGSKRKTLRSGVVDPRAIVVHPGIGYLYFTSWHLQAYIAKMGMDGSNFSRILNWNDGIAWPNALSIDYFTDRIYWADAHLDYIAYADLEGRHRHTVLSGSKVPHVFALSLFDDYIYWSDWNLKAIVRANKFHGANYTVLRNTTHRPYDLHINHPLRQLPYTNPCGTNNGGCSHLCLIAPPPESTYLNIEGYIEEGAPIFKCACPNQFYLARDMKTCVANCTAGQHLCGGRDEKCIPWFWKCDGEKDCKDGSDEPATCAPRHCRAGTFQCKNTNCTPSATICDGVDDCGDRSDEQNCDLPCPLSDFKCKSSGRCILDSWRCDGDADCKDGSDEDPAVCFKRTCDPKTEFSCKNGRCIPQLWMCDFDNDCGDDSDEPAYMCRQRNCTTGWQRCPGQSNYRCIPKWLFCDGKDDCRDNSDELPENCPKCNPETDFKCGNNRCIPKQWMCDFADDCGDASDENEAVCKGRYRECSESEFRCGNGKCISSRWQCDHEDDCGDNSDEMHCEGYQCKNGTFQCASGHCIASYFRCDGDRDCRDMSDEVGCPPRFPGGRYCPESRFQCNNNLCVSLSDLCDGTDDCGDGSDEDPSVCSDFNCDTLRRFQCSNERCVARYQICDGVDNCGDGSDENNMTLCASKQKPCDLYTQYQCANKHCIERSQVCDFSDDCGDASDELGCHHTSSCSEANRGGCQQHCHNLTDGGYICTCYPGYIIAADNKKKCSDVDECLTRQHTCSHQCHNLNGTYSCSCREGFHLTDGASGVCRAEKEDVILLFVNGQEIRGLNWHKSEEFAVIAAEKRIEALDYDAQQQIVFWADSYDKTIKRSYMVNAIDGRAKIGFAQDLNMKGGSKPTAVAVDWLASNLYWTEMDRTGSKPRGRVMVAKTDGRYRRSIVNAGLEVPTSIAVNPQLGRIYWSDAGSAPKIEVSWMDGSKRRPLITEMIRHPAGLTIDYSQDHIIYWVDTKLNAIESMRADGSRRKAIVRGDQLRHPVSLDLFESNMFWMTRDTGELVRQDKFGRGVQVVLHRYIVNPSGLKVYHDKRYNTSLPNPCDNSTCSHLCLLVPGGHRCACPDASGPPPSHRSTAEVICNAAAEHPRPAPRICPCQNGGLCKEDAQGELLCECRTQFVGEHCETSTMGAFGHGDANVTAVVVPIMVILLVMMAAAGAWYVIRKRPFGKLARMPAMTSSQSVTFRHGSNVEFNESGFPGASAPGAGDVAPIEGYNLQTVNANKARDFANPMYDAVQSGTTADPGMGNGSGIYDVPGEPSAKVKSMGHHAGGSFTEPASAIIAPSSITHKASPQLQLRTRELDPSADTGKDTQFLVEEDKSEC

SEQ ID NO: 3946 - DNA, 3044 bp, DROSOPHILA
actgttcctatttacgtatgtgtgtatgatgttgtgtttattccaatccaaaacacaacacaaacaacgagatcggtgcaacaagttggactttagacccgtccaccagatgacgtagctccgtccaaagttcgttggcagtatttactgttcgcctatgtgtattcagcactagagattaccaacttggaatcgaaataaactaatcaaactgaaaaataaagctgtttggtttctattcttaagccagcggtttcttaatgcttacagctgggcgataagaatgagtggtactaaaaatgaccactctccacggactcgacccatcttgataaactggtatacaaaagagattctagcgatgtcacaaaccggaccagagttgtcaagcatttgagagtggttatcattcgaacatgaaaacagttttcaattcatttctaactttccttgtatagaaaaggagtatatattaaatcatcaatacataaaatattagatgcatattagattaaatttgataatggtaaaatcctaattcatattaaataatataactaaatgatagatgaagaaatatagtaaacggtagacatattttgatactggttacaagagtatccaatgtacttatggttgtagaactccagattctgaccagtggagaaactaataatggctatacaatatgtacctcgaccgaaatgaaataagactattcgagtgcgctataatttacagtaaagcaatctttatttaaaatgttgccacaggattttattcacgccaatttcaatttcttcaatattacactagatatatttatagataagaacttcaaagcacggtgaatttttaatccagcccattcattaaaaattcatagttcaggcataagtcaggagttcgtgtgaggagtgggttatatacgtatatcaatttagatccttgcgtacatttgtccatatctatttacaaggaggcgtcccgcaggactacctcactggccgaagaactggtcctgttccacactcccatcctgcgtggtggtcgcctgtgcgccgttcttcacctgctgatcctgcagctcctgtttcttgaacagctccgtcatggccttgtccactggactgcgttcgcctgggttgccttgattggacttgactggcttggactcgggagccgccggcttcaagctcttaccgaatcgaatgaagtttgagtccatcttcccggagcgcacaaaatcctgcggagcggaacgcccgaagcgcatgaagttgtccgggcgaccgaatcgcatgaaatcctgtttgggactgcgaagctcctcgtggggactgcgtccgaagcgcatgaaattgtcggagcgtccgaacctcatgaagtcctccgccggagtgcgtccgaacctcatgaaatcctcagccggagtgcgtccaaacctcatgaaatcctgcttgggatctcgaccgaatctcatgaaatcctgcttgggatcccgaccgaatctcatgaagtcctgctttggatccctgccaaacctcatgaagtcctgtttcggatcccgaccaaaccgcatgaagtcctgcttgggatctctgccataccgatccatagctgctcgcttggccatgccctccagttcatcggattcagcatagctgccctccggtggcagctgctccgcctgcctcttgccgaagtgcatgaagttgtcctgcacggaccttcgcttggcctccagctcgggatcgtacttgtagcgcggtttccggccgtgtttctggaagtgcagcaccacggcgttcttcgagtagtcgatgccaatcacagagatggggtgccggaactccagctccgccctctcggtctgatcgttgccgagcagtgcatctaccaggtcattgtcctgcggtggactcacctcggagtcagcgtcctgcaacgagttgcccgcatagttgggcgtatcgatgatctcgctgtggatggccgactgcatctggtacagggccagcaggaacatcaaggcaatgcccatctgcaaggataagaatggagtgacggcaggataattatgaggcggcggcatctcgcgttatctattgcaacttttaatcacattaagaccgttcgttttacttagggtaacagtagccaccggcagccaggacgcgcagacaaagtgtcctgctaattaaccatcatgatatttatggccagatctgttgggccggcgcgttaaaagttaaccagccgcattaaaaccacaacaatggcatgccacgacaatgggccctcacacccacttagccacccacttagccaccaccactcatccacccacatcggcatataaccaggtttacaggcattaacacttgttcggaaagcccggcgaagtgggcgatgagaggaagtgccaggggagcagggcggttgatgtatggtgtccggacgaggacgacgacgccagcaccattagagatgcaaatgattatggcttttggatatggtgacggctcagcctgcgaggcctgctcaaggcaagctgatccactgagtgccgtgtcagcgcattgtgaacgtggcatctgcaacaggttgcagctaccaggtagcaggacctagcggcactcatgagtgttcaaaattgaatagccaggtccattggggatggtacaaaggtgcgctgctgtacttcactttcttctctctgatgtgactgaaaacacataaaacattggggtcaccaaacccttttcgcctgctaatatttctatcttggctaagattgctaatgctgcacgtctgcttgatggtattcaatcaactgatgacacacaactaaaacattagtcattaaattttagttaccactttaaaatctgggcgtcaactttctgcaagccctgttaacgtggggatatggctaacaaatcttcatgctaaatgccactctttcgcttctcaactcatagataataatcgttattatctgccatctttatgtggctatatttactttctttcgttttcaa

SEQ ID NO: 3947 - DNA, 1044 bp, DROSOPHILA
atgggcattgccttgatgttcctgctggccctgtaccagatgcagtcggccatccacagcgagatcatcgatacgcccaactatgcgggcaactcgttgcaggacgctgactccgaggtgagtccaccgcaggacaatgacctggtagatgcactgctcggcaacgatcagaccgagagggcggagctggagttccggcaccccatctctgtgattggcatcgactactcgaagaacgccgtggtgctgcacttccagaaacacggccggaaaccgcgctacaagtacgatcccgagctggaggccaagcgaaggtccgtgcaggacaacttcatgcacttcggcaagaggcaggcggagcagctgccaccggagggcagctatgctgaatccgatgaactggagggcatggccaagcgagcagctatggatcggtatggcagagatcccaagcaggacttcatgcggtttggtcgggatccgaaacaggacttcatgaggtttggcagggatccaaagcaggacttcatgagattcggtcgggatcccaagcaggatttcatgagattcggtcgagatcccaagcaggatttcatgaggtttggacgcactccggctgaggatttcatgaggttcggacgcactccggcggaggacttcatgaggttcggacgctccgacaatttcatgcgcttcggacgcagtccccacgaggagcttcgcagtcccaaacaggatttcatgcgattcggtcgcccggacaacttcatgcgcttcgggcgttccgctccgcaggattttgtgcgctccgggaagatggactcaaacttcattcgattcggtaagagcttgaagccggcggctcccgagtccaagccagtcaagtccaatcaaggcaacccaggcgaacgcagtccagtggacaaggccatgacggagctgttcaagaaacaggagctgcaggatcagcaggtgaagaacggcgcacaggcgaccaccacgcaggatgggagtgtggaacaggaccagttcttcggccagtga

SEQ ID NO: 3948 - protein, 347 aa, DROSOPHILA
MGIALMFLLALYQMQSAIHSEIIDTPNYAGNSLQDADSEVSPPQDNDLVDALLGNDQTERAELEFRHPISVIGIDYSKNAVVLHFQKHGRKPRYKYDPELEAKRRSVQDNFMHFGKRQAEQLPPEGSYAESDELEGMAKRAAMDRYGRDPKQDFMRFGRDPKQDFMRFGRDPKQDFMRFGRDPKQDFMRFGRDPKQDFMRFGRTPAEDFMRFGRTPAEDFMRFGRSDNFMRFGRSPHEELRSPKQDFMRFGRPDNFMRFGRSAPQDFVRSGKMDSNFIRFGKSLKPAAPESKPVKSNQGNPGERSPVDKAMTELFKKQELQDQQVKNGAQATTTQDGSVEQDQFFGQ

SEQ ID NO: 3949 - DNA, 3896 bp, DROSOPHILA
catcagattaaaaccaatgcctagtattcatggtttctgtaaggaacagatgttgggaaattctctgtatcggaaatttgactgagctttcccgcatgttcacccagatgggctaatgatgtcattctaaggaagaggataatgttaatggggataaataagacagaaaggagttaggaccaaaagcaaagccataataagacaatttcaatcgattttaatgcgtaaacacgttagggaatagtcgatttccccggctttcagatacccattactctgctagtgaaaatgcgaaaaatttaaaaattgttcaaaagtgtagggcaaaccaattctttctaaagtgggcgtggcagttttgggcggtttgtaggcgttaaagttgaaaacaaacctgcttaatctcaacattcaagcggacagatggcacggtcaagaatatcattaatatatgtatataaatataatatatgtatataaatatataaatatataaatatatatacatatatatatgtattcaaacattagaaagatctatgttgatggcatttttatattgtatgtattaattctctgtaaaaacaatcgatgtaaatagccgagagttctcaaaaatgagccctgcactatcggccggccttaattgttttgctggctcaaaaactaaaaattgggaaatggctatatattgtagtttccacagccttggcaaccaccctccactctacgaatttcccattctgaaactaagatttgggaaaacaacagagcaattgattttggattacacatgcagagtcgactaacgcaaatttaaattgaaatatattcaaccttaacaacgccgactttgacgccaaggaacaataaagcataaacgttcgatctattggcgatttattttatatctgaactcgaatatattgccaaaaactattaatgtaatattagtttacaagttataaataaaagaatttgaaatgagataagtgttggcttaaggacaaaagcaatacatttcaatcaagtagttcctaatgcactgcgagccatttctatagtcattaacgcgtgatatatgcccgtctacagctagcttatatcctgtatacctaacgattccttcaaactgaccctcgccaggagtggctatcagtcgcaccctaaattccgactgatgctcatctgcgatgcgtctccacttatcggcagtcaatacccgatccaggtataaagtcttgcaaggcggagtgtgtgtgtggatcatcttattgaggtttcgaataatgagacgggctgcccgctgaacatagccatctgaagtcgagacatttctaggctgctgacacaggcagttcgccgtgggtatggcggccaagaaacagtctctatggtctggaatgggcaagaaaagacttattcctcgcggaatgtctttccccattgcccataaatccactctgcgctgctgcagttgctcatcttccagggaggtcaggttaggtaagttctggagagtggcatgtaaatcaaaggcggtgaccagacgacgattgttactctttaaattgcctatggcctgcggatatcgttcttccagccacctggggtagcaaagtatcgccaggggttgactctcctccactttgccctgcacggttttgtaaaatcggcctttatttaacccatggttggaaaccaccaaaagcaccgtgttcttaagcagaccactccgtcctatggctttgaacattttcaggaatggttggtccagtttccgtccatagttaaacaagtgatcgatgccctgggtccaccaaaggaacgtaaagaacctgtgcgatgtatgatgaggaagcatcttgaataagaactccctaagcaccattgcgtaattgtccttctcgttgcagtgtgtgccaaataatccgtccgttctcgttttcagccacatctctagaagagcaggccgtaagtaaaagtctgttggcggcttacgaaaccccttcacgaacagactcttgtctatgttgtcctctcccaggcccgtttcgtagccggctttttggaaaaccttccagataaaaggacagctgtccagactgctgaggttcgacgaaacgtccttcaattcctgcccacttagaccgctaagcaacggcatcagactatcgaagccgtcctcacccaaccgattgaaccccttaagttccacgtgcggaagtgatagcagaaagttggctgtgcgagccatgctcctgtggaaatgcatttgggaaatagaatctaggcccacgatcaacactgacaaactgccgacgtcggaagccagcttcagaggtgggagaccctgggcggtgcgcagccattcgtcggtcggatgaacgtaaaaatgaactccgttgtagatgctcgtagcgttgataaagcactcagcccttatgatatccgcatggggctcaattgtattattaccatccgttagcaactcgaattcccgactatacaagtagcgattgtcgaaatcggtgtgtcgctccatggcataatacatgcacttaaaactttccaaagtctcgacgccgaacctcgctttagccaactccatgttcacttccgtcctcaggtagttgtaggtgcaattgctgaaggacgtcaggtttaggttgctggcgcaaaagtctctacgaaggccgcgccacaggaacattacgtcgtattcattgggaaccatagtcaacatacgacagcccttcgtgtccacagagtatttttccacaagatggtgctcctcgaagattatgttgtcgaccactacatcgttgtagtaataaacgaaggagaagataatcaagctatacaagaagcagcaacgtatactgcaggagcacatttcgcttattctatcgacaacaaatcagagttgccataatttttcgtgtgaagctagtttttaggaaatatttgttctggccatgcctactcttttcaaatgttttttattttttccattttaacattgttcttgctaacttgtattaaaacgcaaaagctaaacttaaactttctcgtttgcactcccacacgctgagaagcggatatctgatagttcagtttatattagttgtatgtattatatgcaaaatcctcattttgtgatgaatgttttttagggacactttttcaaatattccttaggctcggacaataggtacagccattaatagaacgtattaccttactttggttttatgtcatagcttcttttcgtaattattcgattcaagatgagcttcattttggtcacccgtttctttttaaaaagaacaataaacttaaaagtgcactcgtgcaaaaggcattccccttcgcattctaagctacagtccactccaatccaatcctagcagaaagcaaaaaacattgctggcggagaccggggcagtggcgttaatttatcacttaaccttctttaacagccaagtttataatttcgatggcgtccagggccggccaaagcgagaatgacgatgaagctggcaactgcggcacttcaacgacgactgcccatcagcgaagttccggaggggggacgtggagcggggcactgagagaaacaacatggccagcaaagcaaaggcgttctcgaggacaatgaaagcttgtggcttaaggaactagaccatacagctttaagaaatgtcacatttcagatttacaaaagcaataaaaatatggaaaagactttgacgacttttattattaatatttaattcgtgaataagtaaccaaaaaagcattatatgtctaagattggtttaacaggaaagcctggatttactttcctttcctagttactttttgtatacgaccaacaacagaactgagcaagt

SEQ ID NO: 3950 - DNA, 1896 bp, DROSOPHILA
atgtgctcctgcagtatacgttgctgcttcttgtatagcttgattatcttctccttcgtttattactacaacgatgtagtggtcgacaacataatcttcgaggagcaccatcttgtggaaaaatactctgtggacacgaagggctgtcgtatgttgactatggttcccaatgaatacgacgtaatgttcctgtggcgcggccttcgtagagacttttgcgccagcaacctaaacctgacgtccttcagcaattgcacctacaactacctgaggacggaagtgaacatggagttggctaaagcgaggttcggcgtcgagactttggaaagttttaagtgcatgtattatgccatggagcgacacaccgatttcgacaatcgctacttgtatagtcgggaattcgagttgctaacggatggtaataatacaattgagccccatgcggatatcataagggctgagtgctttatcaacgctacgagcatctacaacggagttcatttttacgttcatccgaccgacgaatggctgcgcaccgcccagggtctcccacctctgaagctggcttccgacgtcggcagtttgtcagtgttgatcgtgggcctagattctatttcccaaatgcatttccacaggagcatggctcgcacagccaactttctgctatcacttccgcacgtggaacttaaggggttcaatcggttgggtgaggacggcttcgatagtctgatgccgttgcttagcggtctaagtgggcaggaattgaaggacgtttcgtcgaacctcagcagtctggacagctgtccttttatctggaaggttttccaaaaagccggctacgaaacgggcctgggagaggacaacatagacaagagtctgttcgtgaaggggtttcgtaagccgccaacagacttttacttacggcctgctcttctagagatgtggctgaaaacgagaacggacggattatttggcacacactgcaacgagaaggacaattacgcaatggtgcttagggagttcttattcaagatgcttcctcatcatacatcgcacaggttctttacgttcctttggtggacccagggcatcgatcacttgtttaactatggacggaaactggaccaaccattcctgaaaatgttcaaagccataggacggagtggtctgcttaagaacacggtgcttttggtggtttccaaccatgggttaaataaaggccgattttacaaaaccgtgcagggcaaagtggaggagagtcaacccctggcgatactttgctaccccaggtggctggaagaacgatatccgcaggccataggcaatttaaagagtaacaatcgtcgtctggtcaccgcctttgatttacatgccactctccagaacttacctaacctgacctccctggaagatgagcaactgcagcagcgcagagtggatttatgggcaatggggaaagacattccgcgaggaataagtcttttcttgcccattccagaccatagagactgtttcttggccgccatacccacggcgaactgcctgtgtcagcagcctagaaatgtctcgacttcagatggctatgttcagcgggcagcccgtctcattattcgaaacctcaataagatgatccacacacacactccgccttgcaagactttatacctggatcgggtattgactgccgataagtggagacgcatcgcagatgagcatcagtcggaatttagggtgcgactgatagccactcctggcgagggtcagtttgaaggaatcgttaggtatacaggatataagctagctgtagacgggcatatatcacgcgttaatgactatagaaatggctcgcagtgcattaggaactacttgattgaaatgtattgcttttgtccttaa

SEQ ID NO: 3951 - protein, 631 aa, DROSOPHILA
MCSCSIRCCFLYSLIIFSFVYYYNDVVVDNIIFEEHHLVEKYSVDTKGCRMLTMVPNEYDVMFLWRGLRRDFCASNLNLTSFSNCTYNYLRTEVNMELAKARFGVETLESFKCMYYAMERHTDFDNRYLYSREFELLTDGNNTIEPHADIIRAECFINATSIYNGVHFYVHPTDEWLRTAQGLPPLKLASDVGSLSVLIVGLDSISQMHFHRSMARTANFLLSLPHVELKGFNRLGEDGFDSLMPLLSGLSGQELKDVSSNLSSLDSCPFIWKVFQKAGYETGLGEDNIDKSLFVKGFRKPPTDFYLRPALLEMWLKTRTDGLFGTHCNEKDNYAMVLREFLFKMLPHHTSHRFFTFLWWTQGIDHLFNYGRKLDQPFLKMFKAIGRSGLLKNTVLLVVSNHGLNKGRFYKTVQGKVEESQPLAILCYPRWLEERYPQAIGNLKSNNRRLVTAFDLHATLQNLPNLTSLEDEQLQQRRVDLWAMGKDIPRGISLFLPIPDHRDCFLAAIPTANCLCQQPRNVSTSDGYVQRAARLIIRNLNKMIHTHTPPCKTLYLDRVLTADKWRRIADEHQSEFRVRLIATPGEGQFEGIVRYTGYKLAVDGHISRVNDYRNGSQCIRNYLIEMYCFCP

SEQ ID NO: 3952 - DNA, 2957 bp, DROSOPHILA
tctactggtacacaagagacaggcgggactttagagccgccagctgggcctggacactggccctgtgcatgaacggcatcccaacgagcgtactaaagataacagtggggcggcccaggcccgactatttttaccgctgctttcccgatggcgtgatggtgcttaacacaacgtcaaatggcgtggacacctccatcctggatttcaattgcacagggcttccgggcgacataaacgaaggccgcaagagcttccccagcggacactcgtcgtgtaagttgaatgttggaatttagttctcgatgctaaccgtatttatatgcctactctagtcgcctttgcgagtttcggtttcattgcctattacattggcgccaagctgcacgcctttgatagccggggacgcggccacacctggcggctctgcatcgctgtgatacctctgtttatcgcactgctggttgcagttagtcgcacctgcgactaccaccaccactggcaggatgtgaccatcggcgggctgattggcctgtttgcaggctatataagctacacacaatactatccctccatcttctgccctgatgccggcataccactggtcaggtggcccagcagagagggaagccagtaccagcgactgtctggaaaggacgacaatggcagtcgtggtccccaccatctcgatggtggggatgcggtgcggagacctctgctcgctgacaaggaggagtccaaatggtactaaaagctttacgtaatattattgtgagtgttgctttcccgtttaaggtttttaaacatattagacaatttctgatttaaaaatgtgctgctggtttacctcgtaataggatgggtagggtttgttaataaaaactaagcgcgtcaattgctaaacgtaaatttattgctcatctttagcagcaacatccaaatctaatttgctacatcaaagtgaccgaaactagcctaaaggacacgatatgcacactcagattcaagtcatggaattgaaggcctgcagaagcacctgtttttcgcgctcctttttcttaactacgtcaagactgcgttgtcgccacgtgctcttgcgcagtttgataggccggctgcccacatagcggccgtccatctccttcatggcccgtataaagtcggccggttctctgaagctcacgaagccaaatcccttgctcttgcccgtgcgcttgtcccgcaccacacgggcccgctgaaacgaggggaacttgttgaaggtccgggtcaggacctcgtcgttgacgtcgtttcccaagtcaccacaaaagatgcggaagtcatcgtcgggccagtcagccagcgaagtatcctcccacacggtgccgccagcgatacgcaccgtcttgcggtctttctttttccgctctgttgtctggaaggattgcagcgccgatgatgcgcgcgctgccttaatggcctcctctgcaatgggattgggtccagacttttccgccttgagcttcttcagcttctgcgttacgtcaaaagagacggcgttgatgtcgatggagggcgcggcggccacggtgggcacgtgcacagactgccggcactgataaagtttgggggcgctgctcaggactacgggagtggcagacatagccttggaagaaccacctccactgcccgtaggcacgaaggtggacataaacgtgggtggaggcggcatcgggggcgggggtacggtcagacgcgatcctccattgccctggtgatgctgcagcttgtgctgcgagttttggtacgtattggcggctatgatcgggcgcacctggttgggcacgaagagattgcgggcggggggcttcgagatctccgcctcgaagcgtgagagctcatcctcgatgttgcgacgctttgtacccatttgaagtggggttttctcttttaaaaaatcaaatcaaagcaagtttttacgaaagtgctgcagaaaactcggagtactaaacaaatatcgatttcgttcccaatcgattgcactatttttattttaaaggcctgtttagacatgtccacagaatcaggctctatttgcaatatataacaaataaaacagttattttaatatcataaaacgaagacatttaatatgttttaactatttaagaaaataactgcgactttttacacttgattacgacaagcacctttccgaacgggccttgatattttctgcaattgttgaccgttaaactagtagacgatagtgtagtgtgacggttcctcattagctggcaaatgccttatgttagtaggctaggagtggtatttcggcttcgtcgacaccagcactgattcaacttcagaattactgttttcttttagacgatctgataaataatactggaattaaaatcgccggaaaagctctagctgtgatagaaagtatcctcagcaagcaaaataaacgcagaagcaatattcctcatacacacatttaaagaaggagcacgggcatacccacacaagcgcacaaaaagtcgaggggcgacagcaaaaacaaaagtgtggaaaatcacaaaaccaataaatttctccatttatttcaaagcactgggccccaggaaaatgccaaccaaggagcgccacatagccatgatgggctaccgatcagtgggtgagttttcccagaaagttccgccagaagcactgacactgttgctgctggcactggtaattgcgtagtatttcgacaacagcaagaactatgatcaattgaccataataattacgcttcgcccgcaggcaaatcgtcgctatgcatacagttcgtggagggccagttcgtggactcctatgaccccaccattgagaacagtaagtgtcacatcccattccgtgcggatttcttagaagccaggctgactccatgcttcgatagcagtagcaatgcgtaatgatcggtaattcccatt

SEQ ID NO: 3953 - DNA, 957 bp, DROSOPHILA
aaaaacttgctttgatttgattttttaaaagagaaaaccccacttcaaatgggtacaaagcgtcgcaacatcgaggatgagctctcacgcttcgaggcggagatctcgaagccccccgcccgcaatctcttcgtgcccaaccaggtgcgcccgatcatagccgccaatacgtaccaaaactcgcagcacaagctgcagcatcaccagggcaatggaggatcgcgtctgaccgtacccccgcccccgatgccgcctccacccacgtttatgtccaccttcgtgcctacgggcagtggaggtggttcttccaaggctatgtctgccactcccgtagtcctgagcagcgcccccaaactttatcagtgccggcagtctgtgcacgtgcccaccgtggccgccgcgccctccatcgacatcaacgccgtctcttttgacgtaacgcagaagctgaagaagctcaaggcggaaaagtctggacccaatcccattgcagaggaggccattaaggcagcgcgcgcatcatcggcgctgcaatccttccagacaacagagcggaaaaagaaagaccgcaagacggtgcgtatcgctggcggcaccgtgtgggaggatacttcgctggctgactggcccgacgatgacttccgcatcttttgtggtgacttgggaaacgacgtcaacgacgaggtcctgacccggaccttcaacaagttcccctcgtttcagcgggcccgtgtggtgcgggacaagcgcacgggcaagagcaagggatttggcttcgtgagcttcagagaaccggccgactttatacgggccatgaaggagatggacggccgctatgtgggcagccggcctatcaaactgcgcaagagcacgtggcgacaacgcagtcttgacgtagttaagaaaaaggagcgcgaaaaacaggtgcttctgcaggccttcaattccatgacttga

SEQ ID NO: 3954 - protein, 302 aa, DROSOPHILA
MGTKRRNIEDELSRFEAEISKPPARNLFVPNQVRPIIAANTYQNSQHKLQHHQGNGGSRLTVPPPPMPPPPTFMSTFVPTGSGGGSSKAMSATPVVLSSAPKLYQCRQSVHVPTVAAAPSIDINAVSFDVTQKLKKLKAEKSGPNPIAEEAIKAARASSALQSFQTTERKKKDRKTVRIAGGTVWEDTSLADWPDDDFRIFCGDLGNDVNDEVLTRTFNKFPSFQRARVVRDKRTGKSKGFGFVSFREPADFIRAMKEMDGRYVGSRPIKLRKSTWRQRSLDVVKKKEREKQVLLQAFNSMT

SEQ ID NO: 3955 - DNA, 2886 bp, DROSOPHILA
gcctgcatgaccaccgattatgcgctgcagaacgtgctcaagcagctaaatctccacctggccgccctcaatggccggatcatcaagcagttgcgcacatatatactccgctgctacgcgtgctacaagaccaccagcatcatgaccaaggtgttttgccccaattgtggcaacaagacgctgaaacgtgtggccgtcagtctggacgagaacggtcgccaggtgattcacatcaatacgcgccgtccgctgaccaataagtacaagaatcagagcctgcctcgcttccagggcggcaagcattcgagaaatccgatcctgttcgaggatcagccgatgcccaggcagatgccgtcgcgcgttgccaagaccaagacgaacgctctggatcaggactacacggccggattctcgcccttcgtgctgcgcgacgtggactccaagtccgccatgctgcgctccaagggcaacctcaaggagtgggccaggaataacaacttcgaggaggatcgccggcgcaagaactacaatcgcttgtacaagtagattactctgggcagtaaggggctagttgttcattagctttccaatcgtagactttatataaatttatataatatataaaataaaacacaagggagaacctgaaactttgtaaaatgtaaacagagaagcttttcaagtagttacaagcgttatttttaaacgaaataaatcttttttttttgtatgtaaggtatggagtttttcttggattctaattccaatatttatttacaaagttaaaagctagaaaatctttttttttgttatgaactagcattaagtttcatttttttaacgtaattaaatctgtttttaattgaacattgtgtttgctgcttctggaaatcaaaatagtcgctgtttcaacaaagaattcatttcaaatgatggatggaaaccagacgttgcggctcaagactccatcgtttattgggaaaccgcataaatgcagaaatcacagcttgacgcacagctcgttgcccggataaacgggcagattcagttcgtatttgcgctgcagggcgggcggcacgaatctgccgcccaagtagtgatgttcgccgcgaaattggcgggcacagagtttcggcgcagtgagggaaatgagcagagccggctccacgtcgcattcagtcagcttgcccttctccacatcccagccgctgggaatgtccacgctgcaaggaggaagcaacattagcttagaattagctagtataacgtaacgaatctcacctggcaattggcagtttggtctgctgcattagttccacgacggcgacaaagtccgctcgcaccggcggcttgaagctgaatccgaagagcgcatccagaatgagatcatagtcacgggcggcactctccaccgacggacactccttcacgtcgcagatgtccatctgttggcactggtggctgaggttctcgaagagcggcttggccgtcggcttgggatagtagatggtgggtgtgtagcccatgagggcgaggtggcgggcggcaaccaagccgtcgcctccattgtttcctggtccacagcaaacgagaattcgtggatgcttctctgccgggaagcatttggccacagcatgggcgcagctcaagcccgccagctccattagctgatccacactgaacttgtaatcgttgaatagttcctggtccacggcgatggcctccttttgatttagatactttaaatccattctcttgccggcgtaaaatcgcttgtttttcagcggtgacctttgtgcttcgatgattttgctggcgagcagtgggtggagtgtgcgggcgatgggcctcaaggaagagccaaatcgacggcaaatcaggctcatagatttcgagttttatttaactatatttccttgaggaaatcaattttaaatgtttgggttgtttgaaaataaacttttaagttctcaaacagctgattgcagagttgccagacgtcgggaaaatactgctgctcctcagacagtgatgccaaatggcgattagcaaaaggtagctaaaattggctagaaaatctttaagcagctaatagctttttggttatctatagattatttgttaagtacatgtgtttctatttatttaatactaaataagtaacaacgttttgattagcgggaggtgctgtaagctagccagatactagctaaaatactagctgacttagcgcggaaccccaccacgatcgatgtggtgcgagtcccgggtgcgcacatctgacgtggtgttttttagcacattttcgttagcagtgtggtatatttcgacccagccaacgcggtcacacttcagtatcttgttttcgcgatcggcgatcgtttcgttcgtttgggttaggttgttatttcgttgttatccgtcggtttcttttagcggagtttgttttcgttggtttcgttctgttttcattcttttttttctgtgccgtgtgagttgcgcgcacgcgcaaccaacaaaattgctaaataaagaaattcaaacgttgcaagtggcagcgtttctcgacgtcaacggcgacgcagcgcaggcgcagcagcagcagaacaacggtaaatgtcgacaagatagtgcaagttgcgcgcgcagcaggtgtttgtttttgtttgttcgccacttcaacaatttcagtttcaactaactgcaaaacaaatttaaatgagtattggcgagcaaacggtatataaatgcaaataaatgtgatttaaatacaattattctgcaaaatatttaatattcgagaagcaaataacataaaaagtacccacaacaattaaaatcccattaaaaagcctgttaaacttatttaattgccgtcatattgca

SEQ ID NO: 3956 - DNA, 828 bp, DROSOPHILA
atgagcctgatttgccgtcgatttggctcttccttgaggcccatcgcccgcacactccacccactgctcgccagcaaaatcatcgaagcacaaaggtcaccgctgaaaaacaagcgattttacgccggcaagagaatggatttaaagtatctaaatcaaaaggaggccatcgccgtggaccaggaactattcaacgattacaagttcagtgtggatcagctaatggagctggcgggcttgagctgcgcccatgctgtggccaaatgcttcccggcagagaagcatccacgaattctcgtttgctgtggaccaggaaacaatggaggcgacggcttggttgccgcccgccacctcgccctcatgggctacacacccaccatctactatcccaagccgacggccaagccgctcttcgagaacctcagccaccagtgccaacagatggacatctgcgacgtgaaggagtgtccgtcggtggagagtgccgcccgtgactatgatctcattctggatgcgctcttcggattcagcttcaagccgccggtgcgagcggactttgtcgccgtcgtggaactaatgcagcagaccaaactgccaattgccagcgtggacattcccagcggctgggatgtggagaagggcaagctgactgaatgcgacgtggagccggctctgctcatttccctcactgcgccgaaactctgtgcccgccaatttcgcggcgaacatcactacttgggcggcagattcgtgccgcccgccctgcagcgcaaatacgaactgaatctgcccgtttatccgggcaacgagctgtgcgtcaagctgtga

SEQ ID NO: 3957 - protein, 275 aa, DROSOPHILA
MSLICRRFGSSLRPIARTLHPLLASKIIEAQRSPLKNKRFYAGKRMDLKYLNQKEAIAVDQELFNDYKFSVDQLMELAGLSCAHAVAKCFPAEKHPRILVCCGPGNNGGDGLVAARHLALMGYTPTIYYPKPTAKPLFENLSHQCQQMDICDVKECPSVESAARDYDLILDALFGFSFKPPVRADFVAVVELMQQTKLPIASVDIPSGWDVEKGKLTECDVEPALLISLTAPKLCARQFRGEHHYLGGRFVPPALQRKYELNLPVYPGNELCVKL

SEQ ID NO: 3958 - DNA, 4433 bp, DROSOPHILA
tcccgagagagataacctccactgagcagcacgtaatgtacaaaggggcgtttcgattggcattgcatgaggaaggcttacccagaaagaaacccatatatgtagtctagttaaataaaagatggagtatatatattgctaggagtttatatttgaatatattcgatcgacgcactgtacagttgactgtctaaaggacgtcctacggtcacagggaccactcacagcacggaagtaatccaaaggtcgggatctgcacacagatcgtccagagtgtaaattcgtattcgctgtacctttaggatataacctagaaaaaattatgttacacctacgcactgttgtaatgaatgaaatttatgtggcactacccacaagcaacatctaatagttattcaaagacttgtgcttgaactcacttagagaatattgagggatccagtcccgcggcatatatgtatgtacaatatgttcagctaaactctagataggtccgggagtgatatgcggataggcaccaggattagggagcatttcagagagagggtcacctacataagtgtatccatcgatgtgtctgttctaataaccatatacaactaaatcgtaactctaagctaatgacatgcaaccgttttggtgaaaaacaagatagtacattatacataaatgcatatatatgtgaaactatataatgagaaacatgttttatccgtgcactgaatatgaaaggttttcgaaattgacaaattgattgtggattcaatatttacctattaagttggtgttttaaacagaaaaacaaaaaaacgagaacaaaaccgaacaaatgacagtagaacattttaaataaaacctttttggcaactgactgtctgactttttcttacaattttattgcaactttaggcttaattccgaatcataagttcaaattctcaactttaaaaactaatgaaatgcaattgcggtacacggattggctgcgatagttatcctttcacatgccgttgtaggcgggaccgccacctccctcgggcaccacccagttgatgttctgcttggggtccttgatatcacaggtcttgcagtggatgcagttctgggcgttaatttgcagcttcatgttgccgccctcctcgttgggcacgtactcgtaaacgccagcggggcagaatctctgctcgggtccctcgtacagcgccaaattatggtccacggggatgcggtcgtccttgagggtcagatgggcgggctggtcgccctcgtggtttgtgcccgtcagtgctaccgaagacagcagatcgaaggagatcttgccatcgggcttggggtaaacaatgggcgggcaggagctagctggcttcaaggactcgtgatcctggggaccgtgttttagggtccatggttcccgaccgcccatgaaaatggagaagccactgagcacaagaccaccgtacagtcccaatggattgtggaaagaagggtgcacatttcgcacactgtacagatccttccatacaaaggagtccttgattctacgaaagagcatttcggttatcaaatgttggttctattctagctacaagactataaacttacttctccgcatagcctgtgggttccacaccagccgtcgattgtgcatccgcattgatggcttcaaaggcactctccgccgccagcatgccgctcttcatcgcgtaatgggagcccttaatgcgagggacattcaaaaagccagcactgcagcccacaaggcaacctcccggaaaggacagcttctgcggcagactttggaagccaccctcattgattgctcgtgctccataggcaattcgagtggcgccctcgaagacgtctcgcaccttgggatgcgtcttgaaacgctggaactcctggaagggactgagccaggggttcttgtagttcaagcccaccacaaagcccactgcaatggtgggtgtgggctcgttcaaatggtacaagaaggagccgccatatgtgaagcggtccaaaggccagccaatggtatgctccaccaaaccaggtctgaagagggagaaatgtttatgtggttaaacatgttatttaggtaatctggtttagtcactcactgatgcttctcgggggcaatctcccagacctctttcagaccgattccataggcctgtggttcgctgccctcgttaagtccgaacttctgcataatctgcttggtcaggtgaccccggcagccttcggcaaagatggtagtcttggcgtgcaactccatgccacgtgcaaaggtgtccttgggagctccgctcttggcaatgcccacatcgttggtggcaatgcccttgacactgccatcctcgtggaagagcacctcggaggcagcacagccgggatagatctccacgcccagagcctccgcctgatctccaagccacttgaccaagtggcccaagcgaactacgtagttgccatggttgtccatgggccagcccttaaagaccggaatggagatgcggccggatccggtgaggaaggagaaagtatccttggtcacgggtgtgtttagaggagctccctgctcttgccagtccgggataagctcgttcagcgagattggatctatgacggcgccggagagaatatgtccgccaacttcggcggccttttccactacgcagacgcggatttcctacaagcaagcgggtgctcagaatacttccgatggccataatgagactagcttacctgatccttttccgccgccagttgcttcgccctaatagccgccgacattccagcaggtcctccaccgacgatgaccaggtccacctcctcaacacaacgctccatatccacttccgtccagcgctcatccttctcgcggggattcagcgtatagtgggtggttatcctgggatatttggccacatcggagatgctgcgagccagagcggggctgaagagtctccgaactgggtgggagataagatcattgtataatcaggcgattttatgggtttctgggtctatcggcatctttgcggttatgtaatgcctgaaatttgggttctgggaacacttacctctgtgcattttcatgagtgccgacatttttcgctccttttcctgataatagcggtttaacagtgggaatagttctagagttgcagaagttcactgtaaactgttcctatttacgtatgtgtgtatgatgttgtgtttattccaatccaaaacacaacacaaacaacgagatcggtgcaacaagttggactttagacccgtccaccagatgacgtagctccgtccaaagttcgttggcagtatttactgttcgcctatgtgtattcagcactagagattaccaacttggaatcgaaataaactaatcaaactgaaaaataaagctgtttggtttctattcttaagccagcggtttcttaatgcttacagctgggcgataagaatgagtggtactaaaaatgaccactctccacggactcgacccatcttgataaactggtatacaaaagagattctagcgatgtcacaaaccggaccagagttgtcaagcatttgagagtggttatcattcgaacatgaaaacagttttcaattcatttctaactttccttgtatagaaaaggagtatatattaaatcatcaatacataaaatattagatgcatattagattaaatttgataatggtaaaatcctaattcatattaaataatataactaaatgatagatgaagaaatatagtaaacggtagacatattttgatactggttacaagagtatccaatgtacttatggttgtagaactccagattctgaccagtggagaaactaataatggctatacaatatgtacctcgaccgaaatgaaataagactattcgagtgcgctataatttacagtaaagcaatctttatttaaaatgttgccacaggattttattcacgccaatttcaatttcttcaatattacactagatatatttatagataagaacttcaaagcacggtgaatttttaatccagcccattcattaaaaattcatagttcaggcataagtcaggagttcgtgtgaggagtgggttatatacgtatatcaatttagatccttgcgtacatttgtccatatctatttacaaggaggcgtcccgcaggactacctcactggccgaagaactggtcctgttccacactcccatcctgcgtggtggtcgcctgtgcgccgttcttcacctgctgatcctgcagctcctgtttcttgaacagctccgtcatggccttgtccactggactgcgttcgcctgggttgccttgattggacttgactggcttggactcgggagccgccggcttcaagctcttaccgaatcgaatgaagtttgagtccatcttcccggagcgcacaaaatcc

SEQ ID NO: 3959 - DNA, 2137 bp, DROSOPHILA
ctggcttaagaatagaaaccaaacagctttatttttcagtttgattagtttatttcgattccaagttggtaatctctagtgctgaatacacataggcgaacagtaaatactgccaacgaactttggacggagctacgtcatctggtggacgggtctaaagtccaacttgttgcaccgatctcgttgtttgtgttgtgttttggattggaataaacacaacatcatacacacatacgtaaataggaacagtttacagtgaacttctgcaactctagaactattcccactgttaaaccgctattatcaggaaaaggagcgaaaaatgtcggcactcatgaaaatgcacagagttcggagactcttcagccccgctctggctcgcagcatctccgatgtggccaaatatcccaggataaccacccactatacgctgaatccccgcgagaaggatgagcgctggacggaagtggatatggagcgttgtgttgaggaggtggacctggtcatcgtcggtggaggacctgctggaatgtcggcggctattagggcgaagcaactggcggcggaaaaggatcaggaaatccgcgtctgcgtagtggaaaaggccgccgaagttggcggacatattctctccggcgccgtcatagatccaatctcgctgaacgagcttatcccggactggcaagagcagggagctcctctaaacacacccgtgaccaaggatactttctccttcctcaccggatccggccgcatctccattccggtctttaagggctggcccatggacaaccatggcaactacgtagttcgcttgggccacttggtcaagtggcttggagatcaggcggaggctctgggcgtggagatctatcccggctgtgctgcctccgaggtgctcttccacgaggatggcagtgtcaagggcattgccaccaacgatgtgggcattgccaagagcggagctcccaaggacacctttgcacgtggcatggagttgcacgccaagactaccatctttgccgaaggctgccggggtcacctgaccaagcagattatgcagaagttcggacttaacgagggcagcgaaccacaggcctatggaatcggtctgaaagaggtctgggagattgcccccgagaagcatcaacctggtttggtggagcataccattggctggcctttggaccgcttcacatatggcggctccttcttgtaccatttgaacgagcccacacccaccattgcagtgggctttgtggtgggcttgaactacaagaacccctggctcagtcccttccaggagttccagcgtttcaagacgcatcccaaggtgcgagacgtcttcgagggcgccactcgaattgcctatggagcacgagcaatcaatgagggtggcttccaaagtctgccgcagaagctgtcctttccgggaggttgccttgtgggctgcagtgctggctttttgaatgtccctcgcattaagggctcccattacgcgatgaagagcggcatgctggcggcggagagtgcctttgaagccatcaatgcggatgcacaatcgacggctggtgtggaacccacaggctatgcggagaaaatcaaggactcctttgtatggaaggatctgtacagtgtgcgaaatgtgcacccttctttccacaatccattgggactgtacggtggtcttgtgctcagtggcttctccattttcatgggcggtcgggaaccatggaccctaaaacacggtccccaggatcacgagtccttgaagccagctagctcctgcccgcccattgtttaccccaagcccgatggcaagatctccttcgatctgctgtcttcggtagcactgacgggcacaaaccacgagggcgaccagcccgcccatctgaccctcaaggacgaccgcatccccgtggaccataatttggcgctgtacgagggacccgagcagagattctgccccgctggcgtttacgagtacgtgcccaacgaggagggcggcaacatgaagctgcaaattaacgcccagaactgcatccactgcaagacctgtgatatcaaggaccccaagcagaacatcaactgggtggtgcccgagggaggtggcggtcccgcctacaacggcatgtga

SEQ ID NO: 3960 - protein, 604 aa, DROSOPHILA
MSALMKMHRVRRLFSPALARSISDVAKYPRITTHYTLNPREKDERWTEVDMERCVEEVDLVIVGGGPAGMSAAIRAKQLAAEKDQEIRVCVVEKAAEVGGHILSGAVIDPISLNELIPDWQEQGAPLNTPVTKDTFSFLTGSGRISIPVFKGWPMDNHGNYVVRLGHLVKWLGDQAEALGVEIYPGCAASEVLFHEDGSVKGIATNDVGIAKSGAPKDTFARGMELHAKTTIFAEGCRGHLTKQIMQKFGLNEGSEPQAYGIGLKEVWEIAPEKHQPGLVEHTIGWPLDRFTYGGSFLYHLNEPTPTIAVGFVVGLNYKNPWLSPFQEFQRFKTHPKVRDVFEGATRIAYGARAINEGGFQSLPQKLSFPGGCLVGCSAGFLNVPRIKGSHYAMKSGMLAAESAFEAINADAQSTAGVEPTGYAEKIKDSFVWKDLYSVRNVHPSFHNPLGLYGGLVLSGFSIFMGGREPWTLKHGPQDHESLKPASSCPPIVYPKPDGKISFDLLSSVALTGTNHEGDQPAHLTLKDDRIPVDHNLALYEGPEQRFCPAGVYEYVPNEEGGNMKLQINAQNCIHCKTCDIKDPKQNINWVVPEGGGGPAYNGM
